United States Patent Application Publication US 2004/0029129 A1 - sequence listing, part 5

SEQ ID NO: 14013 - DNA, 1536 bp, Burkholderia mallei
gtggcgtcgtcgatgccgatcacattcgtctttgccattgccctgtcatttgccgcagatgcgattgcaattccccgcgccgccgttcgccgtccgttcctggcgggggcgttgcataccgcgagcgtgttgttcgtcgcctgcgttatccttgcgctgacccgtcgcccgcattttgccgcgtttctcgctctggcgctggtggcgcttgccggcgcggtcagcaatgcgaaatttacatccctacgcgagccttttgtttttaccgacctgagtctgttcagtcagttgttctcgcacccgcgtctttacttgccgtttctgagcgcgacaacggtcgtggcgatggtgctcggctcggttgcgctggcggccggtttctttctcgatcctgcggtatcggcgcaaaccgcgtggcaagcggccatggcggccctgatttgtttcgcgacgggcggcttgtgcgccgcgcgtttaccgctcacactcgatccgctcgacgatcagcgccgtcacgggttctttgcggtctttgttgcatatttgttgaacggcatgcgaccagccacgtttcgctcggtagcgggattgacttgcgcgggcccgtttgctagtgaagacgaattgcccggtcatcccgacgtgatcgtgatccaaagcgaatccttcttcgatccgcgcccgttgtcggccgcgatcgattcttcgattctcggtcacttcgatcgggtatgtcgcgagtccgtcgagcacggacaactggccgtgcccgcctggggggcgaacacgatgcgctcggaatttgcattcctgaccggtttgccgtcatcgcacctgggctacgcgcgattctatccctatgcattcgtgcggcgcatcagcgcttcactggccggctggttccgccgggccggttatcgtacgacggccattcatccttattacgcggattttttcggccgcgaccgggtttttccgctgcttcagttcgatcgctttttcgacattcgcgcgttcggcgatgcaccgcgtgtgggcccgtatatttcagatgcggccgtgctcgaccagatcgtcgcggtgctcgacgagaagcgcacgcaaccggcctttctatttgcgatgacgatggaaaatcacggcccgctgcacctggagccggtggaagcaggagaggccgcccgctaccatacgctgggcgatgacgccacctggcgcgacctgacggcatacctgcgccacgtcgccaacgcagatgcaatgatcggacggcttgttgcctatctgcgccagtgccgtcgagatacgattttatgtttctacggcgatcatgttcccgcgttgtcgcatgtattcgagaggttcgggaacatacccgaccaaagcaattacttcatctggcggaatttcggggaacacgctccccgcaagcaggaccgcgcggtcgaggaacttggcaccgcgttgcttcgcgcgatgaagacgacgggtaggcaggcggtttcgactggcgcgtcggagataacaacgtagcta

SEQ ID NO: 14014 - DNA, 1105 bp, Burkholderia mallei
atggaagcggaacgtctgaacgcgatcgaaagctccctcgcggacctgcgccggcgcgcgggcgagctacgggggtatctttgactacgacgtcaagtccgaacgtctagccgaagtcaacaagcaactcgaagatccgaacgtctggaacgactcgaagaacgcccaggcgctcggccgcgagaagaaatcgctcgagagcgtcgtcacgacactcaccgcgctcgataacgacctgcgcgacgcgcaggacctgttcgagctcgcgcacgaggaaggcgacgaggaaacgctcgtcgcaaccgaatccgacgcggcgaagctcgaggcgcgcgtcgccgacatcgaattccgccggatgttctcgaacccggccgacccgaacaactgcttcatcgacatccaggcgggcgcgggcggcaccgaggcgtgcgactgggcgtcgatgctgctgcgccagtatctgcgctactgcgagcgcaagggcttcaaggccgaagtgctcgaggaatccgacggcgacgtcgcgggcatcaagaacgcgacgatcaaggtctccggcgaatacgcatacggctacctgcgcaccgaaacgggcatccaccgcctcgtgcgcaagtcgccgttcgattcgtcgggcggccgccacacgtcgttctcgtcggtgttcgtctatccggaaatcgacgattcgatcgaagtcgagatcaacccggccgacctgcgcatcgatacctaccgcgcgtcgggcgcgggcggtcagcacatcaacaagaccgattcggccgtgcggatcacgcacatgccgacgggcatcgtcgtccagtgccagaacgaccgctcgcagcaccgcaaccgcgcggaggcgatggcgatgctcaagtcgcgcctcttcgaagccgagctgcgcaagcgccaggccgagcaggacaagctcgaatcgagcaagaccgatgtgggctggggccaccagatccgctcgtacgtgctcgaccagagccgcgtgaaggatctgcgcacgaacgtcgaaatgagcaacacgaaagccgtgctcgacggcgacctcgacgacttcatcagcgcgagcctcaaacagggcgtgtaa

SEQ ID NO: 14015 - DNA, 644 bp, Burkholderia mallei
ctcgagatcgtcgcgatgccgcgcaacggcgtcgatacgctggcggcgctcaatgccgcgcgcccggacctcgcgtttctcgacattcggatgcccggcatcgacggcctgaagctcgcgagcctcgtgcccgacgtgcacgtggtgttcgtgacggcgtacgacgagtacgcgatcgaggcgttcgagcgctcggccatcgactatctgctcaagcccgtgaccgacgagcgtcttctgcgctgcatcgcgaagctgcagcgcggcggcttcgcgccgccgggcgcgccgccgccggcgggcgcgcccggccgcaggagccgacgccgattcgctggctgacggtggggctgaaggacacgacgcggctcgtgtccgtcgacgatgtgctgtattttcaggcgctcgacaaatacaccgaggtcgtgaccgcgggcgagcggcacgtgatccgcacgccgctcaaggaactgctgcaacggctcgatcccgatcgcttcgcgcgggtgcatcgcggcgtgatcgtcgcgtacgcggcgatcgaccggatcgagcgcgacctgctcgcgcgcctgcgtatccatctgcgcggccaccgcgacgtgctgcccgtgagccgcgcgtatgcggggctgttcaagcac

SEQ ID NO: 14016 - DNA, 936 bp, Burkholderia mallei
atgacgcagcgcctgctcgcggcggcatggcgccggccggtgtggctgctgtgggtgccgcccgcgttctgggccggcaacgtcgtgcttggccgcgcgttcagcacgagctttccgcccgtgtcgctcgcggtcggccgctggctcgtcgcgctcgtcgcgctcgcgccgttcgtgtggcgcgacgtgctgcgcgagcgccggttgctgctgcgtcactggaaactgatctgggcgtgcggcgcgctcggcatcgccggctacaacgcgctcgcgtacgtcgcgctgcgcacggtgccggccgcgagcgtcgcgttcctgaactcgacgctgccgctgatggtgccgctcgccgcggcgatgctcggcgtcgagcggatcacctcgcgcgcgatcgtcggcatcgtcgtgtcgttcggcggcgtcgcgtggatcgtcgcgcgcgggcactgggaggatctcgtcgcgctgcgcttcgatcacggcgagctcatcgtgatcctcgcgacggccaactacgcgatctattcggtgctgctgcggcgaaagcccgcggcgatcggcccgctcgcgttcctcgccgcgacgatggccgccgggctcgcggtgctcgcgccgttctgggcgctggagctcgcgggcggcgcgcgcattccgttcgatccgaaagcgatcggcgcggtgctctatatcggcgtgttcgcgtcgctgatcgccttcatcctgtggggccactgcgtgcaggtgctcggcgcgacggtgacgggcgtgtcgttccatctcgtcgcgctgttcaccgcggtgctcgccgcgctcacgctcggcgagccggttcgttcgtaccacctcgtcggcatcgcgctgatcctgttcggcttcttcgtcgcgacgcgcgccgcacccggcgtgcgctccgctccgaacgcgcggtcgctg

SEQ ID NO: 14017 - DNA, 1200 bp, Burkholderia mallei
atgttcccagaccgtatcttttccggcatgcgacccacggggtcgctccatctcggccactatcacggcgtgctgaagaactgggtcaagctgcagtccgagtatccgtgcttcttctgcgtcgtcgactggcacgcgctgacgacgcactacgaaacgcccgaggtgatcgagaagaacgtctgggacgtgctgatcgactggctcgcatcgggcatcgatccggcgcaggcgacgctgttcatccagagcaaggtgcccgagcatgcggagctcgcgctgttgctcgggatgagcacgccgctcggctggctcgaacgtgtgccgacctacaaggagcagatcgagaagctgaaggacaaggatctgtcgacgtacggcttcctcggttatccggtgctgatggcggccgacatcctgctgtaccgcggctcgctcgtgccggtcggcgaggaccaggtgccgcacgtcgagatgacgcgcgagatcgcgcgccgcttcaattacctgtacggccgcgagccgggcttcgaggagaaggcgctcgaggcggcgaagaagctgggcggcaagcgcgcgaagctctatcacgagttgcgcaacgcgtaccagcaggagggcgacgacgaggcgctcgaacaggcgcgcgcgatgctgcaggaatcgcagagcctgtcgatgagcgaccgcgagcgcctgttcggctatctcgaaggcgcgcgcaagatcatcctcgtcgagccgcaggcgctgttgacggaggcgtcgcgcatgccgggcctcgacgggcagaagatgtcgaagtcgtacggcaacacgatcggcctgcgcgaggacgccgagacgatcacgaagaaggtccgcacgatgccgaccgatcccgcgcgcgtgcgccgcagcgatccgggcgatccggacaagtgcccggtctggcaactgcaccaggtctacacggacgaaacgacgcacgagtgggtgcagcaggggtgccgctcggcgggcatcggctgcctcgactgcaagcagccggtggtcgaaggcatcctgcgcgagcagcagccgatgctcgagcgcgcgcagaagtacatggacgatccgtcgctgctgcgcgcgatcgtcgccgacggctgcgacaaggcgcgcaagcacgcgacggagacgatgcgcgacgtgcgcgaggcgatggggctgtcgtacagt

SEQ ID NO: 14018 - DNA, 762 bp, Burkholderia mallei
atgaggaccgcacgcgtagtgttcaacggcgcactgcatgcggccgagccggcgggcgacgcgctcgtgcggctcgataccgggcgcgtgctcgccgagacggaagtctcgtggctgccgcccgtcgtgccgcgcacggcgttcgcgctcggcctgaactacgccgatcacgcgaaggagctcgcgttcagcgcgccggccgagccgctcatcttcctgaaaggtccgaacacgttcatcggccaccgcgcgcaaacggtgcgacccgccgacgcgacgcacatgcactatgagtgcgagctcgcggtcgtgatcggccgcgaggcgcggcgcgtcacgcgcgcgcgggcgctcgaccacgtgctcggctatacgatcggcaacgattacgcgatccgcgattatctggagaatttttaccgaccgaacctgcgcgtgaagaaccgcgacacgtgcacgccgctcggcccgtggctcgtgagccgcgacgaggtcggcgacgcgtcggatctcgcgctgcgcacgacggtcaacggcgtcgagacgcagcgcggcaacacgcgcgacatgatcttcgacgtcgcgtcgctgatcgaatacatcagcggattcatgacgctctcgccgggcgacctgatcctgaccggcacgcccgaggggctcgccgacacgcagccgggcgacgaggtcgtgaccgagatcgagggaatcggccggctcgtcaacacgatcgtcggcgaagcggattactatcgcgccggc

SEQ ID NO: 14019 - DNA, 1101 bp, Burkholderia mallei
atgagcgccgcgttgcccgacgcgttctggccgcccgccgacgagcttaccgaggccgccgagcggattcgcgcgacgctcggtgcgtggccgcggccggccgtgcgcacgcggatctgtctcgcgccgccggagcagccgcgcgcggccgacctgtgggtcgccatcgcgggcgacgccggcgcgcacgccgcgcacatcgcgcggctgaacgcggcgggcgcgcgggcgatcgtcatcgacgatgcatcggccacgctccacacgggcgcggcgcgccatgcgctcgcgtcgcgcgcgccgctcgccgacgactggatcgcggcgctcgcggcgtttctcgattgcggcttcgccgcgtccgacgcgctcgtgctcgcgctcgcatggcgcgacggcgacgaggcgcgcggcggcgatccgtggcccgtcgatccggcacgctttccgcgcgtgctcggcctgcccgccgcgcccgaaccggcgtttgcgccgtgcccgcagcggctcggcctgtatccggtgctgccgagcgccgaatgggtcgagcgcgtgctcgattgcggcgtgcggaccgtgcaactgcgcgtgaaggacgcctcgcccgacgcgctgcgcgcggagatcgagcgggccgttgccgcgggccgccgccatccggacgcgcgcgtgttcatcaacgatcactggcggctcgcgctcgacgcgggcgcatacggcgtgcacctcggccaggaggatctggagaccgccgatctcggcgcgatcgcgcgggcgggcgcgcggctcggcctgtcgagccacgggtattacgaaatgctcgtcgcgctgcagttcaagccgagctatctcgcgctcggcccggtgttcgcgaccgcgacgaaggcggttgccgcgccgccgcaaggcctcgcgcggcttgcgcgctacgtgcgcttcgccgggccgcaggcgccgctcgtcgcgatcggcggaatcgcgcccgacacgctcggcgcggtgctggcggcgggcgtcggcagcgcggccgtcgtcagcgcaatcacggcggcggccgattaccgggaagcgattgttgcattgcagcaaaacttcggacga

SEQ ID NO: 14020 - DNA, 537 bp, Burkholderia mallei
atggcacgttttcaagagttttacaaagagaaggttgttcccggcctgatcgagaagttcggctacaagtcggtcatggaagtgccgcgcatcaccaagatcaccctgaacatgggtcttggcgaggcggttgccgacaagaagatcatcgagaacgccgtgggcgatctgacgaagatcgcgggccagaagcccgtcgtgacgaaggctcgcaaggcaatcgcgggcttcaagatccgtcagggctacccgatcggcgcgatggtcacgctgcgtggccgcgcgatgtatgaattcctcgatcgtttcgtgacggttgccctgccccgcgtgcgcgacttccgcggcgtgtcgggtcgtgctttcgacggccgcggcaactacaacatcggtgtgaaagagcagatcattttccccgaaatcgattacgacaagatcgacgcgctgcgtgggctgaacatcagcatcatgacgaccgcgaagaccgacgacgaagcgaaggctctgctcgccagcttcaagttcccgttcagaaac

SEQ ID NO: 14021 - DNA, 2307 bp, Burkholderia mallei
atgtcgacctcgtcctcctcctcttcctcgaaagaaaaactccgcgaagccgctctcgattaccacgaattcccgacaccgggcaaagtcgcgatcgcgccgaccaaacagatgatcaatcagcgcgatctcgcgctcgcctattcgccgggcgtcgcgttcgcgtgcgaggagatcgtcgagaacccgttgaacgccgcgcgcttcaccgcgcgcagcaacctcgtcggcgtcgtcacgaacggcaccgcggtgctcggcctcggcaacatcggcccgctcgcgtcgaagccggtgatggaaggcaaggcggtcctcttcaagaagttcgccgggatcgacgtgttcgacatcgagctcaacgaatccgatccgcacaagctcgtcggcgtgatcgccgcgctcgaaccgacgttcggcgggatcaacctcgaggacatcaaggcgccggactgcttcatcgtcgagcgcgaatgccgcaagcgaatgaagattccggtgttccacgacgaccagcacggcaccgcgatcgtcgtcgcggccgcggtcaccaacgggctgaaggtggtcggcaagagcatcaaggaagtgaagctcgttgcgtcgggcgcgggcgcggccgcgctcgcgtgcctcgatttgctcgtcgatctcggcttgccgctcgagcacatcacggtgaccgatctggcgggcgtcgtctacaagggccgtgcggagctgatggacccggacaaggagcgtttcgcgcgcgaaaccgatgcgcgcacgctgtcggaggtgatcgacggcgcggacatcttcctcggcctgtcggcggccggcgtgctgaaggccgacatggtgaagaagatggccgagcgcccgctgattctcgcgctcgcgaatccgactccggaaatcctgccggaagtggcgctggaggcgcggccggacgccgtgctcgcgacgggccgcaccgattatccgaaccaggtcaacaacgtcctatgcttcccgttcatcttccgtggcgcgctcgatgtcggcgcgacgacgatcacccgcgagatggagatcgccgccgtcaacgcgatcgccgagctcgcgcagcaggagcaaagcgacatcgtcgcgaccgcgtatggtattcaggatctctcgttcgggcccgaatatctgattccgaagccgttcgacccgcgcctcatcgtgaagatcgcgcccgcggtcgcgcaggcggcgatggacggcggtgtggcgacccgtccgatcgaggacatggaagcgtacaaggttcacctgcagcagttcgtctaccacagcggcacgacgatgaagccggtgttccagatcgcgcgcggcgcgcccgccgagaagaagcgggtggtgttcgcggagggcgaggaagagcgcgtgctgcgcgcggtgcagatcgtcgtcgacgagaagctcgcgaagccgatcctgatcgggcggcccgccgtgatcgagcaccggatccagcgctacggcctgcggctcacgccgggtgtcgatttcacgatcgtcaacaccgagcacgacgagcgttaccgcgatttctggcaaacctacttcaagatgatggcccgcaaggggatcagcgagcagctcgcgcgcgtcgaaatgcgccgccgcacgacgctgatcggctcgatgctcgtcaagaagggcgaggcggacgggatgatttgcggcacgatcagcacgacgcaccgccacctgcacttcatcgatcaggtgatcggcaagcgcgccggctgcagcgtatacggcgcgatgaacgcgctggtgctgcccggccgccagattttcctggtcgacacgcacgtgaacgtcgatccgaccccggcgcagctcgccgagatcacgatcatggcggcggaagaggtgcgccgtttcggcatcgagccgaaggtcgcgctgctgtcgcattcgaacttcggcacgagcaacgcgccttccgcgcagaagatgcgcgatacgctcgcgatcctgcgagaacgcgcgcccgatctgcatgtcgacggcgagatgcacggcgacgtcgcgctcgacgcggcgttgcgcaaggagatcctgcccgaatcgacgctcgagggcgaagcgaacctgctcgtgctgccgaacatcgatgccgcgaacatcgcctacaacctgctcaaaacggctgccggcaacaacatcgcgatcgggccgattctgctcggcgccgcgcagcccgtgcacgtgctgaccgaatcggcgaccgtgcgccggatcgtcaacatgacggcgctgctggttgccgacgtgaacgcggtacgt

SEQ ID NO: 14022 - DNA, 1440 bp, Burkholderia mallei
atgcccggtcacgccggaaccgtttttttggagggagacatggaaggaagtcagacaggcctcggaaccggcctgaagcagcgtcacgtcacgatgctgtcgatcgcgggcgtgatcggcgccgggttgttcgtcggttcggggcatgcgatcgtggaggccgggccggccgcgctgatcgcgtacgcgatcgcggggctgctcgtcgtgctcgtgatgcgcatgctcggcgagatggcggttgcgcagccggacagcggttcgttctcgacctacgccgatcgcgcgatcggccattgggcgggcttcacgatcggctggctctactggtggttctgggtgctcgtgattccgatcgaggcgacggccgccgcgacgatcctcaatgcgtggttccccggcgtcgcgacgtggatattcgcgctcggcatcacgtcggtgctcaccgtcacgaatctcttctcggtcaagaactacggcgaattcgaattctggttcgcgctcatcaaggtggtggcgatcgtggtgttcctcgcgatcggcggcgcggcgatcgtcggcctgctgccgggttcgaacgtgtcgggcgcggcgcgcctcgtgaacgcgggcggcttcatgccgaacggcgtcggcgcggtgctcgccgcgatgctgacgacgatgttctcgttcctcggcaccgagatcgtcacgatcgccgcggccgaatccgagcatccggagcgccagatcgtccgcgcgacgaattcggtgatctggcgcatctcgctgttctatctcggctcgatcttcgtcgtcgcggcgctcgtgccgtggaacgacgcgctgctgcccgcgcacggctcgtatcagcgcgcgatggagctgatcggcgtgccgcacgcgaagggcatcatcgacgtgatcgtgctggtgtcggttgcgagctgcctgaattcggcgctctacacggcgtcgcgcatgatcttctcgctgtcgacgcgcggtgacgcgccggcattcttgcgccgcaccgatgcaagcggcaccccgcgcgcggcggtgctcgcgtcgacggcgttcggctttctgacggtgatcgcgaactacgtgatgcccgagcaggtgttcggcttcctgctcgcgacgtcgggcgcgatcgcgctgctcgtctatctcgtgatcgcgatctcgcaactgcggatgcgctcgacgctcgacgcgacgggcgagcggctgccgctgcggatgtggtgctttccgtggctcacgtgggcggtgatcgtgttcatctgcggcgtgctcgtcgtgatgctgctgcgcgaggatcaccggatggaagtcggcgcgaccgcggtgcttgcgctcgccgtcgtcgtcgcatcgcggatgaaccggcgcgcgcgcggcggcgacgagccgacgcccgccgcgtcgcgagtgtccgctaacctgcgg

SEQ ID NO: 14023 - DNA, 1131 bp, Burkholderia mallei
atgatttcgcctgcgcgcgcgaagagccgcacccgccgcgcacgccggctcgacggccgcgttgcggtaaaatgcccggttgtccctgcgccccgacgcttttccgccccgcctatgtccgcttcgcctgccctcagtccacgccgggtctccgtcgccccgatgatggactggaccgatcgccactgccgttcgtttcatcggacgatctcgcgccatgcatggctctacaccgaaatggtgacgacgggcgcgctgatccacggcgatgtcgcgcgccatctcgcgttcacgcccgacgaagcccccgttgcgttgcaactgggcggcagcgaacccgccgatctcgcgcactccgcgaaactcggcgagcgctggggctacgacgaaatcaacctgaattgcggctgcccgtccgagcgcgtgcagcgcggcgcattcggcgcgtgcctgatgaacgagccgcaactcgtcgcggactgcgtgaaggcgatgcgcgacgcggtgtcgatcccggtgacggtcaagcaccggatcggcgtcgacgcggtcgaagactacgcgttcgtgcgcgacttcgtcggcacggtcgccgcggccggctgcgacgtgttcgtcgtgcacgcgcgcaacgcgatcctgaaggggctgtcgccgaaggaaaaccgcgagattccgccgctcaagtacgactacgcgtatcggctcaagcgcgactttccgcagatcgaaatcgtcatcaacggcggcgtcacgacgctcgacgaagtcgagcagcatctgcgacatgtcgacggcgtgatgctcggccgcgaggcatatcacaacccgtacgtgctcgccggcatcgacgcacgcttctacggcgcgagcgcgccggcgccgacgcgcgaagaggtggaggcgaagctcgtcgaatactgcgcggccgagctcgcgcgcggcacgtatctcggggcgatcgtgcggcatgcgctcggcctgtatcgaggcgtcgcgggcgcgcgcggctggcgtcgcgtgctgtcagacaacaagcggctcgggcgcggcgacctatcgatcttcgacgaggcgcgcacgcacctgccccgtccggaagaattttttgaaaaaaaggctttgcaaagt

SEQ ID NO: 14024 - DNA, 1128 bp, Burkholderia mallei
ttgcggactgaccgccattttaccggcgcccctacatttgcccaaggccgcgagcttgatcgcgcgccggcgcaaccgcgaatgccgatgtcccgtcccgattccgccgtttcgttgcttcccgactattcgctgcgcgcgcacaacacgttcggcttcgatgcgcgcgcgcgcgtcgccgcgcgcatcggctctcccgggcagttcgcgtcgctcgcgcgcgatccgcgcgtcgcggggctcgacaggctcgtgctcggcggcggcagcaacgtggtgttcacgcgcgacttcgacggcctcgtgctgctcgacgagatccgcggccgcgcgctcgtgcgcgaggacgacggcgcgtggtatgtcgaggcgggcggcggcgagaactggcatgcgttcgtcgaatggacgctcgccgaaggaatgcccgggctcgagaatctcgcgctcattccgggcacggtcggcgcggcgccgatccagaacatcggcgcgtacgggctcgagatgaaggagcacttcgcgtcgctgcgcgcggtcgaccttgcgacgggcgagctggtcgaattcgatgcggcgcgctgcgcgttcggctatcgggacagcttcttcaagcgggacgggcgcggccgtttcgcgatcgtggcggtgacgttccggctgccgaaagcctggacgccgcgcatcggctatgcggacgtcgcgcgcgaactcgccgcgcgcggcatcgacgcgcgcgccgcgcgtgcgcgagacgtgttcgacgcggtcgtcgcgatccggcgcgcgaagctgcccgatccgctcgcgctcggcaacgcgggcagtttcttcaagaacccggtgatcgacgcgcaagcgttcgccgcgttgcgcgcgcgcgagcccgatatcgtgtcgtatccgcagccggacggccgcgtgaagctcgcggccggctggctgatcgaccgctgcgggtggaaggggcgcgcgctcggcgcggcggccgtccacgagcggcaggcgctcgtgctcgtcaatctcggcggcgcgtcgggcgccgacgtgctcgcgctcgcgcatgcgatccggcgcgatgtgctcgggcgcttcggcgtcgagctggaaatggagccggtgtgcctg

SEQ ID NO: 14025 - DNA, 1662 bp, Burkholderia mallei
ttgactgatacccacgacatcgattcgtccgaatccgcgcatgccgttgcgacggcgcgcgccgacgacgcacccgagcagtccgcagcggacgcgggcggcgaagaccgcccgcgccgcggtttgcggcgcgggccgcgcagcctgatcgcgcgccgccgagcggccgcgaaatcgaagcattccgatgcgcccgaaagcgccgacgcggcgccggcggccgatgccggcgcgggcgccgacgtcgcgaaagcgccggctcgcgcgccgcgcggcaaggacgccgcagcgaagccgccgcgcaagacggcgggcaagcgcgaaggcgcggcgcggcagggcgctcagccgaagcgaggcgcgcagcaggctgccgcggcggttgcgccgtccgcggaggccggccaggacgacgtgttcgcctacgtgatttcgccggcgttcgacgccgacaacaacgcgccgggcggcggcgtgcgcgcgccgatgctgcgccggggccgccagactcagccgaagcgcgtgctgtcgccggacgacgacgcgccgaagctgcacaaggtgctcgcggaagccggcatgggctcgcgccgcgagatggaagagctcatcattgccggccgggtgtcggtgaacggcgagccggcgcacatcggccaacggatcatgccgaccgatcaggtgcggatcaacggcaagccggtcaagcgcaagctgccgagcaagccgccgcgcgtgctgctgtatcacaagccgacgggcgagatcgtgagccacgcggatccggagggccgcccgtctgtgttcgatcggctgccgccgatgaagaccgcgaaatggctcgcggtcggccgcctcgacttcaacaccgaaggcctgctgatgctgacgacgtcgggcgatctcgcgaaccgcttcatgcatccgcgctatagcgtcgagcgcgagtacgcggtgcgcgtcgtcggcgagctgtccgaggcgtcgcgtcagaagctgctgcacggcgtcgagctcgacgacggcccggcgaatttcctgcgcattcgcgacggtggcggcgaaggcacgaatcactggtatcacgtcgcgcttgccgaagggcgcaaccgcgaggtgcggcggatgttcgaggcggtcggcctgatggtgagccgcctgatccgcacgcgccacggcccgatcccgctgccgcgcgggttgaagcgcggccgctgggaggaactcgacgaggcgcaggtgcggcgcctgatgtcgacggtcggcctgaaggcgccgaccgaggataagggcggcaagcgcggcggcccggtcgagcgccgccagcccgatccgatgcagacgtcgatgggcttcatcaatcgcgagcccgtgctgacgactcacggccagctcgaccagccgcggcgcggccgccgcgggccggcgggcggcggcttcggcgcgggcctcggcggcggctacgccggcctgccgggctacggcggcgcgtcgcgccagggcggccgcgatgtcgacggcaaccgcgcgtcctacggcggcgcgggcgcgaacaagcgcggcgccggcaagggcggccgcaatccgaacggcaatcgcgccgaaggcggtgcgcgcggcggcccgcgtacgccgcagcagcgcaatcgttcgcgtagccgc

SEQ ID NO: 14026 - DNA, 2793 bp, Burkholderia mallei
atgacaaccggttttcttcagaaaatttttggcagccgcaatcagcggctcgtcaagcaataccaaaagaccgtcgcggcgatcaatgcgcttgaaacgcagatcgagacgctgacggacgaccagttgcgcggcaagacaggggagttccgtcagcgcatcgcggccggcgagtcgctcgacaagctcctgcccgaggcgttcgccgtgtgccgcgaggcgagccgccgcgtgctgaagatgcgccacttcgacgtgcagatgatcggcgggatggtgctgcattacggcaagatcgccgaaatgcgcacgggcgagggcaagacgctcgtcgcgacgctcgccgcgtacctgaacgcgctcgccggccgcggcgtgcacgtcgtgacggtcaacgattacctcgcgcagcgcgacgccgagtggatgggccggctctacaacttcctcgggctttcggtcggcatcaacctctcggggatggagcacgaccagaagcaggcggcgtacgcagccgacatcacgtacggcacgaacaacgaattcggtttcgactacctgcgcgacaacatggtctacgagaccgattcgcgcgtgcagcggccgctgaatttcgcggtggtcgacgaagtcgactcgatcctgatcgacgaagcgcgcacgccgctcatcatctcgggccaggctgaggatcacaccgagctgtacgtgcggatgaacgcgctgccgccgctgctcgagcgccagatcggcgaggagaaggcggacggcacgggcgtcgagaagccgggcgactacacgctcgacgagaagggccgccaggtgttcctgaccgagtcgggccatgagaaggccgagcggatgctcgccgaatggggcttgatcggcgacggcgagagcctctacgcgccgcagaacatcacgctgatgcaccatgtgtacgcggcgctgcgcgcgcacacgctgttccatcgcgatcagcactacgtcgtgcagaacgacgaggtgatcatcgtcgacgaattcacgggccgcctgatgccgggccgccgctggtccgacggcctgcaccaggcggtcgaggcgaaggagcacgtgaagatccagagcgagaaccagacgctcgcgtcgatcacgttccagaactacttccggatgtacgcgaagctctcgggcatgacgggcacggcggacaccgaggcgtacgaattcaacgagatctacggcctcgagacggtcgtgatcccgaccaaccggccgccgaagcggatcgacaagcaggatcagatctacaagaccgcgaaggagcgctacgacgcggtgatccgcgacatccgcgagtgccacgagcgcggccagcccgtgctcgtcggcacgacgtcgatcgagaactcggagctgctgtcgcacctgctcaagcaggcgggcctgcctcacgaggtgctgaacgcgaagcagcacgcgcgcgaagcggcgatcgtcgccgaggcgggccggccgaagcgcatcacgatcgcgacgaacatggcgggccgcggcaccgatatcgtgctcggcggcaacgtcgagaagcaggcggcgttcatcgaggccgacgaatcgattccggccgacgagaaggcgcgccgcatccagcaactgcacgacgagtgggaaacgctgcacgagcaggtgaagaccgcgggcggcctgcacatcatcggcaccgagcgccacgagtcgcgccggatcgacaatcagttgcgcggccgcgcgggccgtcagggcgatccgggctcgtcgcgcttctacctgtcgctcgaggatccgctgttgcgcatcttcgcgggcgaccgcgtgcgcgcgatcatggaccgcctgaagatgccggagggcgaggcgatcgaagcgggcatcgtcacgcgttcgatcgagtccgcgcaacgcaaggtcgaagcgcgcaacttcgatatccgcaagcagctgctcgaatacgacgacgtgtcgaacgatcagcgcaaggtgatctaccagcagcgcaacgagctgctcgaagcgcacgacatcgccgaaacgatcggcgcgatgcgtcacggcgtgatctcggaagtcgttcgccagttcgtgccggcgggcagcatcgaggagcagtgggatctgcccgagctcgaagagacgctgcgcaacgattggcagctggacctcgcgatccaggaaatggtgaacgagtcgtcgtcgatcaacgcggacgagatcctcgacgccgtcacgacggccgccgacgaacactatgaagcgaaggtcgcgctggtcggccgcgaatcgttcagcgcgttcgagcgctcgatcatgctgcagacgctcgaccggctgtggcgcgagcacctcgcggcgctcgatcatctgcgtcagggcattcatctgcgcggctatgcgcagaagaacccgaagcaggaatacaagcgcgaggcgttcgaactgttcgcggcgatgctcgatgcggtgaagcaggaagtcacgcggatcgtgatgaacgtgcagatccagtcgcccgagcagctcgaggaggcagccgagcagatcgaggagcagggcggccagctcggcaacgtcgagttccagcacgccgatttcgcggcggcggcggccgcggcgacggcgggcggcgcggtggtcgcggatgcgacggccgagatggttggccacgcgatgagccacagcggcccggcgggcgaagtgccgcgagtcggccgcaacgatccgtgcccgtgcggcagcggcaagaagtacaagcactgtcacggcaagctgaac

SEQ ID NO: 14027 - DNA, 1425 bp, Burkholderia mallei
atgcactcgcatcccgaagtggccgatacgctgatcgtcggcgcgcagttgtacgacggcacgggcgcgccgagcgtcgagcgcgacgtcgcgatacgcggcgaccgcatcgtcgcgatcggcaatctgacgaactggcttgcggagcaggtggtcgaggcgaacggccgcgcgctcgcgcccggcttcgtcgacgtgcacacgcacgacgacacgcacgtgatcgacgcgccgcagatgctgccgaagatctcgcagggcgtgacgacggtgatcgtcggcaactgcgggatcagcgcgtcgcccgtcgcgctcaagggcgatccgcccgatccgatgaacctgctcggcgcggcgaagccggccgtcaacgtcgcggcgctcgtcggccacaccgcgctgcgcagcaaccagatggaccggctcgaccgcgcggcgaccggcgccgaaatcgcggcgatgcgcgcgcagctcgaggaggcgctcgcgcacggcgcgctcggtctttccagcggcctcgcgtacggctccgcgttcgccgcgccgaccgaggaggtgatggcgctcgccgagccgctcgcgaacgcgggcgccgtctacacgacgcacatgcgcaccgagttcgatgcgatcctcgaggcgatggacgaggcctaccgcgtcggccggcatgcacgcgtgccggtcgtgatctcgcatctgaagtgcgcggggccgtcgaactgggggcgcagcgccgaagtgctcgcgtcgctcgagcgcgcgcggcgcatccagcccgtcggctgcgactgctatccgtacagccgcagctcgtcgacgctcgacatcaagcaggcgacgggcgacatcgacatcacgatcacgtggtccgatccgcatccggaaatggcgggcaagctgctgaggacgatcgccgccgagtggcgcgtgtccgagcaggacgcggcgcgccggctgcagccggcgggcgccgtgtatcacaacatgtcggaggacgacgtgcgccggatcctgtcgcacccggcgacgatggtgggctccgacggcctgccgaacgatccgctgccgcatccgcgcctctggggcgcgtttccgcgcgtgctcggctactacgcgcgcgacgagcggctgatttcgctcgaggacgcggtgcgcaagatgactgcgctgtccgcccggcgcttcgggctcgcgcggcgcggcgaggtgcgggtcggctatcacgcggatctcgtgctgttcgatgcggcgcgcgtgcgcgacgcggcgacgttcgagcagccgcagcagcccgcgcacgggatcgaggcggtatgggtgaacggcgcgctgtcttaccgcgacggtgcgcccacgggcgtgcgcgcgggccgcttcgtcgcgcgcggcgaacgcgcgccggcgacgccgggcgacgcgttc

SEQ ID NO: 14028 - DNA, 438 bp, Burkholderia mallei
atggtcgtgttcctggtcctcgcgtggttcacgatgaagttcgtgtggccgccgttgatcaacgccctcgacgagcgctcgaagaagatcgccgacggcctcgccgccgcggaaaagggcaaggcggaactcgaagcagcgcacaagcgcgtcgaccaggaactcgcgcaggcccgcaacgatggccagcaacgcatcgccgacgccgagaagcgtgcactggcggtcgccgacgaaatcaagaccaacgcccaggctgaagccgcgcgcatcatcgctcaggcgaaggcggaagcggaacagcaaatcgtgaaggcgcgcgaaacgctgcgcggcgaagtcgccgcactcgccgtgaagggcgccgagcagatcctgaagcgcgaagtcgatcaaacggcccacgccgaactgctgaatcaactgaaagccgagctc

SEQ ID NO: 14029 - DNA, 1380 bp, Burkholderia mallei
atgaacgcgccgaaagacccccaaatcgaatcgctgaaagtcccgccgcactcgatcgaggccgagcagtccgtgctcggcggcctgctgctcgataacggcgcctgggaccggatcgccgacttcctgtcgcagagcgatttctaccggtacgaccaccgtatcatcttcgagcacatcggccggctcatcgccgcgacgcgtccggccgacgtcgtcaccgtctacgaggcgctcacgacgtccggcaaggcggaggacgtgggcgggctcgcgtacctgaacgcgctcgcgcagaacacgccgagcgcggcgaacatccgccgctatgcggaaatcgtccgcgatcgcgcggtgctgcgccggctcgtgtcggtcgccgacgaaatctcggccgacgcgttcaatccgcagggcaaggaagtccgccagctgctcgacgaggccgaatcgaaggtattctcgatcgccgaggacggcgcgcgcggcacgcagggcttcctcgaaatcgggccgctcctcacgcaggtcgtcgagcggatcgataccctttatcacaccgcgaacccgagcgacgtgacgggcacgccgacgggcttcgtcgatctcgaccggatgacctccggcatgcacggcggtgagctgatcatcgtcgcgggccgcccgtcgatgggcaagaccgcgttttcgatgaacatcggcgaatacgtcgccgtcgaatacggcctgcccgtcgcggtgttctcgatggaaatgccgggcacgcagctcgtgatgcggatgctcggctcggtcggccggctcgaccagcaccggatgcgcaccgggcgcctgaccgacgaggattggcccaagctcacgcacgcggtgcagaagatgagcgaggcgcagctcttcatcgacgagacgggcggcctgaacccgatggaattgcgctcgcgcgcgcggcgtctcgcgcgccagtgcggcaagctcgggctcatcatcgtcgattacctgcaactgatgacgggctcgtcgcagggcgagaaccgcgcgaccgaaatctcggaaatctcgcgctcgctgaagagtctcgcgaaggagctcgacgtgccggtgatcgcgttgtcgcagctcaatcgcggcctcgagcagcggccgaacaagcggccggtgatgtcggacctgcgcgaatcgggcgcaatcgagcaggacgcggacgtgatcctgttcatttaccgcgacgaagtgtacaacccggacagccccgacaagggcaccgccgagatcatcatcggcaagcagcgtaacggcccgatcggccccgttcgactcacgttcctgggtcaatacacgaaattcgacaattttgcaggggcgcaaaacttctacggcgag

SEQ ID NO: 14030 - DNA, 1221 bp, Burkholderia mallei
ggcgaacgcgcgggcgggctgcgcgacacggcgggcttgatcgagatctcggcggcggcgccggcctcgacgccgatcccggcggcgccgcggcggttcgcgcagccgttcgcgcagccggctcgcgcgttcgccgtcgcgagcgcctgcgcgccgtcctggccgcgctgggaccgtttcaagcgtgacttcgtatcggccgacggccgcgtgatcgacgtcggctcggccgacgagcggaccgtatccgaggggcaggcgtacggccttttcttcgcgctcgtcgcgaacgaccgcgcggcgttcgacgcgctgctgcgctggaccgaggacaatctcgcgcagggcgatctgagcgcgcgtctgcccgcgtggctgtggggccgcgcggccgacggcgcgtggcgcgtgctcgatgcgaacgccgcgtccgacgccgatctgtggcttgcgtacgcgctgctcgaagcggggcgcttgtggcgcgagcgcagctacacggcgcgcggcgcgttgctcgcgaagcgcgtgctcgacgaggagaccgcgacgctgccggggctcggtctcgtgctgctgccgggcccgatgggttttcggccggcgcgcgacgcgtggcggctgaatccgagctattcgccgccgcaggcgattcgcgggatcggcgcgcatgtgcccgacgacgcgcgctgggcgcggctcgcggcgggcgtcggccgcgtgctgaccgacagcgcgccgcgcggcttcgcgccggactgggcgctgtatcgcgcgggccgcggcttcgagccggacgccgaaacgcatgcggtgagcgcgtacaacgcgattcgcgtctatctgtgggcgggcatgctcgatgcgggcgatccgctggcgcggccgctcgtcgcgcatttcgcgccgttcgccgagcatgtcgccgcgcatggcgcgccgccggaggcggtcgatgcgacgacgggcgcggccgccccgcgcgacggcaatgccgggttttccgcggcggccgtgccgtttctcgaggcgcgcggcgagcgggcgagcgccgacgcgcagctcgcgcgcgtcgcgcggctcgagcgcgagacggcgagcggctattacgcgaacgtgctgacgctgttcgggctcggctggcgcgacgggcgctaccggttcgcggccgacggcacgctgcgggtgcgatggagcgagccgtgctcgacgcccgcgcgt

SEQ ID NO: 14031 - DNA, 852 bp, Burkholderia mallei
gacggcgacgaactgcaaggcgagcatcgctaccggctcggcgccgtgctcggcgaaggcggcgcgggccgcgtgcacgaggcgatccggctcgacacgtcggcgcgcgtcgcgatcaagctgctgcgcgaggatgcgccgcgcggcgcgcgcgagcgcgcccggctgcgcgcgcgctttcgccgcgagacggcgctgtgcgcacggctgtcgcatccgcacatcgtcgcgctgctcgacagcggcgagacgccggacggcctgctgttcgcggtgttcgagcacgtcgccgggcgcacgctgcgcgcgctgctcgcggccgacggcgcgctggccgccgagacgacgggcgcgctgatggcgcaggtgctcgacggcctcgcgcacgcgcatgcgaacggcgtcgtgcatcgtgacctgaagccgcagaacgtgatggtgacgacgcgcgacggcgagccgtgcgcgaagatcctcgacttcggaatcggcgcgctgctgcccgatgcgcatgccgccgacgaactgacgctcaccgcgacgaccgaggtgctcggctcgccgcagtactgcgcgccggagcaattgcgcggcgagccgccgaccgcgaaaagcgatttctacgcgtggggcctgatcgtcatcgaatgcctgaccgggcatccggtgatgcagggcgcgagcctcgcggacgtgctgtatcagcatctgagccccgtcgacgtcgcgctgccgcccgtgatcgccgcgcatccgctcggcgacgtgttgcgcgatgcgctgaacaaggatccgcggcagcgcgcggaatccgcgcaggcgctcgccaaccggttccgcgcgatccacttc

SEQ ID NO: 14032 - DNA, 1065 bp, Burkholderia mallei
atgctgttgctgaatcccggtcccgtgacgctgacggagcgtgtgcgccaaagcctgctgcagccggacctgtgccaccgcgaaagcgaattcttcgatctgcaggacgaggcgcgcgcgcggctcgtcgccgcgtacgcgctcgatccggccgaatggagcgcggtgctgatgacgggctccggcacggccgcggtcgagagcatgatcgccgcgctcgtgccggaaaacggcaagctgctcgtgatcgagaacggcgtgtacggcgagcggatcacgcagatcgcgacgcagtaccggatcgcgcacgacgtgctgaaacacgactggatgcaggcgccggatctcgcgcgcgtcgccgagaagctcgacgcggatcgcgcgatcacgcatgtcgcggtgatccatcacgaaacgaccacgggccgcctgaacgacctcgacgcgctcgccgccgtgtgccgcgcgcgcggcgtgcgcatgctcgtcgacggcgtgagcagcttcggcgcggaggcggtcgatttcgcgggcggcgacatcgacgcgctcgccgcgaccgcgaacaagtgcctacacggcgtgccgggcgcggcgttcgtgatcgtgcgccgccgcgcgctcgcgagtgccgcgagccgcacctactacctcgatctcggccggctcgcgaagctgcaggacgcgcgcaacacgccgttcacgccgtcggtgcacgcgtactacgcgctcgtcgaggcgctgcgcgagttcgacgaggcgggcggctggcgcgcgcgccacgcgcgctacgcggcgctcgccgaacaggtgcgcgccggcctcgccgcgcgcggcatgccgctcgtgctgccggacggcgaatcgtcggtcgtgctgcgcgcgtaccggctgcccgccggcgtcgcgtacgagcaactgcacgacggcctgaaagcgcgcggcttcgtgatctacgcgggccagggcgggctgtcgagcgcgttgttccgcgtgtcgacgatgggcgcgatcgagcccgcggacgtcgagcgcctcctcgacggattcaccgcgctcgcgcgc

SEQ ID NO: 14033 - DNA, 694 bp, Burkholderia mallei
ggctttggtctctccccccgccaaagggccgggggccccgccccccttctttaaaaatcgggcaattttcccaacctttcccctgtttcgcttcgcccccccccgtgttaaaacccttccccgcccaaaatgcccgccgccgcgtttgtgcggatcaccccctttcgcaaacccccgatctgctcaagcggtctaaggccggggccaatcgaaatgcgcgatcggggcgcctgtcggagccccgagcggatggtggggctgtctttcgagcatctgtacaacaagccgctcgtcgcggtcgtgcgcgcgggccatccgcttgcggcgagcgcttcgcccgccgcgcagctcgcgcgctatccggtcgtgctgccgccttacggcacgataatccggcaagcggccgagcaattgttgagcgcgtgcggcgcgccgccgctcgaatcgttcgtcgaggtgctgtcggtgtcggtcgcgcgcgcgctcgcgctcgagaacgacgcggtgtggttcgtgccgcgctacgcggaccgtattcgatctcgcggccggcacgctcacgcggctcgcgctgcccgtcgacggcgcggacgagccggtcgggctgatcctgcgcaccgacgcgcagccgtcacccgtcgcgcgcgcgctgatcgacgcggtgcgcgcgattgcgcggcggcggcttgccgga

SEQ ID NO: 14034 - DNA, 1239 bp, Burkholderia mallei
atgccccgcgatggggcgccgaaacgccgatatcgtggcggcctggcatccgcgaggccgccgaaccaaggtctggagacatcgataatgaaaaagcacgtcatttccgcagccgcattgctggccttcgccgcgccggttttcgcccaaagcagcgtcacgctgtacggcgtgatcgacgaaggcttcaactacacgagcaacgtgaacgtcaacggcgtcggcaagagcaactaccagctcgcgagcggtttcgtgcagggcagccgctggggcctgcgcggctcggaagacctgggcggcggcctgaaagccatcttcacgctcgaaaacggtttcgacgtgaacaacggccggctcggccagggcggccggatgttcggccgccaggcgttcgtcggcctgtcgcacgcgcaatacggctcgctcacgctcggccgccagtacgattcgctcgtcgactacctcgcgccgttgaccgcgaacggcaactggggcggcacgctgttctcgcatccgttcgacaacgacaacacggacaactcgttccgcgtgaacaacacggtcaagtacgcgagcccggactggaacggtctgcaagtcggcggcacgtacagcttcagcaacgcgacgggcttctcgaacaaccgccagtacagcatcggcgccgcgtacacgctgggcggcctgcaactcgcggccgcgtacctgcaggcgaacaacccgggcaagacggcgggcggcgcgatcgccgacaacgacgcgaacttcacggcggaccgcctgcgcatcttcggcggcggcgtcaactacacgttcggcccggcgacggtcggtttcgtctacacgaagaccgacgtgaagaacccggtctcgacggtctatctgccgacggcgacgttcgcgggcctcggcctgagcgcgacgaagttccagaacttcgaaatcaacggcaaataccagctgacgccggcgctcttcatcggcgcgcagtacgtgtacacggacggcaagttcgatgcggccgcgggcagcgtcaagccgaagtaccacacggtcggcctgatggcggactacaacctgtcgaagcgcaccgacgtctatctgcagggcgcgtaccagaaggtcgcgggcgacaagacgggcacgatcgcggatggcggctacgtcgtcgggacggacggcccctcggcgtcggcgaaccagttcgcggttcgcgcggcgatccgtcacaagttc

SEQ ID NO: 14035 - DNA, 1146 bp, Burkholderia mallei
atgaaaatcacccgcctcgaaaccttcgtcgtgccgcctcgatggctgttcctgaagatcgagaccgacgcgggcatcgtcggctggggcgagccgatcgtcgaaggccgcgcgcatacggtcgaggcggccgtgcacgagctcgccgactacctcgtcagccaggatccgcttcgcatcgaggaccactggcaggtgatgtaccgcgcgggcttctaccgcggcgggccgatcacgatgagcgcgatcgcgggcatcgaccaggcgctctgggacatcaagggcaagcatcacggcgcgcccgtgcatgcgctcctcggcggcccggtgcgcgagcggatcaaggtgtattcgtggatcggcggcgatcggccgagcgacgtcgcgaacaacgcgcgcgcggtcgtcgaacgcggcttccaggcggtgaagatgaacggctcggaagagctgcagatcgtcgacaccttcgacaaggtcgacaaggtgatcgcgaacgtcgcggcggtgcgcgacgcggtgggcccgtacgtcggcatcggcgtcgatttccacggccgcgtgcacaagccgatggcgaaggtgctcgccagggagctcgatccgtacaagctaatgttcatcgaggagcccgtgctgtcggagaacgccgaggcgctgcgcgacatcgcgaaccagacgagcacgccgatcgcgctcggcgagcggctctactcgcgctgggatttcaagcgcattctcgaaggcggctacgtcgacatcgtacagcccgacgcgtcgcacgcgggcgggatcaccgagtgccggaagatcgcgacgctcgcggaaagctacgacgtcgcgctcgcgctgcactgcccgctcgggccgatcgcgctcgccgcgtgcctgcagctcgacgcggtcagctacaacgcgttcattcaggagcagagcctcggcattcactacaaccagggcagcgatctgctcgactatctgcgcaacccggacgtgttccgctacgcggacggcttcgtcgcgattccgcaggggcccgggctcggcatcgacgtcgacgaggacaaggtgcgcgagatggcgaaaaccgggcaccgctggcgtaatccggtatggcggcacgcggacggcagcgtcgccgagtgg

SEQ ID NO: 14036 - DNA, 585 bp, Burkholderia mallei
atgaacagcgtctgcgtctattgcggttcggccaacggcgcgaagcccgtctacgcggacgcggcgcgcgcgttcggccgcgcgctcgcgaatgccggcctcacgctcgtctacggcggcgggcgcgtcggcctgatgggcgtgatcgccgacgaggtgatcgcatcgggcggacgcgcgatcggcgtcatcacggagctgctctacgacaaggaagtcggccacaccggcttgaccgagctgcacgtggtgcccgacatgcatcaccgcaagaagatgatggccgagctcgcggatgcgttcgtcgcgatgccgggcggcgcgggcacgctcgaagagttcttcgaggtctacacgtgggcgcagctcggctatcaccgcaagcccgtcgccctctacaacgtcgacgcgttctaccagccgctcatcacgctgctcgagcacaccgtcgacgaaggcttcatgcagcgcacgtacttcgacgcgctgtgcatcgacgccgcgcccgacgcgctcatcgatcagctcgtccggtatcgtccgcccgcgcgcgacaaatggacgttcgtgtcgacgcaggaagcc

SEQ ID NO: 14037 - DNA, 1461 bp, Burkholderia mallei
atgcgtgacgatgcgcggcgctcgtgcgccgcgcgggcgcgaatcggcgcgggcgcgaatcgttgcgatcggtcgctcacatccgcgcgaaggcgtcgctacaatgtcgccatccggtcaacatttcaatcgacgatgtcccaccccactccccagacgccgcgcgtgccgatgctgtcgacggccgatgcgctgacggcgctgctcgcggcggcgcgtccgctcgccgagattgaaaccgtgccgacgctcgaggcactcaaccgcgtgctcgcggccgacgtcgcgtccgggctcgacgtgccgccgatgaacacgagcgcgatggacggctacgcggtgcgcatcgccgacctgacgcgcggcgagcggcgcttgccggtgtcgcagcgaattgccgccggccatccggcggcgccgctcgcgccggggacggccgcgcgcatcttcacgggcgcgtccgtgccggccggcgcggacgcggtcgtgatgcaggagcaaacggaggcggcgggcgaccaggtcgacatcctgcatacgccgacggtgggcgaatggatcaccgcgcagggcgcggacattcgccgcggttcggtgatcctgcccgccggcacgcggatgacgccgcaggcgatggggctcgcggcatcggtcggctgcgtgtcgctcgcggtcacgcggcgcgtgaaggtggcggtattcttcacgggcgacgaactgacgatgccgggcgagccgctcaagcccggcgcgatctacaactcgaaccgcttcacgctgcgcgggctgctcgagcggctcggctgcgacgtgaccgactacggcatcgtgccggatcggctcgacgcgacgcgcgcggcgttacgcgaggcggcgcgcgagcacgatgtgatcgtgacgagcggcggcgtgtcggtgggcgacgaggatcacgtgaagcccgcggtcgaggcggaaggccggctcgcgttgtggcagatcgcgatgaagccgggcaagccgctcgcgttcggcgcgatcaggcgagacggcgcggcgagcggcgcggctgccgttgaggcgaacgcgcacggcgcgagcgatgcgagcgacacgcgcgccatgcacgcgacgtccggcggcgaagcgtatttcatcggcctgccgggcaacccggtgtcgagcttcgtcacgttcctgctgttcgtgcggccgttcctgttgcgcgtcgcgggggcggcgcaggtcgcgccgcgcgcggtgtcgctgcgcgcggatttcacgcagaacaaggcggatcgccgcaacgaattcctgcgcgcgcgcgtgaacgcggcgggcgggctcgacctgtttccgaaccagagctcggccgtgctgacatcgacggtatggggcgacggcttgatcgacaatccgcccaaccacgcgatcagcgcgggcgagacggtgcgtttcattcctttttccgaattgctcggt

SEQ ID NO: 14038 - DNA, 1428 bp, Burkholderia mallei
atgccgggtttgcagcgcgcgtgccaccgcacgcgccgccgggcttcccgcacgaagccccgccggccggcgcacccggcgccgcgccccgcctcttccgcaagcgaaaccatgttcagtttcttcaaacgattcaagaaagcgcccgatgccgccccggccgagccgcagcaagcgcccgacgcgccgcgggacgcttcccgcgcaccggcatcgcccgacgccgcgcgagtcgacgcgccggccgcgccgcagccgcgcgacgagcgcagcgaaaaccacgatcgccccgagcacgacgaaacgccgaccgccgagcattcccgttccggcgcgcagcccgccgcgcgcgcgacgccgcccgcgtccgccgccgcgtcggaagcgccggtcgggcagccgcgcgccgccgccgcgcgcgcaagcgagcccgcgccgtcggtcgtgatgacggtcacgccgtcgtcgaacggccgccacggcgtcgtcgagacggtcgagatcgtgccgccgcccgcgcccgagccggccgcgaagaaatcgtggatcgcgcggctgaagtccggcctcgcgaagacgagctcgagcatcacgaacgtattcgtcaacacgaaaatcgacgacgcgctctacgaggagctcgagacggcgctgctgatgtccgacgccggcatcgacgcgaccgagcatctgctcgacgcgctgcgcgaaaaggtgcgcgcgggccgcctcaccgatccgcagcaggtgaaggacgcgctgcgcgggctgctcgtcgagctgctggcgccgctcgagaagtcgttcgtgctcggccgcgcgcagccgctcgtgatgatgatcgcgggcgtgaacggcgccggcaagacgacgagcatcggcaagctcgcgaagcatctgcagagcttcgatcaatcggtgctgctcgccgcgggcgacacgtttcgcgccgccgcacgcgagcagctcgcgatctggggcgaacgcaacaacgtgaccgtcgtccagcaggaaagcggcgaccccgccgcggtgatcttcgatgcggtcagcgccgcgcgcgcgcgcaacatcgacgtgatgatggccgacaccgcaggccgcctgccgacgcagctgcatctgatggaagagctccggaaggtgaagcgcgtgatcggcaaggcgcacgacggcgcgccgcacgaggtgctgctcgtgatcgacgcgaacaccggccagaacgcgctcgcgcaggtaaaggcgttcgacgacgcgctcggcctcacgggcctcatcgtcacgaagctcgacggcaccgcgaagggcggcatcctcgccgcgatcgcgcgccagcggccgattccggtgtacttcatcggcatcggcgagaaggtcgaggatctgcagccgttcagcgcggaggaattcgcggacgcgctgctcggc

SEQ ID NO: 14039 - DNA, 1139 bp, Burkholderia mallei
agcttcttcattccctgcgtgaccctgatcggcccgggctgcgcgcgcgagacgggcgcgcgcgccaaatcgctgggcgcgaaaaaggcgctcatcgtgaccgacgcgggcttgcacaagatgggggtgtccgagatcgtcgcgggccatatccgcgaagcggggcttcaggccgcgatctttcccggcgcgcagcccaatccgaccgacgtcaacgttcacgacggcgttgaactctatcggcgggaagggtgcgatttcatcgtgtcgctcggcggcggctcgtcgcacgactgcgcgaagggcatcgggctcgtcaccgccggcggcggacatatccgcgactacgagggtatcgacaaatcgacggtgccgatgacgccgttgatttcgatcaacacgacggcgggcacggcggcggagatgacgcgcttttgcatcatcacgaattccagcatcacgtgaagatggcgatcgtcgactggcgttgcacgccgctcatcgcgatcgacgacccgagcctgatggtggcgatgccgcccgcgctgacggccgcaaccggcatggacgcgctcacgcacgcggtggaggcctacgtttttaccgccgcgacgccgatcaccgacgcctgcgccgaaaaggcgatcgcgttgatcggcgaatggctgccgaaggccgtcgcgaacggcgaatcgatgcaggcgcgcgcggcgatgtgctacgcgcagtacctcgcagggatggcgttcaacaatgcgtcgctcggctatgtgcacgcgatggcgcaccagctcggcgggttctacaaccttccgcacgggggctgcaacgcgatcctgctgccgcacgtgtgcgagttcaacctgatcgccgcgcccgagcgtttcgccgccatcgcgccgctgctcggcgtcaggacggcgggcatgagcacccccgatgccgcacgcgccgccattgcggcgatccgcgcgctctcggcgtcgatcggcatcccgtcgggcctggccgcgctcggcgtgaaggctgaagaccatgaggtgatggccggcaacgcgcagaaagatgcgtgcatgctgaccaatccgcgcaaggcgacgctcgcgcaggtcatcgtgatcttcgcggcggcgatgtga

SEQ ID NO: 14040 - DNA, 990 bp, Burkholderia mallei
atggattcaatgaccgatcatcaaccgacgccgattcgcttcggcatcgtcggcgcgggcagcatcgcgcgccggttcgcgcacagcatcgcgcacgtgcgtggtgccgagctatcgcgcatatgggcacgccgcgccgacgcagccgccgcgttctgcgccgcgcatggcggcgcgccgtgtgacagcgtcgacgcgctcctcgcatccgacatcgacgccgtctacatcgccacgctgaacgacagccacgcgcattacgcgcgcacggcgctcgcggccggcaaggcggtgctctgcgaaaagcccgcgacggtcaacgcgcgcgagctcgaaacggtgctcgacgccgcgcacgcggcgaagcgcctgttcatggaggcgatgaagccgccgttctatccgctgtaccggaagctgcgcgcgcatctcgagcgcgatccgatcggcgagatcgcgctcgtgcgcgcgggctgcgcgtcgtcgagggtgccggccgatcatcccgtctatcgtttcgagcaggcgggcggcgcgctgctcgacatcggcgtctacgagatgttccttgccgtcgactggctcggcgcgccgctcgacgtgcagacgctcgggcgcgtcggcgcgacgggcgtcgacgtgttcgcgagcgtcaacgcgcggcacgcgcgcggcgtgtcgcaactgttctgcgggctcgacgtgatggggcgcggcgatgcgctgctcgcggcgccgggcggctacgtgacgattcacgagaactggtggaatccggcgcgcgcgacgatccgctatgcggacggccgcgtcgtcgagctcgacgagccgttcgacggcggcggcctcaattacgagatcgcgcatttctgcgagctgctgcgtgcgggcgagctcgaaagcccggtgatgacgcacgatcattcgcggcggatgatcgcgatgacggacgccgcgcgcgcggcgctcggcgtgcgctatccgatggat

SEQ ID NO: 14041 - DNA, 1101 bp, Burkholderia mallei
atgacctcgacgcagcgcacactgatggtgatggcgggcggcaccggcgggcatgtgttccccgggctcgcggtcgcgcatcggatgcaggcgcagggctggcgcgtcgtgtggctcggcaacccggccggcatggaggcgacgctcgtgccgaggcacgggattccgatggagtacgtgcgcttcggcgggctgcgcggcaagggcctcgcgacgaagtttgcgctgccgttcaacctgctgcgcgcatgcgcgcagagcctgcgcgcgctgcgccgcgtgaagccggacgtcgtgctcggcatgggcggctacatcacgttcccggcgggcctcgtgaccgtgctgacggggcgtccgctcgtgctgcacgagcagaattcgatcgccggcctgacgaacaaggtgctcgcgaagctcgcgaagcgcgtgctcgtcgcgttcccgggcgcgctgccgaacgccgaatggacgggaaatccgattcgcacggaacttgcgcgcacggaaccgccccaagcacgctatgcggcgcgcagcgggaagctgaggctgctcgtcgtcggcggcagcctcggcgcggccgcgctgaacgaagtcgtgccgcgcgcgctcgcgcttctcgcgcccgatgagcggccgcaggtcgtgcatcaggcgggcgcgaagcacatcgatacgctcaaggagaactacgaggccgcgggcctttcctgcggcagcgacgtcgcgctcgtgccgttcatcgacgacatggcgtccgcgtacgcgaacgcggacctcgtgatttgccgctcgggcgcgatgacggtcgcggagatcgcggcggtcggcgtcgcggcgctgttcgtgccgtttccgcacgcggtcgacgatcatcagacgaccaacgccgagttccttgccgagcagggcgcggcagtgctcgtgcaacaacgcgacctgtcggccgagctgctcgccgactggctgcgcggccagtcgcgggactcgctcgcggcgatggccgaacgttcgcgctcgctcgcgaagccggacgccaccgacgaagtcgcgcgggtgtgcgcggcggtggcgggcgcgaacctggaaggaaagcaa

SEQ ID NO: 14042 - DNA, 1530 bp, Burkholderia mallei
ttgacaaaaatcatcgggcctttccgggcgattgttacggcactgtccccgtttcgcgcgacgtgtggaaacctgggcggcgcgcacgcgcggcttgccgcgcgcgccgaggcggtctatcgttgggcgccagaaattttccgaccgtccatgcattccgaatctccctttgccggctccggcggcgcgcccgcgggcgacggcgtcattcccgtgtccgcgctcaaccgcgcgatcggcacgatgctcgagcgcacgttcccgctgctgtgggtggcgggcgaagtgtcgaacttcacgcgcgcggcgagcggccactggtatttctcgatcaaggatcagcaggcgcagatgcgctgcgtgatgttccgcggccgcgcgcagcacgcggagttcacgccgcgcgaaggcgacaggatcgaggtgcgcgcgctcgtcacgatgtacgagccgcgcggcgaagtgcaactgagcgtcgaggcgatccggcgcaccgggcaggggcggctctacgaagcgttcctgcggctgaaggcgcagctcgaggccgaagggctcttcgcgcccgagcgcaagcgggcgccgccgacgcatccgcgcgcgatcggcatcgtcacgtcgctgcaggcggccgcgctgcgcgacgtgctgacgacgctcgcgcgccgcgcgccgcacgtgccggtgatcgtctatccggcgcccgtgcagggcgcgggcgcggcggagaagctcgccgcgatggtcgcgacggcgaacgcgcggcgcgaggtcgacgtgctgatcgtctgccgcggcggcggctcgatcgaggacttgtggtcgttcaatgacgaggcgctcgcgcgcgcgatcgcggcgagcgacgtgccggtcgtctgcggcgtcggccacgagaccgatttcacgatcgccgatttcgcggccgacgtgcgcgcgccgacgccgaccggcgcggcggagctcgtgagcccgcagcgcgcgctgctgctgcgcgagctcggcgagcggcagggcgcgctcgcgcgcggcctgcggcgtgggctcgacgcgcgcgcgcagcagctcgactggctcgcgcgccggctgatcagcccggccgagcgcctgcagcgccaggcgatgcacgtggggcagctcgccgcgcggcttgccgcggcgggcgcgcggcccgtgcgcgacgcgcgcgcgcgtttttcgctcgtgcaattgcgctggcagcgcgcgcggcccgacttcgcgcaggcacggcaggtgctcgccgcgttcgcgcaaaggctcgatgcgacgctgcagcggcgcatcgaacgcgataccgcacgcgtggccgcgtgcgcggcgcggctcgaggtgctgagcccgcaacgcacgctggagcgcggctacgcggcgctcatcgacgcgcagacgggccgcgcggtgcgcgcgcccgcatcgctcaagccgcagcgccggctgaccgtgcaccttgccgagggctcggccgacgtatcgcttgccgacgtgcaaccgcgtctttcggatacattc

SEQ ID NO: 14043 - DNA, 726 bp, Burkholderia mallei
atgagcatggtcgaattccgcaacgtgtcgaagagcttcggtcacgtgccggtgctgaaggacatcgacctgcgcatcgacgcgggcgaggtggtggtggtggtcgggccgtcgggctcgggcaagtcgacgatgcttcgctgcatcaacgcgctcgagaagatcacgggcggcgatctgctcgtcgacgggcagagcgtgaagggcaaggccgcggtgattcacggcatccggctcgaagccggcatggtgttccagcagttcaacctgtttccgcagatgaccgcgctcgagaacgtgatgttcgggccgatccaggtgcgcggcgcatcgcgtgcgcaggcgcgcgatcaggcgatggcgctgctcgcgaaagtcggcctcgaggcgcgcgcgaaccactatccgtccgagctctcgggcggccagcagcagcgcgtcgcgatcgcgcgcgcgctcgcgatccggccgaagctgatgctgttcgacgagccgacctcggcgctcgatcccgagttgcgccacgaggtgctgaaagtgatgcgcgatctcgcgaacgaggggatgacgatgatcgtcgtcacgcacgagatcggcttcgcgaagcaggtcggcacgcgcctgctgttcatggatcagggcggcatcgccgaggacggcgatccgaagacgctgatcgatcatccgccgacgccgcgcctgaaggattttctcaaacacgtttcg

SEQ ID NO: 14044 - DNA, 1590 bp, Burkholderia mallei
gtgctttctaccgccaacatcacgatgcaattcgggcccaagcccctgttcgagaacatctcggtcaagttcggggagggcaaccgctacggcctcatcggggcgaacggctgcggcaagtcgaccttcatgaagatcctgggcggcgatctggagccgtcggcgggcaacgtcgcgctcgagccgaacgtgcggctcggcaagctgcgccaggatcagttcgcatacgaggacgtgcgcgtgctcgacgtcgtgatgatgggccacaccgagatgtgggccgcgatgaccgagcgcgacgcgatctacgcgaaccccgaggcgaccgacgacgactacatgcacgcggccgaactcgaggcgaagttcgccgagtacggcggctacgacgccgaggcgcgcgcgggcgcgctgctgctcggcatcggcatcgaggagaagttccacagcggcccgatgcgcgacgtcgcgccgggctggaagctgcgggtgctgctcgcgcaggcgctgttctcgaacccggacgtgctgctgctcgacgagccgaccaataacctcgacatcaactcgatccgctggctcgaggacacgctgaacaactacgattcgacgatgatcatcatctcgcatgatcgtcacttcctgaactcagtgtgcacgcacatggccgacatggactacggcacgctgaaggtctggccgggcaactacgacgactacatgctcgcgtccgcgcaggcgcgcgagcgccaggccgcggcgaatgcgcgcgcgaaggagcgcgtggccgagctgcaggacttcgtgcgccgcttctcggcgaacaagtcgaaggcccgccaggcgacgagccgcgcgaagcagatcgacaagatcaagatcgaggaattcaagccgtcgtcgcgccagaatccgttcatccgtttcgaattcgagaagaagctgcacaacatcgcggtcgtcgccgattcgatcacgaagaagtacgagcgcacgatcttcgagaatttcaatttgtcggtgcagcccggcgagcgcatcgcgatcatcggcgagaacggcgcgggcaagacgacgctgctgcgcgcgctgttcggcaacctgacgctcgatcacggcacggtgaagtgggccgagaacgcgaacgtcggctacatgccgcaggacacgtacgaagagtttccgaacgacgtcacgctgatggattggatcgaccagtaccgcaaggacggcgacgacgagacgatggtgcgcggcacgctcggccgcctgctgttctcggcggacgacatcaagaaatcggtgaaggtgctctccggcggggagaagggccggatgatctggggcaagctgatgctcggccgtcacaacgtgctgctgatggacgagccgaccaaccacatggacatggaatcgatcgagtcgctgcagatcgcgctcgagaagttcgaaggcacgctgatcttcgtgtcgcacgaccgcgaattcgtgagcgggctcgcgaaccggatcatcgaagtgacgacggagggcaagctcgtcgatttcggcgggaattacgaggatttcctcgcaagcaagggcttgcag

SEQ ID NO: 14045 - DNA, 2037 bp, Burkholderia mallei
atgtcaacgacactcaatgaaaacctgctgctggcgattccgctcgcgccgctggccggctcgctgatcgcggggctgttcggcaacgcggtggggcgcaagggcgcgcatcgcgtgacgattctcggcgtcgcgctcgccttcgttctttccgcgctggtgttcttccaggtgctggacggcgcgagcttcaacgcgaccgtctacgaatggatgaacgtcggctcgctgaaactcgaggtgggcttcctcgtcgatacgctgaccgcgatgatgatggtcgtcgtcacgttcgtgtcgctgatggtgcacatctacacgatcggctacatgtcggaggaggacggctaccagcgcttcttctcgtacatctcgctgttcacgttctcgatgctgatgctcgtgatgagcaacaacttcctgcagctgttcttcggctgggaagcggtgggtctcgtgtcgtacctgctgatcggcttctacttcacgcgcgagagcgcgatctacgcgaacatgaaggcgttcctcgtgaaccgcgtcggcgatttcgggttcctgctcggcatcggtctcatcctcgcgtacgccggctcgatgaactacggcgaagtgttcgccaagcgcgcggagctcgcgtcgctgcacttcccgggcacccagtggggcctgctgacggtcgcctgcatctgcctgttcatcggcgcgatgggcaagtccgcgcagttcccgctgcacgtgtggctgcccgattcgatggaaggcccgacgccgatctccgcgctgattcacgcggcgacgatggtgacggcgggcattttcatggtcacgcgcatgtcgccgctgttcgagctgtccgacgccgcgctgtcattcatcaccgtgatcggcgcgatcacggcgctcttcatgggcttcctcggcatcgtccagaacgacatcaagcgcgtcgtcgcgtattcgacgctgtcgcagctcggctacatgacggtcgcgctcggcgtgtccgcgtacccggtcgcggtgttccacctgatgacgcacgcgttcttcaaggcgctgctgtttctcggcgcgggctcggtgatcatcggcatgcaccacgatcaggacatgcgcaacatgggcggcctgcgcaagtacatgccgatcacgtggatcacgtcgctcgtcggctcgctcgcgctgatcggcacgccgttcttctcgggcttctattcgaaggactcgatcatcgacgcggtgaagctgtcgcacctgccgggctcgggcttcgcatacttcgcggtcgtcgcgagcgtgttcgtcaccgcgctgtactcgttccggatgtatttcctcgtgttccacggcgaggagcgcttccgtcatccgaagacgttcggcaacaaccacggcgccgaatcggccgcgcatcacggccatgacgaccacggccacgcgcacgagccgcacgaaacgccgtgggtcgtgtgggtgccgctcgtgctgctcgcgattccgtcggtcatcatcggcgcgatcgcgatcggcccgatgctgtacggcgacttctttcagcacggcgtcgcgttcgacaaggtgatcttcatcggccagaaccacccggcgctcgccgaaatggcggaggagttccacggctggacggcgatggggctgcactcggtgtcgggcctgccgatgtggctcgcgctcgcgggcgtcgtcgtcgcatggttcctgtacctgaagcgcccggatctgccggcggcgatccgtcgcgcgttcggcccgatctatacgctgctcgacaacaagtactacatggacaagatcaacgaggtcgtgttcacgaagggttcgatcgcgatcggccgcggtctgtggaaggagggcgacgtcgtggtgatcgacggcctcgtcaacggcagcgcgcgcttcatcggctggttcgccggcgtgatccgcttcctccaatccggttacatctatcactacgcgttcgccatgatcatcggcatgctggggctcctgaccctgtttgtaacgctcggcggcaaa

SEQ ID NO: 14046 - DNA, 624 bp, Burkholderia mallei
gtgagcacgggccggccgaagagccggcccgcgcgccgcgacggggcgtccctacaacggtggcgggcccaacgcccgcccgcagccgcgagcaccatgaaattcctgttcgatctgttcccgatcattctgttcttcgccgccttcaagctatggggcatcttcacggcgaccgccgtcgcgatcgccgcgaccctcgcgcaagtggcgtgggtcgcgtttcggcaccggaaggtcgacacgatgctgtgggtgagcctcggcgtgatcgtcgtgttcggcggcgcgacgctcgtgctgcatgacgagaaattcatccagtggaaaccgaccgtgctctactggctgttcgcggtcggcctcgtcgccgcgcgctacgcgttcggcaagaacctgatcgagaagatgatgggcaagcagttgacgctgcccgagccggtctgggacaagctgaacctcgcatgggccgcgttcttcgccgcgctcggcgtgacgaacctgtacgtcgtgcgcaacttcaccgaatcgcagtgggtcaacttcaagctgttcggcacgacgggcgcgatcgtcgtcttcgtgatcctgcaaagcctctggctcgcgaaatacctgaaggaagaa

SEQ ID NO: 14047 - DNA, 1077 bp, Burkholderia mallei
gtgcggctcggggcgaccgtccgccgccgcttgcgcgacgccctggctgcccgtatcgggcgcgatgttccatactaccggccgaccggtttcccagccgtgctgcttcagatagttcgcgacgctgccgatcgcatcggcctggctcgcgcgcagatcgatgtgaccattgccgtcgtagtcgaccgcgtaatcgcggatgctgctcggcaggaactgcgggatgccgaccgcgcccgtgtacgagccgagcacgcccgtcgggtcgagctggctgtcgcgcgtccagacgaggaaatcttcgagattcttgcggaacgtcgcctgccgcgcgtcgcgattcggcgtgttcggatagtcgaacgcgagcgtcgtcagcgcgtcgagcgtgcggaagttgcccatgtagcggccgtagatcgtctcgacgccgatgatgccgacgatcacctcgggcggcacgccgaattccgtggacgcgcgttgcagcgtgccttggttcgcgcgccagaatttcacgccggcgttcacgcgcaccgcgtcgagaaagcgcgactggtagacgcgccagttcttgacggctggcgacggcgcgggcatcacgagcttcgcggcggtcgccgagtagctcacgcgcgcgaacagcgcatgcagcgcgttcgcatcgaagtcgtggcgcgcgaccatgtcggcgatgaacgcgtcgatcttcgcgttgttcgcgtagcgctgcggaatgatttcttcttcgaatgtttgcccctgctgtacgctcggctgcggctgcggctgcggctgcggctgcaattgcaattgcgattgcgattgcgattgcgattgcgccggctcttgcgcgacgacggctgcggcgggctgcgtttgcgcgacggcggccgacgcgaagagcgtcgcggcgagcgacagcgcggcgagcgggaagcgaagacggaaagcgagcgaggcgggtgcggcaggctggtggaagatcatgtcgaagcgaagcggacgagacggacgatttcggggcagtataaccgacacgcccgtcgcgccggcccggcggggggcgtgatgtgg

SEQ ID NO: 14048 - DNA, 387 bp, Burkholderia mallei
atgacgacagaaacctcatcgcaccagtccgggcacggaccgctgcgccgcctgctcggctcggtgctcgcgctcctgcagacccggctcgaactcgtcggcatcgaactcgccgaggagaaggaacgcctgatgggcgtactctttgtcgggctcgccgcgatgatgctcgcgacgatggcgctcatcagcctgacggtgctcattgcgatcgcgttctgggatacgtaccgctggcaatcgctcgccgtcgtcaccgcgctctacgcgctcggcgcactcgcctgctggctgaaggcgcgctcgggactgcgcgacgcgcccagcgtgttcgaggcgacgctgaacgaactcgaaaaggaccgcgagctgttccgcggcaagccg

SEQ ID NO: 14049 - DNA, 516 bp, Burkholderia mallei
ttgaccgacatggaaaatcagtccgccgcgaggagaccccaggccgcccctacgcctgccaacatgaatcgcctagccaaaatcctgcctttggagaacgtcgtcatcgacctctccgtcaccagcaagaaacgcgtcttcgaacaggccggcctgatcttcgagaatcagaacggcatcgcgcgcagcaccgtcaccgacaatctgttcgcacgcgaacgtctcggttcgacgggcctcggcgagggcgtcgccattccgcacggccggatcaaggggctcaagcatccgctcgccgccttcgtgcggctcgccgagccgattccgttcgaggcgcccgacggccagcccgtgtcgctgctgatcttcctgctcgtgcccgagcaggcgacgcaggcgcacctcgaaatcctttccgaaattgcccagctgctgtccgatcgcgacacgcgcgagcgtctgcacaccgaaccggaccgcgacgagttgcatcgactcctgactcagtggcaacct

SEQ ID NO: 14050 - DNA, 729 bp, Burkholderia mallei
atgagcaaaacccacttcggcttcgaaaccgtcgaggaaaacgaaaaagcgaagaaggtcgcgggggtgtttcactcggtcgcgagcaactacgatctgatgaacgacctgatgtcggcgggcctgcaccgcgcgtggaaggcgttcacgatcgcgcaggcgaacgtgcgcccgggcggcaaggtgctcgacatcgcggccggcacgggcgacctgacgaaggcgttcgcgaaggcggcggggccgacgggcgaggtctggcataccgacatcaacgaatcgatgctgcgcgtcggccgcgaccgcctgctcgacaagggcgtcgtcacgccgtcgctgctctgcgacgcggagaagctgccgttcccggacaactatttcgatgtggtcaccgtcgcgttcggcctgcgcaacatgacgcacaaggattcggcgcttgccgagatgcgccgcgtcgcgaagccgggcgggcgcgtgatggtgctcgagttctcgaaagtctgggagccgctgaagaaagcgtacgacgtctattctttcaaagtattaccgtggcttggcgacaagttcgcgaaagatgccgacagttaccggtatcttgctgaatctatccggatgcacccggatcaggagacgctgaagacgatgatggaacaagcgggcctcgatgccgtcaaatattacaatttgtcaggtggcgtggtagctttacacgtgggaaccaagtat

SEQ ID NO: 14051 - DNA, 465 bp, Burkholderia mallei
atgtccgattccgccgccgcccctctcgtttatctgctgcgccccgccgcgtcgggcgatttcgaattcgcggaagcgctcacgcacggcaacatgaacgcgtattaccagcgccatggcctcaggtggcgcgcggatctcttttttgcaagctggcgcgattcggaaaacttcatcctcgaactcgacagcgtgtcgatcggcctgttgaggattaccgaggagggcgattcgctgcacatccgcgatgtgcagatcgcgccggggcaccgacagcgcggcgccggcacctatctgctcgaaacctcgcaccgtttcgcgaaggcgcgcgggctgcgcgagacgcagttgcgcgtgttcgtcgacaatccggccgcgcggctctatctgcgaatgggatatcggctcgcggggccgcgtctcgcgcagttcggatcgatccgccacatggtgcggcccgtgtcc

SEQ ID NO: 14052 - DNA, 528 bp, Burkholderia mallei
atgtctcgagtaggtaagagcccgatcgcgctgcaaggcgcggaagtcaagctggccgacggtgcgatcaccgtcaagggcccgctgggcaccatcacgcaggcggtcaatccgctcgtgaacgtggcgaacaacgacggcacgctgaacctgtcgccggtcgacgacagccgcgaagcaaatgcactgtcgggcacgatgcgcgcgatcatcgcgaatgccgtgcacggcgtgaccaagggtttcgagcgcaagctgacgctggtgggcgtcggctatcgtgcgcaggcgcaaggcgacaagctgaacctgtcgctgggtttctcgcacccggtggtgcaccagatgccggaaggcatcaaggctgaaaccccgacgcaaaccgaaatcgtgatcaaggggatcgacaagcagaaagtcggccaagtggctgcggaagtccgcggctaccgtccgcccgagccgtacaagggcaagggcgtgcgctatgccgacgaggttgtgatcctcaaagaaacgaagaagaag

SEQ ID NO: 14053 - DNA, 576 bp, Burkholderia mallei
gggaggagacagtgtggccatcgttacgccattcgtgcaggtcggaacttacccgacaaggaatttcgctaccttaggaccgttatagttacggccgccgtttaccgggacttcaatcaagagcttgcaccccatcatttaatcttccggcaccgggcaggcgtcacaccctatacgtccactttcgtgtttgcagagtgctgtgtttttattaaacagtcgcagccaccagtttattgcaaccccttcacccttctggcgcaggccagtcaagctaccagggcgtaccttatcccgaagttacggtaccaatttgccgagttccttctcccgagttctctcaagcgccttagaatactcatctcgcccacctgtgtcggtttgcggtacggtcatcgttagactgaagcttagaggcttttcttggaaccacttccaattgcttcgctcccgaaggagctcgcgccacacccttgaatcctgcgcccggatttgcctaagcgccttctccaatgcagcgaccgggacttccaacacccggacaaccttccgcgatccgtccccccatcgcatcta

SEQ ID NO: 14054 - DNA, 1704 bp, Burkholderia mallei
atgacattacgtttgagccgccgcgcgtacgcggaaatgtacgggccgacgacgggcgaccgcatccgcctcgcggacaccgagctgctgatcgaagtcgagcgcgaccacacgctctacggcgaggaagtgaagttcggcggcggcaaggtgatccgcgacggcatgggccaatcgcagctccccgcggccgacgtggcggacaccgtgatcacgaacgcggtgattctcgatcactggggcatcgtgaaggcggacatcgcgatcaagcacggccgcatcgcggcgatcggcaaggcgggcaatccggacatccagccgggcgtgacgatcgcgatcggcgcggcgaccgagatcatcgcgggcgaaggcctgatcgtgacggcgggcggcatcgatacgcacatccacttcatcagcccgcagcagatcgacgaagcactcgcatcgggcgtgacgacgatgatcggcggcggcacgggccccgcgaccggcaccaacgcgacgacctgcacgccggggccgtggcacatggagcggatgctgcaggcggccgacggctggccgatcaatctcggctttctcggcaagggcaacgcgagccggccgcagccgctcgtcgagcagatcgaggcgggcgcgatcggcctgaagctgcacgaggattggggcacgacgcccgccgcgatcgacaactgcctgacggtggccgacgacaccgacacgcaggtcgcgatccacaccgatacgctgaacgaggccggcttcgtcgaggcgacggtcgccgcgttcaagggccgcacgatccacacgtaccacaccgagggcgcgggcggcggccatgcgcccgacatcctgaaggtgtgcggcgaggcgaacgtgctgccttcgtcgacgaacccgacgcgcccgtacacgatcaacacgctcgacgaacacctcgacatgctgatggtctgccatcacctcgatccgtcgatcgccgaggatctcgcgttcgccgaatcgcggattcgccgcgagacgatcgcggccgaggacatcctgcacgacctcggcgcgctgtcgatgctgtcgtccgattcgcaggcgatgggccgcgtcggcgaagtgatcatccgcacgtggcagaccgcgcacaagatgaaggtgcagcgcggcgcgctcgccggcgacggcgcgcgcaacgacaacttccgcgcgaagcgctacgtcgcgaaatacacgatcaatccggcgctcacgcacggcatcgcgcacgaggtcggctcgatcgagccgggcaaatgggcggacctcgtgctgtgggagcccgcgttcttcggggtcaagccggcgatgatcgtcaagggcggcatgatcgccgtcgcgcagatgggcgatccgaatgcgtcgatcccgacgccgcagcccgtgcattatcgcgagatgttcgccacccgcggcggcgcgctcgcgcgcacgtcgctcacgttcgtgtcgcagctcgcgctcgatgcgggcatcggcgcgcgctacgggctcgcgaagcggctcgtgccggtgcgcggctgccgcacggtgaccaagcgcgacatgatccacaacgcatggcaaccggccatccgcgtcgaccccgaaacctacgacgtcgtcgccgacggcgcgctgctcacctgcgagcccgccgccgtgctgccgatggcgcaacgctacttcctgttc

SEQ ID NO: 14055 - DNA, 1002 bp, Burkholderia mallei
atgcgccgttcgcgtgcggctcgccgatcggcgcggccgcgcgacgcggacatcgcgcgcccccgtgcgcgacgcgcgcgcgccgggagccgccgcgtcggcggccggcgcgcatcgcgacagcgacatgacgcgcgtcgcggccgccgcgcgccggctgcgttcggcgccggtacgctcgcgcggcgccccggcttcgcgcgcgatccgccggcgcccgcgtcgcccagccgcgcggatgcgcccggcgcggcgcgcccgtcgggcgctcgttcgcaccgagacaaatctccacacgaatccgatcgactcgaccgggcgcgccatgagacgatccgccgctcgttagatttttcatcgcctcttcgccgcatgaatgtcccgatgttgcgcgcggcgccggccgcgcttctgctcgcggtgtgcgcgggcacgcaagcgcagccgctcgccggttcgccgtcgagcgccgcgacggcgaacccggccgcgcaagcgcctacacgctcgcggacgccgcccgatgctcgctcgcctgcgctgccggccggcagcctcgcgtcccagacactgtcgcagcacgcaccgcccgacgcgaagccgcaatacgcggccccgctgcagcgcaacttcgcgttcgcgcaggatcagagccgacaggaggaatgcgacgagctcgccgcgacgatcgacaacctggcgcgccacacccaagccgscacgcgctcggccccgccggcgctgctcgcgccgagcacggccaacagccagacgccctggaaaatccccgcgccgcccgtctacgagccgccgccgtcgcggccgccgccgtccgcgaacggccacgcgcggccgaactacgcgccgctgccgttcgactaccggagccggccgtgggcgcagccgtaccccgccaccgagcaggacgcgaaggaacagcgcgcgcgcagcgcgcagcagatcgagctcgaaacgcgctaccgccagttgcactgccgcccg

SEQ ID NO: 14056 - DNA, 1395 bp, Burkholderia mallei
atgacctacccccccaccgccacgccgttcagcgcgctggcgctgacgcccgcgacgctcgcgaatctcgcgcagctcggctacaccgacatgacgccgatccaggccgcgagcctgccgatcgcgctcgccggccacgacctgatcgcgcaggcgaaaaccggcagcggcaagacggccgcgttctcgctcgcgctgctcgcacgcctcgacgcgcgccgcttcgacgtgcaggcgctggtgctgtgcccgacgcgcgaactggccgaccaggtcgcgcaggaaatccgccgcctcgcgcgcgcggaggagaacgtcaaggtgctgacgctgtgcggcggcacgccgatgcgccctcaaacgcagagcctcgaacacggcgcgcacatcatcgtcggcacgccggggcgcatcatggatcatctggaccgcggccatctgacgctcgacgcgctgaacacgctcgtgctcgacgaagcggaccggatgctcgacatgggtttcttcgacgacatcgcgaaggtggcgcggcaatgcccgccgacgcgccagacgctgctgttctccgccacgtatccggacgggatcgcgaagctcagccagcagttcctgcgccatccgaagagggtgaagctcgaggaacgccacgacgacagcaagatccgccagcgcttctacgaagtgaccgaggacgagcggctgcatgcggtcggcctgttgctgaaccactatcgcccggtgagcacgatcgcgttctgcaacacgaagcagcaatgccgcgatctgctcgacgtgctgcatgcgcagggtttccacgcgctcgcgctgcacggcgagctcgagcagcgcgagcgcgaccaggtgctgatccggttcgcgaaccgcagttgctcggtgctcgtcgcgaccgacgtcgccgcgcgcggcctcgacatcgcgcagctcgaggcggtgatcaacgtcgacgtgacgcccgacccggaagtgtacgtgcaccgcatcggccgcacgggccgcgccgaccaggacggctgggcgctgagcctcgcgagcatgaacgagatgggccgcgtgggcggcatcgagcaggcgctcgcgcgcgaagtcaaatggcatccgctcgccgaattgaaggccggcggcgacgcgccgctgctgccgccgatggagacgctgcagattctcggcggccgcaaggacaagattcgccccggcgacgtgctgggcgcgctgacgggcgacgcgggcttcagcggcgcgcagatcggcaagatcaacgtgaccgagttctcgacctatgtggcggtggaacgcggcatcgcgcgcgacgcgctgcgcaagctcaacgcgggcaagatcaagggcaagcgggtgaaggtgcggctgatggacgaa

SEQ ID NO: 14057 - DNA, 2367 bp, Burkholderia mallei
atgagcactacaccatcgtccgcctcttcggaggccggacacgccgaggccaccgcatcgtcgcacgcgcgtcaatatatcgacgcggttctcgaacaatcgtttcgccatctgttcgggccgaccgcgacaccggagcagccccgcaagcacggcgtcgtttccatcgcgaaactgacggccgcgcttgccgattacctcggcgccgaggaaatcaaagaggtcaaggcggcgttccacttcagcgacgaagcccacctcggtcaatatcgccagagcggcgaaccctacatcacccatcccgtcgccgtcgcggagatctgcgccggctggaagctcgatgcgcaggcgatcatggcggcgctgctgcacgacgtgatggaagaccagggcgtgacgaagagcgagctcgccgagcgcttcggcccgaaggtcgccgagctcgtcgacggcctgtcgaaactcgacaagatggagttcaggagccgcgaggaagcgcaggcggagaacttccgcaagatgctgctcgcgatggcgcgcgacgtgcgcgtgatcctcgtgaagctcgccgatcgcctgcacaacatgcgcacgctcggcgcggtgccgatggagaagcgccgccgcgtcgcgcgcgagacgctcgacatctatgcgccgatcgcgcaccgcctcggcctgaacaatacgtatcgcgagctgcaggacatgagcttcgcgaacttcaatccgcatcgctatgcgacgctcgaaaaggcggtgaaggccgcgcgcggcaatcgccgcgaagtgatcggcaagatcctcgaatcggtgcagcgcgcgatggcggatgcgaagatcgacgcggaaatcaccggccgcgagaagacgatctacagcatctacaagaagatgcgcgacaagcagttgtcgttctcgcaggtgctcgacgtgtacggcttccggatcgtcgtcgaacatccgctcgactgctacacgtgcatcggcgtgctgcatgcgctttacaagcccgtgccgggcaagttcaaggactacatcgcgatcccgaaggtcaacggctatcagtcgctgcacacgacgctcgtcggcccgttcggcgcgccgatcgagttccaggtgcgcacgcgcaagatgcacgagatcgcggaagcgggcgttgccgcgcactggctgtacaagaacggcggcgcggatctgaacgacgtgcaaaagcgtgcgcatcaatggctcaagtcgctcctcgacatccagagcgaggcgggcgattcaagcgaattcctcgagcacgtgaagatcgacctgttcccggacgcggtctacgtgttcacgccgaagtcgaagatcatggcgctgccgcgcggcgcgaccgcgctcgacttcgcgtattcgatccatagcgatctcggcaatcagtgcgtcgccgtgaagatcaacaacgagctattgccgttgcgcaccgaattgaagagcggcgatatcgtcgaggtgatcaccgcgccgtactcgaagccgaatcccgcatggctcggcttcgtgcgcaccggcaaggcgcgttcggcgatccggcattatctgaagacgatgcgcctgaacgaatcggtgcaactgggcgagcggctcgtcgatcagagcctgaagggctatgggctcgcgctggccgacgtcacgcccgaggtctgggaaaagctcgtgcagtggacgggcaacaagagccgtcaggagatcttcgcggacatcggcctcggtcgccgcgtggccgccgtgatggccaaacgcatcgaggtgctgatgagcgggcgcgacgcggacgacgatctgccgcgcgcggagcgtcatgcggccaaccatgcgccgccggtggtcatcaccggcacggaagggatgtcggtgcaactgtccgcgtgctgccggccgattccgggcgacgacatcatgggctacatcggcatcgggctcgggatggcgatccacacgaccgcctgccgcgtcgcgcagcgcatccaccggcgcgatcctggccgctggatcgacgtcgcctgggcgccgcagccgggccgcctgttcgacgtcgcggtgaaggcgctcgtgaagaacacgaagggcatcttcgcgcgcgtcgcggccgatatcacgtcggcggacgcgaacatcgtccatatcgcgatggacgaggatctgacgcacgaatcgacggtgctgcgcttcgtgattcaggtgagcgaccgcgtgcacctcgcgaacgtgatgcgccgcgtgcgcacgaatccggacgtgatgcggatcatgcgcgagcgctcgaacgacgatgtcgtgcatgcgcgccacgatggcggaatgcggatcgatcgcgagcggcaggattac

SEQ ID NO: 14058 - DNA, 279 bp, Burkholderia mallei
atgctcgcggccagcggcagttcgggagcgggtggcgccggtgccgccggcgctgacggcgacggtcacaacggcggctacggtgccgccggcgccggttacgacggcggccgggacatggagcacggcgccggtgccggccgcgcgtcgggtggcggcggcgcgggtgcgcgcagcggcggcggcggcggcggcggtggcggcggcggtggcggcgcgagccggccgagcgccccggcgggcggcgggttcgacgagatggacgacgatattccgttc

SEQ ID NO: 14059 - DNA, 891 bp, Burkholderia mallei
atgaattttgcgttgatccttttcgtgctcgtcgtcgtgacgggcattgcgtgggtgttggacaagctggttttcctgccgcggcggaagaaggcggcggatacggcggtcgccgagttcgaccgccagcaggaacgggtcggcgagcgcttcgccgacgagaacgcgccgcagacgcgcgcgcgcctgcgtgacgagaagctgcgtcagccgtggtggctcgagtacacggcgagcttctttccggtgattctcgtcgtgttcgtcgtgcgctcgttcgtggtcgagccgttcaagattccgtcgggctcgatggtgccgacgctgctcgtcggcgatttcatccttgtcaacaagttcgattacggcctgcgcctgccgatcacgaatcagaagatcaccgccggccgtccgctcgagcgcggcgacgtcgtcgtgttccgctatccgaaggacgaatcggtcgactacatcaagcgcgtgatcggcctgccgggcgatacggtcgcgtatcaggacaagaagctgacgatcaacggtcagcccgtgcccgaggcgccgctgcccgattacttcgacgaagagcggatgaactatgcgaagcagttcgaagaaacgctcggcacgcgcaagaacgcgatcctgaacaatccgtcggtgccgccgttcgtgatgggggcggacgattatccctatcgcaacaattgccagtacgacagccgcggcgtcgtctgcaaggtgccgcccggccattacttcatgatgggcgacaaccgcgacaacagcgcggacagccgttactggggcttcgtgccggacaagaacatcgtcggccgcgcgttcttcatctggatgaacttcagcgacctcaaacgcatcggctcgttcaac

SEQ ID NO: 14060 - DNA, 786 bp, Burkholderia mallei
ttgtcggccgtctgccggccgtgtgcggcgacgccgcccgccggccgcgccgcccgtccatcgcaaggaatcccgatcatgtcagcttcatcgccttcgcgtgcgcggccgggcgcacgcccgcacgacggcgcgcccgcgcccgtgcgcgacgcgtgtccggcaccgcgccgggacgcgtcagcgccggagaatctcttctggcacgccgggcgcgtcgccgccgacgcgcgctcgacccagttcggccgcccgccgctcacgctgtggctcaccggcctgagcggcgcgggcaagtcgacgctcgcgggcgaactggagcggttgctgctgcgcgatcgatggccgtgcgcggtgctcgacggcgataacctgcgccaccggttgaaccgcgatctcggcttcggcgcggaagatcgccacgagaacatccggcgcaccgccgaggtcgcgcggctgatgaacggcgtcgggctcgtcgtcatcgcttcgctgatctcgccgtttcgcgacgatcgcgcgatggcgcgcgagatcgtgggcagcgactggttcagcgaggtttacgtgagcacgccgctcgacgaatgcgagcggcgcgatccgaaagggctgtatcgcaaggcgcgcggcggcctgctgccgaacttcaccggcgtgtccgcgccgtacgaaccgccggtatccgccgatctcgcgatcgacaccacgcggctgtcggtcgccgccgctgcggcgatgttgcgcgcgcacctgatcgcgcgctgcgcgggccgccatgtcgat

SEQ ID NO: 14061 - DNA, 1101 bp, Burkholderia mallei
atgcaactggtcaagaccgaacgagacaccctccttaggccgctgcaaaccgtgagcggtatcgtcgaacgccgccacacgttgccgatcctcgccaatctgttgatcacgaagaacggcccggacgtgtcgttcctgtcgaccgacctcgagctccagatcacgacgcgcgccgatttcggcgtcggcggcgatcaggtcgcgacgaccgtcgcggcccgcaagctgctcgacatcctgcgcgcgatgcccgacggccaggtcacgctgtcgctcgccgacaagcgcctgacggtccagtccggcaagagccgcttcgcactgcaaacgctcgcggccgacgagttcccgaccgtcgcgcaatcgaaggatttcggcgcaagcctcgccgttccgcagaaggcgttccgccagttgctcggcatggtgtacttcgcgatggcgcagcaggacatccgctactacctgaacgggatgctgctcgtcgtggacggcgaccgcctgatggcggtggcgaccgacggccaccgcctcgcgttctcgtcgatgaagatcgaaggctcgttcggccgccaggaagtgatcgtgccgcgcaagacgattctcgagctgcagcgcctgctcgaggacatcgacgacacggtcaagatcgacatcgcgcagactcaggcgaagttcacgttcggccaggtcgagctggtgtcgaagctcgtcgagggcaagttcccggacttccagcgcgtgattccgaaggcgcacaagaacacgttcgagatcggccgcgaagagttgcagcgctcgctgcagcgcgcggcgatcctcacgtccgacaagttcaagggcgtacgctgcatcatcgcgcccggccagttgaagatcatgtcgacgaacgccgatcaggaagaggcgcaggaagaactggaaatcgcctaccagggcgacaccgtcgacatcggcttcaacgtcacgtatctgctcgacgtgctcgcgaacctgaaagtcgacaccgttcaggtgagcctcggcgacgcgagctcgagcgccctcatcaccgtgcccgagaacgacgaattcaagtacgtggtgatgccgatgcgcatc

SEQ ID NO: 14062 - DNA, 486 bp, Burkholderia mallei
atgcatggcgaaatgccgcggtgcggactcgagacattcgcgtcgtcctgtcggttcggtatcgactatacggacgtcacccgccggcaatctgaacaattgtcaccggccggcgcacatggcgcccgtcacgacattcgattcgttgcacgaagcatccggcgatcgcttgacgaagtgcttgacgaagtgcttgacgaagtgcttgacgaagtgctcgtcgaagcgcgcgatgtggttcgcgatagcgatgacgacagcgatagcgatggcgatggcaacagccatcacgacagcgacagcgacagcgacagcgacagcgaatcatggcatcgcatccgtgcgtgccaacccgcgcgtcacgccgtcgatcagcgcttgcgcgcgcggcattcgacgcgcgccgtcgcgcagttccgatcgcggctcgcggcagccgccggcgaccggtcgactggccgctcggcgcatgcacgcatcggcgca

SEQ ID NO: 14063 - DNA, 939 bp, Burkholderia mallei
atgggaaacgaattccagcatcgcacggtgctgttggatgaagcggtcgatgcgctcgtgacgcggcccgacggcgtgtatgtcgacggcacgttcgggcgcggcggccatagccgcgcggtgctcgcgcgcctgggcgacgcgggacggctgatcgcgttcgacaaggatccgcgcgcgatcgagacggccgagagcatcgaggatgcgcggttcgagatcgtccatgacagtttcgcggcgatgaagggcgcactcgatgcgcgcggagtagggcgggtgtcgggcgtgctgctggatctgggcgtgtcttcgccgcaggtggacgatccggcgcgcggcttcagtttccgcgcgaacggtccgctcgacatgcggatggacccgacgcgtggcgaatcggcggccgagtggctcgcacgggcgtcggtgcaggaattgacggaggtgatacgagattatggggaagaacggtttgcttttcagattgcaaaggcgattgttgctcgccgggcagagtccgaccgtctcgggcctctcgacagcacgggcgagcttgcccaaatcgtgggtcacgtcgtcaagacccgtgagaagggtaaggatccggcaacccgcacctttcaggctatacggattcacgtcaatcaagagcttgcggacctgcaagtcgttctagaggcagcactgtcgttgttggagcaagggggccggctggtggtcatcagctttcattcgctcgaggaccggatcgtcaagcgattcctgcaggcgcacgcaagcgcgcctgcggtcgaccgccgcctgccgattcgcgcggccgacctgccccgcccgccgctcaagctgctcggccggatgttcccgaacgatgcggaagtcgcggccaatccgcgtgcccgttcggcggtgatgcgcatcgcggagcgcgtcgcgcca

SEQ ID NO: 14064 - DNA, 1080 bp, Burkholderia mallei
atgaagacgagcatgcaaagcaagctcgaccagctcacaacccggctggccgaactgaacgacctgttgagccgcgagaacgtcaccgcggacctcgaccagtatcgcaagctgacgcgcgagcacgcggagatcggccccgtcgtcgagcactacgcgcagtggcgccaggcgcgcgccgacgaactcgccgcgcaggaactgctcgccgacgcctcgatgcgcgatttcgccgaggacgagctgcgcggcgcgcgcgaccggatgggccgcctcgcggccgagctgcagacgatgctgctgccgaaggacccgaacgacgagcgcaacatcttcgtcgaaatccgcgcgggcacgggcggcgacgaatcggcactgttcgcgggcaacctgctgcggatgtacctgcgctacgcggagcggcagcgctggcaggtcgagatgatgtcggagagcccgtcggatctcggcggctacaaggaagtgatcgtgcggatcgcgggctacggcgcgtactcgcgcctgaagttcgaatcgggcggccaccgcgtgcagcgcgtgcccgcgaccgagacgcagggccgcatccatacgtccgcgtgcacggttgcggtgatgcccgaggccgacgagatcggcgaagtcgagatcaatccggccgatttgcggatcgacacgttccgcgcgtcgggcgcgggcggccagcacatcaacaagaccgattcggcggtgcgcgtcacgcacatcccgacgggaatcgtcgtcgagtgccaggacgaccgctcgcagcacaagaacaaggatcgcgcgctgaaggtgctcgccgcgcggatcaaggacaagcagtatcacgagcagcacgcgaaggaggcagccacgcgcaagagcctgatcggctcgggcgaccgctccgagcggatccgcacgtacaacttcccgcagggccggatgaccgatcaccggatcaacctgacgctgtacaagctcgagcagatcatggacggcgatctcgacgagctgatcgccgcgctcgtgagcgagcaccaggccgagctgctcgcctcgctcggcgacgccgaa

SEQ ID NO: 14065 - DNA, 513 bp, Burkholderia mallei
atgacgcaacgcgacgtgaacatagacgacatcgaggcgcaggaaatggcggcggcgctgctggacgcggtccagaacggcgcgacgctgaaggacctgcatcaggtgccgcaggacctgatggacggcatctatgcgttcgcgtaccgcttctaccagcaggggcggctcgacgacgcggaggtgttcttccgctttctgtgcatctacgacttctacaacgccgaatacgcgatggggctcgcggcggtgtgccagttgaagaaggagtacgcgcgggcgatcgatctgtatgcactcgcgtattcgctgtcgaaggacgaccaccggccgatgttccacaccggccaatgccatctgctgatgggcaaggcggcgctcgcgcggcgctgcttcggcatcgtcgtcgagcgctcgcgcgacgagcgcctcgcgcagaaggcgcagtcctatctcgacgggctcgacgaagtgggcgccgacgcggcgcccgcatccgccgggaacgaccac

SEQ ID NO: 14066 - DNA, 537 bp, Burkholderia mallei
atgaaatcagcctctcgcttggcagcctgggcggcgtatgccgcattcgccggctattccgccgtcgcggcggcggcgagcgcgtcgacgcccgccgcgggcgccgatgccgcgtcgtcgccgaagccggccgtggaagacatcaagatgttcccggccgcccaggcggggcagaagcgcgaggtcatcgtgctgcccgccgaaaagctggaagaagacattcgcgtcgaactcgtcgtcggcaggacgatcaaggtcgattgcaatcagcactggttcggcggcgatctcaagcatgaaacggtgcagggctggggctatccgtactacgtgctcgccgacgcgaaggggccggccgccacgctgatggcctgcccgggccaggaatcgcagcaggcgttcgtgccggtgcgcggcagcggctacctgttgcgctacaacagccgcctgccgatcgtcgtgtacgtgccgaaggagttcgaggttcgctaccggttgtggtacgggtcgaacgaagtggcgcgcgcggtcgagaag

SEQ ID NO: 14067 - DNA, 405 bp, Burkholderia mallei
atgaacttcaagatttcgaccgaacccggcgcgcggctgcgcatcgacaaatggctctgggccgcgcgcttcttcaagacccgctcgctcgcggccgatgccgtcgagaaaggccgggtgaggattggcggcgcggccgtcaagccggcgaaggaagtgcgcgtcggcgaccgggtcgacgtgacgatcgagcgcgtcgtgtgggagatcgacgtgctcggcgtgtgcgacgtgcgcgggccggcgagcgtcgcgcagacgctctacgcggaaacggaggcagggcgggcgaagcggctggcggaactcgagcggcgccggcattttcgggagccgtcggccgagctgcacgggcggccgacgaagcgggaccgccggatcatcgacagattttcgaatgggagc

SEQ ID NO: 14068 - DNA, 2157 bp, Burkholderia mallei
gtggcccgagcggggctcgcggcggcgggcgcgcaagaggcagacggcgcggccgtccggtcatgcatgttcatgattcgctccgcgtacgtcggaagtcgcataggtcatcaccgtgttcggctcgatcgcctcgccttcgagcatcgcctcgatacggccctgccggaacaccgcgacgcgatcgcacaggccgacgatctccggcaactcgctcgagatcagcacgatcgaatagccgcgcgcgctcagctcgcgcatcagttgatagatttccgccttcgcgccgatgtcgatgccgcgcgtcggctcgtcgaagatcaggatccgcgtgtgatggttgagccagcgcgcgatcacgaccttctgctgattgccgcccgagagcgtgtcgacgcgcgtgtgcggcgtcggcgccttcacgccgagccgctgcatcagctcgagcgtcgtgcgcgtctcggccgccgcgtcgacgaaccagcgcagccggcggtgcttgccgaggttgttgatcgcgatgttgtgccggatcgagaacgcggggatgagcccctgcgtcttgcggctctccggcaggaggccgatgcccgcggcgagcgcggcggcgggatcggcgaggcgcaccgggcggccgcgcacgcgcattcgccgcacgcgcgcgggcttcgcgccgatcagcgcgagcgcgctcgacgtgcgcccggagccgacgaggcccgcgaagccgagaatctcgccctcgcgcagcgcgaagcggttcacggggccgttctcgcgcacctgcagcgcgtccacctcgagcacgggcgcggcgtcgcgcgcaagacgcggcttcggcggaaagctctgctcgatgcgccggcccaccatcatctcgacgagcgcgccgacatcggtgcgcgcgacctcggtcgtgccgacgtattgcccgtcgcgcagcacggtgatccgatcgcacacctcgaagatctcgtcgaggtggtgcgagatgaagatcatcgcgacgccccggcgcttgagctcgcgcatcacgccgaacaggtgcgcggcttcggcgggcgtgagcgtcgcggtcggctcgtcgaggatcagcagccgcgcgtcgagcgacagcgccttgccgatctcgacgaactgctgctgcgcgaccgacagctcgcgcaccggcgccgacagatcgatcgcgacgtcgagccgcgcgaagatgtccgccgccgcgcggcgcatccgcgcgcgctcgcgcagcccgagccggccgcgccactcgcggccgaggaacagattgtcgaccgcgttcagctccggaatcaggctgaactcctgaaacacgatgccgacgcccgccgcgatcgcgtcgtgatggttcgcgaagcgccgcggctcgccgtcgagcgcgatcacgccctcgtccggcgggtggatcccgcagaggatcttcatcagcgtcgacttgcccgcgccgttctcgccgagcagcgcgtgaatctcgccgcgcgcgacgcgcagatcgattccgcgcagcgcgacgacgccgggaaaccgcttcgtgatgccggtgagcgccagtatcgtgtccatcgcctcctcgctcgcttcgtcaggcgcgcgcgccgcgccgctcgcttcgtccatgtcgtcggcctcgtcgcgcgggccgctcaccaactgaacgtcttcgcgttgcccttgtcgatccgcttcacgtcgaccggaatcgccttcggcacattggcgccccacttcttcgcgagcccgatgccgatcgcgaggcgaatctggtcgcgcgggaactgcgcggacgtctcgatgaacttcgagttcggcttctgcatcgccgcgatcgcctccggcgcgccgtcgacgctcgtgagcttgatgtcgcggcccgacgcctcgatcgcggacagcgcgcccatcgagccgccgtcgttgacgctgaagatgcccttgagcaacgggtgcgcctggatcatgttctcggtgacggcgagcgcgctcgcgcgctcctgcctgccgttctgcacgtcgacgatcctcacgttcgggaatttcgcgagcgccgcgcggcagccgcgcacgcgctcgagaatcggcacgaccgggatgccgtcgaggatcgcgacttcgccgccgccgccgatcgccttcgcgagg

SEQ ID NO: 14069 - DNA, 385 bp, Burkholderia mallei; identical to SEQ ID NO: 13922

SEQ ID NO: 14070 - DNA, 825 bp, Burkholderia mallei
atgtcgcaacaacttcagcaaatcatcgataacgcctgggaaaaccgcgccgagctgtcgccgaaggccgcctccgcggaaattcgcgaagccgtcgcgcatgcgatcgagcagctcgaccgcggcgcgctgcgcgtcgccgagaagatcgacggcgcatggaccgtgcaccagtggctgaagaaggccgtgctgctgtcgtttcgcctcgaggacaacgcgccgatgccggcgggcggctactcgcagttctacgacaaggtgccgtcgaagttcgcgaactacaccgccgaagacttcgcggcgggcggctttcgcgtcgtgccgcccgcgatcgcgcgccgcggctcgttcatcgcgaagaacgtcgtgctgatgccgtcgtacacgaacatcggcgcgtacgtcgacgaaggcacgatggtcgacacctgggccaccgtcggctcgtgcgcgcagatcggcaagaacgtgcatctgtcgggcggcgtcggcatcggcggcgtgctcgagccgctgcaggcgaaccccgtcatcatcgaggacaactgcttcatcggcgcgcgctcggaggtggtcgagggcgtgatcgtcgaggaaaactcggtgatctcgatgggcgtgtatctcggccagagcacgaagatctacgaccgcgagacaggcgaagtgacgtacggccgcattccggccggctcggtcgtcgtcgcgggcaacctgccggcgaaggacggcacgcacagcctctactgcgcggtgatcgtgaagaaggtcgacgcgaagacccgcgcgaaggtcggcctgaacgaactgctgcgaggcgac

SEQ ID NO: 14071 - DNA, 786 bp, Burkholderia mallei
atgaatcagcagacgtttttcgatcggccgctcggcattctcgccgcgctgccggaggagctgggcgacctcgtcgcggcgatgcgcgacgacgggcccgtcgacacggtcacgctcggccggcgcgattaccacgtcggcgtcgcgcacggcgtgcgctgcgtcgtcacgctcgcgcgggtcggcaaggtcgcggcggccgcgacggcgagcgcgctcatccatcgcttcgacgtgcgcgcgatcgtgttcacgggcgtcgcgggcggcgtcgcgagcgacgtgagcgtcggcgacgtcgtcgtcgccgatgcgctgctgcagcacgatctcgacgcgtcgccgctctttccgcgcttcgaggtgccgctgctcgggctcacgcgcttcgccgccgacgcggcgctcgccgcgcagctgaaggcggcctgcgcgcgcttcgtcgacgacgagggcgagacgctgaacgcgcgtttccggctgcacggcgcgcgcgtgcacgcagggctcatcgtcagcggcgaccgcttcgtgtcgagcgagcgcgaggtgagcgcgctgcgcgacgcgctgccggacgcgctcgcggtggagatggaaggcgcggcgctcgcgcaggtgtgccatgagtacggcgtgccgtgcgcgatcgttcgcacgatctcggataccgccgacgatcacgcgagcacgtcgttcacgacatttctcaccgacatcgcgggcgcctattcgtcgggcatcctgaagcggtttctggccgcgcacgcgcgggcgaacgcggct

SEQ ID NO: 14072 - DNA, 549 bp, Burkholderia mallei
atgcttgtcgagattcggatggcgttcgcgccagttgatctcgggcatccggaaatcgaggtagccgagcgtgcacccgagcgcgatgtcggcgagcgtgtagtggttgccgacgcaccacgtcttgccggcgaggccctgcgacatcgcgacgaggccgtcgtcgaccttgcgctgctggcgcgcgatccacgcatcgctgcgatgctgcggctcgcgctgcgtgtgctcgatgcgaatcgcgaccgccgcgtcgagcacgccgtcgccgagcgcctcccagcaccgcacctcgacgcgctcgcgccccgacggcggaatcagcttgccgacgggcgaaagcgtgtcgacgtattcgcagatcacgcgcgaatcgaacacggccgcgccgtcctccatcacgaggcacggcaccttgccgatcggattcgacgcatggatgttcgtgtccggcgcccagacgttttcgagctccagcttgtagtcgatcttcttttcagcgagcacgatccgcgccttgcggacgaacgggctgctgagcgaaccgat

SEQ ID NO: 14073 - DNA, 1218 bp, Burkholderia mallei
ttgcagccggtagccggcgaacgcgagcatgcccgacagcagcacgaagagcgcggccggaaagccgggcaccgccgcgaagccgatcagcagcaccgcggcgaaatacagcgcgcgatggctgccgcccagttgcctggcgatctccgagccgagcgacgtgccgtcgccgtcgtcgtgatcgtcggcgacgcgcgtgatcatcacgccggccgcgaccgagatcagcagcgacggaatctgcgacaccatcgcatcgccgaccgacaggatcgagaagcggttcgcggcgtcccccgccgtcatcccgtggtacatcacgccgatcgcgatgcccgcgacgatgttcacgagcgtgatgatgagcccggcgatcgcgtcgcccttgacgaacttcatcgcgccgtccatcccgccgtgcaactggctttccttggcgagcgtcgcgcgcttgcggcgcgcctcgtccggcgtcaggatgttcgcgcgcagatccgcgtcgatgctcatctgcttgcccggcatcgcgtcgagcgtgaagcgcgcgccgacttcggccacgcgctccgagcccttcgcgatcacgatgaactgcacgatcgtgatgatcaggaacacgacgaggccgacgacgagattgccgccgacgacgagctcgccgaagctctcgatgatgtcgcccgcgttcgcgtgcagcaggatcgatttcgtcgacgcgatgttcagcgacagccggtacagcgtcgtgaacagcaggatcgacgggaacaccgacagcgacacgatgctgccgacgtacatcgtcaccatcagcagcgtgacgctgatcgcgatgttcacgccgagcagcacgtcgatcacctcgggcggcagcggcaggatcatcagcgagacgatcgcgacgacgagcaccgtgatgccgacctcgccgccggcgggaagtttgagggatttcagcgtcatgacgacctcgcggaggaaacggcggcgaccgcgcgcgcgcccgagagggactcgacccagcgcaggatcgcggccaccgtctcgaacagctcttcgggaatcgacgcgtcgcgctcgacgcggtacagcgcgcgcgcgacgctcggattgccgacgatcggcacgccgagcgcgtgcgcgtggcggcgcagcgcgagcgcgccgtcgtcgacggccttctcgatgacccgcggcagcggatgctcgtggggcgca

SEQ ID NO: 14074 - DNA, 594 bp, Burkholderia mallei
atgcaaaacttcaatctcgccgtcttctccgcgctcaatgcgggttccacgccgcctctcggcgccgttcgcttcggcgtgttcgccgccgactggctcgtctatgcggtgcccgcactgctgctgctgacctgggtgatgggcgcgcgcccgacgcgccgccaggcgatcgaagcgggcgtcggcgcgtgcgtcgcgctcgcgctcgcgcaggtgatcggccacttctggtattcgccgcgcccgttcgtgctcggcatcggcacgcaactgattccgcacgcgccggacggctcgttcccgagtgatcacacgacgttcgtctgcagcgtggcggcgggcctgctgatcgcgcgcgcgacgcgcacggcgggcgccgcgctcgccgtcatcgcggcggtgatcgggtgggggcgcgtgtatgtcggcgtgcattggccgctcgatatcgtgggcggcgcgctcgtcggcaccgccggcgcgctcgccgcgcatctgtacggccgcccggtgacggcgctgctcgaccgggtcggcgaatcggtgcacgcggtcgcgttcacgcgattgcacgagcggccgatccgcatcgac

SEQ ID NO: 14075 - DNA, 471 bp, Burkholderia mallei
atggcaggcattctcatcatcgcgcatgcgccgctcgctaccgctttgcgggactgcatcgcgcacatctacggcgggttgcccgcgcggatcggctgcatcgacgtgcaggccgagaacgatccggcccaggtgatggcgttcgcgcacgcggagctcgcgcgcctgaaggaagaaaacggcgcgctcgtgctgaccgacatgtacggcgcgacgcccgcgaacatcgcggggcagctcgcgaaggtcgagggcgtgcgggtgctcgcaggcgtcaatctgccgatgctcgtgcgcgccgtctgctaccggaccacgccgctcgatacgctcgtcgacaaggcgctcgccggctcgacgaagggcattcacgagatcgcggcgggcacgccgccgccgcgcccgagcgcgctcggctgcggcgagtgcgcgccgattccgccggagccgaaggcgcagacgcagccgcat

SEQ ID NO: 14076 - DNA, 1554 bp, Burkholderia mallei
atgacgttctggaatctgtatttcattctgaagctctatctgttcgcggcgggccacttgaagccgttgtggatcgcgaatctcggtttcgcgctggcgctcgcgctgagcgcgccggcgaggcggcgcagcgtgcggctgctgcgccacgcgcttgcgctggcgctcgcggtgccgctgatgtatcgcgaagcggacgtgccgccactcgcgcggctcgtcgaaacgctcggcggcctgcgcgcgttcagcgccggctactggatggagctcgtgccgcgcttcgtgccgccgatgctcgcattggccgcgctcggcgtcgtgatcggctatctgatcgtcaatcgctggctgcgcgtggcgacgttcgtgctgctcgcgctgatcgcgctgccggtgtggcaggcgggcagcgcggcgctcgcgcggctcgacgcggctgccgcggccgtgcccgggccggccggaacgggccgcgccgtgcagccgcaggatcacaacgcggcgctcgccgcgttccgctcgcaggaatcgcagcggcaggtgacgttcggccggccgagcgccgatccggcgacgcagttcgacgtgatcgtgctgcatgtgtgctcgctgtcgtgggacgacctcgacgtcgcgaggctgcgcaatcatccgctgctcggccatttcgactatctgttcacgaatttcagcacggcggcgagctacagcggcccggccgcgatccgcgtgctgcgcgcgagctgcgggcaggaggcgcacgcggacctgtacaagcccgcgcccgcgcagtgccatctgttcgggcaactcgcggccgccggcttcgcgccgcagacgctgctcaaccacgacggccacttcgacaactttctccagttgatccgcgagaacatcggcgtgccgaacgcgccgatgatcccgaacgcggacgcgcccgtcgcgatgcacgcgttcgacggctcggcgatcaaggacgactacgcgacgctcgcgaactggtacgcgaaacgcggcgcgagccccggccccgtcgcgctgtactacaacacgatcagcctgcacgacggcaatcagctgacgggcggccggatgtcgagcctcgattcgtacccgctgcgcgcgcgcaagctgctggacgacttcgaccgcttcgcggatctcattgccgcatcggggcggcgcgcggtgatcgtgttcgtgcccgagcacggcgcggcgctgcgcggcgacgcgaaacaggtggcggggctgcgcgagattccgacgccgcggatcgtgcacgggccggtcggcgtgcggctcgtcggcttcaagggcgaccacggcgcgaccaccgtgatcgacgcgccggcgagcttcttcgcgctcgcgcaactgctggcgaatctcgtgtcgaacagcccgttcaagccgggcgtgacgctgtcgcaatacgcggccgatctgccgcagacgcgaatgatcggcgagaacgagggcacggtgacgatgacgacgccgacgggctacgcggtgaagacgccggacggcgtatggatcgacgaaaaa

SEQ ID NO: 14077 - DNA, 1188 bp, Burkholderia mallei
atggatctgacccaagtttcgtcttcccgcgcgccgcgcgcttccggcgcggccgcgccgctgctcttcgacgagcggccgttcctgcggcggctgtccctcgtcgactggctgttcgccctggcgctcgtggcgggcgcgggcttcgcgctcgcgcggtaccacgcgcacatggactattacgacacggccgtgctgatcggcaccgtgcccgcgctcgtcgtgctcggctggcgctggaagcccgcgcggctcttgatggcggcgatcgccgcgctctcgctcgtgtcgctgcagctctatcacggcgacctcgcgcgcgccgattcggcgttcctgcttaagtacttcctgtcgagccaatcggcgatcctatggatgagcgcgctgttcgtgctcgcgacccttttctactggatcggcatgctgtcgcgctcggagacgggcggcgcgatcggccagcggctcacgtggatcgcggtgctgatgggtttcacgggcctgatggtgcgctggtacgagtcatacctgatcggcgcggacgtcggccacattccggtgtcgaacctgtatgaagtcttcgtgctgttcagcctcatcaccgcgcttctctatctgtattacgaagggcattacggcacgcgcgcgctcggcgcgttcgtgctgctcgtgatcagcgcggcggtcggcttcctgatgtggtactcgatcgcacgcgacgcgcagcagatccagccgctcgtgcccgcgctgcagagctggtggatgaagatccacgtgccggcgaacttcatcggctacggcagcttcgcgctgtccgcgatggtcgcggttgcgtatctgtcgaaggagcgcggcgtactcgccgatcgcctgccggcgctcgaggtgctcgacgacgtgatgtacaaatcgatcgcggtcggcttcgcattcttcacgatcgcgacgatcctcggcgcgctgtgggcggccgaggcgtggggcggctactggagctgggacccgaaggaaacctgggcgctcatcgtgtggctgaattatgcggcgtggctgcacatgcgtctgatgaaagggctgcgcggcacggtcgccgcatggtgggcgctgacgggcctgctcgtcacgacgttcgcattcctcggcgtcaacatgttcctgtccggcttgcacagttacggcaagctg

SEQ ID NO: 14078 - DNA, 1488 bp, Burkholderia mallei
atgcacgcaaaaagcctgaccgaactgcgcgccgcgctcgacgccaaggaatgctcggccgtcgagctggcgcagcactatctgaaacggatcgacgccgcgcgcgatctgaacgcgttcgtccacgtcgacgccgagctcacgctcgcgcaggcgaaggccgccgacgccgcgctcgccaacggcgaggcggggccgctcgccggcctgccgatcgtgcacaaggacgtgttcgtcacgcgcggctggcgctccaccgccggctcgaagatgctcgcgaactacgcgagcccgttcgacgcgaccgtcgtcgcccgcctgtcggcggccggcatggtcacgctcggcaagaccaacatggacgagttcgcgatgggttcgtcgaacgagaactccgcgttcggcccggtgaagaacccgtgggacacgagcgcggtgccgggcggcagctcgggcggcagctccgcggccgtcgccgcgcgcctcgcgcccgccgcgacgggcaccgacacgggcggctcgatccgccagccggcgtcgttcgccggcgtgaccggcatcaagccgacctacgggcgcgtgtcgcgctacgggatgatcgcgttcgcgtcgtcgctcgaccagggcggcccgatggcgcggagcgcggccgattgcgcgctcctgctgaacgcgatggcgggcttcgacgagcgcgattcgacgagcctcgagcgcgccgacgaagactacacgcgccacctcggcaaggcctgggcggccggcggcgacgcgggcaagccgctcgcgggcctgcgcatcggcctgccggccgaatatttcggcgcgggcctcgccgacgacgtgcgcgcggcgatcgacgcggcgctgaagacctacgaggcgctcggcgcgacgctcgtgccggtgtcgctgccgaagacggagctgtcgattcccgtctactatgtgatcgcgcccgccgaggcgtcgtcgaacctgtcgcgcttcgacggcgtgcgctacggccaccgtgcggccgaataccgcgatctgctcgacatgtacaagaagtcgcgcgccgagggcttcgggcccgaggtgaagcgccggattctcgtcggcacgtacgtgctgtcgcacggctactacgacgcctactacctgcaggcgcagaagatccgccggatcatcgcgcaggatttccaggaagcgttcaaatcctgcgacgtgatcatgggcccggcgtcgcccaccgtcgcgtgggacatcggcgcgaagggcgacgatcccgtccagatgtatctggcggatatctatacgctgtcggtgagcctcgcgggcttgcccggcatgagcgtgccgtgcggcttcggcgcgggcgcgaacgcgaagcgcccggtcgggctgcagatcatcggcaactatttcgacgaagcccggatgctgcaggtcgccgacgcgttccagcgcgcgaccgactggcacgtacaagaaccggcaggagtg

SEQ ID NO: 14079 - DNA, 3231 bp, Burkholderia mallei
atgtttgagcgcctgatccgcttcgcgatcgcgcaccgctggctcgtgatgctcgcgatcgtcgcggccgcgtcgctcggcgtctacagttaccagaagctgccgatcgacgcggtgcccgacatcacgaacgtgcaggtgcaggtcaacacgtccgcgcccggctattcgccgctcgaggccgagcagcggatcacgtatccggtcgagaccgcgatggccggcctgccgaacctcgagcagacgcgctcgatctcgcgctacgggctgtcgcaggtcaccgtgatcttcaaggacggcaccgacatctatttcgcgcgccagctcgtcaacgagcggatccaggaagcgaaggacaagctgccgcccgggatcgcgcccgcgatggggccgacctcgacgggcctgggcgagatctacctgtggacggtcgaggcggatgcgggcgcgcgcaagccggacggcacgcgctacacgagcgccgatctgcgcgagctgcaggactgggtcgtgcgtccgcagttgcgcaacgtgccgggcgtgaccgaggtgaactcgatcggcggctacgtgaaggaataccgcgtcgcgccgaatccgacgaagctgatgtcgtacgggctcacgctcgccgacgtcgtgcgcgcgctcgagcgcaacaacgacaacgtcggcgcgggctacatcgaaaagcgcggcgagcagtatctcgtgcgcgtgccgggccaggcgcgctcggccgaggacatcgcgaacatcgtgctcgtgaacgcgggcggcgtgccggtgcggatgaaggacatcggcgccgtcgatctcggccgcgagctgcgcacgggcgccgcgaccgcgaacggcgaggaagtcgtgctcggcaccgtgttcatgctgatgggcgagaacagccgcacggtcgcgaaggcggtggccgcgaggatggccgacgtgaaccgcacgctgcccgccggcgtgcgcgcgattgccgtgtacgaccgcacggtgctcgtcgagaaggccgtgcggacggtgaagaagaacctgctcgaaggcgcggtgctcgtgatcgcggttctcttcctgttcctcggcaacatccgcgcggcggtgatcaccgcgctcgtgattccgctgtcgatgctgatgaccttcaccggcatggtcaacgcgaaggtcagcgcgaacctgatgagcctcggcgcgctcgatttcggcatcatcgtcgacggcgcggtcgtgatcgtcgagaactgcattcgccggctcgcgcacgcgcagcaggcggcgggccgcccgctcacccgcgacgagcgcttcgccgaagtgttcgccgcgtcgcaggaggcccgccgcgcgctgatcttcgggcaactgatcatcatggtcgtctatctgccgatcttcgcgttgacgggcgtcgaggggaagatgttccatccgatggcgatcaccgtcgtgatggcgctcgcggccgcgatggcgctcaccgtgacgttcattccggccgcggtcgcgctgttcatcggccgccgagtggaggagaaggagaaccggctgatgagcgcggcgaagcggctctacgcgcccgtgctcgatgcgttcgtcgcgcggcccgggcaggtgctcgcgggcgcgacggccgtggtcgcgctctcgctcgtgctggcgacgcggctcggcagcgaattcatcccgagcctgaacgaaggcgacctcgcggtgtccgcgcagcgcattccgggcacgagcctcacgcaatcggtcgcgatgcagcagtcgatcgagaagacgctgaaggcgcgcttcccggagatcgaccgcgtgttcgcgcgcaccggcaccgcggagatcgccgccgatccgatgccgccgaacctgtcggacggctacatcatgctcaagcccgccgaccagtggccggacccgcgcaagtcgcgcgatgcgctgcgtggggaaatcgaggcggtgctcgcgcagttgccgggcaacgcgtacgagttctcgcagccgatccagttgcgctttaacgagctgatctccggcgtgcgcagcgacgtcgcggtcaagatcttcggcgacgacatggcgacgctcaacgcaacgggcgagcagatcgcggccgcgctgcagaaggtgccgggcgcgtccgaggtgaaggtcgagcagaccacgggcctgcccgtgctgaccgtcaacctcgatcgcgacaagctcgcgcgctacggcgtgacggtgggcgacgtgcaggacacggtcgccgcggcggtcggcgggcgcaaggccggcctgctgttccagggcgatcgccgcttcgacatcgtcgtgcggctgcccgacgagctgcgcaccgacgtcgaggcgatcaagcggctgccgatcgcgctacccctggccgcgccggcgggcgcgagcggcccgctcgcgcaggcgccgtacgtgccgctcgccgagctcgcgacggtggacacatcgcccgggccgaaccagatcagccgcgaggacggcaagcgccgcgtcgtcgtcagcgcgaacgtgcgcgggcgcgacgtcggctcgttcgtcgccgacgcgcgcgagcggatcgcctcggacgtccgggtgcccgccggctactggctgtcgtggggcggccagttcgaacagttgcaaagcgcgagcgagcggctgaagatcgtcgtgccgctcgcgctcgcgatggtgttcgtgctgctgttcgtgatgttcaacaacgcgaaggacggcctgctcgtgttcaccggcatcccgttcgcgctcacgggcgacgtcgtgtcgctgtggctgcgcggcattccgctgtcgatcacggccgcggtcggcttcatcgcgctatcgggcgttgcggtgctcaacagcctcgtgatgatctcgttcatccgcaacctgcgcgacgaaggcgcgccgctcgacgccgcggtgcgcgaaggcgcgctcacgcggctgcggccggtgctgatgacggcgctcgtcgcgtcgctcggcttcctgccgatggcgttcgccaccggcacgggcgcggaggtccagcgcccgctcgcgacggtcgtgatcggcggcatcctgtcgtcgaccgcgctgacgctgctcgttttgccggtactctatcgggtggcgcacgccgcgccgccgcgcgccacgctcggcgcacgcgcggccggatggctcgcgaggctcgcgcccgcggccgtgctgcgccggcggcgcgaatcatcgagg

SEQ ID NO: 14080 - DNA, 837 bp, Burkholderia mallei
atgcccacgatgaacgccgatctccactgccattcgaacgtttccgacggtcagctcgcgcccgccgacgtcgcgcgccgcgcgcacgcgggcggcgtcacgctgtgggcgctgaccgatcacgacgaggtcggcggccagcgcgccgcgcgcgaagccgccgaggcgctcggcatgcgctatctgcacggcgtcgagatttccgtgacctgggcgtcgcgcaccgtgcacatcgtcggcctgaacatcgatccgcggaaccccgcgctcgtcgacgggcttcaccgcacccgcaacggccgcgcggcgcgcgcggtcgcgatcggcgacgcgctcgccgcgctcggcatcgaagccgcctacgagggcgcgctcgcctatgtgtcgaatcccgatctgatctcgcgcacgcacttcgcgcgctttctcgtcgacaaaggctacgcggcgtcgatgtccgacgtgttcgaccgctatctcggcgacggcaagccgggctacgtcgcgcaccgctgggcgaagctgtcggacgccgtcgcatggattcggcaggcgggcggcgaagcggtcgtcgcgcatccgggccgctatgcgtatacgagcgtcgagttcgacgcgttcttcggcgagttcatcgagctgggcggcgtcgcgatcgaggtggtgacgggcagccatacacccgaccagtaccgcgaatacgcggacgtcgcgcggcgcttcggcttcgaggcatcgcgcggctccgatttccacgcgccgggagaagggcgtaccgaattcggcagcctgccgccgctgccgtccgatctcaaacccgtctgggagcgctggctg

SEQ ID NO: 14081 - DNA, 2118 bp, Burkholderia mallei
atgacggcgctcgcggttcgcaagcggctgcgtcacggcgggcgcgcgccggaatcctcgccggcgtcgcgcgcggcggcgcccgggcgcgtcggcgcgatcgcgggcgcgctcgtcgcgctgatcgtcgtcacggcggcgatgcggctcgcgcccgagctgcgcgcgtggcttgccgcgccggcgggcggcgacgccgcgcagctcgcgcatatcatgctgttcgatctcgccgcgccgcgcgtcgcggcggcgctcgtcgcgggcggctgcctcgcggccgcgggcgcgctgctgcagtcgctcacgcgcaacccgctcgccgcgccggacctgctcggcatcacgggcggcgcgcagctcgggctgatcgccgcgatgctcgtgcccgcgctcgccggccatgcgtcggtgccgctcctgttcgtctgcgggctcgccgcggccgcgtgcgtgtcggcggcggcgggcggctggcgcgcgacgccgctgcgcctcattctcgcgggcagcgtctgcatgctgctgttctcggcggtcacgacgctgctgctcgcgttcttcgagcagacggtggtcggcgcgtcgctgtgggcgagcggcagcctgtaccagccgggcgcggccgggctgcgcgacgcgctgctgtggctcgtcgcgccgctcgccgcgctgccgctcgtgatccggccgctcgatccgctcgcgctcggcgacgacgccgcggccgcggccggcgtgcgcgtcgacgcgacgcggctcgccggcaccgtcgtcgcggtcggcttcgcgagcgtcgcggtcagcatcgcggggccgctgtcgtacatcggcctgatcgcgccgaacctgatccggcagatgcgcggcgcgaaggcgtcgaggctcggcgcgctcgtgccgctcgccgcgctcgcgggcggcgcgctcgtgctcgtcaccgatagcgccgtgctcgcgctcggcctcgatgcgacgctgtcgacgggcgtcgcgatcgcgttcgtcggcacgccgctgatgctcgcgatgatccgccgcggcgccgcatggtcgggcgccgcgcagcagccggcgcacgtgcgggcgggcacgcgcggcggcgcgcggctcgtgcgcgcgctcgccgtgctgccgtggcccgccgtcgcggtgctgctgctggcggcgggcgccgcggtgctcgtcgtcggcgcgtcgttcggcccggtgtggatcggccccgggcgctggttcgcggcgctcgcgcagcgcgacgacctcgcgcggacggtgctcgatctgcgcgcgccgcggctcttgtgcgcattgctcgcgggcgcgctgctcggcgcgtccggcgtgctgatgcagagcatcgtgcgcaatccgctcgcggggcccgaggtgctcggcgtcacgcagggcgcggggctcgcgacgctcgccacgctcgtcgcgtggccgctcgccgcgcacggcacgctcgtcgccgcctcgctcgcgggcggcggcgcgacgctcgtgctcacgctcgcgctcaaccgccggcatcgctacgcgccgctcgcggtcgcgctgacgggcatcgtgatcggcacgctgtggacgacgctcgcgcaatggctgatcacgcaggagagcgtgcagcccgcgcgcttcgtcgtctggctcgtcggcggcacgtatgggcgcagctggggcgaggcggccgcgctgctgccgtggggcgtgctcgcggtgccggcgctcgcgctgctcgcgcggccgctggatctgctcgcgctcggcgacgaacaggcggccgcgctcggcctgccgatcgccgcgctgcgcccgctcgtgctgacgatcgcgacgctcgccgcctgcgcggccgtggcggcggtcggcccggtcggcttcatcgggctgatggcgccgcatctcgcggcgatgctcggcgcgcgcgcgcacgcgacgcgcctgtggctcgccgccgcgtggggcgcgctcgtgctcgccgccgccgatatcgccgcgcgcacgctgctcgcaccgcgcgagattccggcgggcgtgctgaccgcgctgatcggcgcgccgtacctgctcgcgctgctgatcgccgaagcgcggcgagagcggcgcggcggccga

SEQ ID NO: 14082 - DNA, 1374 bp, Burkholderia mallei
gtgacggtgcggcgcgcgttgcccggaccgaggagaaaaggagagaggtcgatgaaatacaagatgctggttcgttcgctcgcgttcgggggcgcgctttggttcggcgcgcagcaggcggcgtgcgctgccaccgagatccagttctggcatgcgatggaggcggcgctcggcgagcgcgtgaacgagatcgccgcgcagttcaatgcgtcgcaaagcgactacaagatcgtgccggtcttcaaaggcacctacgatcaggcgcttgcggcgggcatcgccgcgtaccgcagcggcaacgcgccggcgatcctgcaggtgtacgaagtgggcacggcgacgatgatgcaggcaaagaaggcggtgctgcccgtatccgacgtgttccgccaggcgggcgtgccgctcgacgagaaggcgttcgtgccgacgatcgcgagctactacagcgatgcgaggacgggccgcctcgtatcgatgccgttcaacagctcgacgcccgtgctgtactacaacaaggacgcgttcaggaaggcggggctcgatccgaaccagccgccgaaaacgtgggccgacgtgaaggccgacgcggaaaagctgaagaaggcgggctacgcgtgcggctacacgacgggctggcagggctggatccagctcgagaactacagcgcgtggcatggcctgccgttcgcgacgcgcaacaacggcttcgacggcgccgatgcgacgctcgagttcaacaagccgcagcagatcgcgcacatccagttcctgcaggacatggcgaaggacggcacgtttacgtacgtcggccgcaaggacgaggcgagcgcgaagttctacagcggcgattgcgcgatcatgacgacgtcgtcgggcgcgctcgcgacgatccacaagtacgcgaagttcgatttcggcaccggaatgatgccgtacgatgcgggcgtgaagggtgcgccgcagaacgcgatcatcggcggcgcgagcctgtgggtgctcgcgggcaaggatccggccacgtacaagggcgtcgcgaagttcctcgcctatctgagctcgcccgccgtcgccgcgaagtggcacgaggacacgggctatctgccggtgacgacggccgcatacgatctcgcgcgcgagcagggcttctatgcgaagcacccgggcgcggacacggcgatcaagcagatgatgaacaaaccgccgctgccgtacacgaaggggctgcggctcggcaacatgccgcagatccgcacgatcgtcgacgaggagctcgagcaggtgtgggcgcagaagaagacgccgaaggcggcgctcgattccgccgccgcgcgcggcgacgaactgctgcgccgcttcgagaaatcgggcggc

SEQ ID NO: 14083 - DNA, 1041 bp, Burkholderia mallei
atgttcggttttttgcgcagctatttctccaacgatctcgcgatcgatctcggcaccgcaaacaccctgatctacatgcgcggcaagggcatcgtgctcgatgagccgtccgtcgtctcgatccgccaggaaggcggcccgaacggcaagaaaacgattcaagcagtcggcaaggaagcgaagcagatgctcggcaaggtgcccggcaacatcgaggcgatccgtccgatgaaagacggcgtgatcgccgatttcacggtcaccgagcagatgatcaagcaattcatcaagactgcgcacgaatcgcggatgttctcgccgtcgccgcgcatcatcatctgcgtgccgtgcggctcgacccaggtcgagcgccgcgcgatcaaggaagcggcgcacggcgcgggcgcctcgcaggtctatctgatcgaggagccgatggcggccgcgatcggcgcggggctgccggtgtcggaagccaccggctcgatggtcgtcgacatcggcggcggcacgaccgaggtcggcgtgatctcgctcggcggcatcgtctacaagggctcggtgcgcgtgggcggcgacaagttcgacgaggcgatcgtcaactacatccgccgcaactacgggatgctgatcggcgagcagacggccgaggcgatcaagaaggaaatcggctccgcgttcccgggctccgaagtcaaggaaatggaagtgaagggccgcaacctgtcggaaggcattccgcgcagcttcacgatctccagcaacgaaatcctcgaggcgctcaccgatccgctgaaccagatcgtgtcgtcggtgaagatcgcgctcgagcagacgccgcccgagctcggcgcggacatcgccgagcgcggcatgatgctcacgggcggcggcgcgctgctgcgcgacctcgaccgcctgctcgccgaggagaccggcctgcccgtgctcgtcgccgaggatccgctcacctgcgtcgtgcgcggctccgggatggcgctcgaacggatggacaagctcggcagcatcttctcgtacgag

SEQ ID NO: 14084 - DNA, 1206 bp, Burkholderia mallei
gtgcgcgaggccgagccctgcaagagttggcgcaacgcgcgacaatcgtgcgtcgcgacgcgcgcccgcgcccatcggcaatgcccgtcggcggcagtgctccgtcagcgcccgccgcagggctgcgcccgccgcgggcgcagcgctcgtccacgcatggcgcgcgcccgcgcatcacccgagggcgcgggccgattccgaactcaacgcacatcgcaaccaggagaagccagcatgccgaaggcaattcgttacgaccagccgggcggcccggaagtcatgaaatgggtcgacatcgacgtcggcgcgccgcagccgggcgaagtccgcatcaagcagcacgcggtcggcctgaactacatcgacgtctatttccgcaccggcctgtatccgcaaccgctgccgggcggtctcggcatggaggcggcgggcgaggtcacggagctcggcgaaggcgtgacggcgctcaagccgggcgaccgcgtcgcgtatgtcgcgcagccgccgggcgcatacgcgcaggagcgcgtgctggccgccgcgaagctcgtgaagctgccggaggccatcggctacgaggacgcggcgtcggcgatgctgcagggcctgaccgcgcaatatctgctgcgtcgcacgtacaaggtcgagccgggcgacacgatcgtcattcacgcggcggcgggcggcgtgggcctgctcgtctgccagtgggcgaaggcgctcggcgcgacggtgatcggcacggtcggctccgacgagaaggccgcgctcgcgaaggcgcacggctgcgatcacccgatcgtctacacgcgcgagaacttcaccgaacgcgtgaaggagatcacgaacggcgcgggcgtgccggtggtctacgattcgatcggcaaggacacgtacatcggctcgctcgactgtctcgcgccgctcggcatgttcgtgagcttcggcaacgcgtccgggccgctgccgccgatcgactcgaaggagttctcgtcgcgcggctcgctgttcttcacgcggccgacgttgttctcgtacatcgccaagcgcgaggatctcgatcgcaacgcggccgagctgttcgacgtgctcgcgtccggccgcgtgaagacgagcatccggcagcgctatccgctcgagaacgtcgcgcaggcgcaccgcgacctcgaggcgcggcgcaccacgggctcgacggtcctgctgccc

SEQ ID NO: 14085 - DNA, 1407 bp, Burkholderia mallei
atgacccgtcctgtacgcacccgttttgcgccgagccccaccggcttcatccatctcggcaacatccgatccgcgctctatccgtgggcgttcgcccgcaagatgaagggcacgttcgtgctgcggatcgaggatacggatctcgagcgctcgaccgaggcgtcggtcgatgcgatcctcgaagggatggcatggcttgggctcgactacgacgaaggcccgtactaccagatgcagcggatggaccgctatcgcgaggtgctcgcgcagatgctcgagaaagacctcgtctacccgtgctacatgtcgaccgaagaactcgatgcgttgcgcgagcgccagcgcgcggcgggcgagaagccgcgctacgatggcacgtggcgccccgagccgggcaaggtgctgcccgagccgccggcgggcgtgacccccgtgctgcgctttcgcaatccgctgacggggtcggtcgtctgggacgacgccgtgaagggccgcgtcgagatctcgaacgaggagctcgacgatctcgtcatcgcgcgccccgacggcacgccgacgtacaacttctgcgtcgtcgtcgacgatctcgacatgggcatcacgcacgtgatccgcggggacgaccatgtgaacaatacgccgcgccagatcaacatcctgcgcgcgctcggcggcgaagtgccggtgtacgcgcatctgccgaccgtgctcaacgagcagggcgagaagatgagcaagcgccacggcgcgatgagcgtgatgggctaccgcgatgccggctatctgccggaggcggtgctcaactatctcgcgcgtctcggctggtcgcacggcgacgcggagatcttctcgcgcgagcagttcgtcgaatggttcgatctcgagcatctcggcaagtcgcccgcgcagtacgatcacaacaagctgaactggctgaacaaccactacatcaaggaagcggacgacgcgcgcctggccgagctggcaaagccgttcttcgcggcgctcggcatcgacgccgacacgatcgcgcggggcccggacctcgtgggcgtgatggggctgatgaaggatcgcgcgtcgacggtgaaggagatcgcggagaattcgacgatgttctaccgttcgcccgccccggatgcgcaagcgctcgcgcagcacgtgaccgacgcggtgcgcccggcgctcgccgagtttgccgcggcgctgaagacggccgagtggacgaaggaggcgatcgcggccgcgctgaaggccgtgctcggcgcgcacaagctgaagatgccgcagcttgcgatgccggtgcgcctgctcgtcgcgggcacgacgcatacgccgtcgatcgacgcggtgctgctgctgttcggccgcgacgtcgtcgtgtcgcgcctcgcggcggcgctcgca

SEQ ID NO: 14086 - DNA, 1629 bp, Burkholderia mallei
atgcgggcaagatcgtgcgcttcgagcagttcaccgacacgctgctcgtcgtgcaggcgatgcagccgtaagcgccttcgtccgttcgttcaaccaacgcgtttttttgtttcgcacgagatctccatgaacctggccgctctttcgacccagcatcaacgccaatccggctttctcgcccgccgccagttcggcaactggatcgacggccgcgccgccgagccgcgctcgggccgctatctgcccgtcgtcgatccggcgaccgagatgacgatcgcggaagtcgccgcgagcgacgcgcgcgatgtcgacgcggccgtggccgccgcgcgccgcgcgttcgattcgggcgactggccgcgcatgcggcccgcgagccgcgaaaagctgctgcatcagctcgccgagcgcctcgagcgctacgcggacgagctcgccgcgctcgagacgctcgaaaccggcaagctgatcggcgtcgcgcgcgcgatcgacgtgctgggcggcgccgagtacgtccgctacatggccggttgggcgacgaagctcgaaggctcgacgctcgatacatcgatcgccgcgcccgccggcgccgagtatttcgcgtatacgcgccgcgaggcggtgggcgtcgtcggcgcgatcgtgccgtggaattttccgctcgcgatcgcgttgtggaaggtcgcgaccgcgctcgcatgcggctgcacggtggtgctgaagccgtcggaggaaacgccgctcaccgcgctgcgcctgggcgagctcgcgcaggaagcggggctgcccgacggcgtgctgaacatcgtgacgggcgcgggcgccgaggcgggcgcggcgctcgccgcgcatccgggcatcgacaagatcaccttcacgggctcggtcggcgtgggccgcgcgatcggccacgcggccgtcgagcggatggcgcgcttcacgctcgagctcggcgggaaatcgccgctgatcgtcttggacgatgccgaccccgacttcgccgcgcatggcgcggcgcaaggcatcttcttcaatcaggggcaggtctgcacggcgggctcgcgcgtgtacgtgcaaaagcgcctgttcgagcgggtcgtcgccggcatcgccgcggccgccgaagcgatgaagatcggctcgggcttcgatccgaacacgcagatcggcccgctcgtgtcgaagcggcacttcgagcgcgtgctcggccacgtcgacgccgcgaaggaggagggcgcgacgctcgtcaccggcggcacgcgcgcgctcgacggcggctatttcgtgaagccgacggtgttcgtcgacgccgcgcctgcgatgcggatcgtgcgcgaggaggtgttcgggccggtcgtcacggtcacgccgttcgacacggtcgacgacgcggtgcggctcgcgaacgacaccgacttcgggctcgcggcgagcgtgtggtcgcagaacctgtcgcacgtgcatcgcgtcgtgccgcggctgaaggcgggcatcgtctgggtgaacacgcacaacatgctcgatcccaacctgccgttcggcggcttcaagcaatcgggctacggccgcgagctcggccgcgcggcgctcgaacagttcaccgagctcaaatccgtctgcatcgcgcat

SEQ ID NO: 14087 - DNA, 870 bp, Burkholderia mallei
atgagctggctcgacaaactgttgccgccgaagatcaagcagaccgatccgaaaagccgcaaggggattcccgagggcctgtgggtcaagtgcccgtcgtgcgaggccgtgctgtaccgcaacgacgtcgatgcgaatcagcacgtgtgcccgaagtgcgatcaccacatgcgcatcggcgcgcgcgagcgcctcgacgcgctgctcgatccggaaggccgctacgagatcggccaggagatcgtcccggtcgatacgctgaagttcaaggacagccgcaagtatccggatcgactgaaggaagcgatggacgagacgggcgagaccgacgcgatggtcgtgatgggcggcgcgatccacacgctgcccgtcgtcgccgcgtgcttcgagttctcgttcatgggcggctcgatgggctcggtcgtcggcgagcgcttcgcgcgcggcgcgcagaacgcgctcgagcagcaggtgccgttcatctgcttcgcctcgtcgggcggcgcgcggatgcaggaaagcctgctgtcgctgatgcagatggcgaagaccaccgcgatgctcacgaagctctccgaagcgaagctgccgttcatctcggtgctgaccgatccgacgatgggcggcgtgtcggcgagcttcgcgtttctcggcgacgtcgtgatcgccgagccgaaggcgctgatcggcttcgccggcccgcgcgtgatcgagcagacggtgcgcgagaagctgccggagggcttccagcgcgcggaattcctgctgcagaagggcgcgatcgacatgatcgtcgaccgccgcaagatgcgcgacgaaatcgcgcagctgctcgcgctgttgcagcgccagccggccgacgcgctggct

SEQ ID NO: 14088 - DNA, 297 bp, Burkholderia mallei
atggctttgaccctgaccgatgtgacacgcatcgcgcaccttgcgcggctcgaaatggccgacgccgacgccgagcgcacgctgacccagctcaacgagttctttggcctcgtcgagcagatgcaggccgtcgacacgacgggcatcgcgccgctcgcgcacccgatcgagcagattctggaggtcgcgcagcggctgcgcgaagacgccgtcacggagcacgtgaaccgcgacgacaaccagcgcccggcgccggccgtccaggacggcctgtacctcgtgccgaaggtgatcgag

SEQ ID NO: 14089 - DNA, 486 bp, Burkholderia mallei
atggccaagaaaagcaacgcaacccagatcaacatcggcatcagcgacaaggatcgcaagaagatcgcggcggggctgtcgcgtctgctcgccgatacgtacacgctgtacctgaagacgcacaatttccactggaacgtgaccggcccgatgttcaacacgctgcacctgatgttcgaggagcagtacaacgaactgtggctcgccgtcgatctcgtcgcggagcgcatccgcacgctcggggtcgtcgcgccgggcacgtatcgcgaattcgcgaagctgtcgtcgattcccgaggccgacggcgtgccggccgccgaggagatgattcgccagctcgtcgaagggcatgaggctgtcgtgcgcaccgcgcgcgcgatcttcccggacgccgacgcggcgagcgacgagcccaccgccgatctgctgacgcagcgcctgcagacgcacgagaagaccgcgtggatgctgcgttcgctgctcgcg

SEQ ID NO: 14090 - DNA, 1590 bp, Burkholderia mallei
atgaagcacatgctgtccaagctcgcggcgagcgccgcactcgccgcgctggccccggtgctggcccccgcgcacgcggccacgccgcccggcatcttcgtgatcgcgacgcagctcggcgaattcacgacgctcgacccgagcgaaatctacgagctcgtgccgtccgaatacgtcgcgaacacgtacgagcggctcgtgcgcgtcgacctgcgcgaaccgtcgaaattcgaaggccggatcgcgcaatcgtggagcgtcggcgcggacggcctcacctacacgttcaagctgcgcaccggcctgaagttccactcgggcaatccggtgacggccgacgacgtggcgtggtcgctgcagcgcacggtgctgctcgacaaagggccggccggcgtgctcgcggacctcggcctgaccaaggacaacgtcgcgcggaaggtacgcaagctcgacgacacgaccgtgtcgatcgagaccgaccgccggtacgcgccgagcttcgtgctgaacgtgctgagcgcggacccggcatcgatcgtcgacaagcagttgctgctctcgcacgagaagaacggcgacttcggcaatgcatggctgaagaacgcggatgccggctcgggcccgtaccggctcgtcaagtggacgccgaacgaaagcctcgtgctgcaacgcttcgacggctaccgcgcgccgtatccgatgaagcgcatcgtgttgcggcacgtgccggaagcgtccgcgcagcgcctgctgctcgagaacggcgacgtcgacgccgcgcgcaacctgagccccgacagccttgctgcgctgtcgaaggcgggcaagatccacgtcgcgtcatggcccgtgtccgcgctgctgtacctgagcctgaacacgaggaatccgaatctcgcgaagcccgaggtgcaggaagcgatgaagtggctcgtcgattacgacggcatccagcgcaacatcgtcaggacgacgtacaaggtgcatcagaccttcctgccggacggcttcctcggcgcgctggacgcgaatccgtaccggcagaacgtcgcgaaggcgaaggcgctgctcgcgaaggccggcctgccgaacggcttcgcggtaacgatggacatgccgaacgattacccgtacgtcgagatcgcgcaggcgttgcaggcgaacttcgcgcagggcggcatccaggtgaagctgattccgggcgacgcgaaacaggcgatcggcaagtaccgtgcgcgccagcacgacatcttcatcggcgaatggtcgccggactacatggacccgaacagcaacgcgcgcggtttcgcgtggaatcccgacaattcggacaacgccaagcacaagctgctcgcgtggcgcaacggctgggatgtgccgcaactgaccgcgaagaccgatgcggcgctcgccgagccgtcggccgcgaagcgcgcgcaggactatcaggcgctgcaaaaggcggtgctcgcgaattcgccgttcgtgatcctgttcgagaaggtcgtgcaggttgcgacgcggccgggtgtcacgggcccggaaatcgggccgatcaacgatctcgtgtcgtatcggaccttgaagaag

SEQ ID NO: 14091 - DNA, 1101 bp, Burkholderia mallei
atgctgaccggaaacatactgaccgccgaaggctggatccacggcacgctcgaattcgagaacggccggatcaccacgctgtcgggcgacgcggcggacccgtcgaacaacgatgcgccctacatcctgcccggcttcatcgatctgcacgtgcacggcgcgggcggcgcggacgtgatggagggcggcgacgcgatcgagacgatcgcgcgcacgcacgcgcgctacggcacgacgagcctgctcgcgacgacgatgaccgcgccgcgcgacgagctgatgcgcgtcgtcgcggagctgggcgacgtcgcgcgcacgcgcacgccgggcggctcgcgcgtgctcggcgtgcatctcgaaggcccgtacatcaatcccggcaagctcggcgcgcagccggacgcggcggtgtccgcggcgctcgacgaggtgctgaagtatctgtcgatcgcgccgatccgcgtggtcacgctcgcgccggagatcgccgggcacatcgagatcatctcggagatggccgcgcgcggcgtgcgcgtgcagctcggccattcgctcggcacgtacgacgacgcggtcgccgcgctcaagcacggcgcgtgcggcttcacgcacctgttcaacgcgatgtcgccgctgcatcaccgcaatcccggcatcgtcggcgcggcgctcgcgcacgccgaatacgcggagatcatccccgatctgctgcacgtgcacccgggcgcgatccgcgcggcgctgcgcgcgatcccgcggctgtacgtggtgaccgacagcacgtcggccaccggcatgcccgacggcgaataccggctcggcagccagcgcgtgacgaagtgcctgggcggcgtgcgcctcgccgacggcacgctcgccggcagcacgctgacgatggatcaggcgctgcgcaatctcgtgtcgctcggcctgccgatcgccgacgtgtcgagccggatgtcgcgctacgcggccgactatctcgggctcgccgatcgcggccgcatcgcgcgtggcgcgtgggccgatctcgccgtgttcgaccgcgagctgaatctgaccgcaaccttcgtcgaaggagaatcgattgtcgaatatgct

SEQ ID NO: 14092 - DNA, 936 bp, Burkholderia mallei
atgatcgagatcgaacgcgtgagccggctgttcggcgacctcgccgcggtcgacgacgtgtcgctcgcggtcgcgcgcggcacggtgacggcgctcgtcggcgcatccggcagcggcaagtcgacgctgctgcggatgatcaaccggctgatcgcgccgacgagcgggacgattcgcgtcgacggcgtcgacaccgcaagcgtgcccgccgagacgctgcggcgcggaatcggctatgtgatccaggggcacgggctctttccgcactggacggtcgcgcgcaacgtcgcgaccgtgccgcgcctgctcggctggcgcgcggcgcgcgtcgacgcgcgggtgcgcgagctgctcgagctgttcgagctcgattacgacacgtacgcgcgcaagctgccgcatcagttgtcgggcggccagcagcagcgcgtcggcgtcgcgcgcgcgctcgcggccgagcccgcgatcctgctgatggacgagccgttcggcgcgctcgacccgatcatccgcggcaaggcgcaggacgatctcgtcgcgctgcagcggcggctcgggatcacggtcgtgatcgtcacgcacgacatcgacgaagcgctgcggctcggcgaccagatcgcggtgatggacgccgggcgcatcctgcaggcgggctcgcccgccgagattctcggccggccgcagccgggcgtcgtcgagcggctcgtcgcggggctcgatcggccgctgcgcctgctcgcgctcacgcgcgtcgacgcgctcgccgagcccggcgcggcgcccggcgagccgatatcgggcgcgctcacgctgcgcgacgcgatctccgagctgttgtggcgcggcgcgcgcgcgctgcccgtatcgagcgccgacggcgcggcggcaaggcgcatcacgctcgatgcgatcgtcgcgcaggcgaagcggccggca

SEQ ID NO: 14093 - DNA, 678 bp, Burkholderia mallei
atgaagattctcgtggttctcacttcgcacgacgaactcggcacgaccggcaagaaaaccggattctggctcgaggaactggccgcgccgtactacgcgctgaaagacgccggcgccgagctcacgctcgcgtcgccgcgcggcgggctgccgcccgtcgatccgaagagcgacgatccggcttcacaaaccgacgcgacgcgccgtttcgcgaaggacgccgaagcacaggccgcgctcgcgtcgacgcgcaaactcgccgacgtgtcgatcgacgattacgacgcggtgttctatcccggcggccacggcccgctgtgggacctcgccgaggaccgtcattcgatcgcgctgatcgagcgcgcgatcgcgacgaacaagcccgtcgcggccgtctgccatgcgcccggcgtactgcgcaacgtgaaggatccgtcgggcgcgtcgttcgtgaagggcctgaatgtcacgggcttctcgaacagcgaggaggcggccgtcgagctcaccgaggtcgtgccgtttctcgtcgaggacatgctgaagacgaacggcggcaattactcgcgcgcggccgactgggcgccgcacgtcgtcgtcgacgggctgctcgtcacagggcagaacccggcgtcgtcggagccggttgccgaggcgctgctcaatctgctcgagacg

SEQ ID NO: 14094 - DNA, 945 bp, Burkholderia mallei
atgatgcacaccgccttgtcgacgccggcttccggccgccgggccgcccgcgcgctgcgcgccgccgcgctttcgctcgcgctcggcgcggcgagcgccgcgcacgcggcgccgctgaagatcggcatgacgttccaggagctgaacaacccgtacttcgtgacgatgcaaaaggcgctcgacgaggcggccgcgtcgatcggcgcgcaggtgatcgtcaccgacgcgcatcacgacgtcagcaagcaggtgagcgacgtcgaggacatgctgcagaagaagatcgacatcctgctcgtgaacccgaccgattcgacgggcatccagtcggccgtcgtgtcggcgaagaaggcgggcgccgtcgtcgtcgcggtggacgcgaacgcgaacggcccggtcgacgcgttcgtcggctcgaagaatttcgacgcgggcgcgatgtcgtgcgactacctcgcgaaggcgatcggcggcggcggcgaagtcgcgatcctcgacggcatcccggtcgtgccgattctcgagcgcgtgcgcggctgccgcgcggcgctcgcgaaattcccgaacgtgaggatcgtcgacgtgcagaacggcaggcaggagcgcgcgagcgcgctcgccgtcaccgagaacatgatccaggcgcacccgttgctcaagggcatcttcagcgtcaacgacggcggctcgatgggcgcgctgtccgcgatcgaggcgtcgggccgcgacatcaagctcacgagcgtcgacggcgcgccggaggcgatcgcggcgatgcagaagccgaactcgaagttcatcgagacgtccgcgcagttcccgcgcgaccagattcgcctcgcgatcggcatcgggctcgcgaagaagtggggcgccaatgtgccgaaggcgattccggtcgacgtgaagcggatcgacaagggcaacgcgaagacgttcagttgg

SEQ ID NO: 14095 - DNA, 1545 bp, Burkholderia mallei
atgaagaatctacgcgcttccttttccacgtttccgcgcgacttcgtggccggcaccgtcgtgttcctcgtcgcgctgccgctctgcctcggaatcgccaacgcatccggcgtcgagccgttcgcgggcctcgtgtccggcatcgtcggcggcctcgtcgtcgcggtgctgagcggctcgccgctgtccgtcagcggtcccgccgcgggcctcgtcgtgatcgtcgtcgacggcatcgcgcaactcggcagcttccaggcgttcctgctcgccgtgctgctgtccggcgtgatccagttcggtttcggcctgctgaaggccggccggttcgccgcatacgtgccttcgcccgtgatcaagggaatgctcgccgcgatcggcatcctgctgatcgtcaagcaagtgccgttcgcgctcggcctgtccggcgacggcgacgcgcccggccatgcggtgttcgcgtcgagcgcgatcgcgctcgcgtcgctcgcgctcctcgccgtctgggaaacacgcgcgatgcgccgcttcgcgttcgtgcgcctcgtgcccgcgccgctcgccgtcgtgatcctcagcataggcgcgacggtcctgctcggcttcgtgtcgccgaacttcgcgccgcccgccgagcaccgcgtcgcgctgcccgagctcgcgtcgttcgccgcgctcggcgaagcgctgaagaccgtcgacctcggcccgaatttcgcgtacctgctgagcccggacgtgtggcgcatcgcgatcacgatcgccgtcgtcgcgagcctcgagacgctcctgagcctcgaagcggtcgagcagatcgatccgaagcgccgcccgtcacagccgaatcgcgaactgaaggcgcaaggcgtcggcaatctggtcgcgggcgcgatcggcggcctgccgatcacgtcggtgatcgtgcgcagctcggtcaacgtgaacgcgggcgcgcaaagccggatgtcggcgatcgtgcacggcgtgatgctcgtcgtcagcgtgttcgcgctcacctggctcctgaacctgattccgctcgcgagcctcgcggcgatcctgatccacacgggcttcaagctcgcgaagccggcgctcttcacgtcggtcgcgaaacagggcccgggcgcgttcctgccgttcgcggtgacgatcgcgggcgtgctcgcgatcgatctgctcgccggcatcgcgctcggtctcgcgtgttcggtgttcgcggtcgcatgcgcgaacctgcgcagcccggcgacgctcgcgcagcacgacgatcactatctgctgtcgttccgcaaggacgtgtcgttcctcggcaaggtccagatcaagcagtatctcgcgcagattccggatcgcgcggtggtcatcatcgacgcgacccgcgccgactacatcgaccacgacgtgcgcgagatgatcgacgcgtttgttgccgaagcgccgcggcgcgagatcacggttgattaccgacgtcaggttcagcacgtgcgcggcgcgggcctgcgctggttcttccgcaatccggcggcccagcaagcgccgcag

SEQ ID NO: 14096 - DNA, 114 bp, Burkholderia mallei
atgaaagtgatggcatcggttaagcgcatttgccgcaattgcaagatcatcaagcgcaaaggcgtcgttcgcgtgatctgcagctcggatccgcgtcacaagcagcgccaaggc

SEQ ID NO: 14097 - DNA, 1275 bp, Burkholderia mallei
gtgataatcgagcgatgcgatgccgttcggcggcagcgggccgagcgagcgcgcaaggccgctcgcaagcgacaggaaatcgttcggcgacagctcgcccgcggcgatccgcagccggtcgagctggcgcgtcatctgcgcggccggatcgagcaccgtcgtcgtcttcggaaacgtcgagagcagcgtctcggtgatctgcgcggcgagcgcgtcgcgctcgcgcgagagcttccaccagtgcgcgttcgcgccgatcaccgcgatggcgagcgtcgtcgccgcgagcgcgagcggcaagcgcaggcgcatgaacgtcgcgcggtcgaagcgccacggcgcgaactcgaattcgaactggcagaggtcgaagcgcgaatcgagcgcacggcgcacgagcgcgtcgaacggccagatcgcggcgcccggcagcaagcgcttgtcgtcgagcgggcgcaccgaagcgagctgcggctcggcacccggctcgccgagctcgtagagctcgagcggcgtgccgttcgcgagcgcttcgagcgtcgccaccgcgctcgacaccggcgcggcgaagccttcgccgagcgcgccgcgcgcgagcgcgagctcgacgcgcggcgcgctcggcgcctgcggcagcagcgccgccggttcctcggcgagcgacggcgcgcgctccgtcgcggcgaggccgagcgcgaccgcgacgatcgactcggccggcgccggggcgttcgcggtcgcgcccgcgtggccgctgcccggcgcgtcggccgcggcggcgtgctccgccggctgatcgagcgcgacgtcggcgacagcctcggtctcggccgccgcggccgcatcgcggcgcgtcgcgggcggcaggcagcgcgtgacgggcaccgcgcgcagatggcgatgcccggccgcggtgaaggcgtcgacgatgaacttgaaccacgcgcggtcgatcaccgcgagcacgcggcgcccgccgtcgagcgccgccggatcgaccgcgatgtggcagccctgcggatcctggatcagttgatcctcgatgatgttcggcagcgcctgcttcagcctcggccctttcagcggaggcagcgcctgctcgagcatcagcaggtcgcgcgcggcgacgataagcaccgtcgtcgccgcctgaggcagcagcgcgagcgccgcgcggcccgcgcgctgcgtgtggccgctcttgtcgacgagcgcgaacggcagctcgggccattgccattcctgcaacggcacggccggctcgcgcggcggcaa

SEQ ID NO: 14098 - DNA, 1128 bp, Burkholderia mallei
atgatggaattgaaaaaacgtagcgatggcgtggacctgctgcgcgggattgcgatcctgctcgtgctgatcctgcattttcacctgacgtaccggctgcacgtgctgccgttcgacgtcccatggctgtccggcgcgatcaaggcgatctcgcgcaacggcaactacggcgtcacgatgttcttcgcggtgtcgggcttcctgatcacgtcgacgtcggcccggcgcttcggctcgttcggcgcgattcggccggcgaccttctaccggttccgcgcgtcgcggatcctgccgtgcctcgtgctcgtgctggcggtgatcgtcgcgctcggctcgctcggcatgcgctcgttcgtcaacaagccggacacggcgagcgtgttggtctcggtgctgtccgtgctgactttctggcacaacgtgctgatggccaaggtcggctatttcaactacagcatgaacatcctctggtcgctgtcggtcgaggaggtgttctatctgtcgttcccgattctgtgcctgctgctcaagcgccgccgctacatcctgctgttcctgtgcgtgccgattctcgtcgcgccggtgtatcggagcctgcacgcggacgacgagatcgtcgcgctgtacggctacctgtcgtgcttcgacgcgatcgcgatgggcgcctgcgcggcgctgctgcccgcgcgcgcgatgtcgcgcggccgcagccgcgcgatccagtggatcgccggcctcgcgatcgccgtcacgtacttgtctggtccgatcatgcagcacgtcgtctggggcgtgtcggtggtcgcgttctccaccgcggcgctgctgtactgcttcaggggcggcgcgccggccgaggccgcggcgccgtcgttcgtctcccgcttcatcggctggttcgggcagcgcagctacgagctgtacctgttccacatcgtcgtgctcggcgtgctgcgcgagtacgtcacgcgggaaaacgtcgatatcgccgcgaagccgctgtggctgctcttctatctgtgcgtgtcggcgctcgtcgcgcagttcgtcttcaagtactactcggagccgctgaacgccgcgctcaggcggggcgcgacgcgtccgtccgcgggctatctgcagaag

SEQ ID NO: 14099 - DNA, 1068 bp, Burkholderia mallei
atggtccagaacgcgtctgtcccgccggcgtccgccggccgcccgaaggcccaatcgatcgcgctcggcgcgctgtatgcggcgctcgtcgcgcttgcgttgtgggtgatccgcgatttcatgccggcgatcgcgtgggcgtgcgtcgtggcgatcgcgctgtggcccgcgctgcgccggatcgacgcgctgcccgcgttgcgcggccgcgcgacgctcgtcgccgccgtgctgacctcggcggtggcgctgctcgtcgtcgtgccgatcgccgcggggctcgtcgaggcggtcgaccagagccacgaactgctcggctggctgcatcgcgtcgagcagacgggcattcccgagcctgacgtgctgtcgcatctgccgttcggctcgcagcaggccagcgcgtggtggctggcgaatctcgcgaagccgctgcatccggcgacggcggtgaagggcgtcgacggcgcaagcgtcgtcacgttcggccggcatttcggctcgcggctcgcgcatgcggcggtgctgttcggcttcatgctcgtcacgctgttcgtgatcttccaggcgggcccgcgcctgtcgggatcgctgctcaccggtgtgcggcgcgcgttcggcgacagcggcgcggcgctgctgcagcggatggcggccgccgtgtacggaacggtgacggggctcgtcgtcgtcggcttcggcgagggcgtgctgctcgggctcgcgtacgcgttcgcgggcttgccgcatgcggcgctgctcggcctcgtcacggcgatcgccgcgatgctgccgttctgcgcgccgctcgtgttcggcggcgcggcgctgtggctttttgtgcagggcgcgctcggttgggcgatcgggctcgcggcgttcggctcggtcgtcgtgttcgccgccgagcacttcgtgcggccggtgctgatcggcaactcggcgcggctgccgttcctgctcgtgttgttcggcatcctcggcggcgcggagacgttcgggctgcttggcttgttcgtcggtcccgcgctgatgacggtgctcaccgtgctgtgggcggaatgggtcgat

SEQ ID NO: 14100 - DNA, 1842 bp, Burkholderia mallei
atgaagcccgcttcgaagcgcacgcaaggcgtgaagttcgcatcgagcccggtgctgtcggttcatctgccgatgtggcgctcgaagcttgtcgtgttcatgctgttcatcgctttcgtcgcgctcgcgatgcgcgcgttctggatccaggggccgggcaacgcgttctatcagaaacagggcgaaagccgctatcagcgcacgctcgagttgccggcgacgcgcggcaagatcctcgatcgcaacggcctcgtgctcgcgacgagcttgcccgtgcgcgcgatctgggcgattccggccgacgtgcccgacgacctcggcgcggacaagctcgacgcgctcggcaagctgctcgggatgacgacgaaggagctgaaggcgaagctctcggaagacaagacgttcgtctacgtgaagcgccaggtgccgctcgacgtcgccgagcaggtcgcgaagctcgacattcccggcgtctatcagcgcggcgaatacaagcgcttctacccggaaggcgagatcaccgcgcacctgatcggtttcacgaacgtcgaggacgaggggcaggagggcgtcgagctcgccgaccagaagctgctcgtcggcacgccgggcagccgccacgtgatcaaggaccgcgtcgggcacatcgtcgaggacgtcgatgcgcaggtgccgccgcacaacggcgccgacgtcggcctgtcgatcgacagcaagatccagtacatcacgtatacgaacctgaaggcggccgtcgagaaattccacgcgaaggcgggcgcggcgatggtgatcgacgtgcagacgggcgaggtgctgtcgctcgtcaattatccgacgtataacccgaacgaccgctcgcacctgacgggcgagcagttgcgcaatcgcgtgctgaccgacgtgttcgagccgggctcgatcatgaagccgttcacggtctcgctcgcgctcgatctgcatcgcgtgacgccgaacacgctcgtcgagacgggcaatggccatttcgtgctcgacggcgcgccgatcaccgacgattcgggcttcggcacgctgaccgtcggcggcgtgatccagaaatcgagcaacatcggcgcgacgaagatcgcgatgacgatgaagcccgaggaaatgtggaatatgtatacaggcatcgggctcggacaggcgccgaaggtcggctttcccggcgcggcggcgggccgcctgcgcccgtggaagaactggcggcgcatcgagcaggcgacgatgtcgtacggctacggcctgtcggtgtcgctgttccagctcgcgcgcgcatacaccgcgatcgcgcacgacggcgaactgatgcccgtgacgattttcaagacgaacgacgcgcaacccccgacgggcccgcgcgtcttctcgccgacgacggcccgcgaagtgcgcacgatgctcgaatccgtcgtgtcgccgcagggtacgtcaccgaatgcggcggtgcccggctatcgcgtcggcggcaagagcggtaccgcttacaagcaggtcggccgcggctatgatcacaagaagtatcgcgcgtcgttcgtcgggatggcgccgatgccgaacccgcgcatcgtcgtcgccgtgtcggtcgacgaaccgacgacgggcggccacttcggcggccaggtgtcgggccccgtattctccgcgatcgtcggcgatacgctgcgcgcgctgaacgtgccgcccaacatgccggtcaagcagctcgtcgtgtcggatgatgcgacgaacgccgccgccgcgcaaaagctggccgcgaatgcgccggcgaaacgcctgatcgtgtcgagcacgacacacaaccgtcctggagtagttcga

SEQ ID NO: 14101 - DNA, 1485 bp, Burkholderia mallei
atgactacccgaatccttgcacgtggcgcagttgccgtggctgtcgccgcggcgttgtcggcaggctatgtggcgggcacccgccgggcggagccgcagatcatcacgccggcggtcgccgcgctgatgccggccgaggcggccgcgaagacgggcattcccgatttttccgggctggtcgagacctacgggccggccgtcgtgaacatcagcgcgaagcacgtcgtgcagcgcgccgcgcagcgtcgcgcggcgccgcagttgccgatcgacccggacgatccgttctatcaattcttccgacatttctacgggcagattcccgggatgggcggcggccgccagccgcagccggacgaccagccgagcacgagcctcggctccggcttcatcatcagcgccgacgggtatatcctgactaacgcgcacgtgatcgacggtgcgaacgtcgtgaccgtgaagctcaccgacaagcgcgagtacaaggcgaaggtcgtcggcgccgacaagcagtccgacgtcgcggtgctgaagatcgacgcttcgggcctgccgatcgtgaagatcggcgatccggcgcagagcaaggtcggccagtgggtcgtcgcgatcggctcgccgtacgggttcgacaacacggtcacctcgggcatcatcagcgcgaagtcgcgtgcgttgcccgacgagaactacacgccgttcatccagaccgacgtgcccgtgaaccccggcaactcgggcggcccgctgttcaacctgaacggcgaggtgatcggcatcaactcgatgatctactcgcagacgggcggcttccaggggctgtcgttcgcgatcccgatcaacgaggcgatgaaggtgaaggacgagctcgtgaagacgggccacgtgagccgcggccggctcggcgtcgccgtgcaggggctcaatcagacgctcgcgagttcgttcggcttgcaaaagcccgacggcgcgctcgtcagctcggtcgatccgaaggggccggccgcgaaggccgggctgcagccgggcgacgtgatcctcgcggtcgacggcgtgccggttcaggattcgtcgacgctgcccgcgcagatcgcgggcatgaagccgggcacgaaggccgatctgcagatctggcgcgacaagtcgaggaagacggtatcggtgacgctcgcgtcgctcgccgacgatcaggcgaaggcgggcgccgacgagcccgtcgagcaggggcggctcggcgtcgcggtgcgcccgctgtcgccgcgcgagcgcaacggctcgtcgctcacgcacggcctggtcgtccagcaatcggcggggcctgccgcgagcgcgggcatccagcccggcgacgtgattctcgcggtgaacgggcggcccgtcacgagcgccgaacaattgcgcgacgcggtcaagcgcgcgggcaacagtcttgcgctgctgatccagcgtgacgatgcccagattttcgtgccggtcgatctgggc

SEQ ID NO: 14102 - DNA, 987 bp, Burkholderia mallei
atggcccaatcgaccctctattcccgcgtgctcggcacgggtagctatctgccgcccgatcgcgtcacgaatcaagaactcgccgatcgtctcgcgaaggacggcatcgagacgagcgacgagtggatcgtcgcgcgcacgggcatccgcgcgcggcacttcgccgcgcccgacgtgacgacgagcgatctcgcgctcgtcgccgcgcagcgcgcgatcgaggcggccgacgtcgatccgcagtcgatcgacctcatcatcgtcgcgacgtcgacgcctgatttcgttttcccgagcaccgcgtgcctgctgcagaacaagctcggcatcaagaacggcggcgccgcgttcgacgtgcaggcggtatgttcgggcttcgcctacgcgctcgcgacggccgacagcttcatccgcacggggcagcaccgcacggcgctcgtcatcggcgcggaggcgttctcgcgcattctcgatttcaaggaccgtacgacctgcgtgctgttcggcgacggcgcgggcgccgtcgtgctgtcggcgtccgaagagccgggcatcctcggcagcgcgctgcatgcggacggcagctattcgaacattctctgcacgccgggcaacgtgaaccgcggcgtcatcgcgggcagcgcgttcctgcacatggacggccaggccgtcttcaagcttgccgtgaacgtgctcgagaaagtcgcggtcgaagcgctgtcgaaggcggagctcgcgtcggaacaggtcgattggctgattccgcaccaggccaatatccgtatcatgacaagcacgtgccgcaagctcggcctgccgcaggaacgcatgatcgtcaccgtcgacgagcacggcaacacgtccgccgcatcgattccgctcgcactcgacgtcgccgtgcgcgacggccgcatcaagcgcggccagcacgtgctgatcgaaggcgtcggcggcggcttcacgtggggcgcgtcggtcttccgcttc

SEQ ID NO: 14103 - DNA, 5223 bp, Burkholderia mallei
atgaggagcacgcatgaaggagcccgcatgaccccccccgatctgctgtcgctcgccgcgcgtttcgcgcggctgcccgacacgcagcgcaagcagttcctcgcgaagctcggcgacgcgggaatcgatttccggatgctgccgattccgccgcgcgaggaccgcgcggcgagcgtgccggcatcgttcgcgcagacgcgcctctggctgcacgcgcgcctgctcggcgaatcggccgcgtaccacatcaccgagcggctgcgcctcgacggcgggctcgacgcgaacgcgctgcggctgtcgtgcgacgcgctgatcgcgcgccacgaggcgctgcgcacgacgttcgccgagggcgcggccggcgtgctgcagacggtgcacgcgccgatgcgctgcccgtggcgcttcaccgatctcgcggacgcgagcgccgggtcgcgcgagcagcgcgcggccgccatcgccgagcgcgacgaggccgagccgttcgatctcgcgcacggcccgctcgtgcgcgcgcacctgatccggctcgatgcggccacgcactggttcgtgctgacgacgcaccacatcgtgtcggacggctggtcggccgacgtgatgctcgcggagctgtcgtcgttctaccggtcgtacgcgacgggcgacgcggtgtcgctcgcgccgctgccggtgcagtacgcggactacgcgctctggcagcgccgctggctcgacgcgggcgagggcgagcgccagctcgcgtactggcgcgcgacgctcgacgcgagccgtgacgcgctgctgctgccgggcgccgcgacgcggcccgcgcagcgcggcgcgagcggcgcgcgccatgcgttcgacatatccgccgaactcgcgcggcgcatgcgtgcgctggcgcaggcgcgccgggcgacgccgttcgccgtgctgctcgccgcgctcgcgacgctgctcgcgcgcgcgagcggcgagaccgggatccggatcggcgtgccgtcggcgaatcgcgagcgcggcgagaccgtcgggctgatcggctttttcgtcaatacgctgacgctcgcggcgagcacgcccgcgacgctcgcgttcgacgcgctcgtcgacgcgacgcagcgcggcctgatcgacgcgcagtcgcaccaggacgtgccgttcgatcaggtggtcgacgcgctcggcgtcgcgcgcagcgcgagccaccatccgctttttcaggtgatggccgcctacggcgcgcggcgcgtgctgccgtcgttcgccgaggtgcgcgcgaccgagctgccctcgggcatgccgtatgcgaaattcgatctcgcgctcagcttcgacgagcgcgacgacggcgggctcgacgcgcgcttcgtctatgcgaccgatctgttcgacgccgacgcgatcgagcgcttcgccgcgcgctacgtcgagctgctcgcgcacgcgctcgacacgcccggcgcggcgatcggcgatctgcaatggctgcccgaagcggagcgccgccagctcgccgcgtggaacgggcagacgcacgacttcaccgggcgcgcgtcgccggcgcgcgccggcgccggcgcggcggtgccccgcgaacgcgccggccaagccggcggcgagccgttcgtcccggtccatgaccggattgcgcagcacgcgcgccgccgccccgacgcgcgcggcgtcgccgacatcgagcgcgcgctcacgcgcggcgaggtcgacgcgcgcgcgacgcggctcgcgaagcgcctcgtcgcggcgggcgtgggcgcggagatgcgcgtgggcgtcgcgctgtcgcgctcggtcgatctgctcgtcgggctgatcgccgcgctcaagtcgggcggcgcgttcgtgccgctcgatccgagccacccgcgcgagcgcctcgcgcagatgctggaggacgcgcagatcgcgcacgtgatcaccgagcgcggcagcgtcgacgcgctgccgctcgcgggcgcgacgcgcgcgtggcttgtcgacgacgcgatcgccgacgcggagatcgacggcgtcgcgctgcccgccgtgtcgccgcatcaggccgcgtacgtgatctacacgtcgggctcgaccggcaagccgaagggcgtcgtcgtcgatcacggcgcgttcgcgcgccattgcgaggcgatcgccgcgcgctacggcgcgaccgagcgcgacgtgttcatgctgttccagtcggtcaatttcgacggcgcgcacgaaggctggttctcgcagtacatgtcgggcgcggccgtcgcggtgacggccgacacgctgtggccgcccgcgcgcacctgcgcgctcgccgcgcgcgaaggcgtgacgatgacctacgtgccgcccggctgcgcgacgcagctcgccgaatgggcgctcgagcacggtgcgccgccgtcgctgcgctcgatcacggtgggcggcgaggcgacgtcgcgcgaggcgttcgcgctgatgcgccgcgcgtttccgaacgcgcgcgtcgtcaacggctatgggccgaccgaaacggtgatcacgccgatgctgtggatgttcgcgccgggcgacgatcccgccaagctcgcggacgccgcgtatctgccgatcggcacgctcgtcggcgcgcgcaccgcgcacgtgctggacgcgcgcctgaatccgctgcccgtcggcgtgatcggcgagttgtatctgggcggcgagggcgtcgggctcgcacgcggctacctgggccgcgcggcgctcaccgccgagcgcttcgtgcccgatccgtacggcgcgccgggcgcgcggctgtaccgcacgggcgacctcgtgcgccgccgcgccgacggcgtgttcgacttcatcggccgcatcgatcaccaggtgaagctgcgcggcttgcgcatcgagctgggcgagatcgaggcgcaactcgccgcgcacgacgacgtgcgcgaggcggtggcggtcgtgttcggcgagggcgcgcacgcgcggctcgccgcgttcgtcgagctcacgggcgacgcgcgcgcgcgcgcgcggcgcgcggatgcggccgagctcgacgcgcatttgcgccgcacgctgcccgattacatggtgcccgcgcacatcgtcgtgctcgacgcgctgccgcgcaacgcgaacagcaaggtcgaccgcgcggcgctgcccgagcccgcgcacgtcgcgcgcgcgtacgaggcgcccgacggcgagctcgagacggcgctcgccgagatctggcgcgaggtgctcggcgtcgagcgcgtcgggcgcgccgatcatttcttcgagctgggcggccattcgctcgcggcggtgcgggtggccacgcgcgtcgccgagcggctcgcgcgcgacgtgccggtgcgcgcgctgttcgaggcgccgattctcgcgccgtacgcgcagcgcgtcgccgccgccgcgccagcgcacgcgccgcaacgcgcgggcagcgcatcgtacgcgcccgatgccgacggcgtgctgccgctgtcggccgcgcagcgcggcctgtggttcctgtggcgcgcgcagccggacagcgccgcgtacaacattcccgtcgcgctgcggctgcgcggcgcgctcgacgtcgatgcgctcgccgatgcgctcgcgcatgcggctgtccgccacccggcgctgcgcacgcggatcgtcgcgcgggcggacggcgcgccggggcagcggattgcgccggcgcggcgcatcgagctgccggtcgtcgacctgcgcgccgacgcgcgcatcgcggacgacgacgcgcggctcgccgccgcgatcgcgctgaccgacgccgacgcgctcgcgccgttcgatctcgccgccgacgcgccgctctggcgcgcgcgcgtgatccggctcggcgcgcacgaccacgtgctgtcgctcgtcgtccatcacatcgtgtcggacgggcaatcgatcgatctgtggctcgacgcggtgcgcgcggcgtacgtcgcgcggcgcgcggacgaacccgcgacggcggcggcgcgcgcagcggcggacaggcgaaccgacaggcacgcgggctcgcgggcggcgtcgcttgcgccggcacgcgcgaaggaagcgcccgcgcaatcggcgacgattgcgccgatacaagcgcccgccgacgcgcctcagcccgcgccggacgcaccggtgctgccggccgccgcgccgcacgcgcggctcgcgttctggcgcgaggcgctcgccggcgcgccgtcgcacgcgctgccgccgccgcgcgcgggccgcgcgtgcgcgccgcgctgggacgcgggccgtctcgcgttcgaattcgacgccgcgctcgtgcgccgcgcgcgcgcgatggcgctcgacgcgcacgcgacgctgccgatgctgctgcacgcggcgctgaacgcggcgttctaccgcgcgacgggcgcgaccgatcagccggtcggcgtgctcgcgtcgacccgcgaactgacgggcgacgcggccgagcgcgcgctcgggctcttcatcaacgcggtcgtcgtgcgcacgcggctgtcgggcgccgatacgccggccacgctcgtcgccgcggtacgcgacgcggcgctcgccgcgtatgcgcacgcggacgcgccgttctgcgatgtcgtcgccgcgctgcgcgcgccgcgcacggtcaacggcaatccgctgttccaggtgatgttcaactacctgcggctggcgggcgccgccgcgcgcgactgggcggggctcgcggtcgacgcgttcaacgatgtccggcaccgcgtcgtgttcgagctcgagctcgacatcgtcgagcatccggacggccgcgtgacgggcgcgttctcgtatgcggccgagcgcgtcgacggcgcgttcgtcgccgcgctcgccgccgactatctcgacgtcgtgcgcggcttcgtcgacgcgcccgcgcgcgcgctcggcgcgtgcgccgcgcgtttcccgctcgcctcgcacgaggcgtacgtgccgccgccgcccgccgcggcggacgcgcgcgccgccgcgcgcgcggcgcgcgcgctcgccgagctgtggcgcgcgtsgctcggscatgccgmgcccgcgcccgaggccaacctgttcgaagcgggcgcgacgtcsttcgacgtcgtgcgcttcgtcgacgcggcgcgctcggccggcttcgcgctcgcgatcgccgacgtgttcgccgcgccgagcctcgcggcgctcggcgagcgcgccgcgcacaccgccggccagcccgccacgcaggcgcgcgatgccgat

SEQ ID NO: 14104 - DNA, 804 bp, Burkholderia mallei
atgccgatcccccacgccctcgcgacgctcgccgcggccgcgctgctgatgcacgccgcgtgcgcggcgacgcttgccgtccacccgggcgagcgcatcggcgcggcgctcgccgccgcgcggccgggcgacacggtgctcgttcagcacggccgctacgaggagaacctgagaatcgacaagccgctcacgctgcgcggcgtcggccgcccgacgatcgacgggcgcctcgcgggcgacgtgatccgcgtcgccgcaccggacgtggcgatcagcggcttttcgatcgtcgacagcggcgcgagcctcaccgcgcaaaacgcgggcgtctacgtggcgcccggctccgatcgcacgcgaatcgagcgctgcgagctcgtctacaacctgttcggcctctggatcgagcgctcggccgacgtgcgcgtcaccggcaacgtgatcgtcggcaagcgcgatttgctgtcgcccaggcgcggcaacggcatccagctctacaacacgacgggcgcgcgcatcgccggcaacacgatcagctacacgcgcgacggcatctatgtcgacgtgtcgcatcacgcgcgcttcgagcacaacacgatccacgacgtgcgctacggcacgcattacatgaactcgtactacaacgtctgggacggcaacgacgtctatcacaaccgcggcggcctcgcgatcatggaggcgcgcgaccagatcgtgcgcggcaaccgggtatggggcaacaccgatcacggcatcatgctgcgcacgatccaggattcgctgatcgagaacaacgtcgtcgcc

SEQ ID NO: 14105 - DNA, 2040 bp, Burkholderia mallei
atgacgaaaaagctgaacgaagtatccgtcgatgacgacgcaaaccagagcgacgaccagcctaccgctgcgtcgggcaaaggcgaaaaggccaaggcgcgcgaccgtcgcgccaaggaaaaggcgctgctgaaggaagcgttcgcgacgagcacgcccggcacggccgaggagctcgaagagcgccgtacgaagctgcgcgcgctgatcaagctcggcaaggagcgcggcttcctcacgtacgccgaaatcaacgaccatctgccggacaacttcacggaaacggaagcgctcgaaggcatcatcggcacgttcaacgacatgggcgtcgcggtgtacgagcaggcgcccgacgccgagacgctgctgttgaacgacaatgcgcccgccgcgtcgtccgacgatgaggtcgaggaggaagcggaagtcgcgctgtcgaccgtcgattccgaattcggccgcacgaccgatccggtgcggatgtacatgcgcgagatgggcacggtcgagctgctcacgcgcgaaggcgaaatcgagatcgcgaagcggatcgaggacggcctgcgccacatggtgatggcgatttccgcgtgcccgacgacgatcgccgacatcctcgcgatggccgagcgcgtggcgaacgaggagagccgcgtcgacgagctcgtcgacggcctgatcgatccgaacgccgccgataccgacggcttctcggagaaggacgccgaggaaatcgagaacgaggacgcggaagccgaagaggacgacgaagaggaagaagaggacgacgacggcgccgcgcaggcgaccgccaacgcggcccagctcgaagcgctcaagcgcgcgtcgctcgagaagttcgcgctcatcagcgaatggttcgacaagatgcgccgcgcgttcgagaaggaaggctacaagtcgaagtcgtacctgaaggcacaggaaacgatccagaacgagctgatgtcgatccgcttcaccgcgcgcaccgtcgagcgcctgtgcgatacgctgcgcgcgcaggtcgacgaagtgcgccaggtcgagcgtcagatcctgcacatcgtcgtcgacaagtgcgggatgccgcgctcggagttcatcgcgcgcttcccgggcagcgagaccgatctcgactgggccgagaaggtcgcggccgaaggccattcgtatggggcgatcctgtcgcgcaacattccggcgatccgcgaacagcagcagcgcctgctcgacctgcaggcgcgtgtcgtgctgccgctcaaggacctgaaggaaaccaaccgccagatggcggcgggcgaactgaaggcgcgccaggcgaagcgcgagatgaccgaggcgaacctgcgcctcgtgatctcgatcgcgaagaagtacacgaaccgcggcctgcagttcctggacctgattcaggagggcaacatcggcctgatgaaggcggtggacaagttcgaataccgtcgcggctacaagttctcgacgtatgcgacgtggtggatccgccaggccatcacgcgctcgatcgcggaccaggcgcgcacgatccggattccggttcacatgatcgagacgatcaacaagatgaaccgcatctcgcggcagatcctgcaggaaaccggcctcgagccggatccggcgacgctcgccgagaagatggagatgccggaggacaagatccgcaagatcatgaagatcgcgaaggagccgatctcgatggaaacgccgatcggcgacgacgacgattcccatctcggcgacttcatcgaggacaccaacacggtcgcgccggcggatgccgcgctgcatgcgagcatgcgcgacgtcgtgaaggacgtgctcgattcgctgacgccgcgcgaggcgaaggtgctgcggatgcgtttcggcatcgagatgagcaccgatcacacgctcgaggaagtcggcaagcagttcgacgtcacgcgcgagcggattcgtcagatcgaggcgaaggcgctgcgcaagctgcgtcatccgagccgttcggacaagctgaagtcgttcctcgaggggaac

SEQ ID NO: 14106 - DNA, 1419 bp, Burkholderia mallei
atgcggttggacgtcacggtgatcgctccgaaatcgagggtggggggcacgcgaggctcgccgcgcaccgtcgccgccgattatccgcgcaaatccgcgcgaacgcgcgcgccgttgagcggcccgcgtgcaacttatgggaaaatcgctctttttgcgacattccttcctcttgcaccgatgagcaccgatcccacttccaagcccgccttcccgatcaccgatgaagtccgccatgcgctcgccgtcacgaagcgcggtgttgacgagctgctgatcgaggaagagttcgcgcagaagctcgcgaaaagcgcggcgacgggcaagccgctgcgcatcaagctgggcctcgatccgacggcgcccgacatccacctcggccacacggtcgtgctgaacaagatgcgccagttgcaggatctcggccatacggtgattttcctgatcggcgatttcacgtcgctgatcggcgatccgtcgggccgcaacgcgacccgcccaccgctcacgcgtgagcagatcgaatcgaacgcgaagacctacttcgagcaggccgcgctcgtgctcgatcgcgagaagactgagatccgctacaacagcgagtggtcgatgccgctcggcgcggacgggatgatcaagctcgcgtcgcgctacacggtcgcgcgcatgctcgagcgcgaggatttcacgaaacgcttccagggcggcatcccgatctcgatccatgaattcctgtacccgctgatgcagggttacgattcggtcgcgctgaacgccgatctcgagctcggcggcaccgaccagaaattcaacctgctcgtcggccgcgagctgcagaagcaatacggccaggagcagcagtgcatcctgacgatgccgctgctcgaaggcctcgacggcgtcgagaagatgtcgaaatcgaagggcaactacgtcggcatcagcgagaagccgaccgacatgttcggcaagctgatgagcatctcggacgtgctgatgtggcgctacttcgagctgctgtcattccgcagcctcgacgagatcgcgcggttccgcggcgaggccgaaggcgggcgcaacccgcgcgacttcaaggtgatgctcgcgcaggagatcgtcgcgcgtttccattcgcaggccgacgccgaacgcgcactcgaggacttcaaccaccgcgcgaagggcggcgtgcccgacgatatcccggccgtgacgctcgccggcgcgccgctcgcgatcggccagttgctgaagcaggcggggctcgtgccttcgacgagcgaggcgctgcgcaacatcgagcagggcggagtgaagatcgacggcgcgacggtgtccgacaaggcgctgaaagtcgacgcgggcgagttcgtcgtgcaggtcggcaagcgccgcttcgcgcgcgtgacgcttaccgca

SEQ ID NO: 14107 - DNA, 1308 bp, Burkholderia mallei
atgactcaaaccgctttccgcgcccgcctgctgaggttcgacggcgaccccgcgcaatcggacgatgcgctcgcgtacgacgaggacggcctgctgatcgtcgagaacgggcgcgtcgtcgcggcgggcgcccatgcggcgctcgccgcgcgcctcgcgcccggcgcgacgctcgtcgagatgcgcgacaagctgatcgcgcccggcttcatcgacacgcacgtgcactatccgcagaccgaaatgatcgcctcgccggcgccgggcctgttgccgtggctcgaccgctacacgttcccgaccgagcggcgcttcgccgatcccgcgcatgcgcgcgacgtcgccgagttcttcctcgatacgctgctcgcgtgcggcacgacgacggcgctcgtctactgcacggtgcacaagcaatcggccgacgcgctgttcggcgcgagcgaggcgcgcggcttgcggatgatcgcgggcaaggtgctgatggaccgccactgccccgagttcctgcgcgacaccgcgcaatcgggctacgacgacagcgccgagctgatcgcccgctggcacggccacggccggcagtcgtacgcgctcacgccgcgcttcgcgccgacatcgacgcacgcgcagctcgaagcgtgcggcgcgctcgcccggcttcatccggacgtgttcatccagagccacgtcgcggagaatctcgacgagctccgctgggcggccgagctgtttcccgagcggcgcagctatctcgatgtctacgatcactacgggctgctgcgccgtcgcgccgtgtacggccactgcatccatctcgacgacgacgaccgccggcgcttcgccgaaacgggcgcgatcgccgcgcactgcccgacgtcgaacctgttcctcggcagcggcctgttcgatttcgagcgcgcgaacgcgcggcacatggccgtcacgctcgcgaccgacgtcggcggcggcacatcgttctcgatgctccaaacgatgaacgaagcgcacaagatcgcgcggatgacgggccatcacctgagcgcgacgcgcatgttctggctcgcgacggcaggcgccgcgcacgcgctcgatctcgcggacacgatcggcacgctcgcgccgcacgcggaagccgacttcgtcgtgctcgatcctgccgcgacgccgctgctcgcgcgccgcaccgcgcgcgcggaatcgctcgaggagctgctgttcgcgctcgcgctgctcggcgacgatcgcgcggtctatcgcacgtatgccgccggccgctgcgtgcaccggcgcgacatcgccgacgcgggc

SEQ ID NO: 14108 - DNA, 567 bp, Burkholderia mallei
atgcgccgcaccgcgtgggccggtacgccggacgaggccgccggcgccgccgaccggtcagtgcgtgacgcgggtcacgccgccgctcgacagcagtcgcacgcgttcgcccgcgcggaacacttcgggcgtcgccgcctgcgtgatcgagcgcaggtcgccgttgtcgaggcgcacggtgatttcgacgccgttcgccgagctgaggccctggccgaccgcgttgccggccaccgcgccggcgatgccgcccgcgatcgcggtcagcaccgagccgcggccgccgccgatcgcgctgccggcgaccgcgccgagcgcgccgccgccgagcgtgccgagcgcgctgccgccgccgtcgccctgaatccgcaccgcgcggacgctttccaccgtgcccatccgcacggtctgttcgcgctgcgcctggccgacgctatagacatcggcggaacccggcggcgtgaagcagcctgcgagcgtcaccgtcgcggtcagcatcgcggcgagcgtgagggttttcctggtcaacatgtttcatcttctccaaacaagattcacttcggactg

SEQ ID NO: 14109 - DNA, 564 bp, Burkholderia mallei
atggcatccgtcaacaaggtcattctcgtcggcaacctcggcgccgatcccgaagtgcgttatctgccaagcggcgacgcggtggcaaacatccgcctcgcgacgaccgaccgctacaaggacaaggcgtccggcgaattcaaggaaatgaccgagtggcaccgcgtcgcgttcttcgggcgccttgccgagatcgtcaacgagtatctgaagaagggctcgtcggtgtacatcgaaggccggatccgcacgcgcaagtggcaaggccaggacggccaggaccgttactcgaccgaaatcgtcgccgaccagatgcagatgctcggcggccgcggcagttcgggcggcggtggcggcggtggcggcggcggtggcggcggcggtgacgacggcggctacggtggcggcggcggcggttacggcggcggccgggacatggagcgcggcggcggtggcggccgcgcgtcgggtggcggcggcgcgggtgcgcgcagcggcggcggcggcggcggcggtggcggcggcggtggcggcgcgagccggccgagcgccccggcgggcggc

SEQ ID NO: 14110 - DNA, 2263 bp, Burkholderia mallei
cagacgctctacgacaaattgtggaattcgcacgtcgtccacaccgaagaggacggcaccgcactgctctatatcgatcgccaactgctgcatgaagtcacgagcccgcaggcgttcgaagggctgaagctcgcgcagcgcccggtgtggcggatcagcgcgaacctcgcggtgtccgaccacaacgtgccgaccaccgaccgcagccacggcatcgccgatccggtgtcgaagctgcaggtcgacacgctcgacgcgaactgcgacgcatatggcatcacgcaattcaagatgaacgacgtgcgccagggcatcgtccatatcatcggcccggagcagggcgcgacgctgcccggcatgacgatcgtctgcggcgattcgcacacgtcgacgcacggcgcgttcggcgcgctcgcgcacggcatcggcacgtcggaagtcgagcacgtgctcgcgacgcagacgctccttcagaagaagagcaagaacatgctcgtgaaggtcgagggccaactgccgcgcggctgcaccgcgaaggacatcgtgctcgcgatcatcggccagatcggcaccgcgggcggcaccggctacgcgatcgaattcggcggctcgacgatccgcgcgctcacgatggaaggccggatgacggtctgcaacatggcgatcgaggcgggcgcgcgcgccggcatggttgccgtcgacgacacgacggtcgaatacctgaagggccgcccgttcgtgccgacgggcgccgaatgggatcaggcggtcgaatactggaagacgttcaggtccgacgagggcgcgcagttcgaccgcgtcgtcgagctggacgcggcgcagatcgtgccgcaggtcacgtggggcacgtcgcccgagatggtcacgtcgatcgacggccgcgtgcccgatcccgagcgcgagaaggacccggtcaagcgcgacgcgatggagcgcgcgctcgcatacatggcgctcgcgccgaacacgccgatcgaggcgatcaaggtcgacaagatcttcatcggctcgtgcacgaacgcgcggatcgaggacatccgcgcggccgcgtacgtcgtgaagaagctcaatcgccgcgtcgcgccgaacgtgcggctcgcgatggtcgtgccgggctcgggcctcgtgaaggcgcaggccgagcgcgaggggctcgacaaggtgttcaccgaggcgggcttcgaatggcgcgagccgggctgctcgatgtgtctcgcgatgaacgccgaccggctcgagccgggcgagcgctgcgcgtcgacgtcgaaccgcaatttcgaagggcgccagggccagggcggccgcacgcatctcgtcagcccggcgatggccgcggcggcggcgatcgaaggccacttcgtcgatattcgccggctggggtgagcgtgaacgcatcggttttccggcgcatcgccgccgcgttcgcgctggcgggctgcgtgctcggcttggccggctgcaacacggtcgccggcgtgggcgaggacctcaacgccgccggccgcgcgatcaagcgcgcggcggactgacggcgcgcgcgagcgcgccgattcgagcttcgattttgccggcccgtgcggccggcctccaatctggttgacggatcatggaaaaattcaatgtgcataccggcgtcgtggcgccgctcgatcgcgagaacgtcgacaccgacgcgatcattccgaagcagttcctgaagtcgatcaagcgcacgggcttcggcccgaacgcgttcgacgagtggcgctatctcgatcacggcgagcccggccaggacaactcgaagcgtccgctgaacccggacttcgtgctgaaccagccgcgctatcagggcgcatcggtgctgctcgcgcgcaagaacttcggctgcggcagctcgcgcgagcacgcgccgtgggcgctgcagcagtacggctttcgcgcgatcgtcgcgccgagcttcgccgacattttcttcaacaactgctacaagaacggcctgctgccgatcgtgctgaccgagcagcaggtcgaccacctgttcaacgacacgtacgcgttcaacggctatcagctgacgatcgatctggacgcgcaggtcgtgcgcgcgccggacggccgcgagtatccgtttgaaatcaccgcgtttcgcaagtactgcctgctgaacggcttcgacgacatcgggctcacgctgcggcacgcggacaagatccgtcagttcgaggccgagcggctcgcgaagcagccgtggctcgacaac

SEQ ID NO: 14111 - DNA, 1038 bp, Burkholderia mallei
atgcggagcatgaacgacgccacttccgaatccaacgcagccggcgcaagcgccggcttgccttttgcagggctcacgccggagcgcgtgctcgacgcactcgacagcgtgctgattcccgccggttcgcgcaccgacgggcgcctgctcgcgctcaatagctacgaaaaccgcgtctatcaggcaggcatcgaggacggcgcgccgatcgtcgcgaaattctatcgtccgcagcgctggtcgaacgacgcgatcctcgaagagcatacgttcgtcgccgagctggccgcgcgcgagattccggccgtgccgccgctcgcattcgacggccgcaccctgcacgaattcgacggttttcgcttcgcgatcttcgagcggcgcggcgggcgcgcgccggagctcgaccggcgcgatacgctcgaatggctcggccgcttcatcgggcgcatccacgcggtcggcgcgaccaagccgtacgccgcgcggccgacgctcgacctccgcacgttcggctacgagccgcgcgatttcctgatgtcgcacgacttcgtgccggacgacgttcggcctgcttacgaagcggcggtcgcgctcgcgctggaaggcgtcgagcgcgcgtacgagcgcgcgggcgacgtgcggatgttgcgcgcgcatggcgactgccatccgagcaacgtgctgtggaccgacgcgggcccgcacttcgtcgatttcgacgacagccggatggcgcccgccgggcaggatctgtggctgctcctgcccggagaccggccgggcgcgtcgcgcgcgctcaccgatctgctcgcgggctacgaggacttctgcgaattcgatccgcgcgagctgcatctgatcgaggcgctgcgcacgctgcggctcatccattacgcggcgtggctcgcgcgccgctgggacgatcccgcgttccccgccgcgtttccgtggttcaacacgcatcgctattgggaagcgcgcgtgctcgaattgcgcgagcagatcggcgcgatgcaggaagggccgttgtggcccgtg

SEQ ID NO: 14112 - DNA, 1788 bp, Burkholderia mallei
ttgagcgtcaagcctactctaagtaaaccgatcggcggccaggacgcgtcgtcgcctgccgtcgtgatgcgccgcctctggccgtatgtgaaaccgctggtatgggtgctcgtcgcaggcgtgctcgcgatggcggcggtcgccgcgacggaagccggaattcccgcgctgctcaagccgcttctcgaccatggcttcggctcgaagggagacatgacgacgaagctgtacgtgcctgcggcggtcgtcggtctcgcgctcgcgcgcgcgatcgcgcaatatgcgtccggctatctgctgcagtacgtgtcgaaccgcatcctgctcgatctgcggatccagatgttcgagcggatgattcacaccggcgtgtcgttcttccagcgcgagacggcaagcacggtgatcaacgcggtcgtgttcgaagtgaaccaggtgctgagcgtgctgatgggcgtgacgatcacgctcgtgcgcgattcgctgacggtcgtcttcctgctcggctatctgttctatctgaactggcgcctgacgctcatcgtcgcgattctgttgccgtgcatcggctggctcgtcggcaagatcaaccgtcggctgcgccggctgaaccgcgagcatcagacgctcacgaaccagctcgcgtacatcgtcgaggagaccgtcggcggctacaaggtcgtcaaggttcataacggcgaaccatacgagatcgggcgcttcaacgagctgagccgcaagctgcgcggctattcgatgcgcatgacggtatcgggcgggcttgcccagccgctcacgcagttcctcgcatcgatcgcgctcgctgtcgtgctgacgattgcggtcgttcagtcggcgaacgatcagacgacggtcggcggcttcgtcgcgttcgtgaccgcgatgctgctcatcatttcgccgctcaagcatctgatggacgtgaatcagccgctgcagcgcgggatgaccgcggccgagctgatcttcgggctgatcgacgagccgcgtgagcccgaaggcggcggcaagccgctcgcacgcgcgtcgggggcgatcgagttcagccatgtgtctttctcttacggcatgtcgcgcgacggccggcaaacgctcgacgacgtatcgtttaccgtcgcgccgggcgagatggtcgcgctcgcgggcccgtccggcagcggcaagacgacgctcgtgaatctgctgccgcgcttcttcgatccttcgtcgggctcggtgcgtgtcgatggcgtcgcgctccccgagtacagcctgcgcgacctgcgcaatcagattgcgatggtgagccaggacgtcgtgctcttcaacgatacgatcgccgcgaacgtcgcgtacggccaggcgcccgaacgcgaccgcgtggaggcggcactgcgtgcggcgaacctatgggaaaccgtcaccgcgatgcccgacggcatcgatacactcgtcggcgacaacggaatgcggctgtcgggcggccagcgccagcggctcgcgatcgcccgtgcgatctacaaggatgcgccgatcctgattctcgacgaggcgacgtccgcgctcgattccgaatcggagcggcacgtgcaggcggcgctcgagacgctgatgaaggggcgcacgacgctcgtgatcgcgcaccgcctgtcgacgatcgagcgcgccgaccggatccttgtgctcgaaggcggcaagatcgtcgaaagcggcagccaccgcgaattgctcgagcagggcgggctctacgcgcacctgcaccgcatccagttccagcaggacgcggga

SEQ ID NO: 14113 - DNA, 1467 bp, Burkholderia mallei
atgcataccgattcgagcttcaccttcgttctcttcggcggcaccggcgatctgtcgatgcgcaagatcctccccgcgctcttcgaagcgcatcgcgcgaacatgctgtcggaagccggcaggatcgtcgccgtggcccgccacgcggcggaccgcgaaggctacctgcagtgggtcgaggagcacgtgaagccgcacgcggcgaaggcggcgggcggcgcgttcgacgaagcggtctggcggagctttctcgagcgcatcgtctacgtgaagctcgacctcggccgcgcggaagattacgcgctgctgcgcgacacggtcggcgggctctcgggcatccgcgtgttctacctggcgacgggcccgtcgctgttcgtgccgatctgcaaggcgctcgccgcggtgggcctgaacgaaggcgcgcgcatcgtgctcgagaagccgctcggctacgacctgcgctcgtcgaacgcgatcaacgacgcggtgggcgagatcttcgccgaagaccagatctaccggatcgatcactacctcggcaaggagccggtgcagaacctgctcgcgctgcgcttcggcaacgcgctcttcgagccgctgtggcgccgcgaatgggtggagagcatccagatcacgatcgccgaggagctcggcgtcgaggcgcgcggcgatttctacgacaataccggcgcgctgcgcgacatggtgcagaaccacctgctgcagctgctgtcgatcgtcgcgatggagccgccgcactcgatggattccgattcggtgcgcgacgagaagctgcgcgtgctgcgcgcgttgaagcccgtcgatccgcgcgacatcggcaaggtcgcggtgcgcggccagtaccacgcgggcgtgatcaagggcgcgcaggtgcccgcgtacgcgaccgagcccggcgtgaaggcggacagccagaccgagacgttcgtcgcgctgaaggtcgagatcgagaactggcgctgggccggcgtgccgttcttcctgcgcaccggcaagcgcctcgccgaccgcgtcgcggagatcgtcgtcaacttccggccggtgccgcactcggcgctcggccccaccgcgctgcgcgcgggcgcgaaccgtctcgtgatccggctgcagccgaacgaatcgatccgcctgtactgcctcgcgaagcagccgggcgaagggatgaacctggcgagcgtgcacctcgacctcgcgttcgaccagttcttcaaggaaggccagatggaggcgtaccagcgcctgctgctcgacgtgatcaacggccgcctcgcgctcttcgtccggcgcgacgagcaggaagccgcatggcgctgggtcgagccgatcctgaacgaatgggcgcgcacgacgaagccgccgaagccgtacgcggccggcacctggggcccggccgcggcgagcgcgatgctcgcgcagcacggcacctgctggctcgaagaagaaaac

SEQ ID NO: 14114 - DNA, 462 bp, Burkholderia mallei
atgccgatgcgtgacgcgtcgcgcatcgcgccgcccgcgcgccccgtcaatcacccaggaatccgaatcatgtccgccacccaacccgaatggatcgccgtctgccgactggacgacatcccgccgctcggcgcacgcgtcctcacgcgcgaggccggcatgccgatcgccctctttcgcaccgcgagcgacgcggtgttcgcgctcctcgaccgctgcccgcacaagggcggcccgctgtcgcaggggatcgttcacggcgagcaggtcacgtgtccgctgcacggcttcaatgtcgcgttctcgagcggctgcgcgctgccgcccgacgaaggctgcacgagcgtcttcagcgtgaagcgcgacggcgacacggtgctgctcgagcgcaccgagctcgcgacgctcggcgtcgacgacgcggcgcagccggctgcgctcgcatcgccgggcgcagccgca

SEQ ID NO: 14115 - DNA, 972 bp, Burkholderia mallei
atgcatcgtttctgctgggccgcggccagcgttcgggtaaaataccgcgcttttggccgccgtcgacggcgccccgcccgcgaggcggggctcgccgagatcgacgaacgcgaattttggccgcctagaatacgcccggcgcgcgcatgcccggacgcatccggccgcgcggccggggaagtcaggaagaggaacgacatgaagaagctcgccctgtgcgcggccctcgcccttgcggcgggcggcgccttcgcgaaggaatggaagaccgtgcggatcggcgtcgacgccagctatccgccgttcgaatcgaccgcgccgagcggcgagatcgtcggattcgacgtcgatctcgcgaaggaagtctgcaagcggatcaacgcgaagtgcacatggacgccgcaggatctcgacggcatcatccccgcgctgaaggcgaagaagttcgacgtgatcgtgtcgtcgctgaccgtcaccgacaagcgccgcgagcagatcgatttctccgacaagctgtacgacgcgcccgcgcgaatgatcgcgaaggcgggctcgccgctcgcgccgagcgtcgagtcgctcaagggcaagcgcgtcggcgtcgagcagggctcgacccaggaaaccttcgcgaaggcgcactgggagccgaagggcgtgacgatcgtgtcgtaccagaaccaggatcaggtgtatgccgatctcggctcggggcgcctcgatgcgacgctgcaagacgagttgcaggccgactacggcttcctgcgcacgccgcgcggcaagggcttcgcctgggcaggtccggccgtgaaggatccgcgcacgctcggcgacggcaccgcgatgggcctgcgcaaggaagacgcggacctgaaggacgcgatcaaccgcgcgctcgcttcgatgcacaaggacggcacgtacgacaggctctcgcgcaagtacttcccgtacagcgtgtattcggcgaag

SEQ ID NO: 14116 - DNA, 1116 bp, Burkholderia mallei
atgaccgttctcaaaaccaccccgcttcatgccgcgcatcgcgccctcaacgcccgcatggtcgatttcggcggctgggacatgcccgtcaactacggctcgcagatcgaagagcaccaggcggtgcgcaccgatgccggcatgttcgacgtgtcgcacatgtgcgtcgtcgatttcacgggcccgcgcgtgcgcgcgttcttcgaacacgcgatcgcgaacaacgtcgcgaagctgcaaacgcccggcaaggcgctctactcgtgcctgctgaacccgcaaggcggcgtgatcgacgatctgatcgtctactacttcaccgaggaattcttccgcgtcgtcgtcaacgccggcactgcggaaaaggacatcgcgtggttcaaccagctcaacgagcaaggcggcttcggcctcacgatcgcgccgcgtcgcgacttcgcgatcgtcgccgcccaaggcccgaacgcgcgcgcgaaggtgtgggacaccgtcccctgcgcgcgcgcagcgacgagcgagctcaagccgttcaacgccgcgcaggtcgcgggcacgccgttcggcgatctcaccgtcgcgcgcaccggctacaccggcgaggacggcttcgagatcatcgtcccggcgacgcacgtggaagcgctgtggaacgcgctcgccgagcgcggcgtgcgcccgtgcgggctcggcgcgcgcgacacgctgcggctcgaggccggcatgaacctgtacggccaggacatggacgaaagcgtttccccgctcgacgcgggcctcgcgtggacggtcgacctgtccgcaccgcgcgcgttcgtcggccgcgacgcgctcgaagcgcacggctcgcgcgcggcattcgtcggcctgatcctgcagaaggagaacggccgcgcgggcggcgtgctgcgcgcgcaccagaaggtcgccacgccgcacggcgaaggcgagatcacgagcggcacgttctcgccgtcgatgcaggaatcgatcgcctttgcgcgcgtgccgaaggacgtcgcgatcggcgacacggtgcacgtgcagatccgcgacaagcaacttcccgcgcgcgtggtaaaactgccgttcgtgcgcaacggcaaggtcctcgctgcg

SEQ ID NO: 14117 - DNA, 750 bp, Burkholderia mallei
atgtggaataacgttcgccaactcaaccttgccgccagcgcgttgtacgcgctgttgctgctcgtgttggcggcggccggctgctactggctgatccagcgcccggcgttcgcgctgcgggaaatccgcatcgacggggacaccgagcacatcaacgcgccgaccgtgcgcgcgggcgtcgtcgggcggctgaagggcaacttcttcaccgtcgatctcgacctcgcgcgcgtcgcgttcgagcagatgccgtgggtgcgccacgcgagcgtgcgccgggtgtggccgaacgcgctcgccgtgacgctcgaagagtacaagccgctcggcacgtggggcaacgatcagctcgtgagcgtcgacggcgagctcttcaccgcgaaccagggcgagctcgatgcggagctgccgtcgttcgacggcccggagggcagcgcgaaggaggtcgtcgcgcgctatcgcgacttcgcgaaatggtttgcgccgatccacgcgacgcctgaggaggtgacgctgtcgccgcgctacgcgtggacggtgaagctgtcgaacggcatgcaggtcgagctcggccgcgagcgcaacagcgacacgctgcccgaccggatccagcgcctcgtcgccgcatggccgtcggtcacgcagcgctggggcggcgacatcgagtacgcggatctttgctatccgaacggattcgcgattcgcgcggcgggcatgcggttcctgaccgataccgacaagggcaagaag

SEQ ID NO: 14118 - DNA, 1734 bp, Burkholderia mallei
atgaaagcctcccgtttctttatcggcaccttgaaggaagcacccgccgacgccgagatcgtcagccacaagctgatggtgcgagccggcatgattcgccgcgtcgccggcggcatctataactatctgccggtcggcctgcgctcgatccgcaaggtcgaggcgatcgtgcgcgaggagatgaaccgggcgggcgcgattgagctgctgatgcccgccgtgcagcccgccgagctgtggcaggaatcggggcgctgggagcagtacggtcccgaactgctgcgcttcaaggatcgcaagcagaacgaattcgtgatcgggccgacgcacgaggaagtcgtcactgacatcgcgcgcaaccagatcaagagctaccggcagatgccggtgaacttctaccagatccagacgaagttccgcgacgagatccgtccgcgcttcggcgtgatgcgcggccgcgagttcatcatgaaggacgcgtactcgtttgataaggatcacgaaagcctcaaggaatcgtacaagaagatgtacgacgcgtacgtgcggatcttcacgcgcatcggcttcgagtttcgtccggtcgcggccgacaacggctcgatcggcggcagcggctcgcatgagtttcatgtgatcgcggataccggcgaggacgcgatcgcctattgcccgacgtccgacttcgcggcgaacgtcgaggccgccgaggcgctaccgctgctcgcgagccgcgcggcgcccgccgaggcgatgcaaaaggtcgcgacgcccggcaaggcgaagtgcgaggcggtggccgagctgatgggcatcccgctcgagcgcacgatcaagtcgatcgtgctcgcgaccgacaacgaaggcgccgagccgacgatctggctgctgatgctgcgcggcgatcacgatctgaacgagatcaagacggcgaagctgccgggcctggccggccaccgcttcgcgaccgaggcggagatcgtcgagtggttcggcacgccgcccggctatctcggcccgatcggcacgaagaagccggtgcgcgtggtcgccgatcgcacggtcgcgaacatgagcgatttcgtcgtcggcgcgaacgaggtcgattaccacatcgccggcgtgaactgggggcgcgacctgccggagcccgtcgtcgccgacatccgcaacgtgaaggcgggcgatccgtcgccggacggcaagggcgcgctcgacatctgccgcggcattgaagtcggccatgtgttccagctcggcaccaagtattcggacgcgatgggcgcgacgttcatcgacgaatcgggcaaggcgcagccgatggtgatgggttgctacgggatcggcatcacgcggattctcggcgcggcgatcgaacagaacttcgacgacaagggtatcgtctggcccgaggcgatcgcgccgttcgaggtcgtgctgtgcccgatgggctacgaccgcagcgatgcggtgcgcgaagcggccgacaagctctacgcggacctcgccgccgcgggcatcgacgtgatcctcgacgatcgcggcgagcgtccgggcgtgatgttcgcggattgggaactgatcggcgtgccgcatcgcctcgtgatcggcgagcgcggcctgaaggacggcaagatcgagtaccagggccgccgcgacgccgaggcgacgctgctgcccgccgattcggccgcggcggcggtcgccgaaaaggtccgcgcggcgctcgcccgc

SEQ ID NO: 14119 - DNA, 1068 bp, Burkholderia mallei
atgccgcgcccgatttccgccacgatccacaccgcagctctcgcgaacaacctctccgtcgtgcgccgccacgccgcccagtcgaaggtctgggcgatcgtcaaggcgaacgcgtacgggcacggtctcgcgcgcgtctttcccgggctgcgcggcaccgacggcttcggcctgctcgacctcgacgaggccgtgaagctgcgcgaactgggctgggcggggccgatcctgctgctcgagggcttcttccggtcgaccgacatcgacgtgatcgaccgctacagcctgacgaccgcggtgcacaacgacgagcagatgcgcatgctcgagaccgcgcggctgtcgaagcccgtgaacgtccagctgaagatgaacagcggcatgaaccggctcggctacacgcccgagaagtaccgggccgcctgggagcgcgcgcgcgcatgcccgggcatcggccagatcacgttgatgacccatttttcggacgccgacggcgaacgcggcgtggccgagcagatggcgacgttcgagcgcggcgcgcaaggcatcgccggcgcgcgcagcttcgcgaactcggccgccgtgctctggcacccgtcggcgcacttcgactgggtgcggcccggcatcatgctgtacggcgcgtcgccgtccggccgtgcggcggacatcgccgaccggggcctgaagccgacgatgacgctcgcctccgagctgatcgccgtgcagacgctcgcgaaagggcaggcggtcggctacggatcgatgttcgtcgccgaggacacgatgcgcatcggcgtcgtcgcgtgcggctatgcggacggctatccgcggatcgcgcccgagggcacgcccgtcgtcgtcgacggcgtgcgcacgcggatcgtcggccgcgtgtcgatggacatgctgaccgtcgatctcacgcccgtgccgcaggcgggcgtcggcgcgcgcgtcgagctgtggggcgagacgctgccgatcgacgacgtcgccgcgcgttgcatgacggtcggctacgagctgatgtgcgcggtcgcgccgcgcgtgcccgtgcgtgccgag

SEQ ID NO: 14120 - DNA, 1572 bp, Burkholderia mallei
gtgcttgggctcgtgcggccggaatggccgccgtgcgacgcgcgttcgttcgatcggcccggccgccgggcgagcgggccatcaggcgagtctcgagccgcggagccgccgcgggcgcgacgcacatgtttgcgccgcgttaggccggttcggcattctcgcggcctgcccgcacgcgttcctcttctctccctgcgctttgcgccccaccgacgcgcggctgccggattgccgccgcgcgccggaaaacgcaccggcatgccgcgcgaacgaccgtcgaaacccgccggaaagccgacgcccgtcggtccggccacgccgccgcgcgccgcccgccgtcggccgtccggccaacgcggcggcccgccgcgccgcgtccggcgaaaacccgccgcgcgtggcgtaaaatacgcgctttcccttccccctgatccttttatgacgctcgcctccacgcccgacatcattgccgagctcaaagccggccggatggtgatcctggtcgacgaagaagaccgcgaaaacgagggcgatctcgtgctcgccgccgaattcgtcacgccggaagcgatcaacttcatggcccgctacggccgcggcctgatctgcctcacgctcacgcaggagcgctgcaagcagctcaacctgccgctgatgacgtatcgcaacggcacccagtacggcaccgcgttcacggtcagcatcgaggcggccgagggcgtgacgacaggcatctcggccgcggaccgcgcgcgcacgatcgcaacggcggtcgcgcacgacgtgcgccccgagcacatcgtgcagccgggccacgtgttcccgatcatggcgcagccgggcggcgtgctcgtgcgcgccggtcacaccgaggcgggctgcgatctgacggcgctcgcgggcctcacgcccgccgccgtgatctgcgagatcatcaaggacgacggcacgatggcgcgcctgccggatctgctcgaattcggcaaggagcacggcctgaagatcggcacgatcgccgatctgatccactaccgcagccgcaccgagtcgatcgtcgagcgcgtcgccgagcgcacgatgcaaaccgcgcacggcccgttcaagacggtgctgtaccgcgatcaccccacgggctcgccgcacatcgcgctcgtgcgcggcacacccacgccgaacgacgagacgcccgtgcgcgtgcacgagccgctgtccgtgctcgatctgctcgaaaccggcgtgtcgacgcactcgtggacgctcgacgccgcgatgaaggaaatcgcggcgcgcgaactcggcgtgatcgtgctcctgaattgcggcgacacgaaggagcatctcgtcgacgtgttcctcgcgttcgacgagaaggagaaggcggccgagctcaagcgccggccggtcgatttcaagacgttcggcatcggcgcgcagatcctgcgcgacgtcggcgtcggcaggatgcaggtgctgtcgaatccgcgcaagctcggcagcatgtcgggctacggcctcgaagtcaccggcttcgcgccgatgccgggaagcgcggcgcccgcgtccggcgccgca

SEQ ID NO: 14121 - DNA, 1230 bp, Burkholderia mallei
atgagcaaagactacaaggatctgctggttgccctcgacatcggcacgtcgaaggtggtggccgtcgtcgccgagctgaagggcgagggccactacgaggtcatcggcctcggccagagcgagtcgaaggggctgaagaagggcgtcgtggtgaacatcgaggccaccgtccaatcgattcagcgcgcgctcgaggaagccgagctgatggccgactgcaagatcaccaacgtcttcaccggtatcgccggcagccacatccgcagtttcaactcgagcgggatggtcgcgatcaaggaaaaggaagtcacgcagaccgacgtcgcgcgcgtgatcgagaccgcgaaggcgatcaacattccgaccgaccagcaggtgctgcacatcctcacgcaggaattcatcatcgacggccaggaggacgtgcgcgagccgatcggcatgagcggcatccgcctcgaggtgaaggtgcacatcgtgacgggtgcggtgagcgccgcgcagaacatcgtcaagtgcgtgcgccgctgcgggctcgaagtgaacgacctgatcctgcagccgctcgcgtcgtcgctcgcggtgctgacggaagacgaaaaagacctgggcgtggtgcttgtcgacatcggcggcggcacgaccgacatcgcgatcttcgccgagggcgcgattcgccacacggcggtgattccgatcgcgggcgaccagatcacgagcgacatcgcgatggcgctgcgcacgccgacgcccgacgcggaggacatcaaggtcggctacgggatcgcgaagcaggcgctcgccgatccggacgagatggtcgaagtgccgggcctgggcgagcgcggtccgcgcacgctgtcgcggcaggcgctcgcggccgtcatcgagccgcgcgtcgaggagctgttctcgctcgtgcagcaggtcgtgcgcgagtccggttacgaagagttactcagttccggtgtcgtgctcacgggcggcgctgcgatgatgcccggcatggtcgagctgggcgaagacatttttctgaagccggtgcgcatcggcgcgccggaatatgcgggcgggctctcggacgtcgtgcgcaatccgcgctattcgacggcgatggggctgctcgtcgagggcagcgctcaacggatgcgcggccgcaaggtcgccgtgcaatccggctccgcggggcagatcttctcgcggatgaaggagtggttcctcagcaatttc

SEQ ID NO: 14122 - DNA, 891 bp, Burkholderia mallei
atgctcgactatgcactgctcgatgcgcttgccgaagtgatccgccacggctcgttcgagcgggcggcgaaagcgctcaacgtgtcgccttcggcggtgtcgcagcgcgtgaagctcttggaggagcgcgtgggcagcgtgctcgtgaagcgcgggcagccgtgcgtcgcgacgacctcgggcgcgctgctgtgccgccacaccgagcgcgtgcggatgctggaggccgagctgtccgggcacatgcccgcgttcgcgggcgcgcaagcggcggcgtggccgacgctgcgcgtggccgtcaacgacgacagcgtcgcgacctggttcgtcgacgcggttggcccgttctgcgcgcaaagcggcacgctgctcgatctcgtgatcgacgatcaggactacaccgcggagcggattcgcgacggcagcgtgcagggcgcggtgacggcgctcgccgagccgattcagggctgccgctcgacgcgccttggccggatgcgttatcacgcggtgtgctcgcccgcgttccacgcgcgctatttcggcaacggcgtcaatcgcgacgcgctgcggcgcgcgccatgcgtgatgttcaatccgaaggacagcctgcaggcgcgcttcatccggcgcgcgacgcgcgtcgatctcgatccgccgcagcactggattccgcacgtcgccggttatctgcgcgcgtgcgaggcggggctcggctggggcatgtgtccggagcggatggtcgagcgccagatcgccgagggcgggctcatcgatttgtcggacggaaggagcatcgacatcgagctctactggcagagctggcggctgtcgatcggctggctggacgagttcagcgcggcgctcaaggcgagcgccgcgcagtatctcgac

SEQ ID NO: 14123 - DNA, 888 bp, Burkholderia mallei
atgaacaacgaaacggtggcggcgctcgcggcgcgcgcgttgagcgtcggctaccgggatcaccgggtgctcgacggcctcgatctgacgatcgcggtggggcgcgtgaccgcgctgtgcggcccgaacggctgcggcaagagcacgctgctgcgcacgctcgcggggctgcagcccgcgctgtcgggcacggtcgacgtcaacggcgcgccgctcggttcataccggcggcgcgcgctcgcgcgcacgctgacgatgctcgcgcagttcaaccagattcccgcggggctcacggtgcgcgagctcgtcgcgtacggccgctacgcgcacggcggctggctgcgcgggctcgcgcgcgcggaccgcgacgcgatcgacgaggcgctcgcggcgacgggcctcgaacccgacgcggcgcgcgacgtggccgcgctgtcgggcggcgagcggcagcgcgcctggatcgcgatggcgctcgcgcagcaggcgcccatcgtgctgctcgacgagccgaccacttatctcgacatccatcaccagctcgacatcctgcgcgagctgcggcggctcaatcgcgcgcgcgggctcacgatcgtctgggtgctgcacgacctcaaccaggcggccgcgtacagcgacgagatcgtgctgatgcgcgccgggcggatcgtcgcgcagggcacgcccgatgcgatgctcgagccgcgtcacctgcaggcggcgttcggcgtgacgatgctcaagaccgcgcatccgctcacgggcgcgccgatgtgcgtgccggcgtacgagggcgtgctcgataccgatcatgccgatccggcgcacgcggccgcgcccggggggcgcggcgcggccgtcgcgcgcgcgcgtcgggatctcgccgca

SEQ ID NO: 14124 - DNA, 1125 bp, Burkholderia mallei
gtgctcctcaagaatcaggaccgccaacttccgctcgatgccgcgggcctgaagcggatcgccgtgatcggcggccatgcggacgcggccgtactcgcgggaggcggatcgggcaatacgcggcatcccgtgaccggcgcgtttcccggatgcggcggcctcaccttcccgaccacgacgggctgcaactggtggccgaatccgtggctgaagctcgacgtgccgatcgtccaggcgatccgcgacctcgcgccgggagcaacggtcgctttcgccgggaacagcgatcggcaatcgccgttcgccgcgtacacaccgcagcaaatcgatgcggccgccgatctcgcgcgacgctcggacgtggcgatcgtcttcgtcacgcaggccgccggcgaggacttcggcgaactgcgcagcctcgcgctcgcgaacccgacgaatcaggacgcgctcgtccaggccgtcgcgcaagccaatccgcgcgtgatcgtcgtcgtcgagagcggcaacccggtgctgatgccgtggcgcgaccaggtgcccgcgatcgtccaggcatggttccccggtgaaggcggcggcaacgcgatcgccaacgtgctgttcggcaaggtcaacccgtcgggcaagctgcccgtcacgttccccgcgcgcgacgaggacacgccgacctggggcgcggacggcacgctcgcgccgaaccccgtctactcggagaagctgaagatcggctatcgctggtacgacgcgcatcgcatcgcgccgatgttcccgttcggacacggcctgtcgtacacgcacttctcgtattccgggctcgaagtcaagcagcgcccggacgcggcgacgacggtgtcgtttgcgctgaccaacgatggcccggtggccggcgccgaagtgccgcaggtctatctcggcgatctcgatgatccgcaggaaccgccgaagcgcctcgtcggatgggacaaggtgggcctgcgcgcgggcgaaacgcggcgcgtgcgcatcgtgattcccgccgagatgcggcgcgtgtgggatgcgagccgcaacggatgggcgctcgcgaagggcgagcgcatctacgtgggcgcatcttcgcgcgacattcggcttcagcagccg

SEQ ID NO: 14125 - DNA, 525 bp, Burkholderia mallei
ttggcgcacccgggtagcaccgcgccggccagggccgtcccgcctgcgccgcctcgtcttgcccgccgagtcggcggccaccgcgcgcgtcgccgcgacgaaccgakmccgcgatcggccactcgtccgatcgcggcgttttcacgtcgctcccgcgcgagcgccgccttcgcgcgcgcggcgcgctcgcccgtggcgacacgcgcccgtgcgacacgccgacgcacgtcgtccgcatccggcccgcgtccggccgccgccgcaccggccccgcccagtcacgtcacgctcaaccaggccacgtcacaccgagccgcgccacgtcacgcgagatcgaacagcaacacctccgcgcgctcgccgcgctcgaacacgacgcgcccgacctcggcgatccgcgcgccgtcgccggccgcgagcatctcgccgttgaccaccacgcacccgcgcgcgacgtgcacgtacgcgcgccgcccggccggcagcgcgaactccgcgcgctcgtcgccgtcgacgaggcccgcg

SEQ ID NO: 14126 - DNA, 345 bp, Burkholderia mallei
atgagcgctgcttgctcgccgatcgacttgtccggcatgcgcgcatcggcggacgccgcgtgcgcgctgctgaaagtgctgtcgaatccggatcgattgctgatgatgtgcgagctcgcacaatgcggcgagctgtgcgtgagcgacatcgaggcgcggctcgatatccatcagccgacgctgtcgcaacagctcggcgtgttgcgcgagcatgcgctcgtcgatacgcggcgcgacggcaagaacatttactacgcgctgacgagcgagcccgcggtcgccatcatggccgtgctctacgagcagttctgcgcgacgcaccaaaagggaaagcgccgtggccgt

SEQ ID NO: 14127 - DNA, 884 bp, Burkholderia mallei
cgcgatacgcgcgggcgaacggaggcggacatgaagccccgctacgaacgggtcgcgattcccgacggctgctcggtgcgcgtgtatcggcgccggctcgcgcagattccgttcgaatggcatcaccatccggaatacgagctgacgctcacgctcaatagcctcggcaagcgcttcgtcggcgatcacgtcgccgattacgcgggcgacgatctggtgctcgtgccgccgaacctgccgcacacggggtgtcggacgagcgcctcgatcccggcgagccgcttgtcgcgctcgtcctgtggttcgacggcgattgggcgcaacgcgtcgccgactgctgcccggagttcgccgggctgcgcacgctgctgcgccgggccgcgcccgggctcgcgttcgcgccgcaggccgccgccgacgtgcgcgcccggctgcccgcgctcgtcgatcgcgcgccgcgcgtgcggctcgcggccgcgctcgacgtgctcgcgtgcctcgccgacgcgcccgcgacgccgctcgcgacggccgccgcctaccgtgcagcctcgggcgccgcgctcgcgcccgaggccgagcggctcgatcgcgtgctcgatctgctcgaccgccgctttcacgagccgttgcgcgtcgccgagctcgcggcgctcgcgcatctgtccgagcgctcgctacagcggcgcttcgcgcggcacgtcggcgagagcatcggcagctatctgcagcggctgcggctctcgcacgcggcgcggctgctcgcgtcgaccgactggcccgtgtcgctcgtcgcgacgcgctccggctacgcgaacctcgcgaacttcaatcgccagttcctcgccgcgcgccgggtgacgccgcgcgcgtaccggcgcttt

SEQ ID NO: 14128 - DNA, 492 bp, Burkholderia mallei
atgaaagtggcgatcggctgcgacgaagcggcctacgcgctcaaggagtcgatcaagcggcacctgcgcgcgacgcaccccgagctcgagctggtcgacttcggcacgcacagcgcggacgaggcggtgctgtaccccgatatcgcgatcgaagtcgcgcagcgcgtcgcggccggcgaatttccgcgcgcgatcctgctgtgcggcacgggcatcggcgtggcgatctccgcgaacaaggtgccgggcatccgcgccgcccagtgccatgacacctactcggccgagcgcgcgcggcgcagcaacgacgcgcagatcgtcacgatgggcgcgcgcgtgatcggcaccgagctcgcgaacagcatcgtcgacgcatggcttagggcagaattcgacggcggccgctcgcagccgaaggtgcagcggatcgccgactacgaacgccgggcgggcctcacccaggccggcccgaatgacgcgcaccgcggttca

SEQ ID NO: 14129 - DNA, 1311 bp, Burkholderia mallei
atgccgctccccaccgtccccaccgcaccgttttgcccggcggaagtcaaaggcagcatcgcgatcgacgccggcgtctcccgtctcaccaaactgcgccgattcgctggcccggggctgctcgtcgcgatcggctacatggatcccggcaactgggcaaccgacattcaggccggctcccagttcggctacgcgctgttgtgggtcgtcgtgttttcgagcgtcgccgcgatcttcctgcagacgctcgccgcgcggctcgggctcgtcgccggtcgcgatctcgcgcaggcgagctacgaccgttacgggccgttcggccggatcgttcaatggatcaccgccgaggtgtcgatcatcgcgtgcgacatcgccgaagtattgggctgcgcgctcgccttcaagctgctgctcggcgtgccgctcgcatggggcatcgtcctcaccgcgctcgatacgatgatcgtcctcggcttgcagggcaaggggttcaggcaggtcgaggcgatcgtgttcgggctgatcggtacgatggcgttctgcttcgtcgcgcaggtcgcgatggtgccgcccgattggcgcgccgtgctgcatggcctcgccccgagtgtgccgggccacgatcgcaaggatgcgatcgtgctggcgctcggcatcgtcggcgcgaccatcatgccgcacaacctctacctgcattcgtcggtcgtgcagacgcggcgcgtcgtcggcggtgcgggcgacgcaatcaaggaaacgctcgcgatggtccgcatcgacacgtggatatcgctcgtcgtcgcgatgctcgtcaatgccgcgatcctcgtgctggccggcgcggcgttccatgcgacgggccagacgggcgtcgccgacatcgagcaggcctatcggctgatcacgccgatcgtcggcggcgcggccgcgtggctgttcggcatcgcgctgctcgcgtcgggccagagctcgacgcttaccggcacgatcgccggtcaggtcatcatggatggctttctgcacatgaagatgccgtgctatcagcgccggctgatcacgcgcgggctcgcgctcgcgcctgcgctcaccggcgtgctgtggctgggcgacggcgcgctcgggcagttgctcgtgtggagccaggtgctgttgagcctgcaattgccgttcgcgatgtggccgctgatccgctcggtcggcgatcggtcgatcatgcgcgaatacgcgatcggccgtggcacgaaagtcgtcgcatggacgctcttcgtcctggttagcataacgaatctggtgctcgtcacgggcttcgtcggg

SEQ ID NO: 14130 - DNA, 783 bp, Burkholderia mallei
atgagcacgctcacccattccctgaaagcacgtttgcgcgacggcgacgagccgctgttcggcctatggctgacgctcgcgagcgaggcggcgaccgaggcgctcgcgcacgccggtttcgactggctgtgcatcgacatggagcacgcgccgaacgacagccgcgacgtcgccgcgcaactgcgcgcgctcgcggccgcgcatctgccgagcgagcccgtcgtgcgggtgccggcgcgcgagccgtggttcgtcaagcgggcgctcgacgcgggtgcgcgcacgctgatgttcccgggcgtcgagacggccgacgaggccgcgcatgcggtgcggctcacgcgctttcaggcgcccgatgcgccggacgggctgcgcggcgttgcgggcatcgtgcgcgcggccgcttatgggatgcggcgcgactacgtgcagacggcgaacgcgcagatcgcgacgatcgtgcagatcgaatcggcgcgcggcgtcgacgaagccgagcggatcgcggcgacgccgggcgtcgattgcgtattcgtcgggcccgccgacctgtccgcgagcctcgggcatctcggcgacacgaagcatccggacgtcgcggccgcgctcgagcacgtgctcgcggccgggcggcgcgccggcgtgccggtcggcatcttcgccgcggatacggccggcgcgcgccagtctctcgaagccggattccgcgtggtcgcgttgtccgcggacgtcgtgtggctgctgcgcgcgacgcgacaggcgctgcaggaggtgcgggga

SEQ ID NO: 14131 - DNA, 768 bp, Burkholderia mallei
atggcaaagatcttctgcgtggcgaaccagaagggcggcgtaggcaagacgacgacgacggtcaatctcgccgcgagcctcgcggcgcaggggcagcgcgtgctgctgatcgatctggacccgcagggcaatgccacgatgggcagcggcatcgacaaggcggaatgcgagtcgacggtctatgaggtgctggtcgatggtgtgacggtcgcggacgcgcgcgtgcgtcccgaagcggtcaagtacgacgttttgccggcgaaccgcgaacttgccggtgcggaaatcgagctggtcagcgtggagaatcgcgagcgccagttgaaggctgcgctcgcgaaagtcgctgacgattacgatttcgtgctgatcgattgtcctcccgcgctgtcgttgctgacgctgaatggtttgtgtgcggcgcatggcgtcgtgatcccgatgcaatgcgaatatttcgcgctcgagggcttgtccgacctcgtcaacacgatcaagcaggtgcatgcgaacctgaatcgggatttgaaagtcatcggtctgctgcgagtgatgttcgatccgcggatcacgctgcagcaacaggtttccgatcagttgaaggcgcacttcggcgacaaggtgttcgacgctgtgattccgcgcaacgtgcgccttgccgaggcgcccagctatgggctccccggcgtcgtattcgatcgcggttcgcgcggcgcgcaggcgtacattcagttcggcgcggaaatgatcgagcgggtgcgcgcgctt

SEQ ID NO: 14132 - DNA, 2595 bp, Burkholderia mallei
atgagaatcgacaagctcaccaccaaattccaagaggcgctctcggatgcgcagagtttcgccgccgggcgcgacaaccagtacatcgaacccgtccacgtgctggccgcgctcgtcgcgcagcaggacggctccgcgcgctcgctgctgtcgcgtgcgggcgtgcacatccaggcgttgcaaggcgcgctcaacgaagcgatctcgcgcctgccgcaggtgacgggcacgggcggcgacatccaggtcggccgtgaactcgcgggcctgctgaaccaggccgacaaggaagcgcagaaactgaacgacacgttcgtcgcgagcgagatgttcctgctcgcggtggccgacgacaagggcgaagccggcaagctcgcgcgccagcacggcctcacgcgccgcgcgctcgaatccgcgatcgccgcggtgcgcggcggctcgcaggtgcacagccaggatgccgagagccagcgcgaggcgctgaagaaatacacggtcgatctgaccgagcgcgcgcgcgcgggcaagctcgatccggtgatcggccgcgacgacgagattcgccgctcgatccagatcctgcagcgccgcacgaagaacaatccggtgctgatcggtgagccgggcgtcggcaagaccgcgatcgtcgaagggctcgcgcagcggatcgtcaacggcgaggtgcccgagacgctgaagaacaagcgcgtgctgtcgctcgacatggcggcgctgctcgccggcgcgaagtatcgcggcgagttcgaggagcgtctgaaggcggtgctcaacgacatcgcgaaggacgagggccgcacgatcgtcttcatcgacgagatccatacgatggtcggtgcgggcaaggccgaaggcgcgatggacgcgggcaacatgctcaagcccgcgctgtcgcgcggcgagctgcactgcatcggcgcgacgacgctcgacgaataccgcaagtacatcgagaaggatgccgcgctcgagcgccgcttccagaaggtgctcgtcgacgagccgagcgtcgaggcgacgatcgcgatcctgcgcgggctgcaggagaagtacgaactgcatcacggcgtcgagatcaccgatccggcgatcgtcgccgcggcggaactctcgcaccgctacatcaccgaccgcttcctgcccgacaaggcaatcgatctgattgacgaggccgcgtcgaggatcaagatggaaatcgactcgaagcccgaagaaatggacaagctcgatcgccgtctgatccagttgaagatcgagcgcgaagcggtgaagaaggagccggacgaagcgtcgcagaagcgtcttgcgctgatcgaggaggaaatcgagcggctcgggcgcgaatacgcggatctcgacgagatctggacggccgagaaggcagccgtgcagggcagtgcgcaactgaaggaagagatcgacaaggtgcgtgccgacattgcgcgcctgcagcgcgaaggcaagctcgagaaggtcgccgagctgcagtacggcaagctgccgcaactcgaggcgcggctcaagcaggtcacgcaggccgaggagagcgagcagcacaatccgacgcggccgcgcctgctgcgcacgcaggtcggcgcggaggaaattgccgaggtcgtctcgcgcgcgacgggcattccggtgtcgcggatgatgcagggcgagcgcgagaagctgctgcacatcgaagagaagctgcatgagcgcgtggtcggccagaacgaggcgatcgacgcggtcgccgacgcgatccgccgctcgcgcgcgggcctcgccgatccgaaccgtccgtacggctcgttcctgttcctcggcccgacgggcgtgggcaagaccgagctgtgcaaggcgctcgccggcttcctgttcgattcggaagagcatctgatccgcatcgacatgagcgagttcatggagaagcacagcgtcgcgcggctgatcggcgcgccgcccggctacgtcggctacgaggaaggcggctatctgaccgaagccgtgcgtcgcaagccgtacagcgtgatcctgctcgacgagatcgagaaggcgcacccggacgtgttcaacgtgctgctgcaggtgctcgacgacggccggatgacggacgggcaggggcgcaccgtcgacttcaagaacaccgtgatcgtgatgacgtcgaatctcggctcgcagctgatccagtcgatgtcgggctcgtcgcaggaagagatcaaggatgcggtgtgggtcgaggtcaagcagcacttccgccccgagttcctgaaccggatcgacgacgtcgtcgtgttccactcgctcgaccgcggcaacatccaggcgatcgcgaagattcagctcgcgcgtctgcacgaccggctcgcgaagctcgacatggcgctcgacgtgtcggaggccgcgctcgagcagatcggcaaggtcggctacgatccgctgttcggtgcgcggccgctcaagcgcgcgatccagcaggagatcgagaatccggtcgcgaagctgatcctcgcgggccgcttcgggccgaaggacgtgattccggtcgacatgcaggacggcaggttcgtgttcgagcgcgtcgtgcat

SEQ ID NO: 14133 - DNA, 696 bp, Burkholderia mallei
atgacggtgcaacagcgtcgccgccccccgattgccagccgggaaacgctgcaagcattgctgtcggagggtgcgcaagcgctgggcgtcgcgttgagcgatgcgcaacgcggcgcactgcttgattacgtcgcactgctcgccaagtggaatgcggtttacaacctcaccgcgatccgcgatccgcggcaaatgctgattcaacacatcctcgattcgctatcgatcgtcccgcatctcggggcgcacggcgcggcggcggctgcgctcgatgtcggttccggaggcggtttgccgggcgtcgtactcgcgatcgcgctgcctggctggcgggtcacgttgaacgacatcgtccataagaaatccgcattccagaaccaggcgaaggcagagttgaagctcggcaatctgtccgtcgtgacggggcgcgtcgaaacgctgcgcccgggcgccgacgtgccggcgaaattcgatgtgatcgtgtcgcgcgcattcgcggatctggcggacttcgttacacttgcccggcacctcgttgcgccgggcgggtcgatctgggcgatgaagggcgtgcgtcccgatgaagaaatcggtcgcttgcccgatggcgcgcgcgtcaaacagatgatccgcctgacggtcccgtcgctcgatgcggaacggcacttgatcgaagtcgagctcgacgaagcaatt

SEQ ID NO: 14134 - DNA, 852 bp, Burkholderia mallei
atgaatctcgccgggttcgaagtcgggctcgacaagccgttcttcctgatcgccggcacctgcgtcgtcgaatcggagcagatgacgatcgacaccgcgggccggctgaaggagatctgcgcgacgctcggcgtgccgttcatctacaaatcgtcgtacgacaaggccaatcgcagctcgggcaagtcgtttcgcgggctcgggatggacgaggggctgcggattctcgccgaggtgaagcgccagctgaacgtgccggtgctcaccgacgtgcacgagatcgacgagatcgcgcccgtggcggccgtcgtcgacgtgctgcagacgcccgcgttcctgtgccgccagaccgatttcatccgcgcgtgcgcgcaatcgggcaagcccgtgaacatcaagaagggccagttcctcgcgccgcacgacatgaagaacgtgatcgacaaggcgcgcgacgccgcgcgcgacgcggggctctcggaagaccgtttcatggcgtgcgagcgcggcgtgtcgttcggctacaacaatctcgtgtcggacatgcgatcgctcgcgatcatgcgcgagacgggcgcgcccgtcgtgttcgacgcgacccactcggtacaactgccgggcgggcagggcacgagctccggcggccagcgcgaattcgtgccggtgctcgcgcgcgcggcgctcgccacgggcgtcgcggggcttttcatggagacgcatccgaatccggccgaggccaagtccgacggcccgaacgcggtgccgctcggcaggatggccgcgctgctggagacgctcgtcacgctcgatcgggcggtgaagcgcgtgccgttcctggaaaacgatttcaat

SEQ ID NO: 14135 - DNA, 403 bp, Burkholderia mallei
atggaactcaagctcctgaattcgaatggtcaggaaggtgcggtggtcaacgcgtcggacgtcgtgttcggccgtgactacaacgaagcgctgatccaccaggtcgtcgtcgcttatcaggcgaacgcccgccagggcaatcgcgcgcagaaggatcgcgagcaagtcaagcacacgacgaagaagccgtggcgccagaagggtacgggccgcgctcgtgccggtatgtcgtcyagcccgttgtggcgtggcggtggtcggattttcccgaactcgcccgacgaaaacttctcgcacaaggtcaacaagaagatgcatcgcgcaggtctctgctcgatcttctcgcagctggcccgcgaagccgtctgtcggtcgtcgaggacatcgttctcgaagcgccgaa

SEQ ID NO: 14136 - DNA, 393 bp, Burkholderia mallei
atgcgtcaccgtcatggtctgcggaaactgaaccgcacgagcagccaccgtctggctatgctccgcaacatgtccaactcgctgatcgagcacgaagtcatcaagacgacgctgccgaaggcgaaggaactccgtaaggtcgtcgagcccctcatcacgctcggcaagaagccgtcgctcgcgaaccgtcgcctggcgttcaaccgcctgcgcgatcgcgattccgtcgcgaagctgttcgacgtgctcggcccgcgcttcgcgaaccgtccgggtggctatctgcgcatcctgaagttcggtttccgcgtcggcgacaacgcgccgatggcgctcgtcgaactgctcgaccgtccggaagtcgaagagaccgaaaacgtccaggaagccgaa

SEQ ID NO: 14137 - DNA, 624 bp, Burkholderia mallei
atggagaaacacatgaaagtcgtcgctttcgagcgccaacagcaaggtacgggtgcgagccgccgcctgcgcaacgccggtaagaccacgggtatcgtgtacggtggcgaagccgccccgcaaatgatcgaactcgatcacaacgcgctgtggcacgcgctgaagaaggaagccttccactcgtcgatcctcgatctcgaggtggccggcaagtcgcaacgcgtgctgctgcgtgacgtgcaataccatccgttccgccagctcgtgctgcacgtggacttccagcgcatcgacccgaagaagaagctgcacacgaaggcgccgctgcacttcctgaacgcggaaacgagcccggccgtgaagctgtcgagcgcggtcgtgtcgcacgtcgtgacggaaatcgaaatcgagtgcctgccggccgacctgccggaattcctcgaagtcgatctgtcgaaaatcgaagcaggccagtcgctgcacgcgaaggacatcgcgctgcccaacggcgtcgcgctgaccgcgcacgtcgacgcagaaaacccggtgatcgcctcggcgacgattccggccggcgccgtgtcggatgaggcggctgcgggcgaaggcgaaacgccggcggcc

SEQ ID NO: 14138 - DNA, 1089 bp, Burkholderia mallei
atgacgaatcgaaacgacgaaacgcagcagatgacggcgatcgtctgccacgcccccgaggactaccgcgtcgagcgcgtcgcgaagccgcgcgcgaacgcgcgcgagctcgtgatccgcatcggcgcgtgcggaatctgcgcgagcgactgcaagtgccacgccggcgcgaagatgttctggggcgggccgagcccgtgggtcaaggcgcccgtgattcccggccacgagttcttcggctacgtcgaggcgctgggcgagggcgcggccgagcacttcggcgtcgcgctcggcgatcgcgtgatcgccgagcagatcgtgccgtgcggcacgtgccgctattgcaagtcgggccagtactggatgtgcgaggtccatcacatcttcggctttcagcgcgaggtcgccgacggcgggatggccgagtacatgcgcataccgtcgggcgcgatcgtccacccgatcccgctcggcatctcgctcgaggacgcggcgatcatcgagccgctcgcgtgcgcgatccacacggtcaaccgcggcgacatccagctcgacgacgtcgtcgtgatcgcaggcgcgggcccgctcggcctgatgatgacgcaggtcgcgaagctgaagacgcccaggcggctcgtcgtcgtcgatcccgtcgaagcgcggcgcgcgctcgcgcgcgcatacggcgccgacgtgacgatcgatccggcccgcgaggacgcgcccgcgatcgtgcgcgcgctgacggggggctacggctgcgacgtctacatcgagacgaccggcgtgccggcgggcgtcacgcagggcatggcgctgatccgcaagctcggccgcttcgtcgagttctcggtgttcggcaaggatacggcgctcgactggtcgatcatcggtgatcgcaaggagctcgacgtgcgcggcgcgcatctcggcccgtattgctatcctgtcgcgatcgatctgctcgcgcgcgggctcgtcacgtcgaagggcatcgtcacgcacggcttctcgctcgacgaatgggacgaggcgatccgggtcgcgaactcgctcgactcgatcaaggtgctgatgaagccgcgcggc

SEQ ID NO: 14139 - DNA, 2865 bp, Burkholderia mallei
atgagcgacaccacgcttgcgaaaagtttcgagccccagaccatcgaatcccaatgggggccggaatgggaaaagcgcggctatgcgacccccgcgctcgatccgagccggccggacttctcgatccagttgccgcccccgaacgtgacgggcacgctgcacatgggccacgcgttcaatcagacgatcatggacgggctcgtgcgctaccaccggatgctcggccacaacacgctgtgggtgcccggcaccgaccacgcgggcatcgcgacgcagatcgtcgtcgagcgccagctcgatgcgcagggcgtgtcgcgccacgatctcggccgcgagaaattcgtcgagcgcgtatgggaatggaaggagcggtccggctcgacgatcacgggccaggttcgccgcatcggcgcgtcgcccgactggtcgcgcgaatacttcacgatgaacgacaagatgtcggaggccgtgcgcgaagtgttcgtccgcctctatgaacaagggctcatctatcgcggcaagcgcctcgtgaactgggaccccgtgctgctcaccgccgtgtccgatctcgaagtggtgagcgaggaggaaaacggccatctgtggcacatccgatacccgctcgcggacggctcgggccacctgagcgtcgcgacgacgcgccccgagacgatgctcggcgacgtcgcggtgatggtgcatccggaagacgaacgctaccggcacctcgtcggccggcacgtgaagctgccgctgtgcgagcgcgagattccgatcatcgcggacgactacgtcgatcgcgagttcggcacgggcgtcgtgaaggtcacgcccgcgcacgatttcaacgactaccaggtcggcctgcgccacgcgctcgcgccgatcgagattctcacgctcgacgcgaagatcaacgacaacgcgcccgccgcttaccgcggcctcgatcgcttcgacgcgcgcaaggccatcgtcgacgagctcgacgcgcagggcttgctcgaatcggtgaagccgcacaagctgatggtgccgcgcggcgaccgcacgggcgtcgtgatcgagccgatgctgaccgaccagtggttcgtcgcgatgacgaagcccgcgccgcaaggcaccttccatccgggcaagtcgatcaccgaggtctcgctcgaggtcgtgcgccgcggcgagatcaagttcgtgcccgagaactggacgaccacctactaccagtggctcgagaacatccaggactggtgcatctcgcgccagctgtggtggggccaccagattcccgcgtggtatggcgaaaacggcgagatcttcgtcgcgcgcaacgaagaggacgcgcgcgcgcaagccgccgcgaagggctacacgggtgcgctcaagcgcgacgacgacgtgctcgacacgtggttctcgtcggcgctcgtgccgttctcctcgctcggctggccgaacgagacgcccgagatgaaacacttcctgccgtcgtcggtgctcgtcaccggcttcgacatcatcttcttctgggtcgcccggatggtgatgatgacgacgcacttcacgggcaaggtgccgttcgggacggtctacgtgcacgggctcgtgcgcgacgccgaaggccagaagatgtccaagagcaagggcaacacgctcgacccgatcgacatcgtcgacggcatcggcctcgacgcgctcgtcgcgaagcgcacgacggggctgatgaatccgaggcaggcggcgacgatcgagaagaagacgcgcaaggaattccccgacggcatccccgcgttcggcaccgacgcgctgcgcttcacgatggcgtcgatggcgacgctcgggcgcaacgtgaacttcgatctcgcgcgctgcgaaggctatcgcaacttctgcaacaagctgtggaacgcgacgcgcttcgtgctgatgaactgcgaaggccacgactgcggcttcgacaagccggaagtctgcggcgcgggcgattgcggccccggcggctatctcgacttctcgccggcggaccgctggatcgtctcgctcatgcagcgcgtcgaggcggacatcgcgaagggcttcgccgactatcgcttcgacaacatcgcgaacgcgatctacaagttcgtctgggacgaatactgcgactggtatctcgagctcgcgaaggtgcagatccagaacggcacgtccgagcagcagcgcgcgacgcgccgcacgctgctgcgcgtgctggaaacggtgctgcgcctcgcgcacccgatcatcccgttcatcaccgaggcgctgtggcagaaggtcgcgccgctcgccggccgctatccggcgggcaaggcggagggcgaagcgtcgctgatggtgcaggcgtatccggtggccgagccgaagaagctcgacgaggcttgcgaacagtgggcggccgaactgaaggccgtggtcgatgcgtgtcgtaatctacgcggcgagatgaatctgtctccggcgaccaaggtgccgcttctcgcggccggcgacgcggcgcaactgcaggcgttcgcgccctatgtgcaggcgctcgcgcgcctgtccgaagtgcgcgtgctgccggacgaagcggcgctcgacgccgacgcgcacggcgcgccgatcgcgatcgtcggcggcaacaagctggtgctgaaggtcgagatcgacgtcgcggccgaacgcgagcgcctgtcgaaggaaatcgcgcgtctcgaaggcgagatcgtcaagtgcaacgcgaagctcggcaacgaggcgttcgtcgcgaaggcgccgcccgcggtggtcgcgcaggagcaaaaacggctggcggagtttcagagcacgttgacgaaactcggcgcgcagctcgctcgcttgccggcg

SEQ ID NO: 14140 - DNA, 444 bp, Burkholderia mallei
atgaaccatgaaacgaaaacgctgccgatcgtctattcctgctcggggtgctcgaatgtcgcgcagctcgcgaatcacgtcgcggtgcggctcgatcgcggcggcgatgcggagatgtcgtgcatcgcgggcgtgggcggcgacgtgccgtcgctgctgaagatcgcgcattcggggcggccgattctcgcgatcgacggctgcccgctcgtatgcgcgaagaagagcctcgagcggcacgggatcgcgcccgatgcgcatctgcagctcggcgagcacggcgtcagaaagcgctttcacgaggatttcgccccgggcgacgcgagccgcatactcgcgatcgcgaaagccgaagcggcgcggctcgcgggaagccggcccgcgcccgaacccgaacacgcgcaggcgggcgaggatgccggcgccgcgcttgaacgcaagcgc

SEQ ID NO: 14141 - DNA, 1029 bp, Burkholderia mallei
atgaaagcgctggcgaaactcgaacgcgggccgggcctcacgctcacccgtgtgaaaaagccggaggtcggccacaacgacgtcctcatcaagatccgccgcaccgcaatctgcggcaccgacatccatatctggaagtgggacgactgggcgcagaagacgattccggtgccgatgcacgtcggccacgagtacgtcggcgagatcgtcgagatgggccaggaagtgcgcggcttctcgatcggcgatcgcgtatccggcgaaggccacatcacgtgcggcttctgtcggaactgccgcgcggggcggcgccatttgtgccgcaacacggtgggcgtcggcgtgaatcgcgaaggcgcgttcgccgagtacctcgcgattcccgcgttcaacgcgttcaagattccgcccgagatctccgacgatctcgccgcgatcttcgatccgttcggcaacgcgacgcacaccgcgctgtcgttcaacctcgtcggcgaggacgtgctgatcacgggtgcggggccgatcggcgtgatggcggtggcgatcgcgaagcacgtcggcgcgcgcaacgtcgtcatcaccgacatcaacgactatcgcctcgaactcgcgcgcaagatgggcgcgacacgcgcggtgaacgtgtcgcgcgaatcgctgcgcgacgtgatggccgacctgcacatgacggagggcttcgacgtcgggctcgagatgtccggcgtgccgagcgcgttcacgtcgctgctcgaatcgatgaatcacggcggcaaggtcgcgctgctcggcattccgcccgcgcagaccgcgatcgactggaaccaggtgatcttcaagggcctcgagatcaagggcatctatgggcgcgagatgttcgagacgtggtacaagatggtcgcgatgctgcaaagcgggctcgatctttcgccgatcatcacgcaccgcttcgccgtggacgactacgagaaaggtttcgctgcgatgctgtcgggcgaaagcggcaaggtgattctcgactgggccgacgcg

SEQ ID NO: 14142 - DNA, 237 bp, Burkholderia mallei
atggacaacatcgaacaacgcgtgaagaagatcgtcgccgaacaactgggcgtcgccgaagccgaaatcaagaacgaagcgtcgttcgtgaacgacctcggcgcggactcgctcgacacggtcgagctggtgatggcgctcgaagacgagttcggcatggaaatcccggatgaagaggccgagaagatcacgaccgttcagcaagcgatcgactacgctcgcgcgaacgtcaaggcg

SEQ ID NO: 14143 - DNA, 405 bp, Burkholderia mallei
gtgacgttcttcaccgattacacgaacctcgcgctcatcgcgatcctggtggtttccggcagcctgctcgcatggcccgcgctgcggcgcggaggcggcggcctgtcggccgcggaggcgacccaactgatcaaccgccgcaacgcgctcgtcgtcgacctgcggccggcggccgaatatggcgcgggccatctgccgtccgcgcgctcggtcgaattcggcgagctgcaggcgaaggccggccagctcgcgaagaacaaggccacgcccgtgctgctcgtgtgccagaacggtcagcagtcgcaaaaggcgcgcaagatcgtcgaggaagcgggctaccaggacgtccacgtgctgcagggcggcgtcgccgcatggcagcaggccggcatgccggtcgtcaaa

SEQ ID NO: 14144 - DNA, 555 bp, Burkholderia mallei
atgagcgatacttcggcatccccgagcggaaaacgttggtacgtcgtgcacgcctactccggtatggagaagagcgtgcaacgcgcgcttcaagagcggatcgaacgtgccggcatgcaggacaagttcggccagatcctggttccgaccgaggaagtggttgaagtcaagggcggtcacaaggcggtgaccgaacgtcgtttcttccccggctacgtgctggtcgaaatggaaatgacggacgaaacgtggcacctcgtgaagaacacggcgaaggtcaccggtttcgtcggcggggcgcgcaatcgcccgagcccgatttccccgcgggaagtcgagaagatcatgtctcagatgcaggaaggcgtggagaagccgcgcccgaagaccctgttcgaagtcggcgagatggtgcgcgtgaaggaaggcccgttcacggacttcaacggcacggtcgaggaagtgaactacgaaaaatcgagggttcgcgtgtcggtcaccatcttcggtcgcgcgacgccggtcgaattggaattcggccaggtcgaaaaggtt

SEQ ID NO: 14145 - DNA, 1311 bp, Burkholderia mallei
atgcgcaaacccattgattcgctgttcgggcggctcgcgctccttgtcgtctgcgtgctgctgctgtcgcacttcgcgtggtacttcgcgatccggctcgagcgcaatcagttccagacgcgctatgcggtcgaggaggcggcgttcctcgtcgacgcggtgcgccagcacgcggagcgctcgcccgaccagccgctgccgtcgcgggtgcggctcgtcgcgccgggcagcggcgacgtgcccgaggcgaagcaggatctgccgccctcgctcaagcgcttcgcggacgagctgcgcgagcgcctgccggccggcacgcaggtgcgcatcggccggccgagccatccgcccgtgctgtgggtcaagcagccgagcgatcgcgactggatcgtcgtgccggttcagccgctgcggccgccgcgctcgctcgaccggatggtgctctggctggtgatgatcttctcggccgcggtgatggcggcgctcttcgccgcctggcaactgcagcagccgctcagttcgctcgcgcgcgcggtcgcgcgcttcggccgcgggatggcggtgccgccgctgcccgagcgcgggccgcgcgagctgcgccagctcacgcacggcttcaatcagatggttcagcaggtgtcgcgcgcggagaacgaccgcgcggtgatgctcgcgggcgtcgcgcacgatctgcgcacgccgctcgcgcggatgcggctgcgcgcggagatgatggacgacgcgcggctgcgcgacggcgtcgtgcgcgacgtcgattcgatgacgcacatcgtcgaccagttcctcgtgttcgcgcacggcgacgccgaccgcagcgaggccgtgccggtcgaccaggcgtgcgagcggatcgcgcgcacttaccgcgcggtgtccccgaacgcgcccaccgtgcgcaccgagctcgcggccgggccgggctttcgcctgccggcggcgacgctcgaccgggtgctgtcgaacctgctcgacaatgcgcatgcctatggcgcgccgcccgtcgtgatcgcgaccgcgcgcaccgcgacgggctacacgctcaccgtcagcgaccacggcaagggcatcgcgccgcgcgatctcgcggacgcgacgcgcccgttcgtgcggctcgatccggcgcgcggcggcaatgggcacagcggtctcgggcttgcgatcgtcgagcggctcgtgcagcgtacggggggcgcgtgcgagatcggcaaccgggaagaaggaggcctgcgggtcgcgatgacgttcgcgttcgacgtcgtgccgaaggcggagccgcagacggaggcgccc

SEQ ID NO: 14146 - DNA, 327 bp, Burkholderia mallei
atggaagtgaaagcaattcatcgcggtgcccgcatctcggcgcagaagacgcgccttgtggctgaccagatccgcggtttgccggtcgacaaggcgctgaacgttctgacgttctcgccgaagaaggcggctggcatcgtgaagaaggtcgtgctgtcggcgatcgcgaatgcggagcacaacgaaggcgccgacatcgacgagctcaagatcaagagcatctacgtcgacaaggctgcatcgctcaagcgtttcaccgcgcgcgcaaagggccgcggcaaccgcatcgagaagcaatcctgtcacatcactgtgacggtcgggaat

SEQ ID NO: 14147 - DNA, 1194 bp, Burkholderia mallei
atggaattcgaaatgctggaaaccgaaaccaacggcacgatcatcaaggtgatcggcgttggcggtgcaggtggcaacgcggtgcagcacatgatcaacaagggcgtgcagggcgtcgatttcgtcgtgatgaacaccgacgcgcaggcgctgtcgcgctcgcgcgcgccgtccgtgatccagctcggcaacaccggcctcggcgccggcgcgaagccggagatgggccgtgcggcagccgaggaagcgcgcgagcggatcgccgacgcgctgcgcggcgcgcacatggtgttcatcacggccggcatgggcggcggcacgggcacgggtgccgcgcctgtcgtcgcgcagatcgccaaggagatgggcattctgaccgtcggcgtcgtgagcaagccgttcgagttcgagggcggcaagcggatgcgcgtcgcggaagcgggctcgcagcaactggaggatcacgtcgattcgctgatcgtcgtcctgaacgacaagctgttcgaggtgatgggcgacgacgccgagatggacaagtgcttccagtgcgctgacgacgtgctcaacaacgcggtggcgggcatcgccgagatcatcaacgtcgacggcctcgtgaacgtcgacttcgaagacgtgaagacggtgatgggcgagcagggcaaggcgatgatgggcacggcgacggtcgccggcgtcgatcgcgcgcgcctggctgccgagcaggcggtcgcgagtccgctgctcgagggcgtcgatctgtcgggcgcgcgcggcgtgctcgtcaacatcacgtcgagccgctcgctgcgcctgtcggaaacgcgcgaagtgatgaacacgatcaagagctatgcggccgacgacgcgaccgtgatcttcggcgccgtgtacgacgacgcgatgggcgatgcgctgcgcgtcaccgttgtcgcgacgggcctcggccgtgcggcgaagaagcagcagtccgcgccgatgacgctgctgcgcaccggcacggacaaccagccgatcagcgcggcgccgcagggctacgcggcttcgcatcacgtgagcacgggcgactacggcgcgttcgatacgccggccgtgtggcgcaattcgcgcgagacggcggcgtcgcacgtgcaggcgctgcaggagaagggtgtcgacacgtacgacattccggcattcctgcgcaagcaggccgac

SEQ ID NO: 14148 - DNA, 963 bp, Burkholderia mallei
atgaacatccatcgactgccgatgctgaatgcgctgcgcgtgttcgaggccgccgcgcggcacgaaagcttctcgcgcgcggcagacgagttgtccgtcacgcacggcgcggtcagccaccagatgcgcgcgctggaagccgagctcggcgtgccgctgttcgtgcgccacggcaagcggctcgcgctgacggacgcgggcggccgctacgcgcagcaggtgcgcgccgcgctcgcgctgctcgccgacgcgacccgcgaggttcgcgcgagcgagcgcgacaagcggctcgtcgtgtcgacgctgccgtcgttcgccgcgcgctggatcacgccgaggatcggcccgttcatcgaacggcatccggaaatcgacctggagctgcgggcaagcgattcgctcgtcgatttcgcgcgcgacgacgtcgatgtcgcgatccgcttcggccacggcgtctatccggggctgcacgtcgagccgctgctcgacgagacgttctttcccgtctgcgcgccgacgctcaacggcggcatgctgcccgagacgcccgccgatctcgtccgctatccgctgctgcgctcggacgacgagctgtggcggccgtggttcgacgcggcggggctcgacacgctgaccgagccgaagcgcggcgtgctgtatcaggattcgtcgaatctgctgcaggcggcgatcgacggccagggcatcgcgctcgtgcggcgctcgctcgcggtgccggaggtggcggccggccggatcgtgcggctcttcgacatcgcggggccgagcccgtggcactacttcttcgtgtgcccgccgtcgctcgcgcaaacgccgcgcgtgcaggcgctcaggagctggctgctggacgagatcgcgcgcttcagggcgctgtgcgcggcgcaggaggcgcagcacacggcggcctatgcggccgcgcgtgcgcgcggcaaggaggaaaac

SEQ ID NO: 14149 - DNA, 1380 bp, Burkholderia mallei
atggtgggacttttgaataaattgctcgatgtggcgctggtcgcggtgggcgcgctgctggcgcagatgctgtacgacggcggcctcttcgatgtgtccgacgcgcagcgcacggccatcgcgctgctgtgcgcgctgacgctgctcgtctttgcggcgatcggcgtctacgacggcgcacgcgagcagatgtcgtatcgcacgctctcgcgcgtgctgctcggctggctcggcgtcgcggcggccgccgcggccttcacgctgctgctgcagcgtgacgccgacgtgtcgctcgcgtggctcggccgcacgatgctgatgtccggcgcggtgctgctgctcggcagggcgtcgatccatggcgtgctgaacggcctgcgccgcacgggcgcgaagccgcgggcagtcgcgatcgtcggctccgaagtctatggccgcgcggtgatcgagcaactgcgcgcgtcgtcgctgcacggctacgaagctgtctgcgtgttcgacgacagcgcgcgcgcggccgatgccgagcttcgcgtgggcggcgtgccggtcgtctccgatctgcgcgagttcaagtgccgcgtgcgcgcgggtgcgatcaaggaaatctggctcgcgctgccgctgtcgcacgagcgacggattcagcggatcgtgcgcgagtttcgccacgatttcgtgaacctgcgcttcctgcccgacgtgcgcgggatcacgttcttcaaccgctcggtcgcgcaggtcgcgggcatgcccgcgatcaacctcgcgacgagcccgctgtcgattccgcagctctggccgaagttcatcttcgatcgcctgttcgcgctcgccgtgctgattccgctgtcgccgatcctcgcggcgctcgcgctcgcggtgaagctctcgtcgccggggcccgtgctgttccggcagaagcgcaagggcgtcgacggccgcgagttcgagatcctgaagttccgcacgatgcgcgtgcacgccgaggagacgggcgtcgtgcgccaggcgtcgcgtaacgattcgcgcatcacgaaggtcggcgcgttcctgcgccgcacgtcgctcgacgagctgccgcagttcttcaacgtgctgttcggccagatgtccgtcgtcggtccgcgtccgcacgcgatcgagcacgacgacctctacaaggagctcgtcgacggctacatgtaccgctatcgcgtgcgtcccggcatcaccggctgggcgcaggtgaacgggtatcgaggcgagacgcgcaaggtcgagaagatggccgcgcgcgtgaagttcgatcttttctacatgcagaactggaccttctggttcgacatcaagatcatcctgatcacgctcgtcaagggtttcgtcggccgcaacgcattc

SEQ ID NO: 14150 - DNA, 786 bp, Burkholderia mallei
gtgaatgctttgggcacaaacgtcatggaaatcgatttgaatgccgacctcggcgaaggctgcggctccgacgaggcgcttctcgacctcgtcacgtcggcgaacatcgcgtgcggctggcacgcgggcggcgcccaggcgatgcgcgactgcgtgcgctgggcggtggaaaaaggcgtgtcgatcggcgcgcatccgagttttcacgatccggagaacttcggccgcaaggaaatggatctgcccgcgagcgagatctacgcgggcgtgctgtatcaattgggcgcgctatctgcgatcgctcaggcggaaggcgggcgcatcgcgcacgtgaagccgcacggcgcgctgtacaaccaggccgcgcgcgagcccgagatcgccgatgcggtggtgtcggcgatccacgatttcgatccgtcgctcgcggtgttcgggctcgcgaaaagcgggttcgtcgacgccgcgcaacaggcggggctcgtcgccgtcgaggaagtgttcgccgaccgcggctatcgcgcggacggctcgctcgtgccgcgcagccagccgggcgcgctcgtcgacgacgaaaacgagatgctcgcgcgcacgctcgagatggtccgcggccagcgcgtgcgcgcggtcacgggcgaatgggtgccgctcaacgcgcagacggtctgcctgcacggcgacggcccgcatgcgctcgcgttcgcgaagcggatccgcgatgcgctcgaggcggccggcatcgacgtgcacgcgcccggcgcgctgcacgcgggggagcgcgcc

SEQ ID NO: 14151 - DNA, 552 bp, Burkholderia mallei
ttgttgaacgaggtgcgcgacgcgtcatgcgaagcgcatcgtttctggaggctaaccgtgccgcttaatagagaagacaagcaagccgtcgtcgctgaggttgccgcgcaagtcgcgaaggcccagaccgttgtgctcgctgagtatcgtggaattgcggttggcgatctgaccacgctgcgcgcgaaagcgcgtgagcaaaaggtttacctgcgcgttctgaagaacacgctggcgcgtcgcgccgttgaaggtacgccgtttgctccgctggcagagcagatgactggccccctgatctacggcatctcggaagatgcaattgctgctgccaaggtcgttcacgacttcagcaagagcaatgacaagttggtcatcaaggccggttcgtacgatggcaaggtgatggacaaggccggcgtgcaagcgctcgccagcatcccgagccgcgaggaactgctctcgaagctgctgttcgtcatgcaggcgcctgtttcgggcttcgcgcgcgcactggctgcgctcgccgagaagaagcaagccgaagctgct

SEQ ID NO: 14152 - DNA, 1170 bp, Burkholderia mallei
atgagcgagacgaaggaagcagcggcaacgggcgctgcgggcggtttcaagccgaagaagtcggttgcgctgtcgggcgtcgcggcgggcaataccgcgctctgcacggtcggcaagaccggcaacgatctgcattaccgcggctacgacattctcgatatcgccggctcgagcgaattcgaggaaatcgcgcacctgctcgtgcacgagacgctgccgaacgtgaccgagctggccgcgtacaaggcgaagctgcgcgcgatgcgcgggctgcccgcgaacgtgaaggcggcgctcgaatggattccggcgtccgcgcacccgatggacgtgatgcgcaccggcgtatcggtgctcggcaccgtgctgcccgagaaggacgaccacaacctgccgggcgcgcgcgacatcgcggaccggctgatggcctcgctcggctcgatgctgctgtactggtatcactattcgcacaacggccggcgcatcgaaaccgaaaccgacgacgattcgatcggcgggcatttcctgcacctgctgcacggcaagacgccgtcgaaatcgtggatcgacgcgatgcacacgtcgctgatcctgtacgcggagcacgagttcaatgcctcgacgttcaccgcgcgcgtgatcgccggcacgggctcggacatgtattcgtcgatcacgggcgcgatcggcgcgctgcgcgggccgaagcacggcggcgcgaacgaggtcgcctacgagatccagaaccgctaccgcacgcccgacgaagcgcaggccgacatccgccgccgcgtcgagaacaaggaagtcgtgatcggcttcggccacccggtgtacacgatctccgatccgcgcaacaaggtgatcaaggaagtcgcgcgcaagctgtcgaaggaagcgggcgacctgaagctcttcaacatcgccgagcggctcgaatcggtgatgtgggagatcaagaagatgttcccgaacctcgactggttcagcgcggtgtcgtatcacatgatgggcgtgccgaccgcgatgttcacgccgctgttcgtgatcgcgcgcaccgccggctggagcgcgcacatcatcgagcagcgggtcgacaacaagatcatccgcccgagcgcgaactacaccgggccggaagacctgaagttcgtgccgatcgagaagcgc

SEQ ID NO: 14153 - DNA, 1578 bp, Burkholderia mallei
atgtctccggtctcggcattcaagctcgttttgctgtcctttctcgcgatcgttgcgctcgagctgctcgcgaagcggctccggctgccgcccgccgccgcgctgctcgtcggcggcgcgggcatcgcgttcctgcccgggctgccgcccgtcaatctcgatccggacctcgtgctgatcgtgttcctgccgccgctgttgatggacggcgcgtacttctcggtgtgggaagagttcaagcgcaacgtcggcggcatcatgatgctcgcgatcggcgcggtcgcgttcacgacgctcgccgtcggcgtcgccgtgcatctcgtcgcgcccgggctgccgtgggccgcgtgcttcgcgctcggcgcgatcgtgtcgccgcccgacgcggtcgccgcgaaggcggtgctcgagcgcgtcgcgctgccgcgccggctgatggtgctgctcgaaggcgagagcctcctgaacgacgcggcggggctcgtgctgttccgcttcgcggttgccgccgcgctgacgggcgcgttcagcacgggcgacgccgtcgtgcgcttcgcgcagctcggcgtcggcggcgtcgcggtcggcttcatcgtcggctggctgatcgtgcggttcctgaagctcgtcgaggacgactatctggtgatcacggtggccgttctcgccgcgtggatcagctacatcgcgggcgaactgttcgaagtgtccggcgtgatcgcgaccgtgacgaccgggatgatgctcggctggcatcagcacgaagtgttctcggcttcggtgcgcaaccgcggcaccgcgttctggcaggtgatcgtgttcctgctcgaggcgctcgtgttcgtgctgatcgggctgtcgctgcgcggcgtgatcgagcggctcggcgggctcggcgaggtgttcgcgacgatgacgcccgcggtggcggcggtggtcgcggccgtcgtcgcgtcgcgcttcgtctgggtgttcgcggtcgaactgctgaaggcgcccgtcgcgcgcttgcgcgggcgtggcccgcgcggcgactggaaggcggcgaccgtgatgggctgggccgggatgcgcggcgtcgtcacgctcgcgatcgcgttgtcgctgccggatgcgatgcccgggcgcgacctgattctcgtcgccgcgttcgcggtgattctcgtcaccgtgctgctgcagggcacgacgatcgggccgctgatccggctgctgaagctgcgcgatccggggcccgcagcacaccatctgacggagccgcagacctgggcgcgcgtcgaggccgcgcagctctcggcgatccagccgctcgtgcacgatgccgagggcaacgtgatccatccgcgcctgctcgagcaatatacgtaccgcgcgagcgtgaccgcgcgccatcaggacgagcccgcgtttccgcagcgcgagcgcgacgcgcattacgacgtcgtgctcgcggcgatcgcggccggccgcgcggagctgctgcggctgcatcgcggcggccagatccacgacgagatgctgtacctgctcgagcgcgatctcgatctgcaggagatcgcggcgcagcacgcgaagggc

SEQ ID NO: 14154 - DNA, 1518 bp, Burkholderia mallei
atgcgcgaggcccgcgtgcgcgccgcgtttttgcacgttcccgcttgcgaggaaaacatcatggctgaagtcacacaagaacaaggcgtcgcggcgaaatccgccgcgaacaagctgcggctcggcgcgctcaccgcgctcgtcgtcggctcgatgatcggcggcggcatcttctcgctgccgcagaacatggcggccaccgccgaagccggcgcgatcctgatcggctgggcgatcaccgcgatcggcatgctcacgctcgcgttcgtgttccagacgctcgcgaaccgcaagccgcagctcgacggcggcgtgtacgcctatgcgcaggcgggcttcggcgactacatgggcttctcgtccgcgtggggctactggatcagcgcatggctcggcaacgtcggctacttcgtgctgctgttctcgacgctcggctatttcttccccgtattcggcgaaggcaacacgcccgccgcgatcgcgggcgcatcggtgctgctgtgggccgtgcactttctcgtgctgcgcggcatccgggaggcggcgttcgtcaatctcgtcaccaccgtcgcgaagatcgtcccgctcgtcgtcttcatcctgatcggcttcttcgcgttcaagctcgacgtgttccgcaccgacatctggggccgcgcgaatccgtcgctcggctcggtgatgaaccaggtccgcaacatgatgctcgtcaccgtctgggtgttcatcggcatcgaaggcgcgagcatcttctcggcgcgcgcggaaaagcgcagcgacgtcggccgcgcgaccgtgatcggcttcgtcggcgtgctgctcgcgctcgtgctcgtcaacgtgctgtcgctcggcatcatgacgcagccgcagctcgcgaagctgcagaacccgtcgatggcggccgtgctcgagcacgtggtgggccactggggcgcggtgctcatcagcgtcggcctcgtcgtctcgctcgcgggcgcgctgctgtcctgggtgctgctctgcgcggaaatcatgttctcggccgcgaaggaccgcacgatgcccgcgttccttcgcaaggagaacgcgaaccatgtgccggcgaacgcgctctggctcacgaacgcgatggtccaggtgttcctgctgatcacgctcttctcgcaaagcacctatctgtcgctgatctatctggcgacgtcgatgatcctgatcccgtacttctggtcggccgcctacgcgctgctcatcgccgtgcgcggcgagacctacgagggcgacgcgcgcgcgcgccgcaaggacctcttcgtcgccgcgctcgccgtgctctacgcggtgtggctgctgtacgcgggcggcctcaagtatctgctgctgtccgcccttctctacgcgccgggcgcgctcttcttcgcgaaggcgaagcgcgagctcggcaagccggtcttcaccgccgccgaaaaactgatcttcgcggcagcggccgccgccgcactcgccgcggcctacgcgctccacagcgggctcatcacactt

SEQ ID NO: 14155 - DNA, 1347 bp, Burkholderia mallei
gtgcaagtcaccgtcaacgaacacgacgccgtcgagtgcgtcgccacggcaaccccggccggcaatcgggaagcgcacgcgcacggtacggacaagctcgcgatcgagggcggccggcgcctcgccggcgagatcgccgtgtcgggcgcgaagaacgccgcgctgccgatcctctgcgcgggcctgctgagcgccgagccggtgcgcctcgataacgtgccggacctgaaggacgtgcgcacgacgctcgcgctgctcggccagatgggcatgcgcgaggaaacggacggcgcgcgggtcgtgctcgacgcgtcgcgcgtcgacaatccggtcgcgccgtacgagctcgtgaagacgatgcgcgcgtcgatcctcgtgctcggcccgctcctcgcgcgcttcggctacgcgaaggtgtcgctgccgggcggctgcgcgatcggcgcgcggcccgtcgaccagcacatcaagggcctgcaggcgatgggcgccgagatccacatcgagcatggctacatcgaggcgcgcgcgaagcgcctttcgggcgcgcgcatcgtcaccgacatgatcaccgtgacgggcaccgagaacctgctgatggcggcgacgctcgccgacggcgagacggtgatcgagaacgccgcgcgcgagccggaagtgacggatctcgcgcatctgctcgtcgcgatgggcgcgaagatcgacgggatcggcaccgaccggctcgtgatccagggcgtcgagcgcctgcacggcgcgacgcacgcggtgattccggaccggatcgaggcgggcacgttcctgtgcgcggtcgcggcggcgggcggcgacgtgacgctcaccggcatgcgcgcgcacatcctcgacgcggtgatcgacaagctgcgcgaagcgggcgcgacgatcgacgaaggcgtcgacacgctgcgcgtgcgcatggacggccggccgagcgcggtcgcgatccgcacgtccgaatacccggcgttcccgaccgacatgcaggcgcagttcatggcgctgaacgcggtggcgcaaggcgccgcgcaggtgaccgagacgatcttcgagaaccgcttcatgcacgtgcaggaactgaatcgcctcggcgcgaacatcgcggtcgacggcaacacggcgctcgtcacgggtgtgccgaagctctcgggcgcgagcgtgatggcgaccgatctgcgcgcgtcggcgagcctcgtgatcgccggcctttgcgcgcaaggcgagacgctcgtcgagcgcatctatcacttggaccgcggctacgaccggatggaaacgaagctgacggccgtcggcgcgaacgtgcgccgcatttcggggagcgaagca

SEQ ID NO: 14156 - DNA, 267 bp, Burkholderia mallei
atgtctgttgctgatatcaagaagtcggaagtcgttgctcagttcgcgcgcggcgccaacgatacgggctcgcccgaagtgcaggtcgcgctgctgacggcgcgcatcacggaactgacggggcacttcaagacccacgcgaaggaccatcacagccgtcgcggtctgctgcgcatggtgagccgccgccgcaagctgctcgactacctcaagggcaaggatgccgaccgttaccgcgcgctgatcgagaagctgggtctgcgtaag

SEQ ID NO: 14157 - DNA, 1719 bp, Burkholderia mallei
atgaatgcaacgaatcgtttcaagtcgacggtgctcgccgcgctcgtgagctcggcgctcgccggttttctgccgagcgcgcccgcccatgcgaagggcccgcagcagcgcgtcgtgctggacggctcggccgtcgcggtcgccgacaagtacagcgccgacgcggccgaggagatcttcaggcagggcggcaacgcggtcgacgccgcggtcgcgatcgccttcacgctcgccgtcacctatccggaggcgggcaacatcggcggcggcggcttcatgaccgtctacatgggcggcaagccgtactttctcgactatcgcgagcgcgcgccgctcgccgcgacgaaggacatgtatctcgacaaggacggcaacgtcgtcaagggcatgagcctgtacggcgatcgcgcggtcggcgtgcccggcacggtggccgggatgtgggaggcgcagaagcgcttcggcaagctgaagtggaagcaggtgatcgcgcccgcgatccgttacgcgcgcgacggcttcgttgtcgacgagcagctcgcgcagcgtggcgtcgacgcgtcgaaggagttcggcggcaagacgaacttcgatcaatacttcagcggcctgaaggcgggcgcgaccttcaagcagccggagctcgcggcggtgctcgcgcgcatcgcgaacgatggcgcgaaggatttctacgacggcaagacggccgacctgatcgccgcatcgatgaagaagggcggcggcctgatcacgaagcaggatctcgtccagtacaaggcggtgtggcgccagccggtccaggcgaactggaacggctatcgcgtgatcaccgcgccgccgccgagctcgggcggcatcggcctcgtgcagttgctgacgatgaaggcggaccgcaaggccgatttcgacggcgtcgcgctcaattcgccgcaatacgtgcatctgatcgccgagatcgagaagcgcgtgttcgccgatcgcgcgcagtacctcggcgatccggatttctacaaggtgcccgtcgcgcagttgaccgacgccgcgtacatcgcgaagcgcgcggccgaggtgaatcccgagaagccgtccgacacgaagagcgtgctgccgggcctcggcacgtcgatgccggagaaggccgagacgacgcatttctccgtcgtcgacaagtggggcaacgcggtgtcgaacacgtacacgatcaacggctacttcggctcgggcgtcgtcgccgaaggcacgggcatcgtgctcaacgacgagatggacgatttctccgcgaagccgggcgtcgccaacatgttcggcgtcgtcggcagcgacgcgaacgcgatcgagccgaagaagcggccgctgtcgtcgatgtcgccgacggtcctcacgaaggacggcaaggtcgcgctcgtgatcggcacgccgggcggctcgcggatcttcacgtcgatcttccaggtgatcacgaacctgtacgacttcaagatgccgctgaaggacgcggtcggcgcgatgcgctttcaccaccagctgctgccgccgaacacgatcttctgggagccgtaccactcgatcgacggcgagctggcgaagggcatcgaggcgaagggctacacgctcaagggccaggatttcagcggcgacatccaggcgatccggatcgacggcaagacgcccgaggcggtgtccgatccgcgcggccgcggcgtgtcgcgcgtgatccgg

SEQ ID NO: 14158 - DNA, 723 bp, Burkholderia mallei
gtggacagcgacgagatgttgctgttggccgtactcaggccggtcgagctcgacgtggacagggagctcaggttgctgttggtcgtgctcagcccggtggacagcgaaccgatgccggtcgacgtcgaggtggacagcgacgtgatcgcgctgttggccgacgacagtcccgtcgacgccgacgtcgacaacgacgcgacgttgctgttggtcgtgctcaacccggtggacagcgagccgataccggtcgacgtcgaggtggacagcgacgtgatcgcgctgatggccgacgacagtcccgtcgacgccgacgtcgacagcgacgcgacgttgctgttggtcgtgctcagtccggtggacagcgaaccgatgccggtcgacgtcgaggtggatagcgatgtgatcgcgctgttggccgacgacagtcccgtcgacgccgacgtcgacaacgatgcgacgttgctgttggtcgtgctcagtccggtggacagcgagccgatgccggtcgacgtcgaggtggatagcgacgtgatcgcgctgttggccgacgacagtcccgtcgacgccgacgtcgacaacgacgcgacgttgctgttggtcgtgctcaacccggtggacaacgagccgatgccggtcgacgtcgaggtggatagcgacgtgatcgcgctgttggccgacgacagccccgtcgacgccgacgtcgacagcgatgtcagttgctca

SEQ ID NO: 14159 - DNA, 1539 bp, Burkholderia mallei
atgcaactcaatccctctgagatcagcgagctgatcaagagccggatccagggccttgaagcgagcgcagacgttcgcaaccagggcaccgtgatctccgtgaccgacggcatcgtgcgcattcacggcctgtcggacgtgatgcagggcgaaatgctcgagttcccgggcaacacgttcggcctcgcgctgaacctcgagcgcgactcggtcggcgcggtgattctcggcgaatacgaacacatctcggaaggcgacatcgttaagacgacgggccgcattctcgaagtgccggtcggcccggaactcgtcggccgcgtgctcgacgcgctcggcaatccgatcgacggcaagggcccggtcaacgcgaagctgaccgacgcgatcgagaagatcgccccgggcgtgatctggcgcaagtcggtgtcgcagccggtgcagacgggcctgaagtcgatcgactcgatggtgccgatcggccggggccagcgcgagctgatcatcggcgaccgtcagtgcggcaagaccgcggtggcgatcgacacgatcatcaaccagaagggcaaggacctcatctgtatctacgtcgcgatcggccagaaggcttcgtcgatcatgaacgtggtgcgcaagctcgaggaaaccggcgcgctcgaatacacgatcgtcgtcgccgcgtcggcgtcggaatcggccgcgatgcagtacctcgcgccgtacgccggctgcacgatgggcgaatacttccgcgatcgcggccaggacgccctcatcatttacgacgacttgaccaagcaagcttgggcgtatcgtcagatctcgctgctgctgcgccgcccgccgggccgtgaagcgtacccgggcgacgtgttctatctgcactcgcgcctgctcgagcgtgcggctcgcgtgtcggaagagtacgtcgagaaattcacgaacggcgaagtgaagggtaagagcggctcgctgacggcgctgcccgtcatcgaaacgcaggcaggcgacgtgaccgcgttcgttccgacgaacgtgatctcgatcaccgacggccagatcttcctggaaaccgacctgttcaacgccggcatccgccccgcgatcaacgcgggcgtatcggtgtcgcgagtcggcggcgccgcgcagacgaaggtcgtgaagaagctgtcgggcggtatccgtaccgacctcgcgcagtatcgcgaactggccgcgttcgcgcagttcgcgtcggatctcgacgaagcgacccgcaagcagctcgagcgcggccgccgcgtgacggagttgctcaagcagccgcaataccagccgctgcaggtgtgggagctggccgtgtcgctgttctcggcgaacaacggctatctcgacgacctcgacgtcaaggacgtcctgccgttcgagaagggcctgcgcgagtatctgaagacgagccacgctgacctcatcaagcgcatcgaagacacgaaggacttgtcgaaggacgacgagagcgcgctgcacgccgcgctcaaggacttcaagaagtccggtgcctat

SEQ ID NO: 14160 - DNA, 1938 bp, Burkholderia mallei
gtgatccgtttcaatcagttcagcctcgcccgcggcacgaagccgctcttcgacgcgacctcgttcacgctgaatcccggcgagaaggcgggcctcgtcggcgcgaacggcgccggcaaatcgacgctcttcgcggtgctgcgcggcgagctgcacgcggacgcgggcgacttctcgatgccgccggcgtggcgcatcgcgcacgtgtcgcaggaaacgcccgccgtcgagcgcagcgcgctcgactacacattggacggcgacgccgcgttgcgcgcgatcgaggcgcgcatcgcgcaggcgtccgccgcgcacgacggcgcagccgaggccgacgcgcacgcggcgttcgcggacgccgacggctacaccgcgcccgcgcgcgccgaggcgctgctgctcgggctcggcttcacgctcgcgcagacgcgcgagcccgtcgcgagcttctcgggcggctggcgcatgcgcctgaatctcgcgcaggcgctgatgtgccgctcggatctgctgctgctcgacgagccgacgaaccacctggatctcgacgcgatcgtctggctcgaagactggctgcatcgctatccgggcacgctcgtcatcatctcgcacgatcgcgaattcctcgacgccgtctgcgacgtgacgctgcatctcgagaatcgccaggtgaagcgttacggcggcaactactcgcagttcgaagtgctgcgcgcgcagcagctcgaattgcagcaaagcgcatacgaaaagcagcagaagacgattgcgcatctgcagagcttcgtcgaccgcttcaaggcgaaggcgtcgaaggcgaagcaggcgcaaagccgggtgaaggcgctcgagaagatggagcggatcgcgcccgcgcacatcgcttcgccatccacgttcgaattccgcacgcccgattccgcgccgaacccgatgctcgtgatggaaaacgtgcgctgcggctaccgcgcggacgacggcggcgaaatcccgatcgtcgagcgcgtcgcgctgtcgatccagaacggccagcgcatcggcctgctcggcgcgaacggccagggcaagtcgacgctcatcaagacgctcgcgggcacgctcgcgccgctgtcgggcgagctgcgcaccggccgcgggctcacgatcggctatttcgcccagcaccagctcgagacgctgcgcgaggacgattcggcgctcgcgcatctcgcgcgcctcgccccggacacgcgcgagcaggaactgcgcgactttctcggcggcttcaacttctccggcgagatggcgaccgcgccgatcgcgccgttctccggcggcgagaaagcgcggctcgcgctcgcgctgatcatctggcggaagccgaacctgctgctgctcgacgagccgacgaaccacctcgatctggaaacgcgccacgcgctcacgatggcactcgcgcaattcgagggcacgctgatcctcgtgtcgcacgaccgtcacctgctgcgcgcgacgaccgaccagttcatgctggtcgcgaagcaccggctgcagccgttcgacggcgatctcgacgactaccgcgactggctgctgcagcacgcggccgaacagcgcgcggcggcgaaggcagcctgcggcccggcgggcgacgccgacggcggcgcgcccgccgtgaatcgcaaggaccagaaacggcaggaagccgaagcgcgccagcgtctgtcgcagctgaagaaaccgctgcaggcgcggatcacgaagatcgagaaggaaatggagcggctgcacgcgcagaaggcggagctcgacgcgttcgtcgccgatccggcgagctatgcggcggaccagaagacgcggctcaccgaggcgatccgcaagctcggcgacgtcaacggccagctcgaaacgctcgaggcggactggctcggcgcgcaggacgagctggaaaaaatcggg

SEQ ID NO: 14161 - DNA, 1026 bp, Burkholderia mallei
atgaaactgccccccggtccggtgatgctcgacgtcgccggcacgacgctcacgcgcgacgacgcgcgccgcctcgcgcatccgcacacgggcggcgtgatcctgttcgcgcgccacttcgagagccgcgcgcaactcgtcgcgctgaccgaggcgatccgggcgatccgcgacggcatcctgatcgcggtcgatcacgagggcggccgcgtgcagcgctttcgcaccgacggcttcaccgtgctgccggcgatgcgccggctcggcgagctgtgggacaaggacgtgctgcacgcgacgaaggcggcgaccgcgctcggctatgtgctcgcttccgagctgcgcgcgtgcggcatcgacatgagcttcacgcccgtgctcgatctcgattacggccgctcgaaggtgatcggcgatcgcgcgttccatcgcgatccgcgcgtcgtcgcgttgctcgcgaagagcgtcaaccacgggctcgcgctcgccgggatggcgaactgcggcaagcattttcccggccacggcttcgcgcaggccgattcgcacgtcgcgctgccgaccgacgatcgtccgctcgacgagatcctcgcgaacgacgcggcgccgtacgactggctcgggctgtcgttgtcggccgtcattccggcgcacgtgatctacacgcaagtcgattcgaagccggccggcttctcgcgcgtgtggttgcaggacgtgctgcgcggccggctgcgctttgcgggcgccgtgttcagcgacgatctgtcgatggaggccgcgcgcgagggcggcacgctcgcgcagtcggcgcaggccgcactcgaggcgggctgcgacatggtgctcgtgtgcaaccagccggatgcggcggagcgggtgctcgacgagctgcgcacgacggcgtcgcgcgaatcgtcgcggcggatcaagcagatgcggccgcgcggcaaggcgctcgagtggcgcaagctgatgcgcgagccgcgctatctgaatgcgcagagcctgttgcgcagcacgttcgcc

SEQ ID NO: 14162 - DNA, 1008 bp, Burkholderia mallei
atgacgattcgcgttgcaatcaacggttacggccgcatcggccgcaacacgctgcgcgctttctacgaaaacggcaagaagcacgatctcgagatcgttgcgatcaacgatctgggcgacgcgaagaccaacgcgcacctgacgcagtacgacaccgcgcacggcaagttcccgggcgaagtgtcggtcgacggtgattacctcgtcgtgaacggcgacaggattcgcgtgctcgcgaaccgcaacccggccgagctgccgtggggcgagctgggcgtcgacgtcgtgatggaatgcacgggcttcttcacgtcgaaggaaaaggcgagcgcgcacctgaagggcggcgcgaagaaggtgatcatctcggcgccgggcggcaaggacgtcgacgcgacgatcgtctacggcgtgaaccacgacgtgctgaaggccgagcacaccgtcatctcgaacgcatcgtgcacgacgaactgcctggctccgctcgtcaagccgctgaacgacaagatcggcctcgaaaccggcctgatgacgacgattcatgcctacacgaacgaccaggtgctgacggacgtctaccacgaggacctgcgccgcgcgcgctcggcgacgcacagccagatcccgacgaagacgggtgcggcggccgccgtcggcctcgtgctgccggagctgaacggcaagctcgacggctacgcgatccgcgtgccgaccatcaacgtgtcgatcgtcgatctgtcgttcatcgcgaagcgcgacacgacggcggccgaagtcaacgcgatcatgaaggaagcgtcggaaggcgcgctgaagggcatcctcggctacaacgatgcgccgctcgtgtcgatcgacttcaaccacaacccggcttcgtcgacgttcgacgcgacgctcacgaaggtgtcgggccgtctcgtgaaggtgtcgagctggtacgacaacgagtggggcttctcgaaccgcatgctggatacggcgatcgcgctcgcgaacgcgaag

SEQ ID NO: 14163 - DNA, 1404 bp, Burkholderia mallei
atgacgatgctgaccttgcgcgaagccgctgcgatgattcccggcgcgaccgtgctcggcgacgagcgcgcgtcgttcgagcgggtgtcgacggacagccgctcggcgggcccgggcgatctgttcgtcgcgctgaagggcgagcgtttcgatgcgcacgatttcgtcggcgacgtcgccgcgcgcggcgcgagcgccgcgatcgtgtcgcgcagcccggccgaatggaatctgcccgcgctgaaggtcgcggatacgcgcgccgcgctcggcgcgctcgcgcacggctggcggatgcgcttctcgatgccgctcgtcgcggtgacgggcagcaacggcaagacgaccgtgaaggaaatgatcgcgtcgatcttcgcggcggccgtcggtgagcacgcgcgcctcgcgacggcgggcaacttcaacaacgacgtcggtctgccgctcacgctgctgcgccttaacgcagcgcatcggctcgcggtcgtcgagctcgggatgaatcatccgggcgagaccgaaatgctcgcgaaaatcgccgcgccgacggtcgcgctcgtcaacaacgcgcagcgcgagcatcaggaattcatggcgacggtcgaggcggtcgcgctcgagcatgcggccgtcatccatgcgctcgggccggacggcgtcgcggtgtttccggccgacgacgcgtacgcgggcatctggcgcgtcgcggcgaccggcaaccggatcgtcgatttcgcgctgcacggcgccgccggcggcgcgcctgccgcggtgacgggcgcgctcgacggcagcctgctcgcgatcgacacgcccggcgctcgcatcgacgtgcggctcaacgcgctcggcgagcacaacgcgcgcaacgcgctcgccgcgacggcggcggcgctcgcggccggcgtgccgctcgcggcgatcaaggccgggctcgaggcgttcgcgccggtgaaagggcggctgcaagtggcgcgcgcggcggcgggctcgctcgcgggcgcgacggtgatcgacgacacctacaacgcgaaccccgattcgatgcgcgccgcgatcgacgtgctcgccgcgcaatcggcgccacgcgtgctcgtgatcggcgagatgggcgaagtcggcgacgaagggccggcgttccaccgcgagatcggcgcgtacgcgcgcgagcgcggcatcgacgcgctcttcgcgctcggcgcggcgacgcggcccgcgtgcgacgcatacggcgcgggcgcgcggcatttcgacgacgcggccgcactcgtcgccgcgctgctcgccgcgaacttcggcgcgcacgcgacgctgctcgtgaagggctcgcggttcatgaagatggagcgcgtggtcgacgcgctcgcgaacgaaaccgcgtcgggcgcagcgcccggcgcacac

SEQ ID NO: 14164 - DNA, 258 bp, Burkholderia mallei
gtgaacaaagtggtcatgtacagcacgcaggtgtgcccgtattgcatgcaggccgagcggctcctcaagctgcgcggcgtcgagcacatcgagaaagtgctgatcgacaaggagccggagcgccgcgcggagatgatggagcgcaccggccgccgcaccgtgccgcagatctacatcggcgacacgcacgtcggcggttacgacgacctgtcgaagctcgaccgcgaaggcggcctgaagccgcttctcgaagccgcc

SEQ ID NO: 14165 - DNA, 1143 bp, Burkholderia mallei
ttgctcgcgtcgtcgatgatcgccttcagttcagcacgcttcggagcgtacttttgcgcaaggcgagcgcgcttcttttcacgttcgatcagtgccagtttagccacggtaacctcagtttctgaacgggaacttgaagctggcgagcagagccttcgcttcgtcgtcggtcttcgcggtcgtcatgatgctgatgttcagcccacgcagcgcgtcgatcttgtcgtaatcgatttcggggaaaatgatctgctctttcacaccgatgttgtagttgccgcggccgtcgaaagcacgacccgacacgccgcggaagtcgcgcacgcggggcagggcaaccgtcacgaaacgatcgaggaattcatacatcgcgcggccacgcagcgtgaccatcgcgccgatcgggtagccctgacggatcttgaagcccgcgattgccttgcgagccttcgtcacgacgggcttctggcccgcgatcttcgtcagatcgcccacggcgttctcgatgatcttcttgtcggcaaccgcctcgccaagacccatgttcagggtgatcttggtgatgcgcggcacttccatgaccgacttgtagccgaacttctcgatcaggccgggaacaaccttctctttgtaaaactcttgaaaacgtgccatttctctactccgcagcgtcaggcgctcagcacggcaccggtcgtcttcaggaagcgaaccttcttgccatcctcgaccttgatgccaacacgcgaagccttgccgttcgcgtcgaccagtgcgacgttcgaaatatgcagcggcatcgtcttcgcttccacgccgcccgtcgtacccttcatcgggttcggcttcacatgcttcttgacgaggttgataccctcgacggtcacatgctcggcgcccacggccagcacgacaccgcgcttgcccttgtccttgccggtgatgacgatgacttcgtcacccttgcgaatcttgttcatcgcgactccttacagcacttccggcgccagcgacacgatcttcatgaatcgttcgctacgcagctcacgcgtcaccggcccgaagatacgggtgccgatcggctcgagcttgttattcaaaagcacagcggcgttgccgtcgaacttgatcagcgagccgtct

SEQ ID NO: 14166 - DNA, 309 bp, Burkholderia mallei
atgcagcaacagaaaatccgcattcgcctgaaggctttcgactatcgtctgatcgatcagtcggctgccgaaatcgtcgacaccgcgaagcggaccggcgcgatcgtccgtggcccggtgccgctgccgacgcgcatccagcgttttgacatcctgcgctcgccgcacgtcaacaagacgtcgcgcgaccagctcgaaatccgcacccatcagcgcctgatggacatcgtcgatccgaccgacaagacggtcgacgcgctgatgaagctcgacctgccggccggcgtcgacgtggaaatcaagctgcag

SEQ ID NO: 14167 - DNA, 450 bp, Burkholderia mallei
atgcaaatcattctgttggaaaaagtcgccaatctgggcaacctcggcgatatcgtcaaggtcaaggacggttacgcgcgcaacttcctgatcccgaaccgcaaggcgcgccgcgcgacgaaggacgcgatcgccgaattcgaagtccgccgcgcggaactcgaaaaggtcgccgccgagaagctggccgccgcgcaagcggtcggcgagaagctgaacggccagacgttcgagatcacgcagaagtcgggcgtcgacggccgtctgttcggctcggtcacgaacggcgacgtcgcggagctgctgaagaaggcaggctacgaaatcgagaaggcgcaagtgcgcatgccggaaggcccgctgaagatgatcggcgagcacggcgtgcaggtcgcgctgcacaccgacgtcgtcgtcgacgtcacggtcaacgtgatcggcgaccacgcg

SEQ ID NO: 14168 - DNA, 642 bp, Burkholderia mallei
atgcgtcgtcaaacaattcgtacttgcaccaccgccatcgcttgcgcagccggtcttgcgatgattccgtcgctgtcgcatgcggcttcgcccggagagggcatcaatcaaggcgacatcatcgcgcgcgttcgcgggatcagcatcatgccggacgagcgcacgagcaatacgttgtcggcgctgaacgtgggcgtgaacaatgcgatcgtccccgagctcgatttcacgtacatgattcgcgactacctgggcgtcgagctgatcctcggcacgtcgcggcatcagatcacgtcgtcgctcggcgatctcggcggcgtcggcgtgctgccgccgacgctgctgttgcagtaccacttcaaccatgccggcaaggtgcgtccgtatgtcggcgcgggcatcaactacacgctgttctacaacaacgggctgcacgcgggcggcgaggggatcgggatcaacaaccacagcttcggtcccgcgctgcagttcggcgtcgatgtgcaagtgacgaagaaggtgttcgtcaacgtcgacgtgaagaagatctggatgcacaccgatgcgacgctcggcggccagccgctcggccggctgaatatcgatccgctcgtcgtgggcgtcggcgtcgggatgaagttc

SEQ ID NO: 14169 - DNA, 1407 bp, Burkholderia mallei
atgacgtcccaactgcacaaaaagggcgaggcctggtcggcccgcttttcggaaccgatgtccgagctcgtcaagcgctacacgtcgtcggtcttcttcgacaagcggctcgcgctcgtcgacatcgccggctcgctcgcgcacgcaggcatgctcgccgcgcagaagatcatcagcgccgacgacctcgccgcgatcgagcgcgggatggcgcaaatcaagggcgagatcgagcgcggcgaattcgaatggcagctcgatctcgaagacgtccacctgaacatcgaggcgcgcctgaccgcgctcatcggcgatgcgggcaagcgcctgcacacgggccgctcgcgcaacgatcaggtcgcgaccgacatccgcctgtggctgcgcggcgagatcgaccggatcggcggcctgctgaacgacctgcgcggcgcgctgatcgatctcgccgaacagaacgcggacacgatcctgccgggcttcacgcacctgcaggtcgcgcagcctgtcacgttcggccatcacctgcttgcctacgtcgagatgttctcgcgcgacgccgagcgcatgcgcgactgccgcgcgcgcgtgaaccgcctgccgctcggcgcggcggcgctcgcgggcaccagctatccgatcgaccgccacgcggtggcgaagacgctcggcttcgacggcatctgcgcgaactcgctcgacgcggtgtccgatcgcgacttcgcgatcgaattcacggccgcggccgcgctcgtgatgacgcacgtgtcgcgcttctcggaagaactcgtgctgtggatgagcccgcgcgtgggcttcatcgacatcgccgaccgcttctgcaccggcagctcgatcatgccgcagaagaagaacccggacgtgcccgagctcgcgcgcggcaagacgggccgcgtaaacggccacctgatggcgctgctcacgctgatgaagggccagccgctcgcgtacaacaaggacaatcaggaagacaaggaaccgctgttcgacacggtcgacaccgtcgccgacacgctgcggatcttcgcggagatggtcgcgggcatcacggtgaagccggacgcgatgcgcgcggccgcgctgcagggcttctcgaccgcgacggatctcgcggactacctggtcaagcgcgggttgccgttccgcgacgcgcacgaggcggtcgcgcacgcggtgaaggtctgcgacgcgcgcggcatcgacctcgcggatctgacgctcgacgaaatgaagcaggaactgccgaacgtcgcgcatctgatcggcgaggacgtgttcgactatctgacgctcgaaggctcggtcgcgagccgcaatcatccgggcggcaccgcgccggaccaggtgcgcgcggcggcgaaggccgcgcgcgcggcgctcggccag

SEQ ID NO: 14170 - DNA, 1062 bp, Burkholderia mallei
atgcccgtcctaggctctcacgtcctgcgcaacaatctgttcgtcgccccgatggcgggcgtcacggaccggccgttccgtcagctatgcaagcggctcggcgcgggctatgcggtgtcggagatggtcgcgtcgaacgcgcagctgtggaagagcgagaagacgatgcgccgcgcgaaccacgcgggcgaggtcgagccgatcgcggtgcagatcgcgggcgccgacccggcgatgatggccgaggccgcgcgtcacaacgtcgcgaacggcgcgcagatcatcgacatcaacatgggttgcccggcgaagaaggtctgcaacgtcgccgccggctcggcgctgctgcagaacgagccgctcgtgcagcggatcgtcgaggcggtcgtcggcgcggtgggcgcgggccccgacgccgtgcccgtcacgctgaagatccgcaccggctgggaccgcgatcacaagaacgcactcaggatcgcgacgctcgccgaggcggccggcatctcgatgctgaccgtgcacggccgcacccgcgcggacctgtaccgcggcgacgccgaatacgacacgatcgcggccgtgaaagccgccgtgcgcattccggtcgtcgcgaacggcgacatcacgtcgccgcgaaaggcgaaggccgtgctcgacgcgacgcgcgccgacgcgctgatgatcggccgcgccgcgcaaggaaggccgtggctcttccgcgaaatcgatcatttcctgcaaagcggcgagcttctgccgccgccgcgcatcgacgagatccgccaggtgatgaacgaacacctggaggatcactacgcgttctacggcgaattcacgggagtccgtactgcacgcaagcacatcggctggtacactcgcggcctttccggcgcgaacgggttccggcaccgaatgaacacgctcgaaaccacccgcgagcagcttgccgccgtcaacgaattcttcgacgcgcaacaggcgctgtccgatcgcctcgtctatgtggacgacgaagacggcgaccgcggcgagccggacgattctaaccagttagcagca

SEQ ID NO: 14171 - DNA, 750 bp, Burkholderia mallei
atgaacgtcttgctggtctatgcccatcccgagccgaaatcgctgaacggctcgctgaagaatttcgcgctccggcatctcgaggaagccgggcacgcggtgcaggtttccgatctgtacgcgatgcaatggaaagcggcgctcgacgccgacgacaataccgcacgccggcccgatacgcgcttcgatccgtcgctcgattcgaagcatgcgttcgagaacggcacgcaggcggccgacatcgcacgcgagcaggacaagctgcgctgggccgacgcgctcgtcctgcagtttccgctgtggtggttctcgatgccggcgatcctgaagggctgggtcgagcgcgtgtacgcgttcggcttcgcgtacggcgtcggcgagcattcggatacgcactggggcgatcgctacggcgagggctcgatgaaaggcaagcgcgcgatgctgatcgtgacgacgggcgggtgggcatcgcattacggcccgcggggcatcaacgggccgatcgacgacctgctgtacccgattcatcacggcatcctgtattaccccggcttcgacgtgctgccgccgtttctcgtgcatcggacgaaccgcatcgacgagacgcgcttcgcgacgatccgcgatgcgctcgggcagcgcctcgacacgctgtggacgaccgcgccgatcgccttccgtgcgcagaatgccggcgattacgagattccacagctcacgctgcgggccgacatcgcgccgggaagg

SEQ ID NO: 14172 - DNA, 879 bp, Burkholderia mallei
atgttgaaagtcaccaaggcggttttcccggtcgcgggcctgggcacgcggtttctgcccgccaccaaggcgagtccgaaggaaatgctgcccgtcgtcgacaaaccgttgatccagtatgcggtggaagaagcgattgcagccggcatcaccgagatgatcttcgtgacgggccgcagcaagcgcgcgatcgaggaccatttcgacaagtcgtacgagatcgaagcggagctcgaggcgcgcggcaaggaaaagctgctcgatctcgtgcgcagcatcaagccgagccacgtcgactgcttctacgtgcgccagccggaagcgctcggcctgggccacgcggtgctgtgcgcggagaagctcgtcgcggacaatccgttcgcggtgatcctcgccgacgacctgctcgacggcgatccacccgtgatgaagcagatggtggacgtgttcgaccactatcacagctcggtgatcggcgtcgaggagattccgcccgaggacacgaagtcgtacgggatcgtcgacggcaaggaatgggaagactcgatcatcaagatgtcggcgatcgtcgagaaacccgcgcccgaagtcgcgccgtcgaacctcggcgtcgtcggccgctacgtgctcaagccgcgcatcttcgatcacctgcgcgcgctcaagccgggcgcgggcggcgagctgcagttgaccgacgcgatccaggcgctcctcgcggacgaacaggtgctcgcatacaagtatcgcggcacccgcttcgactgcggcagcaagctcggctatctgaaggcgacggtcgagttcgcgctgcgccaccccgaagtgaagaccgagttcgaaacgtatctgcgctcgcgcagcgaaacgcaacacggg

SEQ ID NO: 14173 - DNA, 516 bp, Burkholderia mallei
gtgccggccgcgatagccgctcccatccgcgacgcccgtacccaccttgtccacgaacggaggccgatcgtgaatgctgccgagatctgtacacgcgaggtcgtcgcgtgccgccgcaccgataccgtgctcgacgccgcgcacctgatgcgcgaccgccatgtcggcgacctgatcgtcgtcgacgacgcggggcacgcgcacgcgccggtcggcatgctgaccgaccgcgacatcgtgctgtcgctgatcgcgaaggaagtcgatcccgccgcgctgttcgtcggcgagatcatgtccgcgccggcggccgtcgttcacgagcacgacagcctgtggacgatcgcgcagcgaatgcggctgacgggtgtacgccggatgccggtcgtgaatgccgacggcgcgctcgtcggaatggtgtccgtcgacgatctgctggcgagcgtggcggcgttgttcgacgagatcgcgtcgatttcgcggcgtcagattcatttcgaggagaaggcgcgggat

SEQ ID NO: 14174 - DNA, 1254 bp, Burkholderia mallei
gcatctcccctcaccccgaggagatcgaacatgtccaagctccaacacctcgccgccgcggtctgcggcgccctctgcgtatcggcggcccatgccgcgccggtgtggatcacgctctccgagcccgccctgcacgagctgcgcgcgctcgatcccgccgtgacgagccgttacagcgcggcgctcgccaccggcgacgcgaagcgcaccgaaacgatccacgtcgcgcaggtcgacgattcgctgctcgaatcgctgtcgcaggcgatccgccgcgcgcgcggccacggcccgggctttttcgtgcacgcgacgttcgacgaagcgcgcgcgtcgctgcagccgagcgcggcgaagcaggcggccgcgatcgattacccgatcacctactcgcaacaggtccgcaactggatctcgcaactgcaggcgagcaacatcgtcagcaccatcgtctcgctgtccggcttcacgaaccgctactacacgacgacgcacggcgtggccgcgtccgactggatcgcgcagcaatggaagcagttggccggctcgcgcaccgatgtgacggtcgagcagttcacgcatgccggctggccgcagaaatcggtgatcctgacgatcaagggcagcgatccggccgcgggcgtcgtcgtgatcggcggccatctcgattcgaccgtcggccgcatgagcgagaacacgcgcgcgcccggcgcggacgatgacgcatccggcatcgcaagcctcaccgaggcgctgcgcgtgctgctcgcgaaccgctaccagccgaagcgcacgctcaagttcatcggctacgcggcggaagaggcgggccttctcggctcgcaggcgatcgcgaagcagttcagggcgcagaacgtgaacgtcgtcggcgcgttccagctcgacatgacgaactacaagggagatccgaaggatatctatctgatcagcgactacacgaacgcgacacagaacacgtacctcgcgaacctcgcgaaagcgtatctgcccgagctcgcggtcggcacgtcgcaatgcggctatgcgtgctccgatcacgcgtcgtggaacgcgcagggctatccggcgtcgttcccgttcgaagcggatcagaacgacaatccgtacatccattccgcgtatgacacgctcgagcggtcggactcgcaaggcaaccacgcgctgaagttcagcaagctcgcgctcgcgtacgcggcggagctgggcggcgggctgagcgcgtccgcgaagcgg

SEQ ID NO: 14175 - DNA, 2094 bp, Burkholderia mallei
gcccgcaccgtgacggtgagcggccctgccgtgccgacgacgcccgtcggcgagcccgcgctcgaactgagcgcgatccggggcgacgaaacgctatcggaaatctattcgtacacgcttgattgcctgacgccgccggacccgttgctcgcgcacgagcgggccgcgaatctcgatctgaaggcgatgatcggcaaggcgctgaccgtaaccgtgcagctcgaaggcatgggctcgttcgtgcccggcatgccgggcatggcgggcgcggccaatatcggcgcgggcgcgcgcgagatcagcggcatcgtgaccggcgcgcgcttcgagggccaactgaaccggcagtgccgctaccggctgacgatgcggccgtggatctacctggccgacctgcgctcggactaccggattttccagaaccggagcgtcgacgagatcgtcgacgaagtgctgaacgcgtattcgtactcgtacgacaagcgcttgagcggccggtatccgaagctcggctaccaggtgcagtacggcgagaccgatttcgcgttcatccagcggctgatgcaggagcacggcatctactggtttttcgagcatacgaaccaggtgcaccggatggtgctcgtcgatcacctgggcgcgcacaagccggtggagagcgccgcataccgcacgctgcgctactacccgccggggcacaagatcgacgccgagtacatcgacaggttcagcaccgaggagcacatccggccgggccgctgggcgacgggcgatttcgatttcgagaagccgaacgcggacctgggcgtcgagaacgcgctgccgcgggacaccgcgcacaacgggctcgaacgttacgagtggccgggcgactacacggcgcgcgagcacggcgagcacctcgcgcgcgtgcgcatggaacagacgcgcgcgcggggcgagcgcgcatcgggcggcggcaacgtgcgcgacatcgtgtgcggcacgacattcgcgctcgcgggccatccgcacgcgagcgcgaaccgcgagtatctggtgatcggcgcgacgttcgaggcgacggagacggtcggcgcgtcggggccgggcgcatatcggatcgacacgtcgttcgtcgcgcagccggcgaccaccgcgttccggccgccgcgcacggtgcgcaagccgcgcacgcgcgggccgcagacggcgatcgtcaccggcccgcgagggcaggacatctggacggaccagtacggccgtgtgaagctgaaattccactgggaccgttcgctcgtcgacgatcagaactcgtcgtgctgggtgcgcgtttcctatgcgtggtcgggcaacaattacggcggcgtcaatattccgcgtgtgggctccgaagtggtcgtcgatttcgagcacggcgacccggaccggccgctcgtgacggggcaggtatacaacgcgctgcacatgccgccgtggccgttgccggagaacgcgacgcaaagcggcttcatgacgcgctcgcccgcgggcggcggcgagaacgcgaacatgctgcgcttcgaggacaaggcgggcgaggagcaggtcaagctgcatgcggagcgcaattacgacgtatcggtcgagcgcgacgcgacgactgccgtcgggcgcaagcacctgacgctcgtcggcgtcgacctgatgccggtgatgtcgacgcgctcgccgctggagcggctgatcgacctgctgcgcacgggcggcgcggccagcccggcggcgtcggggcagccggcggcggcttcccggcaaccgtcgggacagcagcagcaacatcaacagcaacaccagcaacatcagcggcaacaccagccctatcagcagttgaagcagcagcgccagatgcagcgcgcgggcggatggcaggcgctcgcggcgaacgtcgcgaagacgttgcaggaaatcgtggcggtgctcacggacccgttcgtcaccgcgtcggtgagcaccgtgcagggcgcgtcgacgtccgtcgtgttcggcgacgcgaagggcgtgcacgtgggcgataccgtcaagatcaccagcggagacgcgcattcggaggtcaacggcacggcatcgtcgaag

SEQ ID NO: 14176 - DNA, 414 bp, Burkholderia mallei
atgacgcggatcgatttccatacgaatgtcggcgattcgctcgcgtacgcgtgccggctgctgcgcaaggcgtatcaggcggggcagcccgtcgtcgtgtgcgcggagcccgcgcggctgcgcgcgctcgacgagcgtctgtggacgttctcgccgctcgatttcattccgcattgcgcgatcgacaacgcgcacgcggcgagcacgccgatcgtgctgaccgcggatctcgagcgcgcgccgcatcacgggatcctgctgaacctgggcgcgcaggtgccggcgcagttcgcacgcttcgagcgcctgctcgaggtggtcggcaacccgcccgacgagctcgcggccggccgcgaccggtatcggttctatcgcgatcgcggctacgcgctcaacaatcacaagcagggcggc

SEQ ID NO: 14177 - DNA, 996 bp, Burkholderia mallei
atgagcatccatcccctgcaccgcccgcgccgcatgcgccgcgacgatttctcgcgacgcctgatgcgcgaaaatatcctcaccacgaacgatctgatctacccggtgttcgtcgtcgaaggcacgaacgtgcgccagccggtgccgtcgatgccgggcgtcgagcgcgtgtcgatcgatctgctgatgggtgtcgccgagcaatgcgtcgagctcggcgtgccggtcctgtcgctctttccggccatcgagccgtcgctgaagacgcccgacggccgcgaagcggccaatcccgaagggctgatcccgcgtgcggtacgcgagctgaagcgccgcttccccgaactcggcgtgctgaccgacgtcgcgctcgatccgtacacgagccacggccaggacggcgtgctcgacgaggccggccatgtgctcaacgacgaaacgctcgagattctcgtcgagcaggcgcgcgcgcaggccgaagcgggcgtcgacatcgtcgcgccgtcggacatgatggacgggcgcatcggcgcggtgcgcgagatgctcgagcgtgaaggccacatctatacgcggatcatggcctactcggcgaagtacgcgtcagcgttctacggcccgttccgcgacgcggtcggctccgcgtcgaatctcggcaagggcaacaagatgacctaccagatggaccccgcgaacagcgacgaggcgctgcgcgaagtgcgcctcgacatcgacgagggcgcggacatggtcatggtgaagcccggcatgccgtatctcgacatcgtgcgccgcgtgaaggacgaattccgctatccgacctacgtctatcaggtgagcggcgaatacgcgatgctgaaggccgccgcgcagaacggctggctcgatcacgacaaagtcgtgctcgaatcgctgctcgcgttcaagcgcgcgggcgcggacggcattctcacgtacttcgcgctcgacgcggcgcggctgctgcgcgcgcagaag

SEQ ID NO: 14178 - DNA, 1248 bp, Burkholderia mallei
gtgttcggcgggcatgcgccgcggcgcgtgtcgcatgcggtcgatgtccgctggggcggcacgctcgtgacgatcggcggcgcggcgcccgtgcgcgtgcagtcgatgacgaacaccgatacggccgacgcgatcggcaccgcgatccaggtgaaggagctcgcgaacgcgggctccgagctcgtgcgcatcaccgtgaacacgccggaggcggccgctgccgtgccggcgattcgcgagcagctcgaccggatgggcgtgacggtgccgcttgtcggcgatttccactacaacggccacctgctgctgcgcgactacccggactgcgcgcaggcgctgtcgaaataccggatcaacccgggcaacgtcggccagggcgcgaagcgcgattcgcagttcgcgcagatgatcgaagccgcgatcaagtacgacaagccggtgcggatcggcgtgaactggggcagcctcgatcaggacctgctcgcgcggatgatggacgagaacggcgcgcgcgccgagccgtgggaggcgcagagcgtgatgtacgaggcgctgatccagtcggcgatcggctcggccgagcgcgcggtcgagctcggcctcggccgcgacaagatcgtgctgtcgtgcaaggtgagcggcgtgcaggacctggtcgccgtgtaccgcgaactgtcacgccgctgcggcttcgcgctgcacctcggcctcaccgaggcgggcatgggctcgaagggcatcgtcgcgtcgaccgcggcgatcggtctgctgctgcaggaaggcatcggcgacacgatccgcatctcgctcacgccggagccgggcgcgccgcgcacgggcgaagtggtggtcggccaggagatcctgcagacgatggggctgcgctcgttcgcgccgatggtcgtcgcgtgtccgggctgcggccgcacgacgagcacgctgttccaggagctcgcgctgcggatccagacctacctgcgcgaacagatgcccgtgtggcgcagcgaatacccgggcgtcgagaagatgaacgtcgcggtgatggggtgcatcgtcaacggcccgggcgagtcgaagcacgcgaacatcggcatcagcctgccgggctcgggcgagaatccggccgcgccggtgttcgtcgacggcgagaaagtgaagacgctgcgcggcgagcacatcgcggaagagttccagcagatcgtgagcgactacgtcgcgcgcacctacggccgcgccgcggcgcagaat

SEQ ID NO: 14179 - DNA, 390 bp, Burkholderia mallei
atgatcggtaactggaactacggtacgggccgccgcaagagcgcagtcgctcgtgtcttcatcaaggctggcaagggcgacatcgtcgtcaacggcaagcccatctccgactacttctcgcgcgaaacgtcgctgatgatcgtgcgtcagccgctggaactcacgaaccacgcgcagacgttcgacatcaaggtgaacgtatcgggcggcggcgaaacgggtcaggcgggcgcggtgcgccacggcatcacccgcgcgctgatcgactacgacgcgacgctgaagccggcactgtcgaacgcgggcttcgtcacgcgcgacgcccgtgaagtcgagcgtaagaaggtcggtctgcacaaggcacgccgcgccaagcagttctcgaagcgt

SEQ ID NO: 14180 - DNA, 1140 bp, Burkholderia mallei
atggttctgaagaatctgatcaaggccagggccggccacccggagcgcttgtccgacgatgaccggctcgtgcgctcgggactcctgacggggctcgaggcgttgccgacggtcgtgctcgtgctcgatcggcgcacgctcaggatcgcgttcgccaatccgtcggcggaggcgatgctcgacatctcgcgccggcagttgtcgcagatgccgtggggcgagatcttcccgaacgcgagcgagctcgcgacgacgatcaccgcgatcggcgaggagcgctttcacgcgacccatctggacaccgtgctcgatcgtccgggccgcgagccgctgcacgtgcatgcgatcgtcggctttctcgagggcgcgcccgagttcgtgctcgtcgagctgttcgagaacgagcggcagtcgcgcaccgaccgcgaggagcggatccacgatctcaccgccgtcaacaagcaactgatccgcaacctcgcgcatgagatcaagaacccgctcggcgggattcgcggcgcggcgcaattgctcgagttcgagctgggcgagcgcgagcgcgacgagctgcgcgagtacacgcaggtgatcatcaaggaatcggaccggctgcagacgctcgtcgaccggctgctcgagccgcatcgccatccgcacatcgtcggcgacgtgaacatccacgaagtgtgcgagcgggtgcgcgcggtgatgctcgcggaattcccgcgcggcctcacgatcgagcgcgattacgacgtgagcgtgcccgatctgcgcggcgacaaggagcaactgatccaggcgctcctcaatatcgtgcgcaacgcggcgcaggcgctgcgcgagcggatcgcgcagggcgacgcgcggatcgagctgcgcacgcgcgtcgcgcgcaaggtgacgatcgcgaagcgcctgtacaggctggcactggatttgcgtgtgatcgacaacggccccggcattcccgacgacatccgcgaccggatcttctatccgctcgtatccggccgcgacgacggcagcgggctcgggctcacgctcgcgcagaccttcatccagcagcacgacgggatgatcgaagtggacagccggccgggccggaccgaatttcagattttgctgccgctcgaccat

SEQ ID NO: 14181 - DNA, 2073 bp, Burkholderia mallei
atggcccgatccccagttgaaccgcccgccagccagccggcgaagcgcgccgcgtggctgcgcgccgagctcgagcgggcgaactacgcgtattacgtgctcgaccagccggacctgcccgacgccgagtacgatcgcctcttcgtcgaactccaacggatcgaggccgagcaccccgatctcgtcacgcccgattcgccgacgcagcgcgtcggcggcgaggccgcgagcggcttcacgccggtcgtccacgacaagccgatgctctcgctcaacaacggctttgccgacgaggacgtcatcgcgttcgacaagcgcgtcgccgacggcctcgacaaggcgaccgacctcgccggcaccgtgaccgagcccgtcgaatacgcgtgcgagctgaagttcgacggcctcgcgatctcgctgcgctacgagaacggccgcttcgtgcaggcgtcgacgcgcggcgacggcacgacgggcgaagacgtcaccgagaatatccgcacgatccgtgcgattccgctgacgctcaagggcaagcggataccgcgcatgctcgacgtgcgcggcgaggtgctgatgttcaagcgcgatttcgcgcggctgaacgagcgccagcgcgcggcgggccagcgcgagttcgccaatccgcgcaacgcggcggcgggcagcctgcggcagctcgattcgaagatcaccgcgtcgcggccgctttcgtttttcgcatacggaatcggcgtgctcgacggcgccgacatgcccgacacgcacagcggcctgctcgactggtacgagacgctcgggttgcccgtgaaccgggagcgcgcggtcgtgcgcggcgcggcgggcctgctcgcgttcttccattcggtgggcgagcggcgcgaatcgttgccgtacgacatcgacggcgtcgtctacaaggtgaaccgccgcgacgagcaggatcggctcggcttcgtgtcgcgcgcgccgcgcttcgcgctcgcgcacaagttccccgcgcaggaggcgctcacgaagctcaccgcgatcgacgtgcaggtcggccgcaccggcgcgatcacgccggtcgcgcgcctcgagcccgtgttcgtcggcggcgcgaccgtcacgaacgcgacgctgcacaacgaggacgaggtgcgccgcaaggacatccgcatcggcgacacggtcatcgtgcgccgcgcgggcgacgtgattcccgaagtggtatcggccgtgctcgaccggcgtcccgccgacgcgcaggagttcgtgatgccgaccgaatgcccggaatgcggatcgcggatcgagcgattgcccgacgaggcgatcgcgcgctgcacgggcgggctgttttgccccgcgcagcgcaagcaggcgctctggcacttcgcgcagcgccgtgcgctcgacatcgatgggctcggcgagaagatcatcgatcaactcgtcgagcagaacctcgtgcgcacgccggccgatctgttcaatctcggcttctcgacgctcgtcgcgctcgatcgcttcgcggagaaatccgcgcggaatctgatcgattcgctcgaaaaggcgaagcacacgacgctcgcgcgcttcatttacgcgctcggcatccggcacgtcggcgaatcgacggcgaaggacctcgcgaagcacttcggctcgctcgatccgatcatggacgcgccgatcgacgcattgctcgaggtcaacgacgtcgggccgatcgtcgccgaatcgatccatcaattcttcgccgaggagcacaatcgcacggtgatcgaacagttgcgcgcgcggggcaaggtcacatggcccgaagggccgcccgcgccgcgcgcgccgcaaggcgtgctcgcgggcaagaccgtcgtgctcacgggcacgctgccgacgctcacgcgggaagccgcgaaggagatgctcgaggcggcgggcgcgaaagtcgcgggctcggtatcgaagaagaccgattacgtcgtcgcgggcgccgacgcgggcagcaagctcgcgaaagccgaggaactcggcattccggtgctggacgaagcaggcatgcacacacttctggagggccacgcgcga

SEQ ID NO: 14182 - DNA, 4104 bp, Burkholderia mallei
atgcaatattccttcaccgagaagaagcgcattcgcaagagtttcgcgaagcgttccatcgttcaccaagtgcctttcctgctggccacccagcttgaatcattcagcacatttctgcaagccgatgtgcccaccgcgcaacgcaagtccgaggggttgcaggccgccttcacgtcggtgtttcccatcgtctcgcataacggcttcgctcgtctcgagttcgtgagctatgcgttgtcgtcgccggcgttcaacatcaaggaatgtcagcagcgcggcctgacctactgctcggcgctgcgcgcgaaggtgcgcctcgtgctcctcgacaaggagtcgccgagcaagcccgtcgtcaaggaagtgaaggaacaggaagtgtacatgggcgagattccgctcatgacgccgaccggttcgttcgtcatcaacggcaccgagcgcgtgatcgtgtcgcagttgcaccgttcgcccggcgtgttcttcgagcacgacaagggcaagacgcacagctcgggcaagctgctgttctccgcgcggatcattccgtaccgcggctcgtggctcgacttcgaattcgatccgaaggacgtgctgtatttccgcgtcgaccgccgccgcaagatgccggtcacgatcctgctgaaggcgatcggcctcacgcctgagcagatcctcgcgaacttcttcgtcttcgacaacttcacgctgatggacgaaggcgcgcagatggagttcgtgcccgagcgtctgcgcggcgaagtcgcgcgcttcgacatcaccgatcgcgaaggcaaggtcatcgtccagaaggacaagcggatcaacgcgaagcacattcgcgatctcgaagccgcgaagaccaagtacatctcggtgcccgaagactatctgctcggccgcgtgctggcgaagaacgtcgtcgacggcgacacgggtgaagtgatcgcgaacgcgaacgacgagatcaccgaaggcgtgctcgagaagctgcgcgaagcgaagatcaaggaaatccagacgctctacacgaacgatctggaccagggcccgtacatctcgtcgacgctgcgcgtggacgaaaccgtcgacaagacggccgcgcgcatcgcgatctaccggatgatgcgcccgggcgagccgccgacggaagaagccgtcgaggcgctcttcaaccgcctgttctacagcgaagacgcgtacgacctgtcgaaggtcggccgcatgaagttcaaccgccgcgtcggccgtgacgagatcacgggcccgatgacgctgcaggacgacgacatcctcgcgacgatcaagatcctcgtcgagctgcgcaacggcaagggcgaagtcgacgacatcgaccacctcggcaaccgtcgcgtgcgctgcgtcggcgaactggcggaaaaccagttccgcgcgggcctggtgcgcgtcgagcgcgcggtgaaggaacgtctcggccaggccgagagcgaaaacctgatgccgcacgacctgatcaactcgaagccgatttcgtcggcgattcgcgagttcttcggttcgtcgcagctgtcgcagttcatggaccagaccaacccgctgtcggaaatcacgcacaagcgccgcgtgtccgcactgggcccgggcggtctcacgcgcgagcgcgccggcttcgaagtccgcgacgtgcacccgacccactacggccgcgtgtgtccgatcgagacgccggaaggtccgaacatcggcctcatcaactcgctcgcactgtacgcgcacctgaacgaatacggcttcctcgagacgccgtaccgcaaggtcgtcgacagcaaggtgaccgaccagatcgactatctgtcggcgatcgaggaaggccgctacatgatcgcgcaggcgaacgccgcgatcggcgacgacggcgcgctcgtcgacgaactggtgtcgtcgcgcgaagccggcgaaacgatgatggtcacgccggaccgcatccagtacatggacgtcgcgccgtcgcagatcgtgtcggtggcagcctcgctgattccgttcctcgagcacgatgacgcgaaccgcgcgctgatgggctcgaacatgcagcgtcaggccgtgccgtgtctgcgtccggagaagcccgtcgtcggtaccggcatcgagcgcaccgtggcggtcgactcgggcacgacggtgcaggcgctgcgcggcggcgtcgtcgattacgtcgacgcgggccgtatcgtcattcgcgtgaacgatgacgaagcggtcgcgggcgaagtcggcgtcgacatctacaacctgatcaagtacacgcgttcgaaccagaacacgaacatcaatcagcgtccgatcgtgaagatgggcgacaaggtctcgcgcggcgacgtgctggccgatggcgcatcgaccgacctgggcgagctcgcgctcggccagaacatgctgatcgcgttcatgccgtggaacggctacaacttcgaggattcgatcctgatctcggagcgcgtcgtcgcggacgatcgctacacgtcgatccacatcgaagagctgaacgtcgtcgcacgcgacacgaagctcgggccggaagaaatcacgcgcgacatctcgaacctcgcggaagtccagctcggccgtctcgacgaatcgggcatcgtgtacatcggtgcggaagtcgaagcgggcgacgtgctggtcggcaaggtcacgccgaagggcgagacccagctgacgccggaagagaagctgctgcgcgcgatcttcggcgagaaggcgtcggacgtgaaggacacgtcgctgcgcgtgccgtcgggcatgagcggcaccgtgatcgacgttcaggtgttcacgcgcgaaggtatccagcgtgacaagcgcgcgcaacagatcatcgacgacgaactgaagcgctaccgtctggacttgaacgaccagctgcgcatcgtcgaaggcgacgcattccagcgtctcgcgcgcatgctcgtcggcaaggtcgcgaacggcggtccgaagaagctcgcgaagggcacgaagatcgaccaggcgtacctggaggatctcgaccactaccactggttcgacatccgcctcgcggacgacgaagcggccgtgcagctcgaagcgatcaagaactcgatcgaagagaagcgccaccagttcgacctcgcgttcgaagagaagcgcaagaagctcacgcaaggcgacgaactgccgccgggcgtgctgaagatggtcaaggtgtacctcgcggtgaagcgccgcctacagcctggcgacaagatggcgggccgtcacggtaacaagggtgtcgtgtcgaagatcgttccggtcgaagacatgccgtacatggccgacggccgtccggccgacgtcgtgctgaatccgctcggcgtgccgtcgcggatgaacgtggggcaggtcctggaagtgcacctcggctgggccgcgaagggcctcggctggcgtatcggcgagatgctcgcgcgtcagacgaagatcgaagagctgcgtgtgttcctgacgaagatctacaacgagtcgggccgtgcggaagacctcgagagcttcagcgacgacgaaatcctcgaactcgcgaagaatctgcgcgaaggcgtgccgttcgcgacgccggtgttcgacggcgcgaccgaggaagaaatgtcgaagatgctcgacctcgcgttcccggacgacatcgccgaacagctcgacatgaatccgtcgaagaaccaggtgcgcctgtacgacggccgcacgggcgagccgttcgagcgccgcgtgacggtgggctacatgcactacctgaagctgcaccacttggtcgacgacaagatgcacgcgcgttcgacgggcccgtactcgctcgtcacgcagcagccgctcggcggcaaggcgcagttcggcggccagcgcttcggtgaaatggaagtgtgggcgctcgaagcgtatggcgcttcgtacgtgctgcaggaaatgctgacggtgaagtcggacgacgtgaccggccggaccaaggtttatgaaaacctggtcaagggcgaccatgtcatcgacgccggcatgcccgagtcgttcaacgtgttggtgaaggaaatccggtcgctcggtatcgacatcgacctggaccggaac

SEQ ID NO: 14183 - DNA, 879 bp, Burkholderia mallei
atgttcttgcgaaaacttttcggcttcgtcgcgacagccgtcatcctgatcgtcgcgatcctgattgggcgcacgctgtgggtccactacatggacgagccgtggacccgcgacggccgcgtgcgcgcggagatcgtcaacgtcgcgccggacgtgtcgggcgcggtcgtcgagttgccggtgcgcgacaaccagttcgtgaagcaaggcgacctcgtgatgcagatcgatccgtcgcatttccggatcgcggtcgagcaggcgcaggcggccgtcgccgcccgccgcgcggagctgcagatgcgccgcgccgacgccgcgcgccgcgcggatctcgacgcgctcgtcgtgtcgaaggaaagccgcgagaattcggcgcagaccgcgtcgagcgccgaggcgcagtatcagcaggcgctcgccgcgctcgacgccgcgaagctcaatctcgagcgcacgcgcgtggtcgcgcccgtcgacggctacgtgacgaacctgcaagtcttcaggggcgactacgcgagcgccggccaggcgaagctcgcgatcgtcgacagccactcgttctgggtctacggctatttcgaggaaacgaagctgccgcgcgtgaagatcggcgcaaaggccgagatgcggctgatgagcggcggcgtgctgaagggccacgtcgagagcatctcgcgcggcatctacgaccgcgacaatccgcaaagccgcgacctcgtcgccgacgtgaaccccacgttcaactgggtgcggctcgcgcagcgcgtgccggtgcgcatccatatcgacgaggtgccgaaggatctcgtgctgtcagccggcacgacctgcacggtgatcgtcgagccggacggcggcggcaagcgcaagtcg

SEQ ID NO: 14184 - DNA, 780 bp, Burkholderia mallei
atggagctttcgttgaatcgcaaccagttgaccgaagcggcgctcaaggcgctgcatctgatcgatctcacgtcgctgaacgacgacgacaccgaagagaggatcgcctcgctcgccgcgtcggccgatacgccggtcggcacgcccgccgcgctgtgcgtgtatccgcgcttcgtcggcgccgcgcatgcggcgctcgcgcggcacgggctcgtgctgcccgtcgcgaccgtcacgaattttccgcacggcgcggccgatccggatgcggccgcgcgcgagacggccgatgcgctcgcgcgcggcgcggacgaaatcgatgtggtgtttccgtatcgcgcgctcatcgacggcgacgaacgggtcggccgcgaactcgtcgcgcagtgccgcgcggcggcgggcgcgcagtgcctgaaggtgatcctcgagacgggcgagttgcgcgacgcggcggcgatccgccgcgcgagcgagatcgcgatcgaggagggcgcggattttctgaagacgtcgacgggcaaggtcgcggtgaacgcgacgctcgacgcggcggccgcgatgctcgcgacgatccgcgtcgcgggccgcatggtcggcttcaaggcggcgggcggcgtgcgcaccgcgcaggacgcggcgcagtacctgtcgctcgcgcagcgcgagctcggcccgggctatctgacgagcgcgacgtttcgcttcggcgcgtcggggctgctcggcaatctgctcgagacgctcgggcaccgggcaggcgcgacgcgcggcgcgtat

SEQ ID NO: 14185 - DNA, 471 bp, Burkholderia mallei
atggaccttcgcaagctgaaaactctgatcgacctcgtctccgaatccggcatctccgaactggaagtcaccgaaggcgaaggtaaggtgcgcatcgtcaagaacgcgccgccggtctatgtgcagccgtcggccggcttcgcgccgcaggtgagcgccccggcccccgtcgtgacggcaccgtccgaagccgcgagcgccgcggctgccgccgcagcggcggcagcggccgcgccgcaaggccacgtcgtgacgtcgccgatggtcggcacgttctaccgcgcgccgtcgccgggcgccgatccgttcgtccaggtcggcgacacggtgaaggaaggccaaacgctctgcatcatcgaagccatgaagcttctgaacgaaatcgagtcggacaaggccggcgtcatcaaggaaatcctcgccgagaacggtcaggccgtcgaatacggccagccgcttttcgtgatcggc

SEQ ID NO: 14186 - DNA, 489 bp, Burkholderia mallei
atgaatccgatcgaatcccccgccgtcgccgccgacgcgcaaagcacgctctaccaggagctcatcgtcgagcacaagcgtgcgccgcgccgcttcggcaagctcgccgaaccgacgcacgaagcgcgtggccacaatccgcaatgcggcgacgatctgaaagttcagttgcgcatcgaaggcggccgcatcggcgacatccgcttcgacggccacggctgcgcgatctgcatcgcatccgcgtcgatgatgaccgaggctgtgatcggccgcgacgtcgacgccgcgcgcgcgctccagcagcgattccgcgcggtcctcaccggccaggccgagcacgacgaagcgtatctcggcaagctctcgagcctcgtcgcggtgcggcgctatccgagccggatcaaatgcgcgctgctcggctggcatgcgctcgcgcacgcgctcgatacgcgcgtggccgcccctggcgaaacggagccgcacgcatca

SEQ ID NO: 14187 - DNA, 4701 bp, Burkholderia mallei
atgatcgaccaccagcagccgaagagcgcgcttcctgccgcgcagggtctgtacgacccgcagaacgagcacgacgcctgcggcgtcggcttcgtcgctcacatcaagggcaagaagagccacgaaatcatcgagcagggcctgaagatcctcgagaacctcgatcaccgcggcgcggtcggcgccgatccgctgatgggcgacggcgcgggcatcctgatccagattccggacgcgttctaccgcgaggagatggccaggcaggacgtgacgctgccgcctgccggcgaatatggggtcgggatgatcttcctgccgaaggaaagcgcgtcgcggatcgcgtgcgagcaggagctcgagcgcacggtgaaggccgaaggtcaggtcgtgctcggctggcgcgacgtgccggtcgatcatgcgatgccgatctcgcccgcggtgaaggcgagcgagcccgtgatccgccagatcttcatcggccgcggcaaggacgtgatggtgacggacgcgctggagcgcaagctctacgtgatccgcaagacggcgagccaccggatccaggcgctcaagctcaagcacggcaaggaatacttcgtgccgtcgatgtcggcgcgcacggtcgtctacaaggggctgctgctcgcgggccaggtcggcgtgtactaccgcgacctgcaggacgcgcgcaccgtgtcggcgctcgcgctcgtgcaccagcgcttctcgacgaacacgttccccgcgtgggagctcgcgcacccgtaccggatgatcgcgcacaacggcgaaatcaacacggtcaagggcaacgtcaactggctgaacgcgcgcaccggcgcaatcgcgtcgcacgtgctcggcgacgatctgcctaagctctggccgctcatctaccccggccagtcggatacggcatcgttcgacaactgcctcgagctgctcgtgatggcgggctacccgctcgtgcacgcggtgatgatgatgattcccgaggcgtgggagcagcacacgctgatggacgacaaccgccgcgcgttctacgaataccacgccgcgatgatggagccgtgggacggccccgccgcgatcgcgtttaccgacggccggcagatcggcgcgacgctcgaccgcaacggcctgcgcccggcgcgctacgtcattaccgacgacgatctcgtgatcatggcctcggaagcgggcgtgctgccgattcccgaatcgaagatcgtcaagaaatggcgcctgcagccgggcaagatgttcctgatcgacatggagcacggccggatcatcgacgacaaggagctgaaggacaacctcgcgaacgcgaagccgtacaagagctggatcgacgcggtgcgcatcaagctcgacgagatcgagccggagggcgaggacgtcgccgccgagcgccgttcggcggccgcgctgctcgatcgccagcaggcgttcggctacacgcaggaggacgtgaagttcctgatggcgccgatggcgcagcagggtgaggaggcggtcggctcgatgggcaacgattcgccgctcgcggtgatgtcgaacaagaacaagacgctctaccactacttcaagcaactgttcgcgcaggtcacgaatccgccgatcgatccgatccgcgagaacatggtgatgtcgctcgtgtcgttcatcggcccgaagccgaacctgctcgacacgaacaacatcaacccgccgatgcgcctcgaggtgtcgcagcccgtgctcgacttcaaggacatcgcgaagatccgctcgatcgatcgctacacgggcggcaagttcagcgcgtacgagctgaacatctgctatccggtcgcatggggcaaggaaggcatcgaggcgcgcctcgcgtcgctgtgcgcggaggccgtcgacgcggtgaagtcgggctacaacatcctgatcgtgtccgatcgcaagacggacgcggagaacgtcgcgattcccgcgctgctcgcgacgtcggcgatccacacgcacctcgtgcagcagggcctgcgcacgagcacgggcctcgtcgtcgagacgggctccgcgcgcgagacgcaccacttcgcgctgctcgcgggctacggcgcggaagccgtgcacccgtacctcgcgatggaaacgctcgcgaagatggcgcacgggctgccgggcgacctgtcgccggagaaggcgatctacaacttcacgaaggcggtcggcaagggcttgcagaaggtgatgtcgaagatgggcatctccacgtacatgtcgtacaccggcgcgcagatcttcgaggcgctcggcctcgcgaccgatctcgtcgagaagtacttcaagggcaccgcgtcgaaggtgggcggcatcggcctgttcgaggtggccgaggaggcgatccgcctgcaccgcgacgcgttcggcgagaaccccgtgctcgccgacatgctcgacgcgggcggcgagtacgcgttccgcgtgcgcggcgaagaccacatgtggacgcccgattcgatcgcgaagctgcagcatgcgacgcgcggcaactcgtaccagacgtacaaggaatatgcccacctgatcaatgatcagacgaagcgccacatgacgctgcgcggcctgttcgagttcagggtcgacccggcgaaggcgattccgatcgacgaagtcgagccggcgaaggagatcgtcaagcgcttcgcgacgggcgcgatgtcgctcggctcgatcagcaccgaggcgcatacgacgctcgcgatcgcgatgaaccgcatcggcggcaagtcgaacacgggcgaaggcggcgaggacgagaaccgctatcgcaacgagctgcgcggcattccgatcaaggtcggcgacacgctgaaatcggtgatcggcgacgagatcgtgcgcgacatcccgctgaaggaaggcgattcgctgcgctcgaagatcaagcaggtcgcatcgggccgcttcggtgtgacggccgagtatctcgcgtcggccgaccagatccagatcaagatggcgcagggcgcgaagccgggcgaaggcggccaactgccgggccacaaggtgtccgaatacatcggcaagctgcgctactcggtgccgggcgtcggcctcatctcgccgccgccgcaccatgacatctattcgatcgaggatctcgcgcaactgatccacgatctgaagaacgtcaatccggtcgcgagcatctcggtgaagctcgtgtcggaggtgggcgtcggcacggtggcggcgggcgtcgcgaaggcgaaggccgatcacgtcgtgatcgcgggccacgacggcggcacgggcgcttcgccgctgtcgtcggtcaagcacgcgggtacgccgtgggagctcggcctcgccgagacgcagcagacgctcgtgctgaaccgcctgcgcgggcgcattcgcgtgcaagccgacggccagatgaagacgggccgcgacatcgtgatcggcgcgctgctcggcgcggacgaattcggcttcgcgacggcgccgctcgtcgtcgaaggctgcatcatgatgcgcaagtgccatctgaacacgtgcccggtcggcgtcgcgacgcaggacccggtgctgcgcgcgaagttctcgggtcagcccgagcacgtcgtcaactacttcttcttcgtcgccgaggaggcgcgcgagatcatggcgcagctcggcatcgcgaagttcgacgatctggtcggccgcgccgatctgctcgacatgcgtcgcggcgtcgagcactggaaggcgaagggcctcgatttctcgcgcgtgttctaccagccggaaggctgcgaaggcatcgcgcgccgccacgtcgaatcgcaggaccacggcctcgagcgcgcgctcgaccacacgctgatcgagaaggcgaaggccgcgatcgagaacggcgagcacgtgtcgttcatccagccggtgcgcaacgtgaaccgcacggtcggcgcgatgctctccggcgcgatcgcgaagaagcacggccacgacggcctggccgacgacgcggttcacatccagttgaagggcacggcgggccagagcttcggcgcgttcctcgcgaagggcgtgacgctcgacctcgtcggcgacggcaacgattacgtcggcaagggcctgtcgggcggccggatcatcattcgcccgaccaacgatttccgcggcaagtccgaggaaaacatcatctgcggcaacacggtgatgtacggcgcgctcgaaggcgaggcgttcttccgcggcgtcgcgggcgagcgcttttgcgtgcgcaactcgggcgcgacggcggtcgtcgagggcacgggcgatcacggctgcgaatacatgacgggcggcacggtcgtcgtgctcggcgagacgggccgcaacttcgcggccggcatgtcgggcgggatcgcatacgtgtacgacgcggacggcacgttcgccgcgaagtgcaacaagtcgatggtcgcgctcgatccggtgctgcagcaggccgagcaggagcgcacggtcgatcccgcgctctggcatgccggcacgacggacgaagcgctgctcaaggggcttgtcgagcgccacttccagttcaccggctcgccgcgcgcgaagtcgctgctcgagaactgggatgcggcgcgccgccagttcgtgaaggtgttcccgcacgaatacaagcgcgcgctcggcgagatcggcgcgaagaagaaagcgggcgaggtgctcgccgcc

SEQ ID NO: 14188 - DNA, 783 bp, Burkholderia mallei
atgagcgacatcctcgacaaaatcatcgccgtcaagcgcgaagagatcgccgccgcgctcgagagcgcgccgctcgaagaactgaaggtgcaggcgtcggcgcgcgattcgcgcgacttcgtcggcgcgctgcgcgacaagcacgcggccggacacgccgccgtcatcgccgaggtgaagaaggcgagcccgtcgaaaggcgtgctgcgcgagcatttcgtgccggccgacatcgcccgctcgtacgcgcagcacggcgccgcatgcctgtcggtgctgaccgacgagcggttcttccagggcagcgcgcgctatctcgaacaggcgcgcgccgcgtgcaccctgcccgtgctgcgcaaggacttcatcgtcgacgcgtaccagctgctcgaagcgcgcgcgatgggcgcggacgcgatcctgctgatcgccgcggcgctcgacacgccgctgatgatcgatctcgaggcgtacgcgcattcgctcgggctcgcggtgctcgtcgaagtgcacaaccgcggcgaactggacgaagcgttgaaactgaagacgccgttcgtcggcatcaacaaccgcaacctgcgtacattcgagacgacgatcgacacgacgctcggcatgctcgacgcgattccggacgatcggatcgtcgtcaccgaatccggcatcctgtcgcgcgcggacgtcgagcggatggaggcggcgggcgtgcatacgttcctcgtcggcgaagcgttcatgcgcgccgagaacccgggcgcggaactcgcgcggatgttcttc

SEQ ID NO: 14189 - DNA, 1041 bp, Burkholderia mallei
atgacgacagcaagcaaagaaggtccggcggcctcgccgatgaccatgatccaggctttgcgctcggcgatggacgtgatgctcgagcgcgacggcaacgtggtggtgttcgggcaggacgtcggctatttcggcggcgtgttccgctgcaccgaaggactgcagaacaagtacggcaagtcgcgcgtgttcgatgcgccgatcaacgaaggcggcatcgtgggcgcggcggtcgggatgggcgcgtacgggctgcgccccgtctgcgagatccagttcgccgactacttctatccggcgtccgaccagatcgtgtcggaggccgcgcgcctgcgctaccggtcggcggccgagttcatcgcgccgctgacgatccgcatgccgtgcggcggcggcatctacggcggccagacgcacagccagagccccgaggcgatgttcacgcaggtgtgcgggctgcgcacggtgatgccgtcgaacccgtacgacgcgaaggggctgctgatctcggcgatcgagaacgacgatccggtgatcttcctcgagccgaagcggctctacaacggcccgttcgacggccaccacgaacggccggtgacgccgtggagcaagcatccggcgagcctcgtgcccgacggctactacacggtgccgctcgattcggcggcgatcgtgcgcgccggcggcgacgtgacggtgctcacgtacggcacgacggtgcacgtatcgctcgcggccgccgaggaaaccggcatcgacgccgaggtgatcgatctgcgcagcctctggccgctcgatctcgacacgatcgtcgaatcggtgcgcaggacggggcgctgcgtcgtcgtgcacgaggcgacgcgcacttgcggcttcggcgcggaactcatcgcgctcgtgcaggagcactgcttccattggctcgaggcgcccgtcgagcgcgtgaccggctgggacacgccgtatccgcacgcgcaggaatgggcgtatttcccgggcccgaaccgggtcggcgacgcgctgcggcgcgcgatggagaat

SEQ ID NO: 14190 - DNA, 273 bp, Burkholderia mallei
atggcccgccccactggtaagaaattcgacaagcgtcgtcagcaacaaaacccgctcttcaagcgcaagaagttctgccgcttcacggcagccggcgtcgagcagatcgactacaaggatacggaaacgctgaaggacttcatcggcgagaacggcaagatcacgccggcgcgcctgacgggcacgaaggcccactatcagcgccagctcgatacggcgatcaagcgcgcgcgttttctcgcgctgctgccgtacaccgatcagcacaaggcg

SEQ ID NO: 14191 - DNA, 816 bp, Burkholderia mallei
atgaagcgtcgcactctcctgaaggttgtctccgcggtcgcggccggcgccgccgccctttccgtttccgtcggcgcgcaagcgcaggacaaggtgatcaaggtgggcacggtcgcgggcccggacgcgcaggtctggcaagtcgtccagaaggtcgcgaaggaaaagcagggcctcgacgtgaaggtcatcgagttcaacgactacgtgcagccgaacgcggcgctcgattcgggcgacctcgacgcgaacagcttccagcaccagccgtacctcgacagccaagtgaagcagcgcggttacaagatcgtgagcgcgggcctcacgtacatctcgccgatcggcgtctattcgaagaagttcaaatcgctgaaggaactgccggcgggcgcgaaggtcgcgctgccgaacgatccgtcgaacgagaaccgcgcgctgctgctgctgcagacgcagggcgtgatcaagctgaaggcgggcgccggcacgggcggcagcaacgcgaccgtgctcgacgtcgccgagaatccgaagaagctgaagctcaccgagctcgacgccgcgcaactgccgcgcgtgctgtcggacgtcgatgcggccgtgatcaacacgaactacgcgctcgcggcgaacctgcagccgaccaaggacgcgatcgcgctcgaatcgctgacgagcccgtacgcgaacctgatcgcggtccgcgcgaaggacaaggatcagccgtgggtgaagaagctcgtgaaggcataccagtcgccggaggtgaaggaattcatcacgaagcagttcaagggctcgatggtcgcgtcgttc

SEQ ID NO: 14192 - DNA, 1344 bp, Burkholderia mallei
atgtctgccagcgcagtgaacgtgactcccgggcgcaacgtcgtcgtcgtggggactcaatggggtgatgaaggcaaaggcaagatcgtcgactggctgacggaccacgctcagggcgtcgtgcgtttccagggcggccacaacgccggccacaccctcatcatcggcggcaagaagaccatcttgcgcctcatcccgtcgggcatcatgcgtgaaggcgtcgcctgctacatcggcaacggcgtcgtcctctcccccgaggcactgttcaaggaaatcggcgagctggaagaagccggcctgtccgttcgcgagcgcctgttcatttccgaggcgacgacgctgattctcccgtatcacatcgcgatcgaccaggcgcgcgaggcgcgcaggggcgcgggcaagatcggcacgacgggccgcggcatcggccccgcatacgaggacaaggtcggccgccgcgcgctgcgcgtgcaggatctgttcgacgcgagaacgttcgccgaccgcctgcgcgagaatctcgacttccacaatttcgtgctgacgcagtatctcggcggcgcggccgtcgatttccaggcgacgctcgacacgatgctcggctacgcggatcgcctgaagccgatggtcacggacgtgtcgcgccgcctgtacgaagaaaaccacgcgggccgcaacctgctgttcgaaggcgcgcagggcacgctgctcgacatcgaccacggtacctatccgttcgtcacgtcgagcaactgcgtcgcgggcgcggcggcggcgggcgcgggcgtcggcccgcagaagctcgactacatcctcggcatcacgaaggcgtattgcacgcgcgtcggctcgggcccgttcccgagcgagctgtacgacgcggacaatccgagccgccaggatcagatcggcatcacgctcgcgaacgtcggcaaggaattcggctccgtcacgggccgcccgcgccgcaccggctggctcgacgcggccgcgctgcgccgctcgatccagatcaacggcgtgtcgggcctgtgcatgacgaagctcgacgtgctcgacggcctcgacgaagtgaagctgtgcgtcggctacaagatcgacggtgaagacgtcgatctgctgccgcgcggcgcggccgaagtcgcgcgctgcgaacccgtctacgagacgttcggcggctggaaggaaagcacggtcggcatcgactcgtgggacgcgctgcccgcgaacgcgcgtgcgtacctgacgcgcgtgcaggaagtggccggcgtgccgatcgacatggtgtccacgggcccggatcgcgacgagacgatcctgctgcgtcatccgttcaaggtg

SEQ ID NO: 14193 - DNA, 1866 bp, Burkholderia mallei
atgtgcggcatcaccggatggatcgatttcgcccgcgatctgcgcaacgaagcgccgatcgtcgacacgatgaccgatacgctcgcgcgccgcgggcccgatgcgcgcggcgtgtggctcgacacgcacgccgcgctggggcaccggcggctgtcgatcatcgatcccgagcgcggcgcgcagccgatgctcacgcccgagcgcgggccgcgcggcctgccgcgcgcggtcatctcgtatgcgggcgaaacctacaacttccgcgaattgcgggccgagctgggcgcgctcggccaccggttcgacacgcattgcgataccgaggtggtgctgcgcgcgtatctcgaatggggcgcggcgttcgtcgaccgtctcaacgggatgtattcgatcgcgatctgggataccgcgcgcgacgaactgctgctcgtgcgcgaccggctcggcgtgaagccgctgttctactatccgacggcggacggcgtgatcttcggctcggagccgaaggcgatcctcgcgcatcccgacgtgcgcgcgcgcacgtcgtcggaggggctttgcgatgcgctgctgttcctgcgcacgccggggcaggtgccgttctcggggatgcgcgaggtgaagcccggccatgtgctgcgcgtgcggcgcggcggcctcgccgagcaacgctactgggcgctcgaagcgcgcccgcacaccgacgatctgccgacgacgatcgcgacgatccgcgcgctgctcgacgacatcgtgtcgcgccagatgatctcggacgtgccgctgtgcgcgctgctgtcgggcggcgtcgattcgagcaccatcgccgcgctcgcgcagaagcggcggcgcgcgaacggcggcggcgcgttgtcgacattctgcgtcgatttcaccggccacacgcgcaactttcgcgccgatccgattcgcccgacggccgatgcgccgttcgcgctcgaagtcgcgcggcacatcggcagcgatcaccatacgatcgagctggaccaggccgggctgctcgatccgcaggtgcgcgaagcggtgctgcgcgcgtgggacttgccgttcaacttcgccgatctcgacgtgtcgctgcaccggctgttcgccgaggtccgcaagcacgccaccgtcgcgctatccggcgaggcggccgacgagatcttcggcggctacctgtggttctccgatccggccgcgcggcgtgcacacacgttcccgtggctgaagctgggcgcgcatcgcgggctcgatccgcgcgcgctgtttcatcggtcgttcatcgatgcgctgcgactcggcgaatacgaagcacagctctaccgcgcggcgctcgccgaagtgccgcgcctcgacggcgagaacgcggaggaccgccgcacgcgcgagctgcattacctgacgctcacgcgctggctgccggtgctgctcgacaagaaggaccggatggggatggcaagcggcctcgaggggcgcgtgccgttctgcgatcaccggctcgtcgagtatgtgttcaacatcccgtgggcgatgaagacgttcagcggccaggagaaggcgctgctgcgcgcggcggcggccgatctgctgcccgaatcggtgctgaaccgcaagaaggccgcgtatccgtcgattcaggcgccgggctatgaccgcggcctgatcgagcgcctcaatcgcgcgatcgcggccggccgcgcgccgctcgaaccgttcatcgacgccggcgcgctgcgcggcctgaccgagaagaccgccgccggcagcctttcggaattcgaacgaatcctgctggagtcgagcagccggctcaacgactggctcgatctctatcgtgtcgagctcgacggcgtgccggcgggc

SEQ ID NO: 14194 - DNA, 639 bp, Burkholderia mallei
atggcgatcgaacaggaaatcaagctcgcgctgcccgccgcgcaagtcgacgcggcgcagcgcttcctcgatgcgcgcgccggcgccggcggccgcgagatcacgctcgtgaacgtctacttcgacacgccggcgctcgcgctcgcgcgcgcgaagagcgcgctgcggctgcgccgcgcgccgcagggctggctgcaaacgttcaagacggccggcgcggccgcgggcgggctgcatcgccgccatgaatgggagatgcccgtcgcgggtgaggcgctcgagatcgacgcgctctgcgccgcatgcgacgtgccgagcgcggtcgacgcgctgcgggccaccgcgccgcagctgatcgcgctctttcgcaccgacttcacccgtacgctgtggcacatcgagcacgcgggcgcgacgatcgaggcggcgctcgatcgcggcgaaatcgtcgcgcaggtgagtggcgacgtgtgccgcgaaccgatctgcgagatcgaactcgaactcgtcgacggcgacgcgcaggcgctcgcgacgctcgccgacgaagtcgccgcggcgctgccgggcgtcacgccggacaacctgagcaaggcgcagcgcggctaccggctgcgcggcggcgatctgcgcgccgac

SEQ ID NO: 14195 - DNA, 1017 bp, Burkholderia mallei
atgaccgacatgactgaagctcaaaccgcttgcgcgacgaccgaaacaccggtggccgcgcccgccgcgccgcgctggcgcgtcgccgacgtgatcgcgctctacgagctgccgttcaacgatctgctgttccgcgcgcagcagacgcaccgcgagcacttcgacgcgaacgcgatccagctctcgacgctgctgtcgatcaagacgggcggctgcgaggaggactgcggctactgctcgcagtccgcgcatcacgacaccggcctgaaggcggagaagctgatggaggtggacgcggtgctcgccgccgcgcgcaccgcgaaggaaaacggcgcgacgcgcttctgcatgggcgccgcgtggcgcaacccgaaggatcgccacatcgagccgatcaaggagatgatccgcggcgtgaaggacatgggcctcgagacgtgcgtgacgctcggcatgctcgaggaacaccaggcgaaggcgctggcggaggcgggcctcgactattacaaccacaacctcgacacgtcgcccgaattctatgggcagatcatctcgacgcgcacgtaccaggatcgcctcgacacgctcgagcgcgtgcgcgacgcgggcatcaacgtatgctgcggcgggatcatcgggatgggcgaatcgcgccgcgagcgcgcgggcctgatcgcgcagctcgcgaacatgaacccgtatccggaatcggtgccgatcaacaatctcgtcgcgatcgaaggcacgccgctcgagaacgcgcaggcgctcgatccgttcgagttcgtgcgtacgatcgcggtcgcgcgcatcacgatgcccaaggcgatggtgcgcttgtcggcgggccgcgagcagctcgacgacgcgatgcaggcgctgtgcttcctcgccggcgcgaattcgatgttctacggcgacgtgctgctcacgaccggcaatccgcgcgcggaagcggaccgcaagctgctcgcgcggctcggcatgtcggcaagcgaggcgtcgcagttgagcgcc

SEQ ID NO: 14196 - DNA, 957 bp, Burkholderia mallei
atggtgaacggcagattcttcacgacggcgggcgaatcgcccgcgtttcgcggccgcgcatggggccgcgtcgtcacgcaatacttcggcgggctcgacgcgtgttgcgacggcgacgacgcgttcgacgcgcagctgagccagtacgagatcggcccgatgcgcgtgttcacgatcgccgcgcccgcgcaccgcatcgtgcggcccgttgcggcgctgcacgatcacggttccgacttcttcaagctgatcctgcaactgagcggcgtgagcgagatcgagcagcgcggcaagacgttccggctgcactcgggcgactggagcctgtacgatccgcgcgtgccgtacagcatcgcgaacctgacgcacgtcgagcagctcgcgatccagattccgcgcaagcagctcggcggcttcgcggtgccggatctgcatacgtcggacgtgcgcgagttcgagctcaaggggctgttctcgctgctgtcttcgtttctcgtgtcgttgtccgaacaattgccgtcgctgcccggcacgacaggcaccgcgctatcggagacgatcctcggcctgatcgtatcgacgctgaccgcgcagcgcgacgcgcaaggcgagcacgtcgcgctgcccgccgtgctgcggatgcgcgtcaagcagtacatccacggccaccttgccgacgccgacctatcgatcgaccggatcgcgcgcgagctacgctgctcgaagcgctatctgcaccggatcttcgaggaggaaggcgtgacgatcgaccgttacatctggtcgagccggctcgagcgctgcaaggatgcgctcgacaacgcgcgcgcggcgaagccggcgatttccgagatcgcgttcagctgggggttcagcagcagcgcgcatttctgccgcagcttcaagcagcgctatggcatgacgccgcgcgaattcgtgcgccggcgtgcgtggtcc

SEQ ID NO: 14197 - DNA, 1149 bp, Burkholderia mallei
atgacgaagcgtcgggtcgtggtggggatgtcgggcggcgtcgattcgtcggtgaccgcgtggctcttgaaggagcagggctacgacgtcgtcggcctgttcatgaagaactgggaggacgacgacgacggcgagtactgctcgacgcggcaggactggatcgacgtcgtgtcggtcgcggacctgatcggcatcgacgtggaagccgtgaacttcgcggccgaatacaaggaccgcgtgttcgccgagttcctgcgcgaatactcggcgggccgcacgccgaacccggacgtgctgtgcaacgcggagatcaagttcaaggcgttcctcgatcacgcgatgtcgctcggcgcgcagacgatcgcgaccggccactacgcgcgcgtgcgcgagcgcgacgggcgcttcgaactgctgaaggcgttcgatcatacgaaagaccagtcgtactttctgcatcgcctcaatcaggcgcaactgtcgaagacgatgttcccgctcggcgagatcccgaagacgcgggtgcgcgagatcgccgcgcagatcggcctgccgaacgcgaagaagaaagattcgacgggcatctgcttcatcggcgagcgcccgttccgcgatttcctgaaccgctacctgccgacgaaacccggcccgatgaagacgccggacggcaagaccgtcggcgagcacatcggcctcgcgttctacacgttcggccagagaaagggcatcggcctcggcggcagcaaggacggcagcggcgagccgtggttcgtcgcggtgaaggacatcgcgtcgaacacgctctacgtcgtgcagggccacgatcatccatggctgcgctcgcgcgagctcgtcgcgggcaacgtgagctgggtcgcgggcgagccgcccgccgacggcgcgcggtgcggcgcgaagacccgctaccggcaggccgacgcgccgtgcgcgttcggccgggccgcgcaggcgggcgacgagcgcttctcgctcgtgttcgacgagccgcaatgggcggtcacgcccggccagtcggcggtgctgtacgacggcgacgtgtgtctgggcggcgggatcatcgaatccgcggcgaccgggcgggccggcaccgcgcccgcgggccgcgcgccggcgctcgtcgaagcgcgc

SEQ ID NO: 14198 - DNA, 1407 bp, Burkholderia mallei
atgcagacagagtcgaatggccgccccggcgcgggcggcggcgcagcgcggccggcgcttcagcagacgctcggcacgtggcagctgtggggaattgccgtcggcctcgtgatttcgggcgagtacttcggctggagttacggctgggcgagcgcgggcacgctcggcttcgtcgtcaccgcgctgttcgtcgcggcgatgtacacgaccttcatcttcagcttcaccgagctcacgacgtcgattccgcacgcgggcggcccgttcgcctatgcgcggcgcgcgttcggcccgacgggcggctatctggcgggcgtcgcgacccttgtcgagttcgtgttcgcgccgcccgcgatcgcgctcgcgatcggcgcgtacctgcacgtgcagtttcccggcctcgagccgaagcacgcggcgatgggcgcgtacctcgtgttcatggcgctgaatatcgtcggcgtgcagatcgccgcgacgttcgagctcgtcgtcacgctgctcgcgatcttcgagctgctcgtgttcatgggcgtcgtgtcgccgggcttcgcctggagcaacttcgtgaagggcggctgggcgggcgccgatcacttcagcgccggcgcgttccatggcatgttcgcggcgatcccgttcgcgatttggttcttcctcgcgatcgagggcgtcgcgatggcggccgaggaggcgaagcacccgaaacgctcgattccgatcgcgtacgtggccggcatcctgacgctcgtcgcgctcgcgatcggcgtgatggtgttcgcgggcggcgcgggcgactggaccaagctcgcgaatatcaacgatccgctgccgcaggcgatgaagtacatcgtcggcgcgaacagcggctggatgcacatgctcgtgtggctcggcctgttcggcctcgtcgcgtcgttccacgggatcattctcggctattcgcgccagatcttcgcgctcgcccgcgaaggttacctgcccgaatggctcgcgaaggtgcacccgcgcttcaagacgccttatcgcgcgatcctcgcgggcggcgtggtcggcatcgccgcgatctacagcgacgagctgatccagttcggcggccagacgctcaccgcgaacatcgtgacgatgtccgtgttcggcgctatcgtgatgtacatcgtcagcatggccgcgctcttcaagctgcgccgcgtgcagccgaggatggagcgcccgttccgcgcgccgctgtatccgttcttcccggcgttcgcgctcgtcgcggcgctcgtgtgcctcggcacgatggtgtacttcaacgcgctcgtcgcgtcgatcttcgtcgcgttcgtcgcgctcgggtacggctacttcctcgcgacgcgcgcgcagcgcgaggccgcgcccgccgacgcgctgctcgaggag

SEQ ID NO: 14199 - DNA, 1371 bp, Burkholderia mallei
atgaacgccgactccggactgccgttcccgcaacgctactgggcgatcgtctgcgtcgcgctgggcatcacgctcgccgtgctcgacggcgcgatcgcgaacgtcgcgctgccgacgatcgcccgcgatctgcgcgcctccgacgccgcgtcgatctggatcgtcaacgcgtaccaactcgccgtcacgatctcgctgctgccgctcgcctcgctcggggaccgcatcggctaccggcgcgtctacatcgcggggctcatgctcttcacggcggcgtcgctcggctgcgcgctgtcgggcacgctgcccgcgctcgcgacgctgcgcgtgatccagggcttcggcgcggccggcatcatgagcgtgaataccgcgctcgtgcggatgatctatccgtcttcgcaactcgggcgcggcgtcgcgatcaacgcaatggtcgtcgcactgtcgtcggcggtcgggccgaccgtcgcgtccgcggtgctcgccgtcgcgccgtggccgtggctcttcgcgatcaacgtgccgatcggcgtcgccgccgtgtgcggcagcctgcgcgcgctgccggcgaatccgggccgcagcgcgccgtacgatttcatcggcgccgtgatgaacgcctgcgtgttcgggctgttgatcgtgtccgtcgacgggctcggccacggcgggaatcgcgcgagcgtcgcgctcaccgcgctcgtggccgccgtgatcggctacttcttcgtcaagcgccagttgacgcagcccgcgccgctgttgcccgtcgacctgatgcgcgttccgatcttcgcgctgtcgatcggcacatcggtcgcgtcgttcacatcgcagatgctcgcgttcgtcgcgctgccgttctggctacagaacacgctcggcttctcgcaggtccagacggggctctacatgacgccgtggccgctcgtgatcgtcgtcgcggcgccgctcgcgggcgtgctgtccgaccgctattcggcgggcgcgctgggcggcatcggcctcgccctgttcgcatccggcctgttcgcgctcgcgacgatcggtgcgcacccgacgcccgtcgacatcatgtggcggatggcgctgtgcggcgcgggcttcgggctcttccagtcgccgaacaaccgcgcgatcctgtcgtccgcgccgcgcgagcgcgcgggcggcgcaagcgggatgctcggcaccgcccggctcaccggacaaacgctcggcgccgcgctcgtcgcgctgatcttcggcatcgcgccgcagcacgggccgacgatcgcgctctacgcggcgagctcgttcgccgccgtcgcggcggccgtgagcctgctgagaatccgcgcgcggcgcgatacgaccgccgcagcgggt

SEQ ID NO: 14200 - DNA, 3183 bp, Burkholderia mallei
atgaacatatcgaaattcttcatcgatcgaccgatcttcgcaggggtgctgtcggtcatcatcctgctcgccgggatgatcgcgatgttcctgctgccgatttccgagtatccggaagtcgtgccgccgtccgtgatcgtcaaggcgcaatacccgggcgcgaacccgaaggtgatcgccgagacggtcgcgtcgccgctcgaggagcagatcaacggtgtcgaggacatgctgtacatgcagtcgcaggcgaacagcgacggcaacatgacgatcaccgtcacgttcaagctcggcaccgatccggacaaggcgacgcagctcgtgcagaaccgcgtgaaccaggcgctgccgcgcctgccggaagacgtgcagcggctcgggatcacgacggtcaagagctcgccgacgctcacgatggtcgtgcacctgatctcgccgaacgacagctacgacatgacgtatctgcgcaactacgcgctcatcaacgtgaaggatcgcctgtcgcgcatccagggcgtcggccaggtgcagctctggggcgcgggcgattacgcgatgcgcgtgtggctcgatccgcagaaggtcgcgcagcgcaatctcacggccgacgacgtcgtgcgcgccattcgcgagcagaacgtgcaggtggccgccggcgtgatcggcgcgtcgccgacgctgccgggcacgccgctgcagttgtcggtgaacgcgcgcgggcgtctgcagaacgaggacgagttcggcgacatcgtcgtgaagaccgcgccggacggcggcgtcacgcacctgcgcgacatcgcgcgcatcgagctcgacgcgtccgaatacgggctgcgctcgctgctcgacaacaagccggctgtcgcgatggcgatcaaccagtcgcccggcgcgaactcgctcgcgatctccgacgaagtgcgcaagacgatggccgagctcaagcaggatttccccgcgggcgtcgattacaggatcgtctatgacccgacgcagttcgtgcgctcgtcgatcaaggcggtcgtgcacacgctgctcgaggcgatcgcgctcgtcgtgatcgtcgtgattgtgttcctgcagacgtggcgcgcgtcgatcattccgctgatcgcggtgccggtgtcgatcgtcggcaccttctcgctgctgctgctgttcggctattcgatcaacgcgctctcgctgttcgggatggtgctcgcgatcgggatcgtcgtcgacgatgcgatcgtcgtcgtcgagaacgtcgagcgcaacatcgagaacgggctcaccgcgcgcgccgccacctacaaggcgatgcaggaagtgagcgggccgatcatcgcgatcgcgctcacgctcgtcgcggtgttcgtgccgctcgcgttcatgtcgggcctcacgggccagttctacaagcagttcgcgatgacgatcgcgatctcgacggtgatctccgcgttcaactcgctcacgctgtctcccgcgctctcggcgatcctgctcaagggccacggcgacaaggaggactggctcacgcgcgtgatgaaccgggtgctcggcggcttcttccgcggcttcaacaaggtgttccatcgcggcgcggagaactacgggcgcggcgtgcgcggcgtgctgtcgaggaaggccgtgatgctcggcctgtatctcgtgctggtcggcgcgacgctgatggtctcgaagatcgtgccgggcggcttcgtgcccgcgcaggacaaggagtatctgatcgcgttcgcgcagttgccgaacggcgcgtcgctcgaccgcaccgagaaggtgatccgcgacatgggcgcgatcgcgctgaagcagccgggcgtcgagagcgcggtcgcgttcccggggctgtcggtgaacggcttcacgaacagctcgagcgcgggcatcgtgttcgtcacgctgaagccgttcgaccagcgccacggcaaggcgctgtcggcgggcgcgatcgcgggcgcgctgaaccagaagtacgcggcgctcaaggattcgttcgtcgcggtgttcccgccgccgcccgtgctgggcctcggcacgctcggcggcttcaagatgcagatcgaggatcgcggcgcggtcggctacgcgcggctcgcggacgcgacgaacgacttcatcaagcgcgcgcagcaggcgcccgagctcgggccgctgttcacgagctaccagatcaacgtgccgcaactgaacgtcgatctcgatcgcgtgaaggccaagcagctcggcgtgaacgtgaccgacgtgttcgacacgatgcagatctacctcggctcgctgtacgtgaacgacttcaaccgcttcggccgcgtgtatcaggtgcgcgtgcaggcggacgcgccgttccgccagcgcgcggacgacatcctgcaactgaagacgcgcaacgcggcgggcgagatggtgccgttgtcgtcgctcgtcacggtgtcgccgacgttcggccccgagatggtcgtgcgctacaacgcgtacacggcggccgacgtgaacggcgggcccgcgcccggctactcgtcgggccaggcgcaggcggccgtcgagcggatcgcggcgcagacgctgccgcgcggcgtgaagttcgaatggaccgacctcacgtaccagcagatcctcgcgggcgattcggcgttctgggtgtttccgatcagcgtgctgctcgtgttcctcgtgctcgccgcgctgtacgaaagcctgacgctgccgctcgcggtgatcctgatcgtgccgatgagcatcctgtcggcgctcacgggcgtgtggctcacgcagggcgacaacaacatcttcacgcagatcggcctgatggtgctggtggggctgtccgcgaagaacgcgatcctgatcgtcgagttcgcgcgcgagctcgagcacgacggcaagacgccgttcgaggcggccgtggaggcgagccggctgcggctgcgcccgatcctgatgacgtcgatcgcgttcatcatgggtgtggtgccgctcgtgctgtcgacgggcgcgggcgcggagatgcgccatgcgatgggcgtcgcggtgttcttcgggatgctcggcgtgacgctgttcgggctgatgctcacgccggtgttctacgtggtgctgcgtacgctcgcgggcggcaagattcacgtcgcgcagaaggattcggcgggctacggcgtgccggctccggacgct

SEQ ID NO: 14201 - DNA, 927 bp, Burkholderia mallei
atgtccacgagtcggcatcgccgcatgagtcacgcccccgacgcccggccgactttcacgtaccgcttccgtatttctctcgccatgctcagctatcgtcacggctttcacgtcggcaatcacgcggacgtcctcaagcacaccgtcgtcgtgcagttgctgcgttatttgaacaagaaagacaagtcgtattggtacatcgacacgcacgcgggcgcaggcgtctattcgctcttcgacggctatgcggcgaaaaccggcgaattcggcacggggatcgagaaaatctgggatgcaacggatctgcccgaagcactgtccgactatgtcgacgaagtgcgcgcgctgaaccgcgacggcgaattgcgctactacccgggctcgccttatcttgcgtggcgactgatgcgagaacaggaccggatgcgtctgttcgagcttcacagtaccgaaatcgatgtgctgcgccacaatttccgcgatgcggggcggcgcgcgatgatttacgccggcgacggcttcgaaggcatcaaggcgctgctgccgccgccgccgcggcgcgcgctcgtgttggtggatccgtcatacgaggacaagcgcgattacgcgaaaacgatcgcctgcgtcgaagaaagcctgaagcgattcgcgacggggtgctatgcaatctggtatccgcaggtgagccggcccgaatcgcagaaattccccgaccatctgaagcagttgcagccgaacaactggctgcatctgagcttgaccgtgagccggccgccatcggacggctttggtcttttcggcagcgggatgttcattctcaacccgccgtatacgttggtcgatacgatgaaagaggcactcccctatctcgtcgaagcgcttggccaggacagcggcgcgaaattcgcgatcgagcaccgcgccaac

SEQ ID NO: 14202 - DNA, 960 bp, Burkholderia mallei
atgcgcatttccaccctggatcgacgcgacatgaagcacatccacatcatcgattcgcacacgggcggcgaacccacgcgcgtcgtcgtgtccggctttccggcgctcggcggcggcacgatggccgagcgtctggccgtgctcgcgcgcgagcacgaccgctaccgcgccgcctgcatcctcgagccgcgcggcagcgacgtgctcgtcggcgcgctgctgtgcgagcccgtctcggccggcgcggcggcgggcgtgatcttcttcaacaacgcgggctatctcggcatgtgcgggcacggcacgatcggcctcgtgcgcacgctgcaccacatggggcgcatcgggccgggcgtgcatcggatcgagacgccggtgggcgacgtcgaggcgacgctgcacgacgatctgtccgtgagcgtgcgcaacgtgctcgtgtaccggcacgcgaaggacgtcgtcgtcgacgtgccggggcacggcgcggtgacgggcgacgtcgcgtggggcggcaactggttcttcctcgtgagcgatcacggccagcgcgtcgcgggcgagaacgtcgcggcgctcgccgcgtacgcgtcggcggtgcgcgcggcgctcgagcgcgcgggcgtgacgggccgcgacggcgcgccgatcgatcacatcgagctgttcgccgacgatcccgagtacgacagccgcagcttcgtgctctgcccgggccacgcgtacgaccgctcgccgtgcggcaccggcacgagcgcgaagctcgcgtgcctcgccgccgacggcaagctcgtggcgggcgtgacgtggcggcaggcgagcgtgatcggcagcgtgttctcggcgagctacgcggcggccgaaggcggcgtcgtgccgacgatccgcggcagcgcgcacctgagcgcggaggcgacgctcgtgatcgaggacgacgatccgttcggctggggcatcgcatcg

SEQ ID NO: 14203 - DNA, 375 bp, Burkholderia mallei
atggctgacggagaaggtggccgcgatggcccaggggccgtccgcgtaagcgcccgcgcgcggcgcgcggcccgcagcggccggccgcgcgccggcggaagtgagaccagtatggctttgatgattaccgacgagtgcatcaattgcgacgtgtgcgagcccgagtgcccgaacggcgcgatatcgatgggcccggaaatctacgtgatcgatccgaacaagtgcaccgagtgcgtcggacatttcgacgaaccgcagtgccagcaggtgtgcccggtcgaatgcatcccgcaggatccggggcgccccgagacgaaggatcagctgatggcgaagtatcgcgcgctgatcgccgccgagcagaaggacgacgcg

SEQ ID NO: 14204 - DNA, 813 bp, Burkholderia mallei
gtgatgagaatcgcactcggcattcagtacgacggcgcggcgttctgcggctggcagtcgcagccccacggcaagacggttcaggacgcgctcgagcgctcgctcgcggaattcgcgcagacgtcgctgcacacgacggtcgcgggccgcaccgacaccggcgtgcacggcctcggccaggtcgtccatttcgataccgacctcgaccgcgcggatttctcatgggtgcgcggcacgaacgcgttcctgccgccgacggtcgccgtgcagtgggcgaagccgatgccggatacgttccacgcgcgcttcgccgctttcgagcgcacctactactacgcgctgtacgtgcatccggtgcgctcgccgatgctcgcggggcgcgcggggtgggtccacacgccgctcgacgtcgacgcaatgcgcgaagcggccgcgcatctcgtcggcgagcacgatttctcggcgtttcgctcgtccgagtgccaggcgaaatcgcccgtcaagcatctgtaccagatcggcatccgccccgacggcgatttcatccacttccgcttccgcgcgaacgcgttcctgcaccacatggtgcgcaatctgatgggctgcctcgtcgcggtggggcgcggccgctatccgtcgtcgtggctcgccgaagtgctggagagccgcgatcgcgattgcgcggcgccgactttcatgcccgaagggctctatctcgcgcacgtcggctatccggccgaattcgcggtgccgcccgcacagctcggcagcgtgccgtggagcagcgtgtgggccgatctggacggacgaaca

SEQ ID NO: 14205 - DNA, 990 bp, Burkholderia mallei
atgcgcaatttcctctccctcggccgcaggctcgcgcttgccgccgccgtgctggcgcccgtcgccgcctttgcgaacaacgtgatcgtgctgaattcggccgaagcgacgctttccctgatcgatcagcaatcccggcaggtcgtcggccagtatccgaccggcaaggagccgcatcacctgatggcgacgcccgacaatgcgtcgctgatcgtcgcgaattcggtgtcgaacagcctgatgttcctcgatccgaagacgggcaagccgcagcgcacgctcgaagggatcgacgatccgtaccagctcggcttctcgccggatcgcaagtggttcgtcgcggccggcctgcggctcgaccgcgtcgacatctacagctatgacggccgcgatctgaagctcgccaagcgcttgccgctcgcggtgatgccgagccacctcgcgttcacgaaggacagcaagacagtgctcgtgtcgctgcaggtgtcgggcgagctcgcggcgatcgatctcgccacgcagacgctcaagtggaagatgaaagtgggcaaggtgccggcgggcctctggctcacgcccggcgacaagtacgtgctgatcgggatgacgggcgccgattacgtcgccgtcgtcgactggcgcaaccagaaggtcgtgaagacgattccgaccggcaagggcgcgcacaacttccgctcgctcgcggacggcacgcacgtcgcggtgacgaatcgggtcgcgaacacgatcagcatcctcgacgagaacgcgctcacgaacgtcggcgacatcacgggcctgctgcccggcccggacgacatggaactgtcggccgaccggaagacgctgtgggtgacgttccgcttcgcgaagaaggtcggcgtgatcgatctgccgagccgcaagctgattcagacgatttcggtcggccgctcgccgcacggaatctacttctacgaccgggcgccgtggacggcgccgaacggcgcg

SEQ ID NO: 14206 - DNA, 795 bp, Burkholderia mallei
atgggcatcaaggctttcaacggggtattgtacaatacggcgtatttgccgcaggcggtggaagcttcggagcgcgcttctacggtagactgggcgccgtcgttttttgcagaacctcactactcccacaagacgaaacaaggtgtgcgaatgaatcgactgagcaagtctttggtggtgcttcagttcgcggtagcagggctcgcaggtttcatggcggaggcaagggcggcggatgcggcgaagccggatctcgaccgaggcaaggcaatcgcgacgcaggtatgcgcggcatgccacggcgtcgacggcaacagcgcgacgggttcgttcccgaagctcgccggtcagcatcccgattatctcgtcaagcaattgcacgatttcaagacgcagccgggcgcgaaggggccggtgcgcgtcaattccgtgatggtcggattcgcaagcgcgctgaacgatcaggacgcgcgcaacgtcgccgcctattacggatcgcagtcggccaagccgggcgccgcgcgcaacgcggccaccgtgcccgtcgggcagaagatctatcgcggcggcatcgccgagaagggcgtgcccgcctgcgcgagctgccacgggccgactgggcaggggattccggtccagtacccgcggttgtcggggcaatgggccgactataccgtcgcgcagttgaccgcgttccagcaaggcacgcgcagcaacgacgcgatgcatcagatcgcgttgcggctgacggacagcgaggtcaaggccgtcgccgattacatcgccggcctgcat

SEQ ID NO: 14207 - DNA, 684 bp, Burkholderia mallei
atgacaggcttcgatcgtcagacgatctccgacacgaccgccaaaatgctgctcgaagtgcaagcggtgcacttcaacgccgacaagcccttcatcttcacgtccggatgggcgagccccgtctacatcgactgccgcaagctgatctcgtttccgcgcgtgcgccgtgggctgatggaaatggccgaggcgacgatcctgcgcgacgtcggcttcgagcagatcgacgcggtggcgggcggcgaaaccgccggcatcccgttcgccgcgtggatcgccgaccggatgatgctgccgatgcagtacgtgcgcaagaagccgaagggattcggccgcaacgcgcagatcgagggctatctggaagaaggctcgcgcgtgctgctcgtcgaggacctgacgaccgacagccgcagcaagatcaacttcgtcaacgcgctgcgcaccgcgggcgcgaaggtgaaccactgcttcgtgctgttccattacgacatcttcaaggaaagcgtgtcggtgctgaaggacatcgacgtcgacctgcacgcgctcgcgacctggtgggacgtgctgcgcgtcgcgaaggcgtccggctatttcgagacgaagacgctcgacgaagtcgagaaattcctgcacgcgccggccgaatggtcggccgcgcacggcggcgcgacgggcgcgcaggag

SEQ ID NO: 14208 - DNA, 231 bp, Burkholderia mallei
atggcacgcgtatgccaagtaactgggaaagcgccgatgagcggcaacaacgtttcccacgccaacaacaagacgaagcgtcgcttcctgccgaatctgcaaaaccgccggttctgggtggaaagcgaaaaccgttgggtgcgcctgcgcgtttcgaacgccggcctgcgcctgatcgacaagaacggcatcgattccgtgctcgctgacctgcgcgcacgcggcgaagcc

SEQ ID NO: 14209 - DNA, 1035 bp, Burkholderia mallei
atgccgcaaaccaagacgaccaaccgcaggatcgtgctgcactcgcgcccgaagggcgcgcccacgccggagaatttccgcaccgaaacggcggcggtgcccgtgcccgcgccgggcgaggtgctgctgcgcacgatctggctgtcgctcgatccgtacatgcgcggccgcatgagcgacgcgccctcgtatgctgcgcccgtcgagctcggcggcgtgatggtgggcggaacggtgagccgcgtcgtctcgtcgagcgtgcccgcgttccgcgacggcgatctcgtgctgtcgaacgccggctggcaggactacgccgtgtccgacggcaccgacctgatgccgctcgcggacgtcgcgcatccgtcgtacgcgctcggcgtgctcggcatgccgggcttcaccgcgtacttcggattgctgcacatcggcgagccgaaggcgggcgagacggtggccgtcgcggcggcgagcggcgcggtgggcgcggtcgtcgggcagatcgcgaagctcaagggttgccgcgtcgtcggcatcgcgggcggcgcggacaagtgccgctatgtggccgggacgctcggcttcgacgcgtgcgtcgatcaccacgatcccgatttcgcgaaacagctcgccgccgcgtgcccggacggcatcgacgtgtatttcgagaacgtcggcggcgcggtgttcgacgcggtgctgccgctgctgaacgatcatgcgcgcgtgccggtgtgcgggctgatcgctcactacaacgacagcgagctgccgggcggcccgaaccgcctgccgctgctcacgtcgagcgtgctgcgcaagcggatcaggatgcagggcttcatcatcctcgatcactacgcggacgtttatccggccttcctgaaggatatgagcgaatgggtcgcgcaaggcaaggtgaagccgcgcgaggacgtcgtcgacgggctcgacgcggcgccgcgggcgctgatcggcctgctcggcgggaagaacttcggcaaggtggtcgtgcgcgtggggcccgacacgctc

SEQ ID NO: 14210 - DNA, 1338 bp, Burkholderia mallei
gtgctcgcgaaggcgagccctttgcgttccggcgaccagctcgcgggcgtggcggcctcgaccgaggaggagcgcgtcgccgcgaagatggcgctcgcgagcgcgccgctcaccgcgttcctgaacgaggcggtgattccctatgaggacgacgaggtgacgcgtctcgtcgtcgatacgcattcgcgcgacgcgttcgccgagatctcgcacctgacggtcggcgatttccgcaactggctgctgtcgccggcggccgacgcggccgcgctcgagcggatcgcgccgggcctcacgccggagatggtcgcggcggtgtcgaagctgatgcgcaatcaggacctgatcgcggcggcgagaaagcgccgcgtcgtcacgcgcttccggaacacggtggggctgccggggcggatgtcggtgcggctgcagccgaaccatccgaccgacgacgtgaagggcatcgccgcgtcgatgctcgacgggctgatgtacggctgcggcgacgcgatgatcggcatcaacccggcgacggacagcctcgccgcgatcacgaagctgctcgcgatgatcgacgcgttccgcgagcgctaccgcgtgccgacgcaatcgtgcgtgcttacgcacgtgacgaacacgatcgcggcgatcgacaagggcgcgcccgtcgatctcgtgttccagtcgatcgcgggcacggaaaaggcgaacgcgagcttcggcatttcgctcgcgctgctcgccgaggcgcgcgaagcggcgctggcgctcaagcgcggcacggtcggcaacaacctgatgtatttcgagacggggcagggcagcgcgctgtcggcgaacgcgcatcacggcgtcgaccagcagacctgcgaggtgcgcgcgtacgcggtcgcacgcgcgttcgagccgtttctcgtgaacacggtggtcggcttcatcggccccgaatacctgtatgacggcaagcagatcattcgcgcggggctcgaggaccacttctgcggcaagctgctcggcgtgccgatgggctgcgacatctgctacacgaaccacgcgcaagccgatcaggacgacatggacaacctgctcacgctgctcggcgcggcgggcatcaacttcatcatgggcattcccggcgcggacgacgtgatgctgaactaccagagcacgtcgttccacgatcagctctacgtgcgcgaagtgctcggcctgcgccgcgcgcccgagttcgaggagtggctggagacgatggagatcacggacgcgcatggcgcgctgcgcgccgcgtcggcgcgcgtgccgctgctcgccggcgcgaacgactggatggggcgctgcgca

SEQ ID NO: 14211 - DNA, 1266 bp, Burkholderia mallei
gtgatgccagtccgcgcggcgggcgccgggaatcgagagcccggcgcgccgcgtggtcgaaccgagagtgacgtcatgtataaccttcccgatgatcgcggccatttcggcccatatggcggcgtgttcgtcgccgaaacgctgattcacgcgctcgacgagctgcgtgccgcgtacgagaaattcaagaacgaccccgagttcgttgccgaatacaaccgtgagctgaagcacttcgtcggccgtccgtcgccgatctatcacgcgcagcgctggagcgagacgctcggcggcgcgcagatctacctgaagcgcgaggacctgaaccacacgggcgcgcacaaggtgaacaacgtgatcggccaggcgctgctcgccaagcgcatgggcaagcggcgcgtgatcgccgagacgggcgcgggccagcacggcgtcgccaccgcgacgatctgcgcgcgcttcggcatggagtgcgtcgtctacatgggcgccgaggacgtgcgccggcaggccgcgaacgtctaccggatgaagctgctcggcgcgaccgtcgtgcccgtcgaatccggctcgcgcacgctgaaggatgcgttgaacgaggcgatgcgcgactgggtcacgaacatcgagcgcacgttctacatcatcggcacggtggcgggcccgcatccgtatccgatgatggtgcgcgacttccagcgcgtgatcggcgacgaatgcaaggtgcagatgcccgagctcgccggccggcagcccgacgcggtgatcgcctgcgtcggcggcggctcgaacgcgatgggcatcttctacccgtacatcgacgacgcggccgtccaattgatcggcgtcgaggcggcgggcgacgggctcgacaccggccatcacgcggcgtcgctgatcgccggcagcccgggcgtgctgcacggcaaccgcacgtatctgctgcaggacgacgacggccagatcatcgagacgcattcggtatcggccggcctcgactatccgggcgtcggccccgagcatgcctggctgaaggacagcggccgcgcgcagtacgtcgggatcaccgacgaagaggcgctgaaggcgtttcacgactgctgccggatcgaggggatcattcccgcgctcgaatcgagccacgcgatcgcctacggcgcgaagctcgcgccgacgctgccgaaggacaagatcctcctcgtcaacctgtcggggcgcggcgacaaggacatgcacacggtcgccgagcgatcgggcatcacgctc

SEQ ID NO: 14212 - DNA, 1080 bp, Burkholderia mallei
atgagcgaaccgcagccgtcaaagagcccagagacgaacgcaggcgagaaaccggcgacagccggtggaggcatggcgtcggtcgcggcggtgggcgcgcggctcgcggagttgcgacggacgaaggggtggtcggtcgacgacgtctccgcgcggctgaaggtcgcggcgccgaagcttcaggcgctcgaggcgggcgatacgagtcagttgccgggcacgacgtttgcgctcggcctcgtgcgcagttacgcaaagatgctcggcgtcgatccggagccgttcgcgcaggcgctgcgccgcgaaaaaggcgtgccggaggtcgatctgtcgatgcccgcgtcggccggcaccgatctgccgcgcggcagggtgtcgatcccgctggggggggcgtcgcgcggccggccatggctgtgggcggtcgcggcggtcgtggtcgcgctcgttgccgcggcgatgtggcgtacgggcggcgattcgtcgaactggctcgcgcgcttcaagtcgagcggcgcgggcgaagccgcgtcggccgcgcacgcgcagcaggaaggcgccgcgtcggatctgccggcgagcgcggcggtgtcgggcacggtcatgcaggcgggggcgctcgcggcgtccgcgacgcagtcggtcggcggcgcgtcggcgggcgacacggccgcggcgagcgtgccggccgcgggggccgcgcccgtcgtcgcgagcgcggcggctgcgttatccgcgtcggcgccggtcgccgccgcgcagccagcgcaaggcgcgcagcagccggccgcgtcggcggccgacggcgcgagcgcagccgtcacggcggcgcccggccagtcggtcgtcgcgctcaaggtcgcgcaggactgctggttcagcgtgcgcgacaagaacggcaaggagctgttctcggcgctcgtgcgcgccggcgagacgaggcaggtcgcgggcgacgcgccgctcaaggtcacgatcggcaacaaggccgggctcgaatcggtcgctttcgacggcaagcccgtcgatccggcaaaatactcgacggctcggggcaatgtcgcgcgtttcgcattgccc

SEQ ID NO: 14213 - DNA, 1311 bp, Burkholderia mallei
atgactgccccccaaccgtgcgcgcgccagccggcgcgcgccgctgccgccgcgttcgtcggcacgatgatcgagtggtacgacttctacatttacgcgaccgccgccgcgctcgtgttcggcgagttgtactttccgtcgggcgacccgttcgtcagcacgatggcttcgttcggcacgttcgcggtcggctttttcgcgcggccgctcggcggcgtcgtgttcggccatctcggcgaccggatcggccgcaagaaggcgctgatgacgacgctcgcgatgatgggcgcggcgaccgtgtgcatcggcctgttgccgagccatgcgtcgatcggtgcgctcgcgccggtgctgctcgtgctgctgcggatcgtgcagggcgtcgcggtgggcggcgagtggggcggcgcggtgctgatggcgggcgagcacgcgcccgacgggcggcgcacgttcttcgcttcgttcgcgcagttgggcagcccggccgggctggtcctgtcgctcgtcgcgtttcgcgcggccacgtcgctcgagaaggcggactttctcgcatggggctggcgcctgccgtttctcgcgagcgcggtgctgctgatcgtcggtctcgcgatccggctgggcgtgaacgaatcgccggaattcgaggcggtgaagcgcacgcgcgccaccgcgaagctgccgatcgccgacgtgttgcgctccgcgtcggggctcgtgctgctgtgcatcggcgcgaacacgatcggcatcgccggcgtgtatttcacgaacacgttcatgatcgcgtacacgacgcagcagctcggcatcccgcgcgcgacgatcctcgattgcctgttcgcggtcgcgatcatccagttcgtcgcgcagcccgccgccgcgtggctggccgaaaagctcggcggcgcgcgtttcctgaagctcgcggccgtcgccgcgatggcttcgccgtatccgatgttcatgctcgtgacgagcgggcggcccggcgcgatcgtcgccggcatcgcgctcgcggtggtctgcatggcgggcttctattcggtgatcgcgggtttcgtctccggcgtgttcgcggcgcgcatccgctattcggcgatctcgctgtcctaccaggtgtgcggcgcgctcgcgggcggcctcacgccgctcgtcggcacgtggctcgcgcatcgctacgcgggcgcatggctgccgctcgcgctgttctatacgtgtctcgcggggctctcgctcgtgagcgtcgtcgcgctcgacgcgcgccgcgccgcgcgaggcgcttcggcccgcgaagcgctggaggcgcgc

SEQ ID NO: 14214 - DNA, 946 bp, Burkholderia mallei
cacaacggcgcgggaatgcagggcttcttcatgaacctgcgccggccgctgttccaggacgtgcgcgtgcgccacgcgctcgatctcgcgttcgatttcgaatggctgaaccggcagctcttctatggcgcgtacacgcgcctgaacagctatttcgccgataccgacctgcaggcgacgggcacgccgagcgcgggcgagctcgcgctgctcgccccgttgcgcgcgcagctcgacccggccgtgttcgggccgatgaccgtgcagccgagcaccgatttgcccgcgtcgctgcgcgcgaacctgctgaaggcgcgcgcgctgctcgccgaggccggctggacctaccgcgacggcgcgctgcgcaacgcgaagggcgagccgttcgtgttcgagattctcgacgattcgggctcggcgttcgagccggtggtcgccgcgtacatccgcaatctcgcgaagctcgggatcgtcgtgaagtaccggacggccgatttcgcgctgctgcaaaagcgcctcgacgcgttcgactacgacatgacgacggtccgctacccgggcgtccaggtgccgggcgccgagcaggtcgcacgcttcgcgagccgctatgcggacgagccgggctcggacaacctgacggggctcaagtcgcccgcggtcgacgcgatcctgaaggcgctcacgcaggccgagacgcgcgacgaactgctcgacgcgacgcacgcgctcgaccgcgtgctgatgcacggctactatgcggtgccgcagtggtacagcgccgtgcaccggatcgcgttcaagcgcacgctcgcctacccgtcggtgctgccgctgtactattcggcggaaggctgggtcgcctcgacgtggtgggcgaggcccgagcatggcgcgtccgcgcgttagcccggcgcgcgcggcccgggcgcggcggccaggccgcggc

SEQ ID NO: 14215 - DNA, 1461 bp, Burkholderia mallei
atgactgaactcttcatcgacggcgcctggcgcgacggcgcgggccccgtcttcgcttcgcgcaaccccggcaccggcgagcccgtgtgggaaggcgcgggcgcgtcggcggacgacgtcgagcgcgcggtcgcgagcgcgcgccgcgcgttcgccgcatggtccgcgctcgatctcgacgcgcgctgcgcgatcgtcaagcgcttcgccgcactgctcgtcgagcgcaaggaagcgctcgcgacgatgatcggccgcgagacgggcaagccgctgtgggaggcgcgcaccgaggtcgcatcgatggccgcgaaggtcgacgtctcgatcgccgcatatcacgagcgcacgggcgagcgccgctcgccgacggccgacggcgtcgcggtgctgcggcaccgtccgcacggcgtcgtcgcggtgttcggtccgtacaactttccggggcacctgccgaacgggcacatcgtgcccgcgctgatcgccggcaacaccgtcgtgttcaagccgtcggagctcgcgcccggcgtcgcgcgcgccaccgtcgagatctggcgcgacgccgggctgcccgccggcgtgctcaatctcgtgcagggcgagaaggacacgggcgtcgcgctcgcgaaccatcggcagatcgacggcctcttcttcaccggcagctcggacacgggcacgctgctgcaccggcagttcggcgggcggcccgagatcgtgctcgcgctcgagatgggcggcaacaatccgctcgtcgtcgccgacgtcgaggacatcgacgcggccgtccatcacgcgatccagtcggcgttcctgtcggccgggcagcgctgcacgtgcgcgcgccgcatcctcgtgccgcgcggcgcgttcggcgatcgtttcctcgagcgcttcgcggacgtcgcctcgaggatcacggccgatgtctacgacgccgatccgcagccgttcatgggcgcggtgatctccgcgcgcgcggcgtcgcgcctcgtcgccgcgcaggcgaagcttctcgagctgggcgccgcgcccatcatcgagatgaggcagcgcgatccggcgctcggcttcgtcaacgcgtcgatcctcgatgtcacgcccgtgcgcgagctgcccgacgaggagcacttcggcccgctcgcgcagatcgtccgctacacggatctcgacgacgcgatcgcgcgcgcgaacgacaccgcgttcggcctgtcggcgggcctgctcgccgacgacgaaaccgtctggaacacgtttcgccgcacgattcgcgcgggcatcgtgaactggaaccggccgaccaacggcgcgtcgtccgcggcgccgttcggcggcgcgggccgctcgggcaaccatcgcccgagcgcgtactacgcggccgattactgcgcgtatccgatggcgtcggtcgagagcgcgcaattgcagatgcccgcgaacctgtcgccgggccttcatttc

SEQ ID NO: 14216 - DNA, 654 bp, Burkholderia mallei
gtgcaattcgattggtcagcgatatgggcggcgctgccggacttgatggacggcgtgcggctcaccgttttcatcgcattcttcgggctggcgggcggttttctcgtcggcatgatcgcgggcatgtttcgcgcgtacggccctgccgtgctgaacgtgctcgctcaggtctacatcgagctgatccgcggcacgccgatcgtcgtgcaggtgatgtttctctatttcgcgctgccgctgctcgcgcacgtccgcatcgacggcctgagcgcggcggtcgtcgcgatcacgctgaactccggcgcgtatctcgccgaggtcgtgcgcggcgcgctgctgtcgattcccaagggattgacggaagccgggctcgcgatggggctgtcgatgccgcgcgtgctcgtgaagatcgtcgggccgctcgcgttccggcggctcattgcgccgctcggcaaccagtgcatcgtcagcctgaaggacacgtcgctgttcatcgtgatcggcgtcggcgagctcacgcgcaagggccaggagatcatcgccggcaatttccaggcggtcgagatctggaccgccgtcgccgcgatctatctcgtgctcaccggcgtgatgacgctcacgcttcgcttcgtcgagaaaaggatgcgcatctta

SEQ ID NO: 14217 - DNA, 1110 bp, Burkholderia mallei
ttgaccccgtttcacgaaccacaggcgaccgacgacatggccattcccgtcaccatcctcacgggctttctcggcagcggcaagaccacgctgctcaagcgcatcctgaacgaacagcacggcatgaagatcgccgtgatcgaaaacgagttcggcgaagagaacatcgacaacgagatcctcgtccaggattcgaccgagcagatcatccagatgagcaacggctgcatctgctgcacgattcgcggcgacctcgcgcgcgcgctcgccgacctcgccgcgaaaaagcgcgacggcacgttcgacttcgaccgcgtggtgatcgagacgacgggcctcgcgaatccgggcccggtcgcgcagacgttcttcatcgacagcgagatcgccgacgaattcctgctcgacgcggtcatcacgctcgtcgacgcgaagcatgcgaacgcgcagctcgacgagcacgaagtcgtgcagcgccaggtcggcttcgccgatcgcctgttcatcacgaaggcggacctcgtcgacgacgaggcggtgtccgagctcaagcaccgcctgctgcacatgaacccgaaggcggcgatcaaggtcgtgaacttcggcgatgcggacatcaaggagatcttcgacctgcgcggcttcaacctgaacgcgaagctcgagatcgatccggacttcctcgcggaagacgatcacgcgcacgcgcatcacgacgatcacgaccacgatcacgcgcattgcgatcacgatcacggccattgcgagcacgatcacgggcacggccaccacgatcatcaccacgcgcaccacgacgacaagatcaagtcgttcgtctaccgcaacgatcgcccgttcgatccgaacaagctcgaggatttcctcggcggcattctgcagatctacggcgagcggatgctgcgctacaagggcgtgctgtacatgaagggcgtcgaccgcaaggtcgtgttccagggcgtgcatcagatgatgggcagcgatctcgccgcgaagtggctgccggccgagaagaagaccaacaagatggtgttcatcggcgtcgacctgccgcgcgacctcatcaccgacggcctcgacgcctgcctcgca

SEQ ID NO: 14218 - DNA, 1080 bp, Burkholderia mallei
atgctcacgctttccgatttcgatttcgatctgccgcccgagttgatcgcgcaaaccgcgctgcccgaacgcagcgcgagccgcctgctcgaggtggacaacacgaacccgagcgcgcccccgcgcctcatcgaccggcgcttcgccgagctgcccgcgtgcgtcgcgccgggcgacctgctcgtcttcaacgacacgaaggtgctcaaggcgcgcttcttcggtcgcaaggcaagcggcggcaagatcgaggtgctgatcgagcgcgtcaccggcgagcgcatcgcgctcgcgcagatccgcgcgagcaagagccctccgcccggcaccacgctcacgctcgccgatgcgttcgacgtgacggtcggcgagcgcgtcgagccgttcttcacgctgcacttccccgacaactgcctcgtgctgatcgagcgccacggccggctgccgctgccgccgtacatcgagcacgcgcccgacgcggccgacgagacccgctatcagacggtgttcgccgcgaacccgggcgccgtcgccgcgccgacggccggcctgcacttcgacgacgcggtgctcgccgcgctcgaggcgcgcggcgtcgagcgcgcgacgctcacgctgcacgtcggcgcgggcacgttccagccggtgcgcgtcgaaaacctcgccgagcaccggatgcacagcgagtcgtacgagctgaccgacgcgctcgtcgagaagatcgccgcgacccgcgcacgcggcggccgcgtgatcgcggtcggcacgacgtcgatgcgcgcgctcgaggcggccgcgcgcgacgcgcaggcggccggccggccgctcgccgcgacgcgcgcggaaaccgacatcttcatcacgccgggctaccgtttccgcgtggtcgaccggctcgtgacgaatttccacttgccgaaatcgacgctgctgatgctcgtgtccgcgttcgccggcatcgagacgatccgcgccgcgtaccggcacgcgatcgacgcgcgctaccggttcttcagctacggcgacgcgatgctgctcacgcggcgcgacgacgcggccgaggcgacgcacggcggcgca

SEQ ID NO: 14219 - DNA, 1296 bp, Burkholderia mallei
atggcaacctcgcttccgctcgacccgatcgaacgagcgagccgcgacgaactgctcgcgcttcagctcgaccgcctgaaatggtcactcgcccacgcgtacgagaactcgcccgtctatcggcgcaagttcgacgaggcgggcgtgcacccggccgatctgaaaacgcttgcggatctgagccgctttccgttcacgacgaagaacgatctgcgcgacaactatccgttcggcatgttcgccgtgccgcaggagcgcatctcgcgcatccacgcttcgtcaggcacgacgggcaagccgacggtggtcggctataccgcgcgggacatcgatacctgggcgggcctcgtcgcacgctcgatccgcgcggcgggcgcgcggccgggcgacaaggtgcatgtgagctacggctaccgcctcttcacgggcggcctgggcgcgcattacggcgccgagcgggccgggctgacggtgatcccgttcggcggcggccagaccgaaaagcaggtgcaactgatccaggacttccggcccgacatcatcatggtgacgcccagctacatgctgtcgatcgccgacgaaatggaacgtcagcacctcgatcccgcccagtgctcgctgcgaatcggcatcttcggcgcggaaccgtggaccaacgacatgcgtgtcgcaatcgagcagcgcatgggcatcgacgccgtcgacatctatgggctctccgaggtgatcggcccgggcgtcgcatcggagtgcgtcgaaacgaaggacggcccgacgatctgggaagatcacttctaccccgagatcatcgatcccgacaccggcgaagtgctgccggacggcgcattcggcgaactcgtgttcacgtcgctcacgaaggaagcgctgccgatcgtccgctaccggacccgcgacctcacccgcctgctgcccggcaccgcgcgtacgatgcgcaggatggaaaaaatcaccggccgttcggacgacatgatgatcgtgcgcggcgtgaacgtgttcccgacccagctcgaagagcaattgctcaagcagcgtgcgctcgcgcctcactatcaggtggtgctgacgaaggacgggccgctcgacgtgctgacgctcaacgtcgagccctgcccggagacggcgccggatgcggccgcgatcgacgccgcacgccgcgcgctcgcgcacgacatcaaatcgctgattggcgtgacggcgatcatcaacgtgttgcccgtcaacggcatcgagcgctcggtcggcaaggcgagacgaatcgtcgacaagcggcggccg

SEQ ID NO: 14220 - DNA, 648 bp, Burkholderia mallei
atgaaacaggacagccgttttccgaatctcttcatcctcgaccatccgctgatccagcacaaactcacgcacatgcgcgacaaggacacgtccacccggacgttccgcgagctgctgcgcgagatcacgctgctgatgggctacgagatcacccgcaacctgccgatcacgacgaagcgggtcgaaaccccgctcgtggagatcgacgcgcccgtgatcgccggcaagaagctcgccatcgtgcccgtgctgcgcgcgggcgtcgggatgtcggacggcctgctcgagctgattccgtcggcgcgcgtcggccacatcggcgtgtaccgcgccgacgaccaccgcccggtggaatacctggtgcggctgcccgacctcgaagaccggatcttcatcctgtgcgacccgatggtcgcgacgggctattcggccgcgcacgcaatcgacgtcctcaagcgccgcggcgtgccgggcgagcgactcatgttcctcgcgctcgtcgccgcgcccgaaggcgtgcaggtgttccaggacgcgcatccggacgtgaagctgtatgtcgcgtcgctcgattcgcacctcgacgaccacgcgtacatcgtccccggcctgggcgacgcgggcgaccgcctgttcggcacgaagaac

SEQ ID NO: 14221 - DNA, 966 bp, Burkholderia mallei
atggatacgtccagcatcaacgcccagagcatcttcgacgacaacgcagccatgctgaagctcagctggctgacggggcatgaaggctgggaacgcggtttttccgccgacacggttgcgaacgcgacgtcgagcgccgatctcgtcggccacctgaacctgatccacccgaaccggatccaggtgctcggcgaagccgagatcgactactaccagcgccagaccgacgaagaccgctcgcgccacatggccgagctgatcgcgctcgagccgccgtttctcgtcgtcgcgggcggcgccgccgcgccgcccgagctcgtcctgcgctgcacgcgctcgtcgacgccgctgttcacgacgccgatgtcggccgccgcggtgatcgacagcctgcgcctgtacatgtcgcgcatcctcgcgccgcgcgcgacgctgcacggcgtgttcctcgacattctcggcatgggcgtgctgctgacgggcgattcgggcctcggcaagagcgagctcggcctcgagctgatcagccgcggccacggcctcgtcgccgacgacgcggtcgatttcgtccgacttggccccgatttcgtcgaagggcgctgcccgccgctgctgcagaacctgctcgaagtgcgcggcctcggcctgctcgacatcaagacgatcttcggcgaaaccgcggtgcgccggaaaatgaagctcaagctgatcgtccagctcgtgcgccggcccgacggcgaatttcagcggctgccgctcgaaagccagacggtggacgtgctcggcctgccgatcagcaaggtgacgatccaggtcgccgcgggccgcaacctcgcggtgctcgtcgaggcggcggtgcgcaacacgatcctgcaactgcgcggcatcgatacgctgcgcgacttcatggaccgccagcgcctcgcgatgcaggatccggacagccagttccccggcaagctcgtg

SEQ ID NO: 14222 - DNA, 966 bp, Burkholderia mallei
gtgactgacccaacccaacgcattctcgatccgagcgaaatcgcatcgctcgatcattcggccattccgcgcgtgcggatgcccgagcgcggcgccgtgttcgccgcgcgcgccgcgcggctgcgcaagctcgcggacctgaacccgatcgccggctatctgcggctgatggcggccgtcgccgacgcgcagcacgaactgctgcagacgttcgtgccgaacgcgcccgagaaggcggcggccgagcgcgcgcagcgccattcgatgccgctcatgccggcgctcggcggcgaacgcgatccgcgctggcgcgacctgctgcaaagcctgctcgaccgcgtcgaacgcgcgggcctcgtgaatccgccgctcgcgaagctgatcgacggcatgcggctgcgcgaggccgccgcgctcgacgcgcaggccgacgcgctcgtcgcgcagcgcttcgccgaaatcgagccggcgtccgcgccgttcctgatggccgcgctgcaggtggtatggaccgcgctcgcgagccgcatcgcgcccgccgacgttccgtatctcgagcagccgggcctttgcccggtgtgcggcgcgcagccggtcgcgagcatcgtgcgcgtgggcggcccgtatcagggctatcgcttcctccagtgcgggctgtgctcgaccgagtggcacatggttcgcacgaagtgctcgcactgcgattcgacgaagggcatcgcctatcacggaatcgagggcggcagcgaagcgatcaaggccgaatcgtgcgacgcgtgccatacgtaccggaagatcggttatcaggagaaggactacgacgtcgagccgctcgcggacgatctcgcgagcctcacgctcgacctgctgatgggcgaggcgggctaccggcgcgcgtcgccgaatccgctgctctggccggacctgccggccgaggccggcgcagcggcgggagacgagcgcacg

SEQ ID NO: 14223 - DNA, 558 bp, Burkholderia mallei
atgagtgtcgctgatatcaagaagagcgtcgagcagaagatgcagcgctcgatcgaagcgttcaagaacgatctggcgaagatccgcacgggccgtgcgcacaccggtctgctcgatcacgtgcaggtcgactactacggctcgatggtgccgatctcgcaggtcgcgaacctgacgctcgtcgacgcgcgcacgatcggcgtgcagccgtgggaaaagaccatggtcgcgaaggtcgagaaggcgatccgcgaagccgatctgggcctgaacccggcgacgtcgggcgacctgatccgcgtgccgatgccgccgctcaccgaggagcgccgccgcgagctgacgaaggtggtcaagagcgaaggcgaaacggcgaaggtcgccgtgcgcaatctgcgccgcgacgcgaacgagcaactgaagaagctcgtgaaggacaaggaaatttccgaagacgacgagcgccgcgcgagcgacgacgtgcagaagctgacggacaagcacgtcgcggagatcgacaagctcgtccaggccaaggacgcggagatcatgacggtc

SEQ ID NO: 14224 - DNA, 1931 bp, Burkholderia mallei
gtcggcatcctgatcgcggcgttcgtgatcgccgcgccgctcgtcatcggcgcggcgggcggcaactactgggtccgcgtgctcgacttcgcgatgctgtacgtgatgctcgcgctcggcctgaacgtggtggtcggcttcgccggcctgctcgatctcggctacatcgcgttctacgcggtgggcgcctataccgcggcgctgttgagctcgccgcacctgacgtcgcacttcgactggatcgcgcagatggtgccgggcggcctgcacgtgccgttcctgctgatcgtgccgatcgcgatggcgctcgcggcgatcttcggcatcctgctcggcgcgccgacgctgcgcctgcgcggcgattacctcgcgatcgtcacgctcggcttcggcgagatcgtccggatcttcatgaacaacctcgaccgcccggtcaacgtgacgaacgggccgcaagggatcaccggcatcgatcccgtccaggtcgcgggcttcaacctgtcgcagacgcacgagatcttcggcttctcgctgccgtccgtgtacatgtactactacctgttcgtgctctgcgcgctgctcgtcatctgggtctgcacgcgcctgcagcactcgcggatcggccgcgcatgggccgcgattcgcgaagacgagatcgccgcgaaggcgatgggcatcaacacccgcaacgtgaagctgctcgcgttcgcgatgggcgcgtcgttcggcggcctgtcgggcgcgatgttcggcgcgttccagggcttcgtgtcgccggaatcgttcacgttctgggaatcggtcgtcgtgctcgcgtgcgtcgtgctgggcggcatgggccacatcccgggcgtgatcctcggcgcggtcctgctcgccgtgttccccgaattcctgcgctcgacgatgagcccgctgcagcacatgctgttcggccacgacatcgtcgataccgaagtgattcgccaggctctctacggcctcgcgatggtggtcatcatgctgtatcgctcggaaggcctgtggcccgcgccgaagcacgaggaccggatcgcgaaactggcgaagcgcggcggcaagaagccggtgcgcgcgtaaaggacgtgggaccggcgctgcgcgcgcgagcgcgagcgccggtcgacccaggagaaaaggtaatgagcgaacaaattcgactgtccgtcaaaggcgtgaacaagcgcttcggcggcctgcaggcgctgtccgacgtcggcctcgagatccgcgaggggcagatctacggcctgatcggcccgaacggcgcgggcaagaccacgttcttcaacgtgatcacggggctctacacgccggattccggcgagttcaagctcgacggcacggaatacacgccgaccgccgtgcaccaggtcgcgaaggcgggcatcgcgcgcacgttccagaacattcgcctgttcggcgggatgaccgcgctcgagaacgtgatggtcggccgccacgtgcgcacgaagcacggcctgttgggcgccgtgttccagacgcccgccgagcgccgggaagaacgcgagatcaaggagcgcgcgatcgagctgctcgattacgtcggcgtgctgcagtacgcggattacaccgcgcgcaatctgtcgtatggccaccagcggcgcctggagatcgcgcgcgcgctcgcgaccgatccgaagctgctcgcgctcgacgagccggcggccgggatgaacgcgaccgagaaggtcgagctcacgcgtttgctcgacaagatccgttcggacggcaggacgattctcctgatcgagcatgacgtgaagctcgtgatggggctgtgcaaccggatgacggtgctcgattacggcaaggtgatcgccgagggtctgccgcaggacgtgcagaagaatccgaaggtgattgaggcatatctcggcgcaggggtgcac

SEQ ID NO: 14225 - DNA, 537 bp, Burkholderia mallei
atgagactcaccaccaaaggccgtttcgccgtcacggcgatgatcgacttggcgctacgccaggagcaaggcccggtgacgcttgcaggcatcagccagcgccagcggatttcgctctcctacctcgagcaattgttcggcaagttgcgccggcatgaaatcgtcgaatcggtccgcggaccgggcggcggctacaacctcgcgcgccgcgcgcaggacgtgacggtcgccgacatcatcatcgcggtcgacgagccgctcgatgcgacccagtgcggcggcaagggcgcgtgcgaaggctcgaagcagcccgatggccattgcatgacgcacgaactgtggtcgacgctgaaccagaagatggtcgaatacctcgattcggtgtcgctgcaggatctcgtcgatcagcagcgcgcccgcgagggcacgccggccgtgctgcgcgacaagcgcaagccggagcccgtcgcggcgagcgtcgagcccgtccgctcggttccgctcggcccgaattcggtcttcaacatcgcgaattca

SEQ ID NO: 14226 - DNA, 714 bp, Burkholderia mallei
gtgtggatccgcgaaaaggaagggctcgaacagacgaccggcgtgctcgcgggcgacgcgccgcccgacacgctgatcgcgaacgagaacggcgtgctgtatcacgtcgacgtgcgcaacggccacaagacgggcttctacgtcgaccagcgcgagaaccgcgcactcgtcgcgcagtacgcgcgcgatcgcgacgtgctgaactgcttctgctacacgggcggcttctcgctcgcggcgctcaagggcggcgcgaagcgggtcgtgtcgatcgattcgtcgggcgacgcgctcgcgctcgcgcagcgcaacgtcgccgcgaacggcttcgacgccgcgcgcgcgcaatggctcgacgccgacgcgttcaagacgctgcgccgcctcgtcgacgaaggcgagcgcttcgacctgatcgtgctcgatccgccgaagttcgcgccgacgcgcgacagcgtcgatcgcgcggcgcgcgcgtacaaggacgtcaatctgagcggcttgaagctgctgcgcccgggcggcctgctgttcacgtactcgtgctccggcgcgatcgacatggacctgttccagaagatcgtcgcgggcgcggcggccgacgcgaaggtcgacgcgcgcatcctcaagcggctcggcgcgggcgtcgatcatccgctgctgaccgcgttccccgaaggggaatatctgaaggggctgctgttgcaaatcgcg

SEQ ID NO: 14227 - DNA, 1980 bp, Burkholderia mallei
atgtctgcgattgaatcggttctgcacgaacgccgccagttcgcgccgcccgccgccgtggagaaggcggcagccatttccgggatggcggcttatcgggcgctcgccgaagaggctgagcgcgattacgaaggattctgggcgcgtctcgcgcgcgagacgctcgaatggcgcaagccgttcggcaaggtgctcgacgagacgaacgcgccgttctacaagtggttcgaggacggcgagctgaacgcgtcgtacaactgcctcgaccgccacgtcgccgcgggcttgggcgagcgcgtcgcggtgatcttcgaggccgacgacggcaccgtcacgcgcgtcacctacgccgatctgctcgcgcgcgtgtcgcgcttcgcgaacgcgctgaagaagcgcggcgtcggccgcggcgaccgcgtcgtcatctacattccgatgtcggtcgaaggcatcgtcgcgatgcaggcgtgcgcgcggatcggcgcgacgcactcggtggtgttcggcggcttctcgtcgaagtcgctgcacgagcgcatcgtcgacgtcggcgcgaccgcgctcgtcaccgccgacgagcagatgcgcggcggcaagacgctgccgctcaagagcatcgccgacgaggcgctcgcgatgggcggctgcgacgcggtgaagaccgtcgtcgtgtatcgccgcacgggcggcaatgtcgactggcacgcgggccgcgacgtctggatgcacgagatggtcgcgaacgagtccgacgcgtgcgagcccgaatgggtcggcgccgagcatccgctgttcatcctgtacacgtccggctcgaccggcaagccgaagggcgtccagcacagcacggccggctatctgctatgggtcgcgcagacgatgaagtggacgttcgactggaagcccgacgacgtgttctggtgcacggccgacatcggctgggtcacgggccactcgtatatcacgtatgggccgctcgccgtcggcgcgacgcaggtggtgttcgagggcgtgccgacctatccgaacgcgggccgcttctggaagatgatcggcgaccacaaggtcaccgtgttctacaccgcgccgaccgcgatccgctcgctgatcaaggcggccgaggccgacgaccgcgtgcatccgaggagctacgatctgtcgagcctgcggatcatcggcacggtcggcgagccgatcaatccggaagcgtggatctggtatcacaagaacgtcgggcaggcgcgctgcccgatcgtcgacacctggtggcagaccgaaacgggcggccacatgatcacgccgctaccgggcgcgacgccgacggtgccgggctcgtgcacgctgccgctgccgggcatcatggccgcggtcgtcgacgagacgggccaggacgtgccgaacgggcagggcggcattctcgtcgtcaagcgcccgtggccggcgatggcgcgcacgatctggggcgacccggagcgcttcaagaagagctatttccccgaggagctcggcggccgcctgtatctggcgggcgacggcaccgtgcgggacaaggaaaccggctacttcacgatcatgggccgcatcgacgacgtgctgaacgtatcggggcaccggctcggcacgatggagatcgaatcggcgctcgtgtcgcacgagctcgtcgccgaggcggccgtcgtcggacggccggacgacacgacgggcgaggcggtcgtcgcgttcgtcgtgctcaagcgctcgcggccggaaggcgaggaggcggccgcgctcgcgaagacgctgcgcgactgggtcggcaaggagatcgggccgatcgcgaagccgaaggacatccgtttcggcgataacctgccgaagacgcgttcgggcaagatcatgcggcgcctgctgcgctcgctcgcgaagggcgaggcgatcacgcaggatacgtcgacgctcgagaaccccgcgattctcgaacagctcgccgaagtgcgc

SEQ ID NO: 14228 - DNA, 708 bp, Burkholderia mallei
gtgacgcccgtattgacccacccgatgaaatcgactcgaccttttcacccgaccccagttattacgatcgacggcccgacggcgtccggcaagggcaccgtcgcggcgctcgtcgccgcgcatctcggctttcacctgctcgacagcggcgcgctgtaccggctcgcggcgctcgcgagcatccgctatcaggtcgagccggacgacgccgacgcgctcgccagcctggtcgacggcctgcacatcacgttccgcgagggctgcgcgcagctcgacggcgtcgacgtgtccgacgagatccgcgcggaggcggtcggcaaccgggcctcggcgatcgcggtccatgcgagcgtgcgcgcggcgctcgtcgcgcggcagcgcgcgtttcgcaagacgcccgggctcgtcgcggacggccgcgacatggggacgctgatcttcccggacgcggtgctgaaggtattcctgacggcgagcgtcgaggcgcgcgccgcgcgccggcataagcaattgatgcaaaaaggtttttctgctaatatagataacttgctccaggatttgcgggagcgcgacgcgcgcgacagcaaccgcgcggccgcgccgctcaagcctgcggcggacgccaagcccctcgacacatcggccttgacgatcgagcaatcggtcgaacaggtgctcgcgtggtaccgggaactcggccagcccgcc

SEQ ID NO: 14229 - DNA, 1077 bp, Burkholderia mallei
gtgcgcacgcgcgcgtcgatgcggccgccgcacaccatcatgctcgttctcggcatcgaaagctcctgcgacgaaaccggcctcgcgctctacgacaccgagcgcggcctgctcgcgcacgcgcttcactcgcagatcgcgatgcaccgcgaatacggcggtgtcgttcccgagctcgcgtcgcgcgaccacattcgccgcgcgctgccgctgctcgaagaggtgctcgccgcaagcggcgcgcgccgcgacgacatcgacgcgatcgcgttcacgcaggggcccggcctcgcgggcgcgctgctcgtcggcgcgagcatcgcgaacgcgctcgcgttcgcgtgggacaagccgaccatcggcatccaccacctcgaagggcatctgctgtcgccgctgctcgtcgccgagccgccgccgtttccgttcgtcgcgctgctcgtgtcgggcggccatacgcaactgatgcgcgtgagcgacgtcggcgtctacgagacgctcggcgagacgctcgacgatgcagccggcgaagcgttcgacaagaccgcgaagctgctcggcctcggctatccgggcgggccggaggtatcgaggctcgcggaagccggcaccccgggcgcggtcgtgctgccgcggccgatgcttcattcgggggatctcgacttcagcttcagcgggctgaagaccgccgtgctcacgcaaatgaagaagctcgaagcggcgcacgcgggcggcgccgtgctcgagcgggcgaaggcggatctcgcgcgcggcttcgtcgacgcggccgtcgacgtgctcgtcgcgaagtcgctcgccgcgttgaaggcgacgcggctcaagcggctcgtcgtcgccggcggcgtgggcgcgaaccggcaattgcgcgcggcgctgtcggccgccgcccaaaagcgcggcttcgacgtccattatcccgatctcgcgctctgcaccgacaacggcgcgatgatcgcgctcgcgggcgcgctgcggctcgcgcgctggccgtcgcaggcgagccgcgattacgcgttcacggtgaagccgcgctgggatctcgcgtcgctcgcgcga

SEQ ID NO: 14230 - DNA, 567 bp, Burkholderia mallei
ttgaagacatccgcccatcgcctcgtcgagatcgcgccgcacacgcacggcgtcgacgtcgatctcgtctacgcgaccgagcgcaatctgaccggccagccgatctaccggcgcgcgcactgcctgctgctcgagccggccgaagcggcgctgcgccgcgcggtcgcggtcgccgcgcgaagcggcctgcggctgagaatctatgacgcataccggccgccgcgggcgcagcggatactgtgggacttcctgcccgatccgaacttcgtcgccgatctcggccgcggctcgaatcacagccgcggcaccgcgctcgacctgacgctcgtcgacgcgaacggcgacgcgctcgacatgggcacgggcttcgacgagatgatcgccgcgtcgaatcatttccacgacggcctgcccgagcccgtgcagcgcaaccggctgctgctgctcggcgtgatgcacgcggcgggcttcacgcacatcgcgagcgagtggtggcattacgagctgcccggctcacgcgcgctgccgctgatcgacgaagaagcgggcggaccgtggcggctgatg

SEQ ID NO: 14231 - DNA, 1710 bp, Burkholderia mallei
atgtccgacctgcaaacctccaacccgaataccgaatcctttgcggctctgttcgaagagtcgctgacccgccaagacatgcgcgccggcgaagtgatctccgccgaagtcgtgcgtgtcgaccacaacttcgtggtcgtcaatgccggcctgaagtccgaggcctacattccgatcgaggaattcctgaacgatcagggcgaggttgaggttcaggcgggcgatttcgtttccgtcgcgatcgacgcgctggaaaacggctacggcgacacgatcctgtcgcgcgacaaggcgaagcgtctggcttcgtggctgtcgctggaaaaggcgctcgacaacaacgaactcgtcacgggcacgatcaccggcaaggtgaagggcggcatgacggtgatggtcaacggcatccgcgcgttcctgccgggctcgctcgtcgacacgcgtcccgtcaaggacacgaccccgtacgaaggcaagacgctcgagttccgcgtgatcaagctcgaccgcaagcgtaacaacgtcgtgctgtcgcgccgcgcggtgatcgaagccacgcaaggcgaagagcgcgcgaagctgctcgagacgctcaaggaaggcgcgatcgtcaacggcgtcgtcaagaacatcaccgattacggcgcgttcgtggacctcggcggcatcgacggcctgctgcacatcaccgacatcgcatggcgccgcgtgcgtcacccgagcgaagtcctgtcggtcggccaggaagtcaccgcgaagatcctcaagttcgaccaagagaagaaccgcgtgtcgctcggcatcaagcaactgggcgacgatccgtgggaaggcatctcgcgccgttacccgtcgggcacgcgcctgttcggcaaggtcacgaacatcaccgactacggcgcgttcgtcgaagtggaatcgggcatcgaaggcctcgtccacgtgtcggaaatggactggacgaacaagaacgtcgctccgtcgaaggttgtccagctcggcgacgaagtcgaagtcatggtgctcgagatcgacgaagatcgtcgtcgtatcagcctcggcatgaagcagtgcaagccgaatccgtgggacgacttcagccgcaacttcaagaagggcgacaagatcacgggcgcgatcaagtcgatcaccgatttcggcgtgttcatcggcctgccgggcggcatcgacggcctcgtccacctgtcggacctgtcgtggagcgaagccggcgaagaggctgtccgcaagtacaagaagggcgatgaagtcgaggcgatcgtgctcggcatcgacgtcgagaaggaacgcatttcgctcggcatcaagcagctcgaaggcgatccgttcagcaactacgtcgcgatgaacgacaagggttcgatcgtcgacggcgtcgtgaagtcggtcgatgcgaagggcgcggtcatcacgctgacgccggacgtcgagggctacctgcgtgcgtcggaaatctcgcaggatcgcgtcgaagacgctcgcaacgtgctgaaggaaggcgagaaggtcaacgcgatggtgatcaacatcgatcgcaagtcgcgcggcatcaacctgtcgatcaaggcgaaggattcggccgagcagcaggaagcgatgcgcggcctgcaagccgattcgagcgccgctgcgaccggtacgaccaacctcggcgcgctgctgaaggcgaagctcgacggccagaaccag

SEQ ID NO: 14232 - DNA, 1338 bp, Burkholderia mallei
ttgatacagatcttcgcgctcatcggcgcgttgctcctcgtggccctcaacggctttttcgtcgccgccgaattcggtctcgtcaaactgcgcgcgacgcgcgtgaaaaccctcgcccgccagcacggcctgcgcggacgcatcctgcggatcgtccatgcgcggctcgatgcgtacctgtccgcctgccagctcggcatcacgctcgcgtcgctcggcctcggctggatcggcgagccggcgttcgccgcgctgctatcgcccgtgctcgcgttcgcgggcgtcgaatcggaaaagctcgtgcatctgatctcgctcgtgttcgcgttctcggtgatctcgttcctgcacatcgtcgtcggcgagctcgcgccgaaatcgatggcgatccgtcaggccgagaagacgggcctctgggtcgcgctcccgctctatgcgttctactgggcgatgtatccggcgatctgggtgctcaacacgagcgcgaacgcggtgctgcggctcgcggggctgtccgccgatcacggcggcgacgcgcactactcgaccgacgagctgaagctgatcctgcgcagccgccgcaacgcggccggcgccgcgaaagcgccgaagcacgcgtacagcaacgacgaatggaacacgctcgcgcactcgctcgatttttcgtcgatgaccgtatcggatctgatgcgccccgcgcacgagatggtgggcctgcgccgcgatctgccgctcgcggacaacatggaagtcgtcgcgcgccaccgcttcagccgctatccgctgttcgacgaccaatcgcgcgaaaccgtgaacggcctcatccacctgaaggatctgctgctcgcgcggcacgcgggcgcggcgctcgccgatctgtccgattatgtgcgcccggtgcagtacgtgaagccggacacgcccgcgctcgacctgttccggcgcttccgcaagggcgcgccgcacttcgcgctcgtcggcaagaaaggcgagaagccgatcggctttctcacgctcgacaacctgctcagcgcgctcgtcggccagatccacgacgaattccggcagggcgattcggactggagccggctcgacgacggcacgctgatcggcaagggcagcctgcccgtcgtgtcgctcgagcaggcgctcggcatcgacatcgacgaagggcgcgcggaatcggtcggcggcctcgtcattcaggcgctcaacgatctgccgacggaaggccggcgcgtatcgttcgatcgcttcgacatcgtcgtgaaaaagatgatcgggccgcgaatcgtgctcgtgcgcgtgtatccgaagtcgcccaaggaagcggacgag

SEQ ID NO: 14233 - DNA, 417 bp, Burkholderia mallei
atggatacgctctcgtcgcgtgttcaatcgttcatggaggccgtgatgtctttttctcttcatcgtgtcgtgttgccgctcgtcgccgcgggcgcgggcgtttgcgcgctcgccgcgccgcttgccgcaagcgccgacgagatcgtcgtcgagcaggcggtgcccggcgtcgtcgtcgcgccggcgatgcgcgaagtcgtcgtcgtcgcgccgagcgcgccgccgcccgtgcgctacgaggtcgtgcccgagccgcgcgtcgggtacgtgtgggatcgcggccactggcgctgggatcacgatcgctatgtgtggatcgccgggcattgggaagtcgagcgcatcggcatgcactgggcgccgggccactggtcgcagcgcggcccgggctgggtctgggtccgcggccactgggcc

SEQ ID NO: 14234 - DNA, 969 bp, Burkholderia mallei
atgaaacagtatctcgatctcgttcgcaccattctcgataccggcacctggcagagcaaccgcacgggcattcgcacgatcggcatccccggcgcgatgctgcgcttcgatctgcagcagggctttcccgcagtgacgacgaaaaagctcgcgttcaagtccgcgatcggcgagctcgtcggctttctgcgcgcgacgcgcagcgcggccgatttccgcgcgctcggctgcaaggtatgggacgcgaatgcgaatgagaacgcgcagtggctcgcgaatccgtatcgccgcggcgtcgacgacctcggcgacgtgtacggcgtccaatggcggcgctggccgggctacaaggtgctcgacgcgcatgccgacgcgcagatcgccgatgcgacgtcgcgcggttttcgcgccgtcgcgcgcttcgacgaggacggcgcgcagaaggtgctgctacacaaggcgatcgaccagttgcgagactgcctcgacacgatcgtgcgcgacccgtcgagccggcgcatcctgttccacggctggaatcccgcggtgctcgacgagatcgcgctgcccgcgtgccatctgctgtatcaattcctgccgaatgtcgagcgtcgcgaaatctcgctgtgcctgtacatccgcagcaacgacgtcgggctcggcacgccgttcaatctcgccgaaggcgcggcgctcctcacgctcgttggccggctgacgggctatacgccgcgctggttcacgtacttcatcggcgatgcgcacatctacgagaatcagctcggcatgctcaagcagcagctcgaacgcgagccgttcgacagcccgcggctcgagatcgccgagcgcgtgcccgagtacgcgaaaacggggcagtacgagccacaatggcttgaacgcatcgagccgtcggatttcacgctcgtcggctatcgtcaccacgaaccgctgagcgcgccgatggccgtt

SEQ ID NO: 14235 - DNA, 1395 bp, Burkholderia mallei
atgagcgagcggcgcttcgcgccctcgacgcgttttggtcccggagcagtcttgagcacacacgcaaccgacgactgggtcgcgcgcagcctgcgcgcggtctggcatccttgcacgcagatgaagcaccacgagcggctgccgctcattccggtcgcgcgcggcgaacgcgcgtggctgttcgatcgcgcgggcaatcgctatctcgacgcgatcagctcgtggtgggtgaacctgttcggccacgcgaatccgcgcatcaacgcggcgctcaagcagcagctcgacacgctcgagcacgcgatgctcgccggctgcacgcacgaaagcgcgatcgagctcgccgaacggctcgccgcgcgcacgcagcacacgctcggccatgcgttcttcgcgtcggacggcgcgtcggccgtcgagatcgcgctgaagatgagctttcacgcatggcgcaaccgcggccgcggcgacaagcgcgaattcgtctgcatcgcgaacggttaccacggcgagacgatcggcgcgcttggcgtgaccgatgtcgcgctgttcaaggacgcctacgatccgctgattcgcgcggcgcacgtcgtcgcttcgccggacgcgcgcggcgcgcgcgacggcgaaaccgcggccgacgtggccgcgcgcgcgctcggcgacgtgcggcgcctgttcgccgagcgcggcgagaagatcgccgcgctgatcgtcgagccgctcgtgcagtgcgcggccggcttcgcgatgcacgatccgtcgtacgtgcgcggcctgcgcgcgctgtgcgacgcgcacgacgtgcatctgatcgccgacgagatcgccgtcggctgcgggcgcaccggcacgttcttcgcgtgcgagcaggcgcacgtgtggcccgatttcctgtgcctgtcgaaaggcatcagcggcggctatctgccgctgtcgctcgtgctctcgcgcgatgcgatcttcgatgcgttctacgacgacgacgtgacgcgcggcttcctgcattcgcattcgtacacgggcaatccgctcgcgtgccgcgcggccgtcgcgacgctcgagctgttcgacaccgacgacgtgctcgccgaaaacgcacgcaagtccgcgctgatgcgtgaggcgctcgcgccgctcgcgtcgcatccgcacgtgcgccacctgcgcgagcgcggcacgatcttcgcgttcgacgtcgcgctcgaaggcgacgcggcgaggacgttcccgcgccgcttcttcgagcacgcgctcgcgcgcgagacgctgctgcgcccgatcggcacgacggtctacctgatgccgccttacatcctcgacgaaggcgagatcgaatggctcgcctcgcgcacgcgcgcgacgctcgacgcaacgctgtcggaggcccacgca

SEQ ID NO: 14236 - DNA, 3810 bp, Burkholderia mallei
atgagtcacgtcgcgccatccggcccgtcggcgagcgagctcgacgtgttcgcgtgtccgctcgacggtgtgaaccagatcgaggcgtccgcgggcaccggcaagacctggaacatctgcgcgctgtacgtgcgcctgctgctcgaaaaggatctcggcgcggacgagattctcgtcgtcacgttcacgaaggcggcgacggccgagctgcacgaacggattcgcgcgcgcctcgcgcagctcgcgcacgcgctcgacacgggcgacgacggcggcgatccgttcatcgcgcgcctgttcgagacgacgctcgcgcccgagcgcgggctcgatccgcaaacggcggcgaagcgcgtgcgtcgcgcgctgcgcgcattcgaccaggcggcgatccacacgatccacgcgttctgccagcgggcgctgcaggaagcgccgttcgcggcggcgatgccgttcgcgttcgagatggaagcggacgacggcgcgctgcgcttcgagctggccgccgatttctggcgcacgcgtgtcgagcccgtcgcggcggcctatccggcgttcgccgagtggctcgtcgagtacggcgcggggccggcggcgctcgacgcgcagctcgcgcggcggctgaagaagccgctggcgcgactgcgctgggacggcttgcacgcggccgacgacggcgcggaaagcgccgcgcgcgcgcacttcgatacggcggccgcgatctggcgcgacgagcgcggcgtgctcggcacgctgctcgccgacgcgcagccgtcgttgaaccagcgctcgcacaagccggaggcggtgagcgaggcgctcgacgcgtgggcgcgttatttcgagcaggcgagtgcggtggccgcgttgccgcgcgcggcgctcaagctcacgcagtccgcgctcgagaaagcgacgaaaaagggcggcgcgacgccgcgccacgcgttcttcgacgtcgcgcaggcgctcgaggcggctgtcgccgcgctcgaggccgcgcagcgcgcgcgctggctgtcgctcgtcgagcaatggctcgacgcggcgcccgccgagctcgcgcagcgcaagcgcacgcgccgcgtcgtatcgttcgacgatctgctcgcgaacctgtatcgcgcgctcgacgcgcatccgtggttgcgcgagacgctgcgcgcgcgctatccggccgcgctcatcgacgaattccaggatacggacccgctgcagttcgcgatcttcgatacgatcttcgcgcccgccggcccgctctttctcgtcggcgatccgaagcaggcgatctacagcttccgcgcggcggacctgcacacgtatctcgccgcgcgcgcgcgggcgtccgcgcgctacacgctcgcggtgaaccagcgctcgacgcccgcgatcgtcgatgcgtgcaaccgcgtgttcggcgcgaacccgcgcgcgttcgtgctcgacgggctcgattacgaaccggtgcgcgcgggctcgcgcgtgcgcgcgccgcttgtcgacgcgaccgatccgcttgccggcgcgggcgacttccgcatatggacgctgcccgccggcgacgacgtgctgaccaagcgcgacgcgcagcggcacgccgcgcatgcatgcgcggcggaaatcgcgcggctgatgcggggcgcgcgcgagcgcgcggtgacgctcggcggcgagccgctcgcggcgtccggcatcgcggtgctcgtgcagacgcaccggcagggcagtctcgtgaagcgcgtgctggccgcatggggaatcggcagcgtcgagctcgcccaggcgtcggtattcgcaacgatcgatgccgagcagctcgagcgcgtgctggccgccatcgacgcgccgggcgacctgcggcgcctgcgctcggcgctcgcgtccgactggttcgggctcgatgcggcggcgctctggcgcctcgagcagggcgatgccgagcaggacggcatcgacgccgccgcccgcggcgcgagcggcaacggcggcggcgcgcgcgccgcatcggcgggcgcgcccgcgccgtcgcccgcggacgccgatgcgatgggctgggtcgagcgcttctcgcgctaccggctgctgtggcgcgagcgcggcttcgcggtgatgtggcgcacgctcgccggcgagctgcgcatcgccgagcggctgatggcgggggcggacggcgagcggcgcgtgaccgacgtcaatcacctcgccgagctgacgcaggcgcgcgcgtccgcgcagccgggcatcgcgccgacgctgcgctggcttgccgcgcagcgcctcgaaggcggtggggacgacgcgcagttgcggctcgaatccgaccgtaacctcgtgcagatcgtcaccgttcacaagtcgaaggggctcgaatacgcgatcgtgttctgtccgttcctgaacgacggcgggctgcgcgagccggccggctccggcctgcccgacgcgcgcgagtaccacgacgaatcgggctgcgcggtgctgcattacggctgcgacgacgaagcggccgagcgcgcgtcgcgcgaggcggtgcgcgagcaggcggccgagcgcgcgcggctcgtctacgtcgcgctcacgcgcgccgtctatcggtgctatctggtcgcgggcacctatcagtcgtcgcgttcgacgaaggaggcgcggcgcagcgtgctgaactggcttgtcgcgggcgcgggccgcgatttcgatgcgtggctgaaggagccgcccgaagacgcggagctcgccgagcgctggcaggcgctcgcgggcggcccggtgacgctcggcgcgctgccggtgcccgcgcatcgcgagccgctcgcggccgggcacgatgcgcaggcgacgcgagccgcgcgacgtgcgacgcgtggcttgcgcgacgcatggcggatcgcgagcttcagctcgctcgcatcggcgatcgcgcgcgatgagagcggcatcgcgcgcgcggccgacgacgagatgcgccccgatcatgacgcgcttgccgccgcgctcggcgcggacgcgctcgagccgccggacgcggccgccgcgatcgcgccggcgcccgccgccgcgccgcgcgagctcgccgaagacgacatcctcgcgttcccgcgcggcgcggcggcgggcgaatgcctgcaccggctgctcgagctgagcaatttcgccgatgcgtcgacgtggccgcccgccgcgctgcgcgcgctgcacgagcgcccggtcgaggcggagctcgcgctggccgagcggctgcccgcgatgatgacgcggctcgtcgccgatctcgcggcgacggagctcgtgccgggcatgcgcctcgcggcactcgatccggcgcggcggctcacggaaatggagttcctgtttcccgcgcccgcgctcgatttcaacgcattgcggcgcttgctcgccgcgcacggctatccggacgtcgcgctcgaagcgggcacgctggccggattcgtcaaaggattcatcgacatgatcgtcgagcacgacggccgcttctggatcgtcgactggaaatcgaatcatctcggcacgacgcccgaagcatacggcgagcgggcgctcgacgccgcgatggcgcatcacgcgtatcacctgcaggcgctgctctatatggtcgcgctgcatcgctatctgcgcgtgcgcatgcgtggctacgactacgacgcgcacatcgcgggctatctgtacgtgttcgtgcgcggcgtgcgtcccgattggcgaaatggcggcgcgagcgccggcgtgcatgcgcggcggcccgcacgcgcgctgatcgaggcgctcgacgcgctgatgcgcgagggggatgca

SEQ ID NO: 14237 - DNA, 1164 bp, Burkholderia mallei
atggcgttccaactcacaccgctgcgcgtcgcgctcgtcgcgggcgagccgtcgggtgatctgctcggcgcgtcgctcctcggcgggctgcatgcgcggctgcccgcgtcgtcccgctactacgggatcggcgggccgcgcatgagcgccgtggaattcgatgcgcactggccgatggaaaagctcgcggtgcgcggctacgtcgaggcgctcaagcacatccccgagatcctgcgcattcgcggcgaactcaagcgccagttgctcgccgagccgcccgacgcattcgtcggcatcgacgcgcccgatttcaacttcggcctcgagcaggcgttgcgcggcgccggcattccgacgatccacttcgtctgcccgtcgatctgggcatggcgcggcggccggatcaagaagatcgtcaaggccgtcgaccacatgctgtgcctgttcccgttcgagcccgaactgctcgagaaggcgggcgtcgcggcgacgttcgtcggccatccgctggccgacgagattccgctcgagcccgatacgcacggcgcgcggatcgcgctcgggctgccgggcggggggcccgtgatcgcggtgctgccgggcagccgccgctcggagatcgagttgatcggcccgacattcttcgacgcgatggaactgatgcagcagcgcgagcccggcgtgcgcttcgtcgtgccggccgcgacgcccgcgctgcgcgcgttgctgcagccgctcgtcgacgcgcatccgtcgctgtcggttacgctgaccgaggggcgcgcgcaggtcgcgatgacggcggccgacgcgatcctcgtgaaaagcggcacggtgacgctcgaagcggcgctgctcaagaagccgatggtgatttcgtacaaggtgccatggctcaccgggcagatcatgcgccggcagggctatctgccgtacgtcggcctgccgaacattctcgcgggccgcttcgtcgtgcccgagctgctgcagcatttcgcgacgcccgacgcgctcgccgacgcgacgctcacgcaactgcgcgacgatgcgaaccgtcgcgcgctcgccgacattttcaccgacatgcatctcgcgttgcgccagaataccgcgcagcgcgcggccgaggccgtcgcgcacgtgatcgacagcaggaagccgcgc

SEQ ID NO: 14238 - DNA, 609 bp, Burkholderia mallei
ttggcgcgtcggccttcggccggttccgggaggcgcggagtcgcgcgccgcgcgggcttgccgcatgctggtcgcggttgggctgcgcggcgggcagacggtcgtttgccgcgtcaagccttctctatccgcgtccgccttcgcggccggctgccgaaggcgcgctttcgcgcgcccgacaaccagctgcggctgccgacatcgagcttgccgcgccggctcgcgctcgcgaacaacgaggctcatgcgcaggcactcggccagctcgaccgcgagatggcgcggctcaatctcgacgggtcggcgcttgccgaccgtgttcgcgcggaattgacgttgaccgagagcggttatccgtcgctcgcgcggctcgcgtcgaagctgttcctgtccgaacgcacgccgaaacgccggttgcaggcgcacggcacgccgtatcggaacatgctcgaggccgcgcgctatcgcgacgcgtgccggttgctgacgcgcaccgatcggtgcgtcgccgatgtctcgacgcggctcggctatgtgaatccttccgcgttcacgcgcgcctttcgccgctgggccggcatcgcgcccagccgctatcgcgacgaccgc

SEQ ID NO: 14239 - DNA, 1359 bp, Burkholderia mallei
atggaattcgactacgatctctttgtcatcggcgcgggctcgggcggcgtgcgcctgagccgcgtcgcggcgtcctacggcgcgcgcgtcggcatcgccgaggaagagcgcatcggcggcacctgcgtgctgcgcggctgcatcccgaaaaagctgctcgtctacgcgtcgcattacagccacgacgtcgaggacgccgcgggctatggctggaccttcgacatcggcctgttttcgtggccgacgctcatcgaggcgaaggaccgcgagatcgcgcgcctgagcggcatctacgtcgatctgctgaacaagtcgggcgtcgagatccatacggggcgcgcgacgctcgtcggcgcgcatacggtcgacgtcgcgggccggcgtgtcaccgcccggcacatcgccgtcgcgacaggctcgcggccggtgctgccgccgattcccggcatcgagcacgcgatcacgtcgcgcgaggcgctcgagttgcccgagctgccgcagcggatcgcgatcgtcggcggcggctacatcgcggtcgagttcgcgggcatcttcaacgggctcggcgtcgatgtcgacctgttctatcgcggcgagcagatcctgcgcggcttcgacgacgacgtgcggcacgcgttgcatggcgagatgacgaagcagggtgtcgccatccatacgcgcgcgacgatcgaggcgatcgagcgcggcgccgacggcgggttgacgctcaggctcgccgagggcgcgtacgggccgtacgacgcggtgctgtatgcgacggggcgcgtcgcgaatggcgacgggctcgggctcgaggcggtcggggtcgcgcgcgacgcgaacggcgcgatcgaggtcgacgcctattcggcgacgacggtgccgtcgatccacgcgatcggcgacgtcaccgcgcgcccgcaactgacgcccgtcgcgacgcgcgacggcatgctgctcgcggcgaacctgttcggcggcaagcggatcgccgccgatcatcgctacgttccttccgcggtgttcagccagccggagatcgcgacggtcgggctcaccgaggcgcaagcgcgcgccgagctcggcgcgctcgacatctacaagacgtcgttccgcgcgctgcggcacacgttgtccggccgcgacgaaaagacgttcatgaagctcgtcgtcgcgcgcgacagccagcgcgtcgtcggcgcgcacatggtcgggcgcgacgcggcggagatcatccagggcatcgcgatcgcgatccgggcgggcgcgacgaaggcgcagttcgacgagacggtcggcatccatccaaccgcggccgaggagttcgtcacgttgcggcagaaggagccggacgacgca

SEQ ID NO: 14240 - DNA, 2784 bp, Burkholderia mallei
atgacacaacgcactccttcaaaacacaagcaacgcggatttctccattacggcgcgcggggcgacggcgacgccggccgcccgatgcgcatcgaatacgcatccgcgcaaccgctcgccgatacgctcgcgcatcttcgcacgagcgagtgcggcctcacgacgcccgacgcgaggcagcgcctgctcggcgacggcccgaacgaaatcgcgcacgacaagccgccgcactggagccggcagttgctcgcggcgctgaacaatccgttcgtctacgtgctgctcgtgctcgccgcgatcagtttgctcaccgacgtctatttcgccgacccgggcgatcgcgactacgtgaagatcacgatcctgctgtctatggtgacgatcagcgtgctgctgcgcttcgtgcaggaattccgctcgctgcgcgcggccgaaaagctcaaggcgatggtccgcacgacggcgaccgtgcagcgccgcgccgacgacgcgagcgcgccgatcaggcacgacgtgccgatgcgcgaagtcgtcgtcggcgatatcgtgcatctgtcggcgggcgacatgattcccgcggacgtgcggctgatctcgtcgcgcgacctcttcatcagccaggcggtgctcacgggcgaggcgctgcccgtcgagaagtacgacacgctcggcgccgtcgcgcaaaagtcggccgatccggcgagccgctccagcggcgccgccgtgcgcctcgagcgcgtggaacacggcggctcgctgctcgatctcgcgaacgtgtgcttcatgggcaccaacgtcgtgagcggcaccgccaccgcggtcgtcgtcgcgacgggcggcgatacgtacttcggcgcgctcgcgaagaacgtcgtcagccacaagcgcatcgagacgagcttcgatcgcggcgtctcgagcgtgagctggctgctgatccgcttcatgctcgtgatggtgcccgtcgtcttcatgatcaacggcctcacgaaaggcgactggctgagcgcgctcacgttcgcgctcgcggtggcggtcggcctcacgcccgagatgctgccgatgatcgtcagcgcgaacctcgcgcgcggcgcgatcgcgatggcgcggcgcaaggtggtcgtcaagcggctgaactcggtccagaacttcggcgcgatggacgtgctctgcaccgacaagacgggcacgctcacgcaggacaagatcatcctcgagcatcatctcgacgtgtcgggccgcaagaacgaggacgtgctgcggctcggctggctgaacagcttccatcagagcggccagaagaacctgatcgacatcgcgatcgtcgagcgcgcgaaccagctcggcgaatggatcaagccgcagggctaccgcaagatcgacgagctgccgttcgacttcgtgcgccggcgcctgtcggtcgtcgtcgaggatccgcgcggcacgcatctgctcgtctgcaagggcgcgctcgaggagatgctcgccgtctcgacgcacgttcaggatgacgaaggggtgcatccgctcgatttcgtcgcgcgcaagcggctgctcgcgcaggcgaatgcgtacaacgaagacggctttcgcgtgctgatcgtcgcgacgcgcacgatcgcgcgcggcgacgaacgcgagcagtaccgcacggccgacgagcgcgacctcgtcgtgcgcggcttcctcacgttcctcgatccgccgaaggaatcggccgcgcccgcgctcgccgggctgcgcgagaacggcgtcgccgtgaaggtgctcacgggcgacaacccgaccgtcacgctgaacgtctgccggcaggtcggccttgcgcccggcaagccgctgctcggcaccgaaatcgaggcgctccacgacgcggcgctcgagaaggccgtcgagcacacgacggtgttcgcgaagctcacgccgctgcagaaggcgcggatcgtcaaggcgctgcaggcgaacggccacacggtgggcttcctcggcgacgggatcaacgacgcgccggcgctgcgcgacgccgacgtcggcatctcggtcgacagcggcgcggacatcgcgaaggagacggccgacatcatcctgctcgagaagagcctgatggtgctcgaggaaggcgtgatcaagggccgcgagacgttcggcaacatcctcaagtacctgaacatgaccgcgagctcgaacttcggcaacgtgttctcggtgctcgtcgcgagcgcgttcctgccgtgggagccgatgctcgccgtgcagatgctcgtgctgaacctcatctacgacacgtcgcagatgctgctgccgtgggacaagatggacccggagttcctgaagaagccgcgcaagtgggaagcgaacaacatcggccgcttcatgctgtgggtggggccgacatcgtcggtgttcgacatcacgacctacgtgctgatgtggacggtgttcggcgcgggcgcgctctaccacgcgcagggcggcgcggccggccagctggtgatgaactccggctggttcgtcgagagcctcgtgtcgcagacgctcgtcgtccatctgctgcgcacgcagaagatcccgttcctgcagagcaccgcttcgctgcccgtgctgctgtcgacgacgatcgcgatcgcgatcggctgctggctgccgttctcgccgttctccgaagcgctcggcttcatccgcctgcccggcagctactggctgtggctcgccgcgacgatgatcggctacatcgcgctcgcgcagatcgtgaagacgctctacgtgcgccgctacaagcggtggttc

SEQ ID NO: 14241 - DNA, 1458 bp, Burkholderia mallei
gagcgcgccgcggtgatggccgtcgattcgacgttcacgacgctcgatccgtacgattcgaacgacacgctgtcgcaggcggtgtcgaaatcgttctatcagggcctgttcggcttcgacaaggacatgaagctcgtgaacgtgctcgcgaccggctacgaagcgagccccgacgcgaaggtctacacgatcaggctgcgccagggcgtgaaattccaggacggcaccgatttcaacgcggccgcggtgaaggcgaacttcgaccgcgtgaccgatccggcgaacaagctcaagcgctacaacctgttccgccggatcgcgaagaccgaggtcgtcgatccgtacacggcgaagatcacgctgaccgagccgttctcggcgttcatcaacgtgctcgcgcacccgtcggccgtgatgatctcgcccgccgcgctgaagaagtacgggcgcgagatcgggctgcatccggtcggcaccggcccgttcgagctcgtcgaatggaagcagaccgacgacctgaaggtgaagaagttcgcgggctactggaaggccggctatccgaagatcgacgcgatcgactggaagcccgtcgtcgacaacaacacgcgcgccgcgctgatgaagacgggcgaggccgatttcgcgttccgcattccgttcgagcagacggccgagctgaaggcgagcccgaaggtcgacgtgatcgagcgcgcgtcgatcatccagcgctacgtgagcctgaacgtgatgcaaaagccgttcgacaacccgaaggttcgccaggcgctgaactacgcggtcaacaaggaggcgctcgcgaaggtcgcgttcgccggcaacgcgacgcccgccaccggcatcgtgccgcagggcgtcgattacgcggtgaagctcggcccgtggccgtacgatccggcgaaggcgcgcgcgctgctcaaggaggcgggctacccgagcggcttcgagacgacgctctggtccgcgtacaacaactcgacgtcgcagaaggcgatccagttcgtccagcagcagctcgcgcaggtcggcgtgaaggcgcaggtgcaggcgctgaggcgggcgagcgggtcgcgaaggtcgagagcgcgcaggacccggcgaaggcgcccgtgcggatgtactacatcggctggtccgcgtcgacgggcgagtcggactgggcgatctcgccgctgctcgcgtcgtcgtcgattccgccgaagctcgtgaataccgcgtactaccggaacgatgccgtcgacgccgatctcgcgaaggcgctcgagacgaccgatcgcgcgaagaaggccgagctgtacgcggacgcgcaaaggcgcatctgggccgacgcgccgtggattgcgctcgtgcaggagaagatcgtctacgcgcgcagcaagcgcctgcagggcgcgtacgtgatgccggacggctcgttcaacttcgacgagatcgcgatca

SEQ ID NO: 14242 - DNA, 1056 bp, Burkholderia mallei
atgaatgcttccgttcccgcctcgctgaccctcgcccgccccgacgactggcacctgcacgtgcgcgacggcgcgatgctcgcggccgtcctgccgcacaccgctcgccagttcggccgcgcgatcatcatgccgaacctgaagccgcccgtcacgacgaccgcgcaggcgcaggcctaccgcgagcgcatcctggccgcggtgccggccggcatgacgttcgagccgttgatgacgctgtacctgaccgacaacacgcccgccgacgaaatccgccgcgcacgcgaaagcggctgcgtgcacggcgtgaagctctatccggcgggcgcgacgacgaactcggacgccggcgtgaccgacctgctcggcaagtgcgcgaagacgctcgaggcgatgcaggaagtcgggatgccgctgctcgtgcacggcgaggtgacggatccgtcgatcgacctgttcgaccgcgagaaggtgttcatcgatcgcgtgatggagccgctgcgccgcgcgctgccggggctcaaggtggtgttcgagcatattacgacgaaggatgcggccgactacgtgcgcgatgccgacgcggcgtcaggccggatcggcgcgacgatcaccgcgcaccatctgctgtacaaccgcaatgcgatgtttttcggcggcatccgtccacattactactgcctgccggtgctcaagcgcgagacgcatcggatcgcgctcgtcgaggcggcgacgtcgggcaatccgcgcttcttcctcggcaccgacagcgcgccgcacgcgaaaggcgcgaaggaagccgcgtgcggctgcgcgggctgctacaccgcgctgcacgcgctcgagctgtacgcggaggcattcgaccaggcgggcgcgctcgacaagctcgaaggcttcgcgagcttcttcggcgcggacttctacggtttgccgcgcagcgccgagacggtgacgctgcgccgcgagacgtgggagctgccgcgcgagatcgacgcgggcgccggcccggtcgtgccgctgcgcggcggcgaggcgatcggctggcggctcgtc

SEQ ID NO: 14243 - DNA, 888 bp, Burkholderia mallei
ttgccgcgccgcgcccggcacacctgtttgaactcactgggcgaattcatgaaactgctgcgatacggggcgaagtcccgagaaaaacccggcctgctcgatgcgcaggggcgcattcgcgatctgtccggcgtcatcgacgacgtcgcgggcgacgcgctcggccccgatgcgctcgcgcggctgcgcgcgatcgatccggcgagcctgccgctcgtcgacggcgcgccgcgcctcggcgcgtgcgtgggccgcgtcggcaagttcgtctgcatcgggctcaactattcggatcacgcggccgaatccggcatggacgtgccgagcgagcccgtcgtcttcggcaagtggacgagcgcgatctgcgggcccgacgacgacgtcgaactcccgcccggctcgacgaagaccgattgggaagtggagctcggcgtcgtgatcggcacgggcgggcgcgacatcgacgaagcgcgtgcgcttgcgcacgtggccggctattgcatcgtcaacgacgtgtccgagcgcgcgtaccagctcgagcgcggcggcacgtgggacaagggcaagggatgcgacacgttcggcccgctcgggccctggctcgtgacggccgacgaagtgccggacccgcaccggctgaagctgtggctcgacgtcgacggtcgccgctatcagcatggctcgaccgcgacgatgatctttcgcgtgccgttcctgatcagctacttgagccgcttcatgagcctgcagccgggcgacgtgatctcgaccggcacgccgccgggcgtcgggcttggtcaaaagccgcccgtctatctgcgcgcggggcaggtgatgacagtcggcatcgaagggctcggcgagcagcggcagcgggtcgtgcagcga

SEQ ID NO: 14244 - DNA, 195 bp, Burkholderia mallei
atgcctaagatgaagaccaagaagagcgctgcaaagcgcttcgtggtgcgtccgggcggtaccgtcaagcgcggtcaagccttcaagcgccacatcctgaccaagaaaaccacgaagaacaagcgtcacctgcgcggcgccacggcagttcacgattccgatctgaactccgtccgcgcgatgctcccgttcgcg

SEQ ID NO: 14245 - DNA, 1584 bp, Burkholderia mallei
atgggaggagaaaacgtggcacaggtggaatcacccagacaggcaacggcaggttcggcggagcaagccgccggcaagctcggcggattgctctcgctcgcattcctgctgggcctgatgacggtcatggccgcgttcggctggatcgcgctgcgcgaaggcacgcatcgcttcctgctcccgttcgtgaacggcaacgccacccggcagatcgccgacgcgatcgcatccgtccgtgcgcatccgtcgctcgaaggcatacgccaggtcagcgaggaaatatggatgatgtcgctgccgacgtcagtcacgcgtttcagccattccagactgatggagcaaggcatctattacacgacgatgcccagggtcaatcaggtgctcatcgcgattcacgtcctgttcagcgcgttctgcgtgacgttcgggagcctgcagttctggccgtcgttccgcaagcgcttcatgcgggcgcaccggctgatcggcgccgtatacgtcgccaccgtgccgatctcgacggtgagcgcactcgcctatctcgccctgacgccgccgcatcacctctacgcacacctgatcggctggatcgcgctgtggatattcggcgtcctgacgctcatcgcgatcgccatggcggtgcgcgccctcaaggcacgcaggattttcgaacaccaggcgtggatggcgctgtcgttcggctgcctgctggttgcgccactgctgcgcatcgactgggtgctgctcgcgccgctctttccccacatcgatcaggaaaccctgaacctcgtcaccatgggcgtcatgcttccgcaggcgcagctgatcacgtatgcgctgatcgccgtcaatcggcagtacgcgcggcccatgaagcaacgcacgccggcgccgctggcgagccgcgcgggcgcgtggtttcttcgatcgcaacccgggttgctcgcctcgaccgcggtgtggggcgccgtcaacgtgtgggcctacgggctcggacacggcaccgccggcctcgacgccgccgcccgcatgcttcccgccgatctgttgacgcgggagcaggaggcgctgcatgcgtatccgggcatcgcgtggctgatggcgctgtcgcttaccgcggcatttcccgccgccgtcctgagcctcggtgcgcggcttcgcgccgcgtcggcaagcgtcgccgcgcgtctcgatgccaccgccgcgtgcctgggactggccgcgggcgcggcgagcgtgttcctcggttggcacatcgggatcgcccccgacaatcacctgttctccggcggcacgatgtatacggtcaacgggctcgtcatcgccggcttcagcctgatgctcgccgcgaccgcacggcgccggcaacacgcgatcgcgaaggaaagcctcgtcttccttctttgcatgctgcccttccccgcgttgtatttcgcgacgctggaggccgtcggccgaattcggctgccggctgcgtacctggcggccggccaaggcttcgtgattccggtcggcttcagcagcagcctgctttttctggccgccttccatgtgatcttcggccaggcaacccgagagcacaac

SEQ ID NO: 14246 - DNA, 957 bp, Burkholderia mallei
atgcagacgatccgcatcagcccagcggtgctggcgatcacggccgccgcggcattgagcggttgcgcgacagtccagacgccgaccaagggcgacccgttcgaaggcttcaaccggacgatgtacacgttcaacgacaaggtcgaccagtacgcgctcaagccggtcgcgcgcggctatcagtgggcggtgccgcagccgatgcgcgacagcgtgacgaacttcttctcgaacatcggcgacgtctacatcgccgcgaacaacctcgtgcagctgaagatcgccgacggcgtcggcgacatcatgcggatcgtgatcaacacggtgttcggcgtgggcggcctgttcgacgtcgcgacgctcgcgaagctgccgaaacacgcgaacgacttcggcgtgacgctcggccactacggcgtgccgagcggcccgtacctcgtgctgccgctgctcggcccgagcaccgtgcgcgacacggcgggcctcgccgtcgactacgcgggcaacccgcttacctatgtacggcccgacggcgtgagctggggcctgttcgggctgaacctcgtgaacacgcgcgcgaacctgctcggcgcgggcgacgtgctcgaggcagccgcgatcgacaagtattcgttcgtgagcaacgcgtacctgcagcgccgccaggcactgatcggcggcgccacgggcgcgcagtcgaacctgccggattacggcaacgaggcgccgccgccgaattacgagatgccggaagagggcgccgcggcgcccgcgagcggcgcggcatcggcgccggccgccgcttccgcgcccacggcggcgtccggtgcggcgccgggcgcggccgagcccgcatcggccgcggcgccgaatccgagcagcgcgacgaacgtgcccgctcagcaggtcgtgccgccgtcgccgggcggcatccgtttcccgagcatccggctgcac

SEQ ID NO: 14247 - DNA, 612 bp, Burkholderia mallei
atgtttaccggaatcgtcgcggcggtcggccgcatcgaagcgatcacgccgatcgccgcctcgcccgatgcgggcgtgcgcctcacgctgcgcgcaggcgggctcgacctcgccgatgtcgcgctcggcgacagcatcgcgatccagggcgcgtgcatgacggtcgtcgcgaagacggccgacacgttcgacgtcgaggtgtcgcgcgaaagcctgaacaggacggtcggcctcgccgagccgggcgacgtgaatcttgaaaaggcgctgcgcgcgcacgaccggctgggcggccacatcgtgtccgggcacgtcgacgggctcggcaccgtcacgcgcttcgcgcccgtgggcgaatcgcacgaactgcgcgtgctcgcgccgcgcgagctcggccgctatctcgcgtacaagggctcgatcaccgtcaacggcgtgagcctcaccgtcaattcggtcgacgaccgcgacgacggctgcgaattctcgatcaacctgattcctcatacggtcgaagtgacgacgctgcggcacctgacggccggcgcgaaggtcaatctcgagatcgacatgatcgcgcggtatgtggagcggatgacgaacgcaccaaaa

SEQ ID NO: 14248 - DNA, 1275 bp, Burkholderia mallei
atgaagattcatatcaaaggcggcacgctcatcgatccggcggccggcacgcagcggcaggccgacgtgttcgtcgcggccggcaaggtggccgcgatcggcgcggcgccggccgatttcaacgcggcgaagacgatcgacgcgacggggctgatcgtcgcgccgggcttcgtcgatttgtcggcgcggctgcgcgagcccggctacgagcataaggcgacgctcgaatccgagatggcggcggcggtcgcgggcggcgtgacgagcctcgtgtgcccgcccgacaccgatccggtgctcgacgagccgggcctcgtcgaaatgctgaagtttcgcgcccgcaaccggaatcaggcgcacgtgtatccgctcggcgcgctgacggtcggcctgaaagggcaggtcatcaccgagatggtcgagctgaccgaggcgggctgcatcggcttcacgcaggcgaacgtgcccgtcaccgatacgcaggtgctgctgcgcgcgctgcagtacgcgagcacctacggctacacggtgtggctgcgcccgctcgacgcgtttctcgcgaagggcggcgtcgcggcgagcgggcccgtcgcgtcgcggctcggcctgtcgggcgtgccggtcgcggccgagacgatcgcgctgcatacgctgttcgagctgatgcgggtgacgggcgcgcgcgtgcacgtcgcgcggctgtcgtcggcggccggcgtcgcgctcgtgcgcgccgcgaaggccgagggcctgcccgtgacctgcgatgtcggcgcgaaccacctgcatctgatcgatgtcgacatcggctacttcgacgcgcagttccggctcgatccgccgctgcgcgccgagcgcgaccgcgaggcgattcgcgcggcgctcgccgacggcacgatcgatgcgatctgctcggatcacacgcccgtcgatgacgacgagaagctgctgccgttcgccgaggcgacgcccggcgcgacgggcctcgagctgctgctgtcgctgaccgtgaagtgggcgcgcgaagcgggcgtgccgctcgcgcgggcgctcgcggcgatcacctcggcgcccgccgatgtgctgaagctgcccgccggccgtatcggcgaaggcgcgccggccgacctgtgcgtgttcgatccgaatgcgcactggcgcgtcgagccccgcgcgctgaagagccagggccacaacacgccgttcctcggctatgagctgccggcgcgagtgtgcgcgacgctcgtcgcggggcaggtggcgttcgagcgtcgc

SEQ ID NO: 14249 - DNA, 426 bp, Burkholderia mallei
gtgttccaaggggcgtcggcgctgacgctcgatgcgaaaggacggatgtcggtgccgtcccgctatcgcgaagcgctgcaaggacaggcagaaggacgggtgactgtgaccaagcacccggacggctgcctgttgctgtttccgcgccccgaatgggaagtgttccgcgcgaagatcgccgcgctgccgatggatgcgcattggtggcgccgtatttttctcggcaacgcgatggacgtcgatctcgacagcgcgggccggattctggtgtctcccgagttgcggatggcggccgggctggaaaaggaagtcatgttgctgggtatgggaagtcacttcgagctgtgggatgcgcagacctacaccgcgaaggagcaggcggcgatggcgcagggcatgcccgaagcgctgaagaatttcacgttc

SEQ ID NO: 14250 - DNA, 846 bp, Burkholderia mallei
atgaacatggcagaaagccacctcgatccttcgaaactcgccaccgggccggccggcttcggcgcggcggcggggcagcgtccgctcgcgccgctgaacgcgaagatcgaagtcaagaacctgaatttcttctacaaccagttccacgcgctgaagaacatcaatctgagcattcccgaggggaaggtgacggcgttcatcggcccgtcgggctgcggcaagtccacgctgctgcgcacgttcaacaagatgtacgcgctctacccggagcagcgcgccgaaggcgagatcgtgatggacggcgagaacctgctgcagtcgaagctcgacatctcgctcttgcgcgcgcgcatcggcatggtgttccagaagcccacgccgttcccgatgtcgatctacgacaacatcgcgttcggcgtgaagatgttcgagcggctcacgcgctcggagatggacgaccgcgtcgaatgggcgctcacgaaggccgcgctctggaacgaagtgaaggacaagctgagccagagcggctacggcctgtcgggcggccagcagcagcgcctttgcatcgcgcgcggcatcgcgatccggcccgaggtgctgctcctcgacgagccgtgctcggcgctcgatccgatttcgacgggccgcatcgaagagctgatcgcggagctcaagagcgactacacggtcgtcatcgtcacgcacaacatgcagcaggcggcgcgctgctcggactacaccgcgtatatgtatctcggcgagctgatcgagttcggcgaaacggaaaagatcttcatcaagccggcgcgcaaggaaacggaagactacatcacgggccgcttcggc

SEQ ID NO: 14251 - DNA, 1942 bp, Burkholderia mallei
ccgttcgatcagccgatcgtcatgggcgccgccgcgctcatggcgctcgtcgcgctgtcggtcgtgggcgcgctcacctacacgaagcgctggaaatggctgtggtgcgagtggctcacgtcggtcgatcacaagaaaatcggcgtgatgtacatcgtcgtcgcagtgctgatgctgctgcgcggcttcgccgacgcggtgatgatgcgcctgcagctcgcgctcgcgtacaacgggcccggaccactacgaccagatcttcaccgcgcatggcgtcatcatgatcttcttcatggcgatggcgctgctcgtcgggctcttcaacctgatcgtgccgctgcagatcggcgcgcgcgacgtcgccttcccgttcctgaactcgctgagtttctggatgacggccgtcgccgcgctgctgatgaacgtgtcgctcgtcgtcggcgaattcgcgcagacgggctggctcgcgtatccgccgctctcggagctgcagttcagtccgggcgtcggcgtcgactattacctgtgggcgctgcagatatccggcgtcggcacgctgatcaccgcgatcaacttcttcgtgacgatcatccggatgcgcgcgcccggcatgacgctgatgaagatgccggtgttcacgtggacggcgctttgctcgaacgtgctgatcatggcgacattcccgatcctgacggtcgcgctcgccctcctcgcgctcgatcgctacctcggcatgcacttcttcacgaacgacgccggcggcaacgcgatggtctacctgaatttgatctgggcgtggggccaccccgaggtgtacatcctcgtgctgcccgcgttcggcatctattcggaagtgatcgcgacgttctcgaagaagccgctgttcggctacaagacgatggtctacgcgtcgtgcgtgatcatggtgctcgcgttcctcgtgtggctgcaccacttcttcacgatgggctcgggcgcgaacgtgaacgcgttcttcggaattatgacgatggtgatcgcgatcccgaccggcgtgaagatcttcaactggctgttcacgatgtaccgcggccgcatcgagttcaccgcgcccgtgctgtggacgatcggcttcatggtgacgttcacgctcggcgggatgacgggcgtgatgatggcgattccgggcgcggacttcgtgctgcacaacagcctgttcctgatcgcgcatttccacaacgcgatcatcggcggcgtcgtgttcggctatctcgccggcttccattactggtttccgaaggcgttcggcttcaagctcgacgagaagctcggcaagcgcgcgttctggtgctggttcatcggcttttacgtgtcgttcgtgccgctgtacgtgctcggtttcatgggcatgacgcgccgcctgaaccattacgacaaccccgcctggcatccgtggctcatcgtcgccgcgtgcggcgtcgcgttgatcgcgctcggcgtgctgcaccaggtcgcgcaggtgtgggtggcggtgcgcaatcgcaacgcgcccggctaccgcgacacgacgggcgacccgtggaacggccgcacgctcgaatgggcgacggcctcgccgccgcccgtctacaacttcgcggtgatcccgaccgtgcacgcgctcgacgagctcgcgtaccgcaaggagcacggcatcggcgtcggcaagaacgccgtctatcaggacatccacatgccgtcgaacaccagcgcgggcttgttcgtcggcatgttcagcctcgtgctcggcttcgcgctcgtgtggcacatctggtggctcgcgatcgcatcgttcgtcggcatcgtcgcgatggtggtgctgtacagcgcgggcgagaacgacggctattacattgcggccgacaccgtccgcgagatcgaggaaaggcgcgccggcgcgcgcgcgccggcgcggccggccgaa

SEQ ID NO: 14252 - DNA, 1377 bp, Burkholderia mallei
ttgaaatcaagcggtaagccgctcgccgcgcccaaggtgggtatggtttcgctcgggtgcccgaaggccctcgtcgactccgagcagatcatcacgcaactgcgcgccgaaggctacgaaatctccggcacctatgacggcgcggatctcgtcgtcgtcaacacttgcggcttcatcgacgaggcggtgcaggaaagcctcgacgcgatcggcgaagcgctcgccgaaaacggcaaggtgatcgtcaccggctgcctcggcgcgaagaagagcgcgagcggctccggcctcatcgcggaagtgcatccgaaggtgctcgccgtcacgggcccgcatgcggtcggcgaagtgatgcaggcggtgcacagccatctgccgaagccgcacgatccgttcgtcgacctcgtgccggccgcgggcatcaagctcacgccgcgtcactacgcgtatctgaagatctccgaaggctgcaatcaccgctgctcgttctgcatcatcccgtcgatgcgcggcgagctcgtgtcgcggcccgttgccgaggtgatgctcgaagccgagaatctcttcaagtccggcgtgaaggagctgctcgtgatctcgcaggacacgagcgcgtacggcgtcgacgtcaagtaccgcacgggcttctggaacggccggccgctcaagacgcggatgaccgagctcgtcggcgcgctcggtgagctcgccgcgcagtacggcgcgtgggtgcgcctgcactacgtgtatccgtatccgcacgtcgacgagatcattccgatgatggcgcaaggcccgctcaagggccatgtgctgccgtatctcgacgtgccgttccagcacgcgcatccggaggtgctcaagcgaatgaagcgcctggcgaacgcggagcgggtgctcgagcgcgtgcagaagtggcgcgagatctgcccggatctgacgattcgcagcacgttcattgccggctttccgggcgagaccgacgcgcaattcgagacactcctcgatttcatccgcgaggccgagctcgatcgcgtcggctgcttcgcgtattctccggtcgagggcgcgagcgcgaacgcgctcgacggcgcgctgcccgacgacgtgcgcgaggcacgccgcgcgcgcttcatggaagtcgccgaggaggtgtccgccgcgcgcatcgcgcgcaagatcggcaagacgctcaaggtgttgatcgacgaggtcaacgcggaaggcggcatcggccgcaccgcggccgatgcgcccgagatcgacggcgtcgtctatgtcgagccggcggccaaggcgtcgaagcgctacaaggtcggcgagttcgtgtccgtgaagatcacgggcgccgacggccacgatctgtggggcgaggtc

SEQ ID NO: 14253 - DNA, 2988 bp, Burkholderia mallei
gtgcgggccgtccggcgtcggcaagaccgagacggcgctcgcgctcgccgagatgctgtacggcggcgagcacaacgcgatcacgatcaacatgagcgagtttcaggaggcgcacaccgtatcgacgctcaagggcgcgccgcccggctacgtcggctacggacagggcggggtgctgaccgaggcggtgcggcggcggccgtacagtgtcgtgctgctcgacgaaatcgagaaggcgcaccgcgacgtgcacgagatcttctttcaggtgttcgacaagggctggatggaagacggcgaggggcgctatatcgactttcgcaacacggtgatcctcctcacgtcgaacgtcggttccgagcgcgtgatgcagctgtgccgcgatccgcagcgcctgcccgatgcgcagaccttgaccgatgcgctgcgcgaggtgtttcccgccgcgttgttgggacgcctgacggtcgttccgtactacccgctcaccgacgagatgctcgcgcggatcgtcgcattgcagctcgcgcgcatcgagcggcgcatcgaagcgcaccacggcatcgcgttgcgctgcgcggattcggcgaccgcgctgatcgccgagcgctgccggacgatcgaatccggcggccgcatggtcgacgcgattctcacgcacacggtgctgccgcgcatcagccaggagatcctgcgcgcgacgatcgaggggcgcgcgctgcgggcgatcgacgtgagcgccgaagacggccagttcgtttaccgattcgaagaggagggcgcgacgtgacccgcgtgttcacactcgacagcctgcacggcgacgacctgaagttccaccggctctacggcgaggaagcgctcgggcggatgttcgacttccggatcgaagcgctcgccgacaatcacagcctgtcgctgaaggaactgctcggcaagccggtgacggtgcgcatccggcagcaggacgaatcggagcgccatctgaacgggatcgtcgcgcgcgccgcgctggtcgggcggcgcgcggagcggcattacggctatcaactgatcgtgcggccgtggctgtggctcgcgacgcgccgctccgattgccggatcttccagaacaagacggtgccggagatcgtgcaggacgtgctcggcacgtacggctttccgatcgaaaaccatctgaccgacacgtacgcgccgcgcgactactgcgtgcagtacaacgagaccgacgcggcgttcgtgtcgcggctgatggagttcgaagggatctactactacttcaagcacgccgcgcaaacgcacacgctgatgctgtgcgacgcgatggcgtcgcacgtcgcgctgccgggctacgagcacattccgttcatcgcgcgcgaccgcaccgcgatcgccgacgaagagcacatcgacagctggctgcccgcgcaggaagtgagcatcggcaagcacgagacgagcgactacgactacacgaagccgcgcgcggatctgtccgcgcagaagatcgatccgcgcggccacgaccatgacggcttcgcgtcgttcgaatggcccggcggctatcgcgacgatgaaccgggcgcgcattacagccgcgtgcggctcgaagagcagcaggcggagcacgaacgcgcgctcgcgcgcaccgacgtgcgcggcatcgcacccggctatctgttcacgctcgaacactgcccgcgcgccgaccagaaccgcgaatacctgatcgtgcgctgccagtatcggtttcaggagaacgcgtacgcgaccgatagcggcaacgaggcggtcgtgcacgaatctcagacactcgtgcagccttcgagcctgccgtatcgctcgccgcgcgcgacgccgcggccgcgcacgaacggcccgcagacggcgaccgtcgtcggcccgaagggcgaggaaatctggacggaccagtacgggcgcgtgaagctgcaatttcgctgggaccgctacgggcagagcgaccagaactcgtcgtgctgggtgcgcgtgtcgagcccgtgggcgggcggcggcttcggcggcgtgcagatcccgcgcatcggcgatgaggtggtggtcgatttcctgaacggcgaccccgatcagccgatcgtgacggggcgcgtgtacaacggcgagaagatgccgccatgggggctgcccggcagcgcgacacaaagcgggctgctgtcgcgctcgtcgccgggcggcacggccgagcattcgaacgcgtttcgcttcgaggacaagaagggcgcggagcagctgtggatgcatgcggagcgcaacttcgacgcggagactgagcaggaccacacgctgtcggtgggccacgatcattcgcattcggtcggcaacaacgagatgatgagcgtcgcgaacgaccggcaaaggagcgtcgggcagaacgagacggtgaacatcgggaaacatcgcgtcgcgcagatcggcgggaacgagacgcatggcgtcgcgggaaaccgcacgcggcaggtcggacagaacgaagccgtgacgatcggcgcgaatcgcgaggcgacgatcggcggcaatcacgtggagacggtcgcgaaagacaagaccgaaacgattgggcagggcaagacgctgaatgtcactcagcactatcagacgacttcgaagagcatgaagaccgctgtcgccgaacatcacgccgaggagatcggctcgcgaacgtcgacgatcgagaaagcgcacgagctcaacgttggcggttctcaatcggtgaacgttggcgcgagccacacgatgagcgtgaagaacaacgtacatgtcggcgcgggcgatcagatctcgctcgtttgcggcgatgcgagcatcacgctgaagaaggacggcacgatcgcgatcaacggcgtcacggtggaatcgagcgccagcggaagccatagcgtgcgcggcaagacagtgacgtcgtcggcgacgggcgagcacacggtggaaggcacgatactgaaactgaacccc

SEQ ID NO: 14254 - DNA, 1371 bp, Burkholderia mallei
atgacccacggtctgcacggccccaagcgctggtatgcgctcgtcgttctctgtctgggcgtgctgatgatcgtgctcgattcgacgatcgtcaacgtcgcgctgccgtcgatcggcgcggacctgcacttcaccgaaaccgcgctcgtctggatcgtgaacgcttacatgctgacgttcggcggctgcctgctgctgggcggccggctcggcgatctgtacggccagcgccggatgttcctcgccggcctcacgctgttcacgctcgcatcgctcgcgtgcgggctcgcgccaacgcagttcgtgctgatcgccgcgcgcgcggtgcaggggttcggtggcgcggtggtgtccgccgtcgcgctgtcgctcatcatgaatctcttcaccgagccgggcgagcgcgcgaaggcgatgggcgtctacagcttcgtctgcgcgggcggcggcagcctcggcgtgctgctcggcggcgtcctcacgagcgtgctcagctggcactggatcttcctcgtcaatctgccgatcggcgtcgccgcgtacgcgctgtccgccgcgctgctgccgaaggtgcgcccgcaggcggccgacgcgcggctcgacgtcgcgggcgcgatcgccgtgaccgcttcgctgatgctcgccgtctacggcatcgtcaacggcaacgaggccggctggctgtcgacgcagacggtcgcgacgctcgcaggcgcggccgcgctgctcgcggcgttcatcgcgatcgagacgcgcgccgcgcatccgctgatgccgctcgcgctcgccacgcagcgcaacgtcgcggtcgcgaacgtgatcggcgtgctgtgggcggccgcgatgttcgcgtggttctttctttccgcgctctacatgcagcgcgtgctcggctacgggccgctccaggtcggcctggcgtttctgcccgcgaacctgatcatggccgcgttctcgctcggcttgtccgcgaagatcgtgatgcgcttcggcatccgccgcgcgatcggcgccgggctcgtcatcgcggccgcgggccttgccctcttcgcgcgtgcacccgccgacggcggcttcgtcgcgcacgtgctgccggggatgatactcgtcggcgtcggcgcgggcgtcgcgttcaatccggtgctgctcgccgcgatgagcgacgtcgcgccgagcgattcggggcttgcctcgggcatcgtcaacacctcgttcatgatgggcggcgccctcggcctcgcggtgctcgcgagcgtcgcgtccgcgcgcaccgacgcgctcgccgccgcgcgcgcggcgctgcccgtcgcgctcaacggcgggtatcacgcggcgttcgcgtgcggcgcggcattcgcggcgctggccgcc

SEQ ID NO: 14255 - DNA, 1162 bp, Burkholderia mallei
gtgccgcgcgcgcccgacgcgccgtgcggccgcacaactgaacggagacaaatcatggcaagcgtgctcctgcgcaatatcggcaagcgctacgacgacaacgaagtgctgcgcaacgtcaatctcgacatcgccgacggcgagttcgtcgtgttcgtcgggccgagcggctgcggcaaatccacgctgatgcggatgatcgcggggctcgaggagatttcgggcggcgagctgctgatcgacggcgcgaaggtcaacgacgtgccgagcgcgaagcgcggcatcgcgatggtgttccagtcgtacgcgctctatccgcacatgacgctctacgacaacatggcgttcggcctgaagctcgcgggcgcgaagaagcaggagatcgacgacgcggtcaagcaggcggcgaggatcctgcatatcgatcacctgctcgacaggaagcccaggcaactgtcgggcgggcagcggcagcgcgtcgcgatcggccgcgcgatcacgcgcaagccgaaggtgttcctgttcgacgagccgctgtcgaacctcgacgcggcgctgcgcgtgaagatgcggctcgagttcgcgcggctgcacgacgagctgaagacgacgatgatctacgtgacgcacgatcaggtcgaggcgatgacgctcgccgacaagatcgtcgtgctgtcggcgggcagcgtgcagcaggtgggcgcgcccaacgcgctgtatcacgcgccggcgaaccagttcgtcgcgggcttcatcggctcgccgaagatgaactttctcgcgggcgtcgtcgaatcggcgtcggccgacggcgcgctcgtgcgcttcgaatcgggcgagacgcagcgcgccgcggtcgacgcgtcgacgctgcgcgcgggcgagcgcgtgacggtcggcatccggcccgagcatctgcatgtcggcgtgacgggcggcgacggcatcgtcgcgcggacgatggccgtcgaatcgctcggcgatgccgcgtatctgtacgcggaatcggccgtcgcgcccgacgggctgatcgcgcgcattccgccgctcgacacctatcgcgcgggcgagatgttgcgcgtgggcgcgcagcccgagcactgccatctgttcgacgccgacgggcgcgcgttcaagcgcaagccgaggcacgcgctggccg

SEQ ID NO: 14256 - DNA, 1384 bp, Burkholderia mallei
atgaattacatctccacgcgcggcgccggcatcggcgagcgtcacacgttctccgacatcctgctcggcggcctcgcgaaggacggcgggctctacctgccgagcgagtatccgcgggtgagcgcggacgagctcgcgcgctggcgcgcgctgccgtacgcggatctcgcgttcgagatcctcgcgaagttctgcgacgacatcccggccgacgacctgcgcgcgatcacgcgccgcacgtatacggccgacgtctatcgtcacacgcgccacggcggcaacgcggccgacatcacgccgctcacgacgctcggtgccgagaacggcgcgccggtctcgctgctcgaactgtcgaacggcccgacgctcgcgttcaaggacatggcgatgcagttgctcggcaacctgttcgagtacacgctcgccgcgcacggcgaaacgctgaacatcctcggcgcgacgtcgggcgatacgggcagcgcggccgaatacgcgatgcgcggcaagcggggcgtgcgcgtgttcatgctgtcgccgcaccggaagatgagtgcgttccagacggcccagatgtacagcctgcaggacccgaacatcttcaacctcgcggtgaagggcgtgttcgacgattgccaggacatcgtgaaggccgtgtcgaacgatcacgcgttcaaggcgcagcagaagatcggcacggtcaattcgatcaactgggcgcgtgtcgtcgcgcaggtcgtgtactacttcaagggctatttcgcggcgacgcgcacgaacgacgagcgcgtgtcgtttacggtgccgtcgggcaacttcggcaatgtctgcgcgggccacatcgcgcggatgatggggctgccgatcgagaagctcgtcgtcgcgaccaacgagaacgacgtgctcgacgaattcttccgcacgggtgcgtatcgcgtgcgcagcgccgagcacacgtaccacacgagcagcccgagcatggacatctcgaaggcgtcgaacttcgagcgcttcgtgttcgacctgctcggccgcgatccggcgcgcgtcgttcagctgtttcgcgacgtcgagcaaaagggtggcttcgatctcgcggcgagcggcgatttcgcgcgcgtcgccgagttcggcttcgtgtcgggccgcagcacgcacgcggaccggctcgcgacgatccgcgacgtgttcgagcgctatcgcacgacgatcgacacgcacacggccgacggcctgaaagtggcgcgcgagcatctgcagccgggcgtgccgatgatcgtgctcgagaccgcgcagccgatcaagttcggcgaaacgattcgcgaggcgctcgggcgggagccgtcgcggcccgccgcgttcgacgggctcgaggcgttgccgcagc

SEQ ID NO: 14257 - DNA, 999 bp, Burkholderia mallei
atggcgcgcgcagtgcatgcttgcgcggccgacacggcgggcggagacgccggccgcgcacccgcgccgccggccgaccgtctcgtggacgcgcttgccgcgtcgccggcgtggctcgacagccgcgcgtcgatcgatctgttctgcgacgcgatgtggctcgagcacgggctgtcgcgcaacacgctcgacgcgtaccggcgtgatctgcaactgttcgcgcaatggctcgccgcgcggcatgcggcgagcgtcgatcatgcgagcgagccgacgctgaccgaatacatcgccgcgcgcagcgacggcaaggcgacgtcgtcgaatcgccggctatcggtgtttcgccgctactacggctgggcggtgcgcgagcaccgcgcggccgtcgatccgacgctcaggatcgcgtcggcgaagcaggcgccgaggtttccgtcgacgctgtccgaggcgcaggtcgaggcgcttctcgccgcgcccgacgtcgatacgccgctcggcctgcgcgaccgcacgatgctcgaactgatgtatgcgagcgggttgcgcgtgagcgagctcgtcacgctgaagacggtcgaggtcggattgaacgaaggcgtggtgcgcgtgacgggcaagggttcgaaagagcggctcgtgccgttcggcgaagtcgcgcacggctggatcgagcgctatctgcgcgatgcacggcccgcgctactcggtgcgcgcgcggcggatgcgctgttcgtcaccgcacgcggcgacggcatgacgcgccagcaattctggaacatcatcaagcgccatgcgcagcaggcggatgttcgcgtgcatctgtcgccgcatacgctgcggcacgcgttcgcgacgcatctgctcaatcacggcgcggacctgcgggtcgtgcaactgctgctcggccatagcgatatctcgacgacgcagatctacacgcacgtcgcgcgcgagcggctgaagacgctgcatgcggcgcatcatccgcgcgga

SEQ ID NO: 14258 - DNA, 969 bp, Burkholderia mallei
atgcatcagaggaaaaccggcgcggcgcgcagcgccccgcgcgccgtatccaccggacgtgaacgcagtgtcgccgtgcgcgctttgcccgtctccggtataaaggccattcgatacggtattcaggccatgctcgatcccattcttcccatcgaactcgtcacgtcttccgaaggcccgttcgtcgccgccgtcgaattgacgcagcgcaccgagcgcacgaccgcgcggcacagccacgcgcgcggccagctcgtcggcacgtcgagcgggctcgtgtcgatcgggctcgacgacgaagactgggtcgtgcccgcggttcacgcggtctggattccgccgcaccgcgtgcattcgctgcgctcgttcggcccgtttgccggctggagcgtcttcgtcgccgaagaccggtgcgcagcgctgccgggcgcgccgcgcgcgatcgtcatgtcgacgctgctgcgcgaagccgtgcgccgcgcggcgagctggcgcggcgccgcgctcgatgccgcgcgcgcgcggatcgcgaacgtgatactcgacgaaatcgccgccgcgcagacggggccgcgcgggctgccccgcccgcgcgatccgcgcctcaggcggatcgccgacgcgctcgcgggcgatctcgccgataaccgccgcgccgacgaatgggccgcatgggccggcatggccccgcgcacgctgagccgccgcttcgtgtcggagacgggattcaccttcacgcaatggcggcagcaggcgcgcgtgctgcgcgcgctcgagcggctcgcggacggcgtgacggtgacggcggtcgcgctcgatctgggctacgacaacgtgagcgcgttcatcgacatgttcaggagaacgctcggcacgacgcccgggcaatacgtcaacgcgcgcgccggcgacgcgcgggacggcgcgccggctccatgcggtccgcgcgcggtccgcgcgcggcgtcag

SEQ ID NO: 14259 - DNA, 252 bp, Burkholderia mallei
atggtcatcatccgtctggctcgcggcggctcgaagaagcgcccgttctacaacatcgtcgctaccgattcgcgcaaccgtcgtgacggccgcttcatcgagcgcgtcggtttctacaacccggtcgcgacgaagggcgaagcgctgcgcattgctcaagaccgtctgacgtactggcaaggcgttggcgcgcagctgtcgccgaccgtcgagcgtctcgtgaagcaggcgcaaaaggcgcagccggctgcc

SEQ ID NO: 14260 - DNA, 1988 bp, Burkholderia mallei
atgggaaagatcatcggtattgacctcggcaccacgaactcgtgcgtcgcgatcatggaaggcaaccaggtcaaggtcatcgagaattcggaaggcgcgcgcacgacgccgtcgatcatcgcgtacatggacgacaacgaagtgctcgtcggcgcgcccgccaagcgccaatcggtgacgaacccgaagaacacgctgttcgcggtcaagcgcctgatcggccgccgtttcgaagagaaggaagtccagaaggacatcggcctgatgccgtacgcgatcatcaaggcggacaacggcgacgcgtgggtcgaggcgcacggcgagaagctcgcgccgccgcaggtgtcggccgaagtgctgcgcaagatgaagaagacggccgaagactacctcggcgagccggtcacggaagccgtgatcacggtgccggcgtacttcaacgacagccagcgccaggcgacgaaggacgcggggcgcatcgcgggcctcgaagtcaagcggatcatcaacgagccgaccgcggccgcgctcgcgttcggcctcgacaaggccgagaagggcgatcgcaagatcgcggtgtatgacctcggcggcggcacgttcgacgtgtcgatcatcgagatcgcggacgtcgacggcgaaatgcagttcgaagtgctgtcgaccaacggcgacacgttcctcggcggcgaggacttcgaccagcgcatcatcgattacatcatcggcgaattcaagaaggagcagggcgtcgatctctcgaaggacgtgctcgcgctgcagcgcctgaaggaagcggccgagaaggcgaagatcgagctgtcgtcgagccagcagaccgaaatcaacctgccgtacatcacggccgacgcgtcgggcccgaagcacttgaacctgaaggtcacgcgcgcgaagctcgaggcgctcgtcgaggatctggtcgagcgcacgatcgagccgtgccgcaccgcgatcaaggacgcgggcgtcaaggtgtcggacatcgacgacgtgatcctcgtcggcggccagacccgcatgccgaaggtgcaggagaaggtgaaggaattcttcggcaaggagccgcgccgcgacgtgaacccggacgaagccgtcgcggtgggcgcggcgatccagggccaggtgctttcgggcgaccgcaaggacgtgctgctgctcgacgtgacgccgctgtcgctcggcatcgagacgctcggcggcgtgatgacgaagatgatcaacaagaacacgacgatcccgacgaagcacgctcaggtgtattcgacggcggacgacaaccagggcgccgtgacgatcaaggtgttccagggcgaacgcgagatggcggcgggcaacaagctgctcggcgagttcaacctcgagggcatcccgcccgcgccgcgcggcgtgccgcagatcgaagtgaccttcgacatcgacgcgaacggcatcctgcacgtcggcgcgaaggacaaggcgaccggcaaggaaaacaagatcacgatcaaggcgaactcgggcctgtccgaagccgagatcgagaagatggtgaaggacgcggaagcgaacgcggcggaagaccacaagctgcgtgagctcgccgaatcccgcaaccagggcgacgcgctcgtgcacagcacgaagaaggcgctcaccgagtacggcgacaagctggaggcgggcgagaaggagaagatcgaagcggcgctcaaggagctcgaggacgtgctgaagaacgcgtcgagcgacaaggcggcgatcgacgcgaaggtcgaagcggttgcgacggcgtcgcagaagctcggcgagaagatgtacgccgacatgcaggcgcagcaggcaggcgccgcgggcgcggccggggcggcagccgaaggtgcgtcggcgcagggcggcgcgcagccggccgacgacgtcgtcgacgccgacttcaaggaagtgaagaaggactgaagccgggtggcggtctaccgcgtcgggcgcctcga

SEQ ID NO: 14261 - DNA, 1164 bp, Burkholderia mallei
gtgtcccccaaggagccccccgtgttgccgtctttttctcccgctttgctcgcactcgccgacggcacggtctttcgtggttattcgatcggcgcggccggccatacgatcggcgaagtcgtgttcaacaccgcgatcaccggctatcaggaaatcctgacggatccgagctatgcgcgccagatcgtcacgctgacctatccgcacatcggcaacgtcggcgtgaacgccgaggacgtcgaagcgacgaaagtccatgccgccggcctcatcgtgcgcgatttgcccgcgctcgcgtcgaacttccggatggcgcgcacgctcggcgattacctgcgcgacgaaggcgtcgtcgcgatcgcgggcatcgacacccgcaagctgacccgcatcctgcgcgacaagggcgcgcagaacggctgcatcctgacgggctccgacgacgaaacgaaggcgctcgcactcgcgcgctcgttcccgggcctcgcggggatggacctcgcgaaggtcgtctcgacggctaagccgttcgagtggaagcagacggaatggcgcctcggcagcggctacgggatgcaggagacgccgcgctaccgcgtcgtcgcgttcgatttcggcgtgaaatacaacatcctgcgcatgctcgccgagcgcggctgccacgtgagcgtgctgcccgcgcaatcgagcgcggccgacgcgctcgcgctcaatccggacggcatcttcctgtcgaacggcccgggcgatccgcagccgtgcgactacgcgatcgccgcgacccgggagttcatcgagcgcggcgtgccgaccttcggcatctgcctcggccaccagatcatgggcctcgcgctcggcgcgaagacgctcaagatgaagacgggccatcacggcgcgaaccatccggtgaaggatctcgcgaacggccgtgtcgtgatcacgtcgcaaaaccacggtttcgcagtcgacgccgattcgctgcccgcgaacgcgcgcgcgacgcacgtgtcgctgttcgacggcacgctgcagggcttcgagctgaccgacaagcccgcgttctgcttccaggggcacccggaggcgtcgcccggcccgcacgacatcggctatctgttcgaccgcttcaccgcgctgatggacgcggcgaaggcgcgcagcgcc

SEQ ID NO: 14262 - DNA, 2850 bp, Burkholderia mallei
atgaagcagttccagctgaactcgtatctgttcggcggtaacgcttcgtatgttgaagaactgtacgaagcttatttggataatccggcgtcggtgccagataactggcgcgaatatttcgacgcactgcagaacgtccccgcaaccgacggttcgaacgcgagcgacgtggcccacaacccgatcgtcgaatcgttcgcccagcgcgcgaaagccaacgctttcatcccgcgcgaaagcggcggcaacctcgccaccgcccgcaagcaagtccacgttcagtccctcatcagcgcgtatcgcttcctcggctcgcaatgggccaacctcgatcccctgaagcgccgtgaacgccccgcgatccccgagctggaacccgcgttctacgatttctccgaagccgatctcgaccagacgttcagcgcgagcaacctgtatttcgggttcgagcaagcgtcgctgcgcgacatcgtcaaggggttgcgcgacacgtactgcggcacgatcggcgccgaattcatgtacatcagcgatcccgagcagaagcgctggtggcaggagcgtctcgagtcgacccgcgcgacgccgaatttctcggccgacaagaagaagcacatcctgaaccgcctgacggcgggcgaaggcctcgaacgctatctgcacacgaagtacgtcggccagaagcgcttctcgctcgaaggcggcgagagcttcatcgcggcgatggacgaagtcgtccagcgcgcgggttcgaagggcgtgcaggaaatcgtcatcggcatggcgcaccgcggccgtctgaacgtgctcgtgaacacgctcggcaagatgccggcggatctgttcgccgaattcgaaggcaagcacgtcgacgacctgccggcgggcgacgtgaagtatcacaagggcttctcgtccgatatcgcgacggaaggcggcccggtccacctgtcgctcgcgttcaatccgtcgcacctcgaaatcgtgaacccggtggtcgaaggttccgcgaaggcgcggatggatcgccgcggcgacgccgacggcctgcaggtgctgcccgtgcagatccacggcgacgcggcgttcgcgggccagggcgtcgtgatggaaacgctgaacctcgcgcagacgcgcggttacggcacgcacggcacgctgcacatcgtcatcaacaaccagatcggcttcacgacctccgacccgcgcgacgcgcgctcgacgctgtactgcacggacgtcgtcaagatgatcgaggcaccggtgctgcacgtgaacggcgacgatccggaagccgtggtcctcgccacgcagatcgcgatcgactaccggatgcagttccacaaggatgtcgtgatcgacatcgtctgcttccgcaagctcggccacaacgaacaggacacgccggccgtcacgcagccgctgatgtacaagaagatcgcgcagcacccgggcacccgtgcgctgtacgcggagaagctcgtccagcagggcgtgatcagcgccgacgacgcggacggcttcgtgaaggcgtaccgcaaggcgatggacgacggccaccacacggtcgatccggtgctgtcgaactacaagagcaagtacgcggtcgactggatgccgttcctgaaccgcaagtggacggacgccgccgacaccgcggtgccgctcgccgagttgaagcgcctcggcgaacgcatcacgacggtgccggaaaacttcaaggtccacccgctcgtcgagcgcgtgatcaacgatcgccgcaacatggcgcgcggcgaccagccgctcgactggggcatgggcgagcacctcgcgtacgcgtcgctcgtcgcgtccggctacgcggtgcgcctgacgggccaggattcgggccgcggcacgttcacgcaccgtcacgcggtgctgcacgaccagaaccgcgagcgctggaacgacggcacgtacgtgccgctgcagaacgtctcggaaggccaggcgaagttcaacgtgatcgactcggtgctgtccgaagaggcggtgctcggcttcgaatacggctactcgaccgccgagccgaacacgctcgtgctgtgggaggcgcagttcggcgatttcgccaacggcgcgcaggtcgtgatcgaccagttcatctcgtcgggcgaagtgaagtggggccgcgtgtcgggcctcacgatgctgctgccgcacggctatgaaggccaggggccggagcactcgtcggcgcgcatcgagcgctatctgcagctgtgcgcggagcacaacatgcaggtcgtgcagccgacgacgcccgcgcagatcttccacctgctgcgccgccagatgatccgcctgttccgcaagccgctcatcgtcgcgacgccgaagtcgctgctgcgccacaaggaagcggtgtcggatctgtcggaactcgcgaagggctcgttccagccggtgctgggcgaagtcgacggcggcatcgatgcgaagaaggtcaagcgcgtgatcgcctgctcgggccgcgtgtattacgacctcgtcgcgcatcgccgcgaagcgaaggcgaacgatgtcgcgatcgtgcggatcgagcagctctatccgttcgcgcacaagcagttcgaggcggaaatgaagaagtacgagaacgcgacggaagtggtctgggtgcaggacgagccgcaaaatcaggggccgtggttctacgtcgaacaccacctgaaggaaggcatgaaggaagggcagaagctcgcgtacagcggccgcccggcttccgcctcgccggccgtcggctattacgcgaagcactacgagcagcagaaggccctcgtcgaaggcgcattcggccgcttgaagagcgcatcgatcgcgaaa

SEQ ID NO: 14263 - DNA, 726 bp, Burkholderia mallei
atgaaaaaaacgattcgtatcgccgcgctcgccctggctgccgcgacggcgacgctcggctgcaccgcgcaggccgaccagtccaccgacaagctgaaggccgcgctgcaatcgcgcctcggcgccgacgcgccgatcaagagcgtgacgaagtcgccgattgcgggtttgtacgaggtcaatctcggctcgcagatcgtctatagcgacgcatcgggcgattacgtgctgctcggcgagctcgtcaacacgaagacgcacaagaacctcacggccgagcgcctcgccgagatcaacaagatcgatttcgcgagcctgccgctgtcgaacgcgatcaaggtcgtgaagggcaacggcgcgcgcaagatcgcggtgttctccgatccgaactgcccgtactgcaagaagctcgagacgacgctgcaatcggtcgacaacgtgaccgtctacacgttcctgtatccggtgctgtcgcccgattcgacggtgaagtcgaagtcgatctggtgcgcgagcgaccgcgtgaagagctggcagtcgtggatgctcgagcatcgcgcgcccacgagcgcggcgaactgcgacacgaccgcgctcgacaagaacctcgcgctcggccgcggaatgaacgtgacgggcacgccgaccgtattcctcgccgacggcacgcgcctgccgggcgccgtatccgccgacgaactgaatcaggcgctcgccggcgtcaag

SEQ ID NO: 14264 - DNA, 498 bp, Burkholderia mallei
atgagcgatgctccgcccaccctgcttctgaccgtgcgcgacgccgccgagcggctcggcgtgacgccgcgcacgctcaagtactacgaggagcgcgggctcgtcacgccgtcgcgcagcgagggccgctatcggctgtatgacgccgcggacctcgaacgcttcgagcgcatcctgcggctgcgcgcgctcgggttctcgctgcacggcatcacggaaatgctcaagcgcccgctcgagccggcaggcgacgggcggcggcgctattcggacgcatcgctgcgcgacattcacgcggatctgtcgcagcagatcgcgacgctcgacgcgcgcatcgccgccgcgcagcgcgaactgaaggaagtgcgcgcgctgaagcaggagttgcagcacgacatcgactatgtcgagcgccggctcgccggcgaaaaccccgacgagctgatcgcgcagcgccgcgccgccgcgcgcgcgcgcaagacgggcgggacaagcgca

SEQ ID NO: 14265 - DNA, 902 bp, Burkholderia mallei
aaggtggcggtgctgctcggcggggattccgccgagcgcgaggtatcgctgaactctggccggctggtgctgcagggcctgcgcgacgcgggcatcgacgcgcatccgttcgatccggcgcagcggccgctcgcggcgctcaaggacgaaggcttcgtgcgcgcgttcaacgcgctgcacggcggctacggcgagaacggccagatccagggcgcgctcgatttctacggcatccgctacacgggcagcggcgtgctcggctcggcgctcgggctcgacaagttccgcacgaagctcgtctggcagcagacgggcattccgacgccgccgttcgagacggtgatgcgcggcgacgattatgcggcgcgcgcgcaggacatcgtcgcgaagctcggcgtgccgcttttcgtgaagccggcgagcgagggctcgagcgtcgcggtcgagaaggtgaaaagcgccgatgcgttgcccgccgcactggaagaagcggcgaagcacgacaagatcgtgatcgtcgagaagagcatcgaaggcggcggcgaatacaccgcgtgcatcgccgcggatctcgatctgccgctcatcaggatcgtgcccgcgggcgagttctacgactatcacgcgaagtacatcgcgaacgacacgcaataccgattccgtgcggcctcgacgcggcaaaggaagccgagttcaagcgcatcgcgcgccgcgcgttcgacgtgctcggctgcacggactggggccgcgcggatttcatgctcgacgccgcgggcaacccgtatttcctcgaagtgaacaccgcgccggggatgaccgatcactcgctgccgccgaaggcggcgcgcgcggtgggcatcggctattcggagctggtggtgaaagtgctgtcgctcacgctc

SEQ ID NO: 14266 - DNA, 687 bp, Burkholderia mallei
atgtttcttcaaggctacggcccgctgatactctccggcacctggcagaccgtcaagctcgcggtgctgtcgctcgcgctgtcgttcctgctcggcctcgtcggcgcggcggcgaaactgtcgcgaagccgcgtctcgaacggaatcggcacgctctacacgacgctcattcgcggcgtgccggacctcgtgctgatgctgctcctcttctacagcctgcagatctggctgaaccagctcaccgatctgatgaactgggatcagatcgacatcgatccgttcgcggccggcgtgctcgtgctcggcttcatctacggcgcgtacttcaccgaaaccttccgcggcgcgttcctgtcggtgccgcgcggccagctcgaggcgggcagcgcgtacgggatgacgaactggcaggtgttcgcgcgcgtcatgttcccgcagatgatgcgcttcgcgctgcccggcatcggcaacaactggcaggtgctcgtgaaatcgacggcgctcgtgtcgatcatcggcctcgccgacgtggtgaaggcgtcgcaggacgcgggcaagggcacgctgcggttcttcttcttcacgctgctcgccggcgcgatctatctcgcgatcacgacgatctcgaacttcgtgctgatgtggctcgagaagcgttattcgaccggcgtacgcaaggcagaccta

SEQ ID NO: 14267 - DNA, 1140 bp, Burkholderia mallei
atgttctcggaaagcgacttcacccacatgcagcgcgcgctcgcgctcgccgcgcgcgggatgtacacgacggcgccgaacccgcgcgtcggctgcgtgatcgtcaaggacgacgtcgtgatcggcgagggcttcacgcagccggccggccaggatcacgcggaagtgcaggcgctgaaggacgcgcgcgcgcgcggcaacgatctgcgcgacgcaaccgtctacgtgacgctcgagccgtgcagccacttcggccgcacgccgccgtgcgcgcacacgctgatcgacgcgcgcgtcggcaaggtcgtcgcggcgatggaggacccgaatccgcaggtatccgggcgcggcctcgcgatgctgcgcgatgcgggcatcgacgtgcgctgcggcctgctcgcgcacgaggcgcacgaaatgaacatcggcttcgtgtcgcggatgacgcgcggccgcccgtgggtgcggatgaagacggccgcgtcgctcgacggccgcaccgcgctcgcgtcgggcgaaagcaaatggatcacgggcgacgccgcgcgcgacgacggccacaagtggcgcgcacgcgcctgcgcgatcctgacgggcatcggcaccgtgcgcgaggacgatccgcagctcaacgtgcgcggcgtcgacaccccgcgccagccgcgccgcgtgctgatcgacagccgcctggacattccgctcgccgcgcgcctgctcgaaggcggctcgctgctcgttttctgcggcgcgctcgacgcgcagagcgagccgcgcgcggacgcgctgcgcgcgcgcggcgcggagatcgtgccgctcgcgaacgcgcgcggcaaggtcgatctgcccgcgatgctcgccgcgctcggcgagcgcggcatcaacgaactgcacgtcgaggcgggccacaagctgaacggctcgctgctgcgcgagcgctgcgtcgacgagttgctcgtctatctcgcgccgagcctgctcggcgcggacgccgcggcgatgttcgacctcgccgcgccggcgtcgctcgtcgaccgcacgcggctcgcgttccacagcgtcgagcgcgtcggcgacgacctgcgcattctcgcgcgcttcgcgaacgctcacgcgagcgcgagcgcctcccctactcgttca

SEQ ID NO: 14268 - DNA, 1179 bp, Burkholderia mallei
atgcccgccatgactgcctatcatcagaccttcgacgtcgccgtcgtcggcggcggcctcgtcggcaagacggccgcgctcgcgctgacgcaggcgggccacaagaccgcgctgctcgcgcagccggccgtcccgcgccccgccgatctcgcgttcgactcgcgcatctacgcgctatccgcgagctcgcaggcgctgctcgagcggctgcgcgtgtggcaagcgctcgaccacggccggctcgcgcccgtctacgacatgcgcgtctatggcgacgcgcacgccgagctgcacttctccgcgttccagtcggcggtgtcgcagctcgcgtggatcggcgaatcgtcgctgatcgaatgcgcgctcgatgccgcgctgcgcttccagccgaacctcacgtggttcgacgcgcgcgcgcaaggcctcgacgtgaccccgggcgccgcgacgctcgcgctcgcgaacggcgacgtgatcgaatgcgatctcgtcgtcggcgcggacggcgcgcattcgtgggtgcgctcgcagatcggctcgaaggtcgagcggcgcgattaccggcagacgggcgtcgtcgcgaatttcaaggcggcgcagccgcatcgcgagaccgcctatcaatggttccgcgacggcgagatcgtcgcgctgctgccgctgccggacggccacgtgtcgctcgtgtggtcggcgcacaccgcgcacgccgacgagctgctcgcgctcgatcccgcgcggctcgcggctgaagtcgagcgcgtgacgctgaaccgcctcggcgcgctcgagtgcgtgacgcccgcgcagggtttcccgctcgcgctgcagacggtcgaccggctggtcgcgccgcgcgtcgcgctcgtcggcgacgccgcgcacctgattcacccgctcgcgggccaggggatgaaccttgggctgcgcgatgtcgccgcgctcgccgatgtcctcgcgaaccgcgaagcgttccgcgatctcggcgacaccgtgctgctgcgccgctacgagcgcgcgcggcgcgaggacattcgcgcgctgatggtcgcgaccgacggcctgcagcggcttttctcgctgccgggcgcgctcgcgcgcatcgtgcgcaacgcgggaatggcgctcgtcggcgcgcagccgctcgtcaagcgctggctggtcgcctcggcgctcggc

SEQ ID NO: 14269 - DNA, 2583 bp, Burkholderia mallei
atggatcaattcgccaaagagaccctgcccacctccctcgaggaggaaatgcgcaagtcgtatctcgattacgccatgagcgtgatcgtcggccgtgcccttccggatgtccgcgatggcttgaagcccgtgcaccggcgcgtgctgttcgcgatgcacgagctgaacaacgactggaaccggccgtacaagaagtccgcgcgtatcgtcggcgacgtgatcggtaagtaccatccgcacggcgacaccgcggtctacgacacgatcgtccggatggctcaggatttctcgctgcgttacatgctcgtcgacggccagggcaacttcggctcggtcgacggcgataacgcggccgcgatgcgctacaccgaaatccggatggccaagatcggccacgaactgctcgcggacatcgacaaggaaaccgtcgacttcggcccgaactacgacggcagcgagatgcagccgctcatcctgccgtcgcggattccgaacctcctcatcaacggttcgtcggggatcgcggtcggcatggcgaccaacatcccgccgcacaacctgaacgaggtcgtcgacgcctgcctttacctgctgaacaatccgcaggcgagcgtcgacgaactgatcgagatcatccccgcgcccgatttcccgacggccggcatcatctacggcgtcgccggtgtgcgcgacggctatcgcaccgggcgcgggcgcgtcgtgatgcgcgcggccacgcacttcgaggagatcgaccgcggccagcgcatggcgatcatcgtcgacgaactgccgtaccaggtcaacaagcgctcgctgctcgagcggatcgcggagctcgtcaacgagaagaagctcgagggcatctccgacatccgcgacgaatccgacaagagcggcatgcgcgtcgtgatcgagctcaagcgcggcgaagtgcccgaggtggtgctgaacaacctgtacaaggcgactcagctgcaggacacgttcggcatgaacatggtcgcgctcgtcgacaaccagccgaagctcctgaatctgcgggagatcctgcagtgcttcctgtcgcatcggcgcgaagtgctgacgcggcgcaccgtctacgaactgcgcaaggcgcgcgagcgcggccacgtgctcgaaggcctcgccgtcgcgctcgcgaacatcgacgagttcatcgcgatcatcaaggccgcgccgacgccgccgatcgcgaagcaggagctgatggcgaaatcgtgggattcgtcgctcgtgcgcgacatgctcacgcgcgcggaaaccgagaacgcggcggccggcgggcgcgacgcgtaccgtccggagggcctgagtccggcgttcgggatgcagggcgacggcctgtaccggctgtccgacacgcaggcgcaggaaatcctycagatgcgcctgcagcgcctcacgggcctcgagcaggacaagatcatcggcgaatatcgcgacgtgatggcgcagatcgccgatctgctcgacattctcgcgcggcccgagcggatcacgacgctgatcggcgacgaactgacgcaggtgaaggcggagttcggcgatgcgcgccgctcgaagatcgagctgaacgcgaccgagctgaacaccgaagacctgatcacgccgcaggacatggtggtcacgatgtcgcacgcgggctacgtgaagtcgcagccgctgtccgagtaccgtgcgcaaaagcgcggcggccgcggcaagcaggcgacgcagatgaaggaagacgactggatcgagacgctgttcatcgcgaacacgcacgactacatcctgtgcttctcgaaccgcggccgcgtgtactgggtcaaggtgtacgaggtgccgcagggctcgcgcaactcgcgcggccgtccgatcgtcaacatgttcccgctgcaggacggcgagaagatcaatgtcgtgctgcccgtgagggaattctcggccgacaagtacgtgttcatgacgacggctttgggcacggtcaagaagacgccgctcgaagcgttcagccgcccgatgaagaagggcatcatcgcggtcggcctcgacgacggcgattacctgatcggcgcggcgatcaccgacggcgcgcacgacgtgatgctgttctccgacgccggcaaggcggtgcgtttcgacgagaacgacgtgcggccgatgggccgcgaggcgcgcggcgtgcgcgggatgcagctcgacgacgcccagcaggtgatcgcgatgctcgtcgcgggcagcgaggaacagtcggtgctgaccgcgaccgagaacggctacggcaagcgcacgccgatcaccgagtacacgcgccacgggcgtggcacgaaggggatgatcgcgatccagacctccgagcgcaacggccgcgtcgttgccgcgacgctcgtcgaccccgaggatcagatcatgctgatcacgacggcgggcgtgctgatccgcacgcgcgtgtcggagattcgcgagatggggcgggcgacgcaaggtgttacactcatcagtctcgatgaaggcaccaagctttcgggtctgcagcagatcgccgaggcggacgccgatgccgacgacgatgcggtg

SEQ ID NO: 14270 - DNA, 753 bp, Burkholderia mallei
ttgattctttacgagtatccgttcaacgagcgaatccgcacgctgttgcgtctcgaagatttgttcgaacgcttcacgttcttcgtggctcaagaggacgcgagagagcatcatgtcgcgctgacgacgctgttcgagatctccgaagtcgcgggccgcgcagatctgaaatcggatctgatgaaagagcttgagcgccagcgccagacactcgcgccgtttcgcggcaaccccggcatcgagcagaacgcgctcgaggcggtgctcggcgaaatcgagcagacgctcgcgaacctcgcgcaaatgcaaggcaagaccggtcagcatctgatcgacaacgagtggctcgcgagcatccgcagccgcgccgtcattcccggcggcacgtgcaagttcgatctcccgtcgtactacgcatggcagcagtggccggccgaacagcgccgccacgacatcgcgaagtgggcgatgccgctcctgccgctgcgcgacgcggcgatgatcgtgctgcgcctcgcgcgagaatccgggcaagcatcgaaggtaatggcgatgcagggcagctatcagcagatgctgtccggccgcacgtaccagttgatgcaggtgcgcgtgccgcccgagttgcgcgtgattcccgaagcgagcgcgaacaagtacatgctgtgggtgcgcttcaccgcgcaggacggcgacgtgcggccgcgtgcggtcgacatcgacgtgccgttccagctcacgctctgcaatctg

SEQ ID NO: 14271 - DNA, 1122 bp, Burkholderia mallei
atgcggcgcctcgcgatcatctaccgtctcggcgtgaaggaactctggagcctcgtgcgcgacccgatcctgctcgtgctgatcgcctacacgttcaccgcgtcgatctactcggccgcgaccgcgcggcccgacacgctgcacatggcgccgatcgcgatcatcgacgaggacgcctcgccgctgtccgcgcgcatcgcatcggcgttctttccgccgcagttcgcgctgccgaggatggtgacgctcgccgaagcggaccgcggcatggacgcgggcgacttcacgttcgcgctcgacatcccgccgaacttccagcgcgacgtgctcgcggggcggcccgcgcagatccagctgaacgtcgacgcgacgcgcatgagccaggcgttcacgggcaacggctacgtgcagcagatcgtgagcggcgagatcgacgatttcgcgcgccgctaccgggcgaacacggcgccgcccgtcgacatcgcgatgcacatgcgcttcaacccgaatctggaccagacgtggttcggctcgctgatggaagtgatcaacaacgtgacgctgctgtcgatggtgctcaccggcgcggcgctgatacgcgagcgcgagcacggcacgatcgagcacctgctcgtgatgccggtgacgccgggcgagatcatgctggcgaaggtgtggtcgatggggctcgtcgtcgcgtgcgcggcggcgttctcgctcgcgttcgtcgtgcgcggcgcgctgcacgtgccgatcgagggatcggtcgcgctcttcgtcatcggcatggcgatccacctgttcgcgacgacgtcgatgggcatctttctcgcgacgctcgtgcgcagcatgccgcagttcgggatgctgctcgtgctggtgctgctgccgctgcaactgctgtcgggcagcctgacgccgcgcgaaagcatgccgttcgcggtgcagaacatcatgctcgccgcgccgacgacgcacttcgtcgagatcgggcaagcgatcctctatcgcggcgcgggcatcgagacggtatggcggcagttcctgatcctggcggtgatcggcaccgcgctgttcctgctgtcgctgaagcggtttcgcaagacgatcgggcagatggcg

SEQ ID NO: 14272 - DNA, 744 bp, Burkholderia mallei
atgaagccatcgacggaagaccgctggtccgatctgcgccccgaccccgacaacgacacgccgctttatctgcaactcgcccgcaagctgggcgacgcgatccacgacaaccgttgggccgcgggcgaagcgctgccttccgagcggctgctcgcggaatcgctcggcgtgtcgcggatcaccgcgcgcaaggcgatcgcgctgctcgtcgagcaagggctcatccggcgcacgcaaggcgcgggcaacttcatccagccgcgctacgaggatccgctgtcgcggctgtcgagcttcagcgaaatgctcaagcggcgcggcttcacgccgagctcgacatggctgtcgcgcgacatccagcccgcgaatcgcgacgaggtgatccagctcgggctttcgcccgccgcatcggtcacgcgcctgaagcggctgcggctcgcggacggcatcgtgatggccgtcgagaattcgacgttccccgcaacgatcgttcccgatccgcaggcaatcggcgattcgctttacagctatctcgagcagcgcggcacgccgatcgtgcgcgcgctgcagcactttcgcgcggtcaacgcgaccgacgagatcgcgcggcagatgggcatcgcgccgcacgacgcgctccttttgatcacccggatcggcttcacgcacgatcagcgcgcgatcgaactcaccgacacatactgtcgaaacgattactacgatttcgtcgtcgaactgcgcaaa

SEQ ID NO: 14273 - DNA, 1701 bp, Burkholderia mallei
ttgaacaaccggcgcgcgacgagtgttcagcaatggcgcagtccgccgcgccgagcgcgcgccgagccccgcgccggcgccccgatgcaccgcggcgcggcgtgctggcacggttttggcgtaacgaacggcgtcgcgcacgtcgcgcggcgcatcaccgataccgacatgcgaggagcaacgatgaatcacgcggacatgcaacatctgaacatcgaattcccgtaccgcaagcagtacgggaatttcatcggcggcgaatgggtcgccccggtcggcggcgagtatttcgacaacgtctcgcccgtcaccggccggccgttcaccgcgatccctcgctcgcgcgaagccgacatcgagctcgcgctcgacgccgctcacgcggccaaggcgggctgggccgcgaagggcgcggccgagcgcgcgaacgtgctgctgaggatcgccgaccggatggaggcgaacctcacgcgcctcgccgtcgccgagacgatcgacaacggcaagccgctgcgcgaaaccaccgcagccgacgtgccgctcgcgatcgaccacttccgctacttcgcgggctgcatccgcgcgcaggaaggctcgatcgccgatatcggcggcgacatggtggcctaccacttccacgagccgctcggcgtcgtcggccagatcatcccgtggaacttcccgctgctgatggccgcgtggaagctcgcgccggcgctcgcggccggcaactgcgtcgtgctcaagccggccgagcagacgcccgcgtcgatcctcgtgttcgccgagctgatccaggatctgctgccgcccggcgtgctcaacatcgtcaacggcttcggcctcgaggccggcaagccgctcgcgtcgagcaagcggatcgcgaagatcgcgttcacgggcgagacgtcgacgggccgcctcatcatgcagtacgcgagcgagaacctgattcccgtcacgctcgagctgggcggcaagagcccgaatattttcttcgccgacgtgatggatcgcgacgacagctacttcgacaaggcgctcgaaggcttcgcgatgttcgcgctgaaccagggcgaagtctgcacgtgcccatcgcgcgcgctcgtcgaggagagcatctacgatcgcttcatcgaacgcgcgctcaagcgcgtcgaggcgatcaagcagggccatccgctcgattcgcagacgatgatcggcgcgcaggcgtcggccgagcagctcgagaagatcctgtcgtacatcgacatcggccgcggcgaaggcgcgcaatgcctgacgggcggcgagcgcaacgtgctcggcggcgagctcgccgaaggctattacgtgaagccgaccgtgttccgcggccacaacaagatgcgcatcttccaggaagaaatcttcgggccggtgctcgcggtgacgacgttcaagaccgaggaggaagcgctcgagatcgcgaacgacacgctgtacggcctgggcgccggcgtctggacgcgcgacggcaaccgcgcgtaccgcttcggccgcggcatccaggcgggccgcgtgtggacgaactgctatcacgcgtatccggcgcacgcggcgttcggcggctacaagcaatccggcatcggccgcgagacgcacaagatgatgctcgaccactaccagcagacgaagaacctgctcgtcagctacagcgaaaagccgctcgggttcttc

SEQ ID NO: 14274 - DNA, 622 bp, Burkholderia mallei
cccgtgaagatcgccgcgttcgtcgcggcgctgtatccgctcgcgcgtatcgtgttcttcggcgtgacggaccggctcggcgcgaacccgatcgagttcgtcacgcgctcgacggggctctggacgctcgtgttcctgtgcatcacgctcgccgtcacgccgctgcgccggctgacgggcatcaacgcgctgctgcggttgcggcgcatgctcgggctctacgcattcttctacgcggtgctgcacttcacgacctacatctggttcgacaagtggttcgatgtggtggagatcgcgaaggacgtcgtgaagcgtccgttcatcaccgtcggcttcgccgcgttcgtgctgctgattccgcttgccgcgacgtcgccgcgcgcgatcgcgaggcggctcggccggcactggcagacgctgcacaaggcgatctatgcgatcgccgcgttcggcatcctgcatttctggtggatgagggcgggcaagcacgatctcgcactgccgaagctgtacggcgcgatcgtgctcgtgctgctcggctggcgcgtgctcgtatgggcgcggcaacgctggggcgcagcggcggcgggcggacgcgcgtcgtagcgcgaggggcgggcgc

SEQ ID NO: 14275 - DNA, 1920 bp, Burkholderia mallei
ttggagcctgacggccaagcgctgcttttcgatccgactcccgggagcgattgcccgggagcgcaaaaaaacgtcggttttaaccgaggccggccgacgcgcttgaccgcgaaacgacgctggggcgacgcacgcaatgccgcaatgcgcatgacaggctcagaaaccggcaattataacaacaaaatcaagcgagtggcaagcgaaagccgcatcggccgaatgccggcgccggcgcgcgcgcgcgggccggcgggctcgcggcagcggctggtgagcggggcgtcccgagccggtgcgccgatgccggtgcgcgccttttgctcgaacgtatcggtcgccgccgcccgaggtccgtataataagcgccccatgaatctattccgagccctgctgacggtcagcggcttcacgctgctgtcgcgcgtgaccggactggcccgtgagacgctgatcgcccgcgcgttcggcgccagtcaattcaccgacgcgttctacgtcgcattccgtattccgaacctgctgcgccggctgtccgccgaaggcgcgttttcgcaggcgttcgtgccgattctcgccgagttcaagaatcaaaaagggcacgatgcgacgaaggcgctggtcgacgcgatgtcgaccgtgctcgcgtgggcgctcgcgctcctgtcgctcgcggggatcgcaggcgcgtcgtgggtggtgttcgcggtcgcgtcggggctgcgcacggacggccaggcgttcccgctcgctgtcgcgatgacgcggatcatgttcccgtacatcgtgttcatttcgctcaccacgctcgcgtcgggcgtgctcaacacgtacaagcgtttctcgctgccggcgttcgcgcccgtgctgctgaacgtcgcgttcatcgtcgcggcggtgttcgtcgcgccgcacctgaaggtgcccgtctatgcgctcgcatgggcggtgatcgcgggcggcgcgctgcagttcgcggtgcagttgccggggctgaagaagatcgacatgatgcccgcgatcggcgtgaatccgctgcgcgcgctcgcgcacccgggcgtgaagcgtgtgctggcgaagatggtgcccgcgacgttcgcggtgtcggtcgcgcaactgtcgctcatcatcaatacgaacatcgcgtcgcggctcgggcagggcgccgtgtcgtggatcaattacgcggaccggctgatggagtttccgaccgcgctcctcggcgtcgcgctcggcacgatcctgctgccgagcctgtcgaaggcgcacgtcgacgccgattcgaccgagtattcggcgctcctcgactggggcctgcgggtcacgttcctgctcgcggcgccgagcgcgctcgcgctgttcttcttcgccgagccgctcacggcgacgctgttcaattacggcaaattcgacgcgcacacggtcacgatggtcgcgcgcgcgctcgcgacgtacgggatcggcctcgtcggcatcatcctcatcaagatcctcgcacccggcttctatgcgaagcaggacatcaagacgcccgtgaagatcgcgatcggcgtgctcgtcgtcacgcagttgtcgaactacgtgttcgtgccgatcatcggccacgcggggctcacgctgagcatcggcgtgggcgcgtgcctgaactcgctgctgctcttcatcgggctgcgccgccgcggcatctatcagccgtcgtccggctggctgcgctttttcgcgcagctcgcgggcgcctcgctcgtgctcgccggcgtgatgcactggctcgcgatcaacttcgactggaccgcgatgcgcgcggcgccgctcgagcggatcgcgctgatggccgcctgcctcgttctgttcgctgcactatatttcggtatgttgtggctgatgggtttcaaatacgcgtacttcagacggcgcgccaag

SEQ ID NO: 14276 - DNA, 429 bp, Burkholderia mallei
atggcaaagaagattgtcggctttatcaagctgcagattcctgcaggtaaagccaacccgtcgccgcccgtcggtccggcactgggccagcgcggcctgaacatcatggagttctgcaaggcgttcaacgcgcagactcaaggcatggaaccgggcctgccggtgccggtcgtcatcacggcgtacgcggacaagagcttcacgttcgtgatgaagacgccgcccgcgacggtcttgatcaagaaggcggcgaaggtcgacaagggctcgagcaagccccataccgacaaggtcggcaagatcacccgcgcacaagcggaagaaatcgcgaagaccaagatgccggatcttacggcagcggatctcgacgcggccgttcgcaccatcgctggtagcgcacgctcgatgggcatcactgtggagggcgtg

SEQ ID NO: 14277 - DNA, 392 bp, Burkholderia mallei
gatcgtcagacgatctccgacacgaccgccaaaatgctgctcgaagtgcaagcggtgcacttcaacgccgacaagcccttcatcttcacgtccggatgggcgagccccgtctacatcgactgccgcaagctgatctcgtttccgcgcgtgcgccgtgggctgatggaaatggccgaggcgacgatcctgcgcgacgtcggcttcgagcagatcgacgcggtggcgggcggcgaaaccgccggcatcccgttcgccgcgtggatcgccgaccggatgatgctgccgatgcagtacgtgcgcaagaagccgaagggattcggccgcaacgcgcagatcgagggctatcggaagaaggctcgcgcgtgctgctcgtcgaggacctgacgaccgac

SEQ ID NO: 14278 - DNA, 1570 bp, Burkholderia mallei
ctgctgctctcgcccgccgacaattgcctgatcgccgcgacgcgcctgtgcgcggggcaagcagtgacgatcgacggcgagcgcgtcgtgctcgcgcagacggtcgagctcggccacaagatcgcgcgcgcgccgctcgccgcgaacgacaaggtgctgcgctacggcgcgccgatcggccacgtgacacgcgaggtcgcgcgcggcgagcacctgcacacgcacaatctcgtgagcgattacctgccgacgtacacgcgcgacgcgggccgcgcgttcgtcgcgcattgatgcgcacgcaaccgtttattcaggtgaacccttcatgtccatgacagtttcgacgccggcttctccggagctttccgccgacggcgtgcgccgcgtgctgctcgcgggctatgcgcgcagcgacgggcgcaagggcattcgcaatgtcgtcgcggtggcgtatctcgtcgaatgcgcgcatcacgtcgcgcgcgagatcgtcgcgcagttccgcgcgccgccgcgcctcggcgacgcggcgcccgccgccgaggcgccgcccgtgcacctgatcggctttcccggctgctacccgaacggttacgcggaaaaaatgatcgagcggctcgcgacgcatccgaacgtcggtgcggtgctgttcgtgtcgctcggctgcgagagcatgaacaagcactacctcgtcgacgcggtgcgcgcgagcggccgcccggccgaggtgctgacgatccaggaggcgggcggcacgctgaatacgatcggcgcgggcgtcgattgggtgcgcgatgcgcgcgccacgctcgcgaggcaggcgaaggtgccgatgggcgtgggcgaactgatcgtcggcacgatctgcggcggctcggacggcacgagcggaatcaccgcgaatccggccgtcggccgcgcgttcgatctgctcgtcgagcagggcgcggcgtgcctgttcgaggaaacgggcgagctcgtcggctgcgaatatcacatgcagagccgcgccgcgcgccccgagctcggccgcgagatcgtcgcgtgcgtgaagaaggcggagcgctattactcgatcctcgggcacggcagcttcgccgtcggcaacgcggacggcgggctcacgacgcaggaggagaaatcgctcggcgcgtatgcgaagagcggcgcatcgccgatcgtcggcatcgtgaagccgggcgacgtgccgccgacgccgggcctctatctgctcgacgtcgtgccggacggcgagccgcgtttcggattcccgaacatcagcgacaacgcggagatcgccgagctgatcgcgtgcggcgcgcacgtgatcctgttcacgacgggccgcggctcggtggtgggctccgcgctcgcgcccgtcgtcaaggtgtgcgcgaatccggcgacataccgcaagctcgaaggcgacatggacgtggacgcgggccgcattctcgaaggccgcgcgacgctcgatgaagtcggccgcgagattttcgcgaagacgctcgccgtcgcgagcggcgcggcgtcgaaatccgaggcgctcggtcaccaggagttcatcctg

SEQ ID NO: 14279 - DNA, 897 bp, Burkholderia mallei
atgaacgcacccgctcccaccggtttccgttgcggcatgatcgcgatcgtcggtcgtccgaacgtcggcaagtcgacgctgatgaacgcgctcgtcggccagaagatcagcatcacgtcgcgcaaggcgcagacgacccgccaccggatcaccggcattcatacgctcgacgatgcccagtacatcttcgtcgacacgcccggttttcagacccgccacagcaccgcgctcaaccggtcgctgaaccgcgcggtgacatcgacgctcacgtcggtcgacgcgatcctgttcgtgatcgaggcgggccgcttcggccccgacgaccagaaggtgctcgacctgattccgcccggcacgccgacgctgctcgtcgcgaacaagctcgaccgcgtgtccgacaaggacacgctgtacccgttcttccagaaaatgggcgggctgcgcgagttcgcggagatcgtgccgctgtcggcgaagcatccggaagacatccagcggctgatgaacacgatcaagccgtatttgccggaaggcgacgcgatctacggcgaagacgatctgaccgaccgcagctcgcgcttcctcgcggccgagatcctgcgcgagaaggtgttccgctggacgggcgacgagctgccctacacgagcaccgtcgtcatcgacaagttcgaggaggaggggcggctcacgcgcgtgttcgcgacgatcctcgtcgagcgcgattcgcacaaggcaatggtgatcggcaagaagggcgcgaagctcaagcagatcagcaccgaggcgcggcaggacatggagaagctgttcgacggccccgtctatctcgagactttcgtcaaggtgaggagcggctgggcggacaacgaagcggggctgcgcgcctatgggtacgaa

SEQ ID NO: 14280 - DNA, 1533 bp, Burkholderia mallei
atgaccgtcatcaaacaggaagacctgatccagagcatcgcggattcgctgcagtacatcagctactaccatccgctcgattacatccaggcgctcggccgcgcatacgagctcgagcagagcccggccgcgaaggatgcgatcgcgcagatcctgacgaacagccgcatgtgcgcggaaggcaagcgcccgatctgccaggacacgggcatcgtcacgatcttcgtgaaggtcggcatggacgtgcgctgggcaagcgagaacggcgccgcgacgatgagcgtcaccgacatgatcaacgaaggcgtgcgccgcggctacacgcatccggacaacgtgctgcgcgcatcgatcgtcaacccgcccgaaggcgcgcgcaagaacacgaaggacaacacgccggccgtgatccattacgagatcgtgccgggcgacaaggtcgacgtgcaagtcgcggcgaagggcggcggctccgagaacaaatcgaagttcgtgatgctgaacccgtcggattcgatcgtcgactgggtactgaagaccgtgccgacgatgggcgcgggctggtgcccgccgggcatgctcggcatcggcatcggcggcaccgccgagaaggcgatgctgatggcgaaggaatcgctgatggagccgatcgacatccaggaaatcatcgcgcgcggcccgaaggactgggtcgaggaactgcgcgtcgagctgcacgagaaggtcaacgcgctcggcatcggcgcgcagggtctcggcggcctcgcgaccgtgctcgacgtgaagatcctggccgcgccgacgcacgcggcgtcgaagcccgtcgcgatgatcccgaactgcgcggccacgcgccatgcgcacttcgtgctcgacggctcgggcgcggcgaagctcgaggcgccgtcgctcgacgcatggccgaaggttcaatgggaaccgaacaccgagacgagcaagcgcgtcgacctgaacacgctgacgccggaagaagtcgcatcgtggaagccgggccagacgctgctgctgtcgggcaagatgctcacgggccgcgacgccgcgcacaagcgcatcgccgacatgctcgccaagggcgagccgttgcccgtcgacttcaagaaccgcgtgatctactacgtcgggccggtcgatccggtgcgcgacgaagtggtcggtccggcgggcccgacgacggccacgcgcatggacaagttcaccgagacgatgctcgcgcagacgggcctcatctcgatggtcggcaaggccgagcgcggcccggtcgcgatcgacgcgatcaagaagcacaaggccgcttatctgatggcggtcggcggcgccgcgtacctcgtgtcgaaggcgattcgcggcgcgaaggtgctcgcgttcgaagacctcggcatggaagcgatctacgagttcgacgtacaggacatgccggtgacggtcgcggtcgattcgcagggcacgtcggtccatcaaacggggccgaaggagtggcaggcgaagatcggcaagatccctgtcgcgagcgcg

SEQ ID NO: 14281 - DNA, 1309 bp, Burkholderia mallei
ggacgagctcggcgcggcgcatcgcggcgaaagacgtattataaaatccgtccttcgatttcatcttcccggcgttccctttccgtgacctcccgactttttgccctgattccgtgcgccggcaccggcagccgttccggctcggcattgccgaagcaataccgcacgctcgccggacgcgcgctgctgcactacacgcttgccgcgttcgacgcatgcagcgagttcgcgcagacgctcgtcgtgatctctcccgacgacgcccacttcgacgcgcgccgcttcgccggcctgcgcttcgcggtgcggcgctgcggcggcgcgtcgcggcaggcgtcggtgatgaacgggctgatccagctcgccgaattcggcgcgacggacgccgactgggtgctcgtgcacgacgccgcgcgccccggcatcacgccggcgctgatccgcacgctgatcggcgcgctgaaggacgaccccgtcggcggcatcgtcgcgctgccggtcgccgacacgctcaagcgcgtgccggcgggcggcgacgcgatcgagcgcaccgaatcgcgcaacggcctctggcaggcgcagacgccgcagatgttccgcatcggcatgctgcgcgacgcgatccggcgcgcgcagctcgatggccacgacctgaccgacgaggcgagcgcgatcgaatgggcgggccacacgccgcgcgtcgtgcagggcagcctgcgcaacttcaaggtcacctatccggaggatttcgacctcgcggaggcgatcctcgcgcaaccggcgcgcgcttcctgaaccgcatcttcaccatcgcatcacactcggatcgaatcacatggatttcagaatcggacaaggctacgacgtgcaccagctcgttcccggacgcccgctcatcatcggcggcgtgacgatcccttacgagcgggggctgctcggccactcggacgccgacgtgctgctgcacgcgatcaccgacgcgctcttcggcgcggcggcgctcggcgacatcggccgccacttttccgacaccgatccgcgcttcaagggcgccgacagccgcgcgctgttgcgcgaatgcgcatcgcgcgtcgcgcaggcgggttttgcgatccgcaacgtcgacagcacgatcatcgcgcaggcgccgaagctcgcgccgcatatcgacgcgatgcgcgcgaacatcgcggccgatctcgacttgccgctcgatcgcgtgaacgtgaaggcgaagacgaacgagaagctcggctatctcgggcgcggtgaggggatcgaggcgcaggcggctgcgctcgtcgtgcgc

SEQ ID NO: 14282 - DNA, 2274 bp, Burkholderia mallei
atgcgctattcggtcgaaatcaggaagtttttctacagccagtatttcttcggcggcctacgtatcgcgctcggcgtgtcgctgcccgccgtactgagcctcgccgtgctgcacgaccgcgagctcggcttcacgatcgccacgggcgcgctcggcgcatgcgtcgtcgacatgccgggcccgctcaagtacaagcacaacgaaatgctcgcgtgcagcgtgatcggctttttctccgcgctcgcgaccgggctcgcgacgccgaacatcttcgcgctgtggctcacgatcgtgccgctcacgttcgtgctgtcgctcatcgtcgtctacggcaaccgctggccgcagatcagcttcgcgacgctgttcatgatggtgatgacgctcgaagagaaattcacgccgctgcaggcgctcgtcaacgcgtcgtggattctcgcgggcgggctgtggtacacgtactgggcgaccatcgtgtcgcgctggcaggcgcgccgcatcgagcagcaggcgctcgccgagagcctgttcgcatgcgcgtcgtacctgctcgcgcgcgcggacttctacgatctcgacgcggatctcgacgagtgctaccgcaacctcgtcgcccggcagatcaccgcggtggagacgcaggaaaccgcgcgcgacatcgtgctgcgcaacctgccgaagctgcgccgcggcaagctcgacccgggccgcacgatgatgttcaacctgttcatcaacagcgtcgacctgcatgagatgttcgtcggcgcgcacaccgattacccgctcgtgcgcagcacgttcggcggctcggacctgatgatcttctaccgcgacctgatccgcaaggcctccgccgacctcgaggaaatcggcttcgcggtgctcgagaaccggctgccgcattcgcgcatcagcgtgaaggccgaattgcgcgcgatcgaatacgagatcgagctgatgcgcaagaagcagttcgcggcgacccaccccgaagcgtacgcggccgtgctcgcgacgttccgccggatctggagcgcgacgcgcctcatcgacaagatgcgccgcaacctgtcgggcagcgccgacgcgcagcgcaccgagctgaagatcgacaaggcgctcacgcgcttcctgcagaagcgccggatgtcgccgctgctgattttctcgaacctgaacatgggctcgccaagcttgcggcacgcgctgcgcgtgacgatcgcggtggcggtcggcttctggctcgggcgcctgctgccgctcacgaacgcttactggatcgtgatgacgagcatcatcatcctgaagcccggctattcgctcacgaagcagcgcaacgcgcagcgtatcgtcggcacgctgatcggctgcgcggcgagcctcgcgctgatctacacggtgcacgagccgcacgtgctgatcgcgatcatgttcggctcgatggtgataagctacagcctgctgctcttcaattacgcggcgagcgtcgtgttcacgtcgtcgtacgtgctgctgctcttccatctgctcgcgcccggcaacatgcggatcatcggcgagcgcgcgatcgacaccgtcgtcggctgcatgatcgcgatcgccgcgagccgcctcttcccgtactgggagtaccgcgcgatcggcaagctcgtcgccgacgcgctcgcgacgacgcgcaagtacttcgaggccacctggcgcgcgggccgcggcaaggcggcccccgccgtgcccgccgccgacggcgcggcggccgtgcccgcggtggcggccgtcgtcgacgcggtggcgcccggcctcgacggcgactatcaataccggctcgcgcgcaagaacgtgcacatcgcgttcgcgaacctcggccaggcgttccagcggatgatgctcgagccgaaggcgcaccagaagttcgtgcccgagctcaacgatctgctcgtgcagacccacgtgctcggcgcgcagatcaccgcggccgcgccgctgctgcgccacgcgtgcgagcagggcaatccgcccgcgctcgagcgcggaatggccgccgtgcgcgagcacctcgagcaggccgaggccggcgtgccgccgccggcgaaccaggccgagacgagcaagcagctcacgcgcgagctcgattcgatggtcgtcgacgccgagcgctccgacgcgggcgccgatctcgcgcacgacctgaaggtgctcgcgcatcagtgcaagcagatgctcgcgtcgtcgctgctgatccgcaaggacgcgagcgtgatccggctgcccgag

SEQ ID NO: 14283 - DNA, 2070 bp, Burkholderia mallei
atgccgcccgtgccccgttttctcgactcgttctccggactcgacatgacgacttcgtctcccgcctccaccactctgatggccaacgcgatccgcgcgctcgcgatggacgccgtccagcaagcgaactccggccaccccggcatgccgatgggcatggccgagatcggcgtcgcgctgtggtcgcgccacctgaagcacaacccgacgaccccgcattgggccgaccgcgaccgcttcgtgctgtcgaacggccacggctcgatgctgctgtattcgctgctgcacctgacgggctacgatctgccgatcgaagagctgaagaatttccggcaattgcattcgaagacgccgggccacccggaatacgggatcacgccgggcgtcgagacgacgacgggcccgctcggccagggcctcgcgaacgcggtcggcatggcgctcggcgaggcgctgctcgccgccgagttcaaccgcgacgacgcgaagatcgtcgatcatcacacgtacgtgttcgtcggcgacggctgcctgatggagggcatctcgcacgaagcgtgctcgctcgcgggcacgctcaagctcaacaagctgatcgcgttctacgacgacaacgggatctcgatcgacggcgacgtcgtcaactggttccacgacgacacgccgaagcgcttcgaggcgtacggctggaacgtgattccgaacgtgaacggccacgacgtcgacgcggtcgatgccgcgatcgcgaaggcgaagagcgcggacaagccgacgctcatctgctgcaagacggtgatcggcaagggcgcggcgacgaaggcgggcggccacgacgtgcacggcgcggcgctcggcgcggaggaaatcgcgaagacgcgcgacgcgctcggctggaagtgggcgccgttcgtgattccgcaggaagtctacgcggcgtgggacgcgaaggaagcgggcaagcgccgcgaaggcgactggaacgcggcgttcgcgcagtaccgcgcgaagtacccggccgaggccgccgaattcgagcgccgcatggcgggcaagctgccggccgactgggccgagaaggccgcggcgatcgtcgccggcgcgaacgagcgcggcgagacggtcgcgacgcgcaaggcgtcgcagcagacgatcgagggccttgccgccgtgctgcccgagctgctcggcggctcggccgacctgacgggctcgaacctcacgaactggaaggcgtcgaaggcggtgcgcgcgaatgcgcacggcgcgggcatccagtggggcaaccacatcaactacggcgtgcgcgaattcggcatgagcgccgcgatcaacggcctcgtgctgcacggcggctacaagccgttcggcggcacgttcctcacgttctccgactacagccgcaacgcgctgcgcgtcgccgcgctgatgaaggtgccgtcgatcttcgtgttcacgcacgattcgatcggcctcggcgaagacgggccgacgcaccagtcggtcgagcatgtcgcgagcctgcggctgattccgaacctcgacgtctggcgcccggccgacacggtcgagacggcggtcgcgtggacccacgcggtctcgcaccagcacccgtcgtgcctggtcttcagccgccagaacctcgcgttcaacgcgcgcaccgacgcgcagctcgcgaacatcgagaagggcggctacgtgctgcgcgactgggacgaagagatcgtcgcgcgcaagatcatcctgatcgcgacgggctcggaagtggagctcgcgatgaaggcggtcgagccgctcgcgcagcaggggatcgccgcgcgcgtcgtgtcgatgccgtcgaccgacgtgttcgaccggcaggacgccgagtaccgcgagcgcgtgctgccgcacggcgtgcgccgcgtcgcgatcgaagcgggcgtcaccgatttctggcgcaagtacgtgggcctcgaaggcggcgtggtcggcatcgacacgttcggcgagtcggctccggctggcgtgttgttcaagcatttcggcttcacgatcgagcacgtggtcgaaacggcgaaggcggtgctcgcg

SEQ ID NO: 14284 - DNA, 1401 bp, Burkholderia mallei
atgctcgccactgattccgatccgatcgtcgccattgccaccgcgtcaggccgaggcgggatcggcgtcgtgcgcctttcgctcgggcgagcgggggaagcggcggcgcgcgcgctgagcgatgcgctgtgcggtgcgcgactcatgccgaggcatgcgagctacgtgccgtttctcgacggcgcgggcgagccgctcgatcgcggcatcgcgctctatttccccgcgccgcattcgtatacgggcgagcacgtgatcgagctgcaaggccacggcgggccgatcgtgctgcagctcttgctgcagcgctgcctcgacgccgggcgtgcgcatgggctgcggctcgctgagccgggcgaattcacgcgccgggcgttcctgaacgacaagctcgacctcgcgcaggcggaggccgtcgccgatctgatcgaggcgagcaccgaggcggctgcgcgttcggcgggccgctcgctcgacggggcgttctcgcgcgacatccatgcgctcgtcgacgacgtgatcgcgctgcggatgctcgtcgaggcgacgctcgattttccggaggaggagatcgacttcctggaggcggccgacgcgcgcggcaagctcgcgcacatccgcgagcggctcgcgcacgtgctcggcgacgcgcggcagggggcgttgttgcgcgaggggctatcggtcgtgcttgccgggcagccgaacgtcggcaagtcgtcgctgttgaatgcgcttgcgggcgcggaactggcgatcgtcacgccgatcgccggcacgacgcgcgacaaggttgcgcagacgattcagatcgagggcattccgttgcacattatcgatacggcgggcttgcgcgaaacggaggacgaggtcgagaagatcggcatcgcgcgcacgtggggcgagatcgagcgggcggacgtcgtgctgcacctgctcgatgcgagaagcgggcttggcccgggcgacgaggcgatcgccgcgcgcttcccggacggcgtgccggtggtgcgcgtgctgaacaagacggatctgacgggcgcgccggcatcggtgacgcggacaggcggcggcgcggcgcgcgcggacgtatgtgaagtgcggctgtcggcgaagcgcggcgacgggatcgatttgctgcgcggcgagctgctgcggatcgccggttggcaggcgggtgcggaaagcgtgtatctcgcccgcgagcggcatctgatcgcgctgcgcgcggcgcaggcgcatctcgcgcgggcggcggagcacgcggagcagaatgcgcaggcgctggatctcttcgccgaggaactgcggctcgcgcaggagcggcttaattcgatcaccggggagtttacgtccgatgatttgttgggggtgatttttagtcggttttgtatcggaaaa

SEQ ID NO: 14285 - DNA, 1890 bp, Burkholderia mallei
atgaccgacacgaatcactcgtccatgcgccagcattcgctgcaatcgctcgcgatcgccgcgatcggcgtggttttcggcgacatcggcacgagcccgctgtactcgctcaaggaagcgttcagtccggcccacggcattcccctcacgcccagcgcgattctcggcgtgatctcgctgttgttctgggcgatcatcctcgtcgtcggcatcaagtacgtgctgttcgtgatgcgcgcggacaataacggcgagggtggcgtgctcgcgctgatggcgctgtcgctgcggccgctgaatccgaaatcgcgcatcaccggcctgatgatggcgctcggcatcttcggcgcatgcatgttctacggcgacgcggtgatcacgccggcgatctcggtgatgtcggcggtcgaagggcttgaagtcgcgacaccgcaactgtcgcacctcgtgctgccgatcacgatcgtgatcctgatcgcgctgttctggatccagcggcacggcacggcgacggtcggcaagctgttcggcccgatcatgctgctctggttcgtgacgatcgccgcgctcggcatctatcacatcgcgcgcgcgccgatgatcgtctcggcgatcaatccgtattacgcgttttcgttcatgtccgagcacgtgctgctcgcgtacgtcgtgctcggctcggtcgtgctcgtgctgacgggcgcggaggcgctctacgcggacatggggcacttcggcgcgaagccgatccggctcgccgcatacgtgctcgtgatgccgtcgctcgtgctcaactacttcggccagggcgcgctgctgctgctcgatccgaaggcgatcgaaaatccgttcttcctgctcgcgccgcaatgggcggcgctgccgctcgtggtgctgtccacggtcgcgaccgtcatcgcctcgcaggcggtgatctcgggcgcgtattcgctgacgagccaggcgatccagctcggctacgtgccgcggatgaagatcctgcatacgtcggagctcgcgatcgggcagatctacgtgcccgtcgtcaactggctgttgttgttcgtgatcctctgcatcgtgatcggcttcaagagctccgacaacctcgcggccgcgtacggcatcgcggtgacggcgacgatggtgatcacgacgatcctcgccgccgtcgtgatggtgaaggtctggaactggaacaagctgcttgtcgcgatgatcatcggcgtgttcctcgtcatcgatctcggcttcttcggcgcgaacctgctgaaggtcgagcagggcggctggctgccgctcggcatcggcgcgctgctgttcttcctgctgatgacgtggtacaaggggcgtcacatcgtcaaggagcgcaccgccgcagacggcattccgctcgcgccgttcctgcaggggctgctcgcgcatccgccgcaccgcgtgtcgggcaccgcgatctatctgacgggcaacgatacgctcgtgccggtgagcctcctgcacaacctgaagcacaacaaggtgctgcacgagcgcacgatcttcatgacgttcgtcacgcgcgacatcccgtatgtgaaggaccacgaacgagtgacggtccatgatgcgggcgaggggctctacatcgtcaaggcggaatacggctttaacgagacgccggacgtgaaggccgtgctcgaggaggtcgcgcgccagcgcggcatgacgttcgagctgatggacacgtcgtttttcctcgcgcgcgaaaccgtcgtgccgacccatctgccgggcatgtcgatctggcgcgagcgcgtgttcgcatggatgcaccagaacgccgcgaagccgacggatttcttcgcgatcccggcgaaccgcgtcgtcgagctcggcacgaaaatcgagatc

SEQ ID NO: 14286 - DNA, 1911 bp, Burkholderia mallei
atgacgcgagcattttgcccgaaggcttcgtggctttccctgggcgcctttctgttcgatctgatggcggtcgtatgcgcgtggctgatcgcgtatgtggtccggttcaatggtgcgatgccgcctgaattcctgaaaggcgccttcgtcgcgctcgcatgggtggtgccgttgtatggcctgctgtttcatgttttcgggttgtatcgcggtctctgggtatttgcgagcctgccggatctgctgcgtatctcgaaggccgtggtgggcggcggcttgatcgtgatgatcggcgcggtgatgctgcagccggttccgatcattccgcgttcggttctcgtgctgtcgccgatgctgctgtttcttgcgatgggtggtgcacgtgcgctctatcgggcgacgaaggagttctatctgtacggcggactgatcgggcagggcaagcccgtgctgattctcggcgccggcagtgccggcgcgagcctcgcccgtgaactgtcgcgctccggtgagtggcgtcttgccggtctgctcgatgacgatcccgcgaaacacgggcgcgaagtctacggctataaggtactgggttcgatcggcgaagtcgcagactgggccgaggccgcgaaagccgaatacgcgatcatcgcgattccatccgcatcggtcgaagcgcaacgtcgcttcgccaccctctgcgtgcgcgccggcgtcagggccatggtgctgccgtcgctgaccgcattgatgccgggccagggcattctgtcgcagatccgccagatcgatctcgaagacctgctcggccgcgaggccgtgacgatcgacacgccgcacgtcgaggcgctgctgcgcggccgcgtcgtgatggtgacgggcgcgggcggctcgatcggctcggagctgtgccgccagatcctgaagttccagcccgcgcaactgatcgcgttcgatctgtccgaatatgcgatgtaccggctcacggaagagttgcgcgagcgcttccccgatctgcccgtcgtgccgatcatcggcgatgcgaaggattcgctgctgctcgatcaggtgatgtcgcgctatgcgccgcacatcgtgttccatgcggccgcgtacaagcacgtgccgttgatggaggagctcaacgcatggcaggcgctgcgcaacaacgtgctcggcacgtatcgcgtcgcgcgcgcggcgattcgccacgacgtcaggcacttcgtgctgatctcgaccgacaaggccgtgaacccgacgaacgtgatgggcgcgagcaagcgcctggccgagatggcttgccaggcgctgcagcagacgagcgcgcgcacgcagttcgagacggtgcgcttcggcaacgtgctcggcagcgccggcagcgtgattccgaaatttcagcagcagatcgccaagggcggcccggtgaccgtcacgcatccggaaatcacgcgcttcttcatgacgattcccgaggcgtcgcaactcgtgctgcaggcgtcgagcatggggcagggcggcgagatcttcattctcgacatgggcgagccggtgaagatcgtcgatctcgcgcgcgatctgattcgcctgtacggcttcaccgaggagcagatccgcatcgagttcagcgggctgcgcccgggcgagaagctctatgaggaactgctcgccgacgacgagaccaccacccgcacgccacacccgaagctgcgcaccgcgaaggcgcgcgaggtgcccgatcatctgctcgacgaactgctgccgtggctgatgcagcaccgcgtgctgagcgacgatgaagtgcggcgcgacttgcggcgctgggtgcccgagtatcagccggccgtcggcccgacgctgcagagcgtgccgaccggcaacgggctcgtcgccggcatcgggcgcgaggcggggcgc

SEQ ID NO: 14287 - DNA, 483 bp, Burkholderia mallei
atgcccgcttcgttcgaacgcaagctgatcacccgcgacgcgctcgccgccatgcgcgcgtcgctgcccgcgcccgtcgtcttcacgaacggcgtattcgacatcctgcatcgcggccacgtcagctatctcgccgacgcgaaggcgctcggcgcgtgcctcatcgtcggcgtgaacagcgacgcatcggtgcgcatgctcggcaagggcgacgatcggccgatcaacgtgcaggaagaccggatggcgctgctcgccgcgctcgaatgcgtcgactgggtcgtcggcttcgacgagaagacgccggtgtcgctgatcgaggcggtgcatcccgacatcctcgtgaagggcggcgactacgacatggatgcattgcccgaatcggcgctcgtgcgcggctggggcgggcgcgcgctcgcgattccgttcgagcacgatcgctcgacgaccgcgttgttgaagaaggtgcgcgcgcagtcgcgc

SEQ ID NO: 14288 - DNA, 480 bp, Burkholderia mallei
gtgcagcgcgccgggcgcgtgcacgtcgatgccggccgcctcgagcgcatcgcggatccgcttcgcgaacgcgagcgcatgcgggccgtcgccgtgcaggcagaccgtctgcgcgttgagcggcacccattcgcccgtgaccgcgcgcacgcgctggccgcggaccatctcgagcgtgcgcgcgagcatctcgttttcgtcgtcgacgagcgcgcccggctggctgcgcggcacgagcgagccgtccgcgcgatagccgcggtcggcgaacacttcctcgacggcgacgagccccgcctgttgcgcggcgtcgacgaacccgcttttcgcgagcccgaacaccgcgagcgacggatcgaaatcgtggatcgccgacaccaccgcatcggcgatctcgggctcgcgcgcggcctggttgtacagcgcgccgtgcggcttcacgtgcgcgatgcgcccgccttccgcctgagcgatcgcaga

SEQ ID NO: 14289 - DNA, 483 bp, Burkholderia mallei
atgatctcagctgaaggcctgaaagaaatcgatcgagcgatcgcgaagtatcccgccgatcagaaacagtccgctgtgatgtcggcgctggccgtcgctcaggaagagcatggctggctgtcgcccgaactgatgcagttcgtcgcggactatctcggcatgccggccatcgcggtccaggaagtcgcgacgttctacacgatgtacgagctcgcgcccgtcggcaagcacaagatcacgctctgcacgaacctgccgtgccagctcggcccgcacggcggcgccgaggcgacggccgactatctgaagcaaaagctcggcatcgatttcggcgaaaccacgccggacggcaagttcacgctgaaggaaggcgaatgcttcggcgcgtgcggcgatgcgccggtgctgctgctcaacaatcacaaaatgtgcagcttcatgagccgcgagaagatcgaccagctgcttgaggagctctcgaaa

SEQ ID NO: 14290 - DNA, 2184 bp, Burkholderia mallei
ctctatcgatacgcgctcgaccacgtcgcgggggcgcgggctgcgttcgcggcgatcgcggacgcgagccgcacgcaaggcatgcgcgcgttcgcacgcaagctcgatgccgaagcggcgcttgccgatgcgcgggccgcgctcgcgcgcgaggaccgcgcggcggctcatgccgcgctcgagcgcgcgcgccgcgccgcgcccgacgatccggacatgctcgccgcggtcggggcgcagtggatcgacatcggcgaaatcgagcgcggtctcgcgccgctgcgcgactggatcgtcgcgcatccgcgcgaggccgacgccgacgtgcggctgcgctacggcgacctgctcggcggcgcgcggcgcgacgacgcactggccgcctggctcgacacgctgcgccgcggcggcgcgccgctcgacgccgcgcaaagcgcgcgcctcgaggatcaggcgctgcggctcgtgctgcgcgaaaccgatgacgcgctcgatcgcgacgattacgaggcggccgcgcgcgcgctcgatcgcgcgagcccggcaggcagggccgatcgccgctatgcgctcgaggcggccgagctcgcgcgcgcgcaggggcgctacgacaccgcgcgcgcggcgctcgcgccgctgctcgcgcgcgcgcccgacgacgccgacgcgcagctcgcgctcgcgcgcattctcgacgacgacggcgcgcccgcggatgcgctcgcgctcgtgcgcgacgtgctcgcgcgcacgccgcccgacgatgtcgacacgcagctgtccgcgctgcgccggctgaccgcgctgcgccgcgcgcgggatgcggccgcgctcgccgacacgctgcgcgccgcctatccggcgcgcgcggacgtgacggtcgcggccgggcgggtcgcgcaggcgctcggccgctatgacgacgcggcgtcgctgtactggctgtcgctcgcgcaggaacgcgcgacgggcatcgcgccgcgccgcgacggcgcgacgcccgcgcaggccgcatgggccgacttgcagcagcgccgcgatccgcagatcgaagcggggtggctgcccgcgtacaagtccggcgacgagggcgtgtccgcgtatcgcgcgcatcagatgccggtttatctgcagatgccgtatcgctacgacggtcacgcgttcgttcatctcgacgcggtgcggctcgacgcgggcacgctcgatacgagcgatccgcgcgcgtatgcgttcgacacgttcgcgacgcatccggcgctcgccgacgcagccgcgccgggcggcgcgctgcgccagcgcgcggcgggcatcggcggcggcatcggctatcgcgacgacgcgtggcgcgtcgacgtcggcacgacgccgctcggctttccggtgcattacgtcgtcggcggcgtgcgctaccggttcggcgcgggcccggcgagcgtcaccgtcagcgcggcgcggcggccggagacgggcagcatgctgtcgtacgcggggctgcgcgatccgtggacgggcgcgacctggggcggcgtgcggcgcgatagcgtcggcgtgcgcgcatccgtcgacatcggccgcgtgaatctgttcgccgatctcgccgccgcgcggctgaccgggcgcaacgtcgccgagaacgcggccgtcacgctgcgcacgggcttcatggcgcccgtctatcggcgcgcggacatgcgcgtgagcgcggggctcgtcggcaacgcgtggcactacgcgcagaacctgcgctactacacgtacgggcagggcggctactacagcccgcagcgctacctgtcgatcggcatgccgctcgaatgggcggggcggcgcggcgcgttcacgtgggacgtgaccgcgacggtcggcgtgtcgaattcgtacgagcgcgattcgccgtattttccgaatgggctgccgggctcgacgctcgtcaagtccgcgccggcgctcggcaacccggtgttctcgcgcggctcgacgcgcggcgtgtcgttctggtacgggttcgcggacgtcgccgagtatcgcgtgaacgggcggctcgccgtgggcgcgcgattcgatatcgaccacgcgcacgactacgcgccgagcgccgggctgctgtacgtgcgctatgcgttcgacgcgcgcaaggacagcggcggcttctcgccgtcgccggtccgactctattcgagctac

SEQ ID NO: 14291 - DNA, 894 bp, Burkholderia mallei
atgagtatgctgcgcgcgatgcaaaacaatcgttcgaaggttccgctctcgctcgctcagcgcgcgatttgcatggcggcgttcgcgctgctcggcgcgtgcgcgacgcggctcgatcaggcgcccgtcgtcgaccgctccggctcgctcggcacgacggccgccacgcagccgcccgcgccgctgccgcccgcgcctccgggttactaccgggtgaagccgggcgacacgctttatcggatcgcgctcgagaacggccagaactatcgcgacatcgccgcgtggaacaacctgaccaacccgaatcagatcgaagtcgatcagttgctgcgcgtgtcgccgaccgcgggcggcgcgacggcggccgcgcctgccgcgggcgcggtggtcacgccgccgctgtcgagcggcccgtcgaacggcgccgccgcggtgccgccgatctatggctccggttccaccgcgagcgccgcgccgagcgcgccggccgcatccgcgtcgagcgagccgagcgcgcccgccgcgaacggcaacgtgtcgttcgcgtggccggtgcgcggcgcgctgctgaacacgttcgacgattcgaagaacaaggggatcaacatcggcggccccgccggcgaggccgtgaaggccgccgcggatggtcgcgtggtgtacgcgggcaacgggctgcgcggctacggcaacctcattatcatcaagcacgacgcaacttatctcacggcgtatgcacacaatcgcgctttgatggtaaaagagggggacgcggtgacgaaaggccagaagatcgcagagatgggcaatagtgattccgaccgcgtgatgctgcatttcgaggttcgccggcagggtaaacctgtcgatccgctgaagtatttgccgcctcaa

SEQ ID NO: 14292 - DNA, 897 bp, Burkholderia mallei
ttgcaggtcgatcaggatctgacgcgtggcgagcggcgtgccgcccagataggtgttgagcagaaagcgcatcagcgtcttgctttgcgcaacggtctgcgcccgatggtaatcgtcctcttccatgtcgagcaacgtctggccggcgatcacgggccagtgcgacggcgcgtcgctgcccgcgtcgcgcacgccgcgctgcggatcgaacacatagagcttgtcgggctcgaccgcgcgccgcgcgacggtgcgcttgagcgtcatcgcatagcccgtctcgcgcagcagcacgcgctcgaacgagcgcagcacctgcacgggcggctcgccgtgcgccaggcgcgtgagcgtgacgaggtagtgctgaaagagcggcggatgcggatcttcgcgcgcacagaacttgacgagcagctcgttcgcgtagaagccgcacaacagcgcgtcgcccgcgagcggcagcatgccgcccacccattcggcgcccgtcagcgtgcgcagctccgatttgcccgaccacgacagcgacagcggctggaacgtctgcagcacgccgcgcagcgccgaatgcgggcgcttcgcgcccttcgcgacgagcgcgatgcggccgtggtcgcgcgtgagcacgtcgatgacgaggctcgtctcccggtacggatagctgtgcagcacgaacgccggctgctcggcgatccggaattcggacgtgcgcggcgcggcgcggcgcggcttgcgcgccggcttgtcggcagccggcgcgccggttgcgggcggcgcggcgaagggttgcaggtcggcgtcggcctcgtcggtcatcccgacatcggacgtcccgtcattcgtacccataggcgcgcagccccgcttcgttgtccgcccagccgctcctcacct

SEQ ID NO: 14293 - DNA, 1971 bp, Burkholderia mallei
atgctttatcccactgaatttgacgtcatcgtcgtcggcggcggtcatgccggcacggaggccgcattggcttccgcacgcatgggcgccaagacgctcctgctgacgcacaacatcgaaacccttgggcagatgagctgcaacccgtcgatcggcgggatcggcaagggccatctggtcaaggaagtcgacgcgcttggcggtgcgatggcggctgccacagacgaaggcggcatccagttccgcattctgaattcgtcgaaggggccggcggtccgtgcgacgcgcgctcaggcagatcgcgtgctgtacaagcaggcgatccgccgtcgtctggagaatcagccgaatctgtggttgttccagcaggctgtcgacgatctgatggtggagggggaccgggttgtcggcgcggttacccaggttggcgtccggttccgggcgcgcgcggtggtattgactgccggtacgttcctggacggcaagatccatgtcgggctcaatcactatacgggcggtcgcgcgggtgatccggcggccgtgtccttgtcgtcgcggctgaaggaactgaatctgccgcaagggcggctgaagaccggaacgccgccgcgcatcgacggccgaacgatcgatttctcgaagctcgacgagcagccgggcgatcttgatccgattccggtgttctcgttccttggtcgggccgagcagcacccccaacagttaccgtgctgggtcacgcataccaacgagcgcacgcacgacattatccgcagcggcctcgatcgttcgccgatgtatacgggcgtcatcgaaggcgtggggccccgctattgcccgtcgatcgaggacaagattcatcgctttgcgtcgaaagattcgcatcagatctttcttgagccggaagggctgacgaccaacgagttctatccgaacggtatttcaaccagcttgccgttcgatgtgcagcttgcgctcgtgcattcgatgcgaggtttggaacaggcgcatatcctgcgcccaggttatgcgatcgagtacgattatttcgatccccgcgcgctgaaatcgtcgctcgaaaccaaggcaattggcggtctattctttgcggggcaaatcaacggcacgaccggctatgaagaagccgctgcacaaggcctactcgcgggcatcaacgcgggccgctatgcacaggaaaaagacgcatggtgtccgcggcgggatcaggcgtatctcggtgtgctcgtcgatgatctggtgacgcgcggcgtatccgagccttatcggatgttcacgagccgcgccgagtatcggctcagcctccgcgaggacaacgcggacatgcgtctgaccgaaatcgggcgtgaattgggtgtcgttgatgacgttcgctgggacgcatttaaccgaaagcgcgatgctgtttcacgtgaaaccgaacggctgcgcacgacgtgggtaacgccaaagacgttgccggccgacgaagccaccgcgctgctcggcaagccgatcgatcacgaatacagtctcgcggagctgctacgccggccgggcgtcagctatgacggcgtgtgcggtttgcgtggcggcgagtgtggcccatccgaaccgctggccgaagacgaactgttgcttgcgcagatcaaggagcagattgagattggcatcaagtaccagggctatatcgagcgtcaggccggcgaaatcgaacggaatggtgcaaacgaaaatacgcgattgcctgacgggatcgactacacggaggtgcgtggcttgtcgttcgaagtcagtcagaagttgaaccaattccgcccggaaacgatcgggcaggcatcgcggatctcgggcatgacgcccgctgccatctcgctgctgatggtgcatctgaagaagcgcgggctgggccggcgaaagggcgcggacagtgtaccgggcgccgacgtgcaagccgacaacacggcggcgcaacaa

SEQ ID NO: 14294 - DNA, 1104 bp, Burkholderia mallei
atgaaccagcatgccgccgccgccccgctgcgcgatctcgcgggcgaagtgctcggcctgatcgacctgaagcagatgtttaccgacatccacatcgaacaggaccgccccgtcacgatcaagacgccgcgcggctgggtcgagacgagcgacgaaccggtgctcctcgacgacatgcgccctctgctcgatgcgatcgacgagcactgggagagcgcgctgcgccagggcacgctcgaccgcccgttcgtcctcacgcgctgccggctgcgctgccacgtgtatcgcgcgggcggcgggcgcaagatcgtgatctcgatgcggcggctgccgctcaagccgctgccgctcgaggagctcggcctgcccgtctacgtgcgctcgatgctcgacaacacgaagggcatcatcctcgtcaccggcccgacgggctccggcaagacgacgacgatcgcttcgctgctcgagcacgtcaacgcgacgcgcaacacgcatatcgtcacgatcgaggaaccgatcgaatactatctggagcgccgccagtcgatcatctcgcagcgcgaagtgccgaccgacacgccgaatttcccgcacgggctgcgcgaggcgctgcggcagaaaccggacgtcgtgatggtgggcgaggtgcgcgacgcgcagacggccgacacgctgctgcaggcgggcgaatccgggcacctcgtgctcgcgacgatgcacacgggcagcgcggtcagcgcgctcaacaagctgctgtcgttctttccggtcgagcagcgcgaccggcacgcggtcgcgctcgccgaatcgctgatcggcatcgtctgccagagcctcgtgccgagcgcggacggcgaaagcctcgtgctcgcgagcgagctgctgttcaacaacaacaaccaggtcgcaaagctgatcgcggacccgaccaagctgcacctcgtcaacgagttcctgcgccgccgggaggacaacatgtcgcgctcgctgaacgacgacctcgcggcgctcgcggcccgcaaccggatcacgacgaaggatgcgttacgggccacttacaatcggctcgagctgcatgaaatgatgcagtcgattgttaatcga

SEQ ID NO: 14295 - DNA, 1206 bp, Burkholderia mallei
atgcggcccgcacgcttttttcccaacccgaccgcccggcaatcgaggatctccgacatgatgaacaccgccgcccccgccgcttcgcccgcccgcgcgctcgcgcccgacgagctgcgcgacgcgttcctgcacctgaaagaaacccgcaagctgcgcaaccgcgacgtcgcgcaactgctcggcgtgagcgaaggcgaggcgctcgccgccttcgcgggcgagcgcgtcgtgcggctcgaatcgagcttcgtcgagctgttcgaggagatgccgcgcttaggcggcgtgatggcgctcacgcgcaacgcggccgccgtgcacgagaaggacggcgcgttcgagcagatgagccacgacggcccggtcggcctcgcgctcggcgcgatcgacctgcgcatcttctaccgcaactgggcggccgggttcgccgtctacgagccgaccgcgcacggcgtgatgaagagcctgcagttcttcgacgcgcagggcgacgcggtgcacaaggtctacctgcgcaagcacagcgatcacgccgcgttcgacgcgttcgtgtcgcgctggcggatgcccgtgcaatcgccggcgttcgcggtcgagcccgcgccgcccgcgcatgtcgaacggcccgacggcgagatcgacgccgcggggctgcgcgccgcgtgggacgcgatgacggatacgcaccagttccacggcgtcgtgcgccgccacggcgtgtcgcgcacgcaggcgctgcggctcgccggcgcgtcgcgcgcgcatcgcgtcgcgaccgacgcggcgcggcgcgtgctggagcgcgccgcgcagacgcggctgccgatcatggtgttcgtcggcaaccgcggcatgatccagatccacaccggcgccgtgacgaacatccgccgcatgggcacgtggatcaacgtgctcgacgaggatttcaacctgcatctgcgcgaggatctcgtcgcgtccgcgtgggtcgtgagaaagccgacgagcgacggcgccgtcacgtcggtcgagctgttcgacgcggcgggcgacaacatcgcgatgttgttcggcgcgcgcaagcccggacagccggaactcgcgggctggcgcgaactggcgggcgcgctgccgaggctcgacacggcggatgcggcggatgcggcgaccgtcgcgcatgccgccgacgtccccgtcgcgaccgacgccggagccgcgcga

SEQ ID NO: 14296 - DNA, 2598 bp, Burkholderia mallei
gtgaatcacgagcgtgagatcggcccgcggcgtgcgctcgccgatcacgtcgaacgtctcggtgccgtcgatcgcgagcgtcgcgcggttcgtgccgggcttgaactcgagcggcagcacgcccatgccgatcaggttcgtgcggtgaatccgctcgaagccttccgcgacgatcgcctcgacgcccgcgagccgcacgcccttggccgcccagtcgcgcgacgagccctggccgtaatcggcgccggcgatcacgacgagcggctgcttgcgggacatgtaggtctcgatcgcctcccacatgcgcatcaccttgccgtccggctcgacgcgcgcgagcgagcccttcttcacctcgccgtcgacgatcgccatctcgttgacgagcgtcgggttcgcgaacgtcgcgcgctgcgcggtcaggtgatcgccgcggtgcgtcgcgtacgagttgaagtcctcttcgggcaggcccatcttcgcgaggtattcgcccgccgcgctcgtcggcaggatcgcgttcgacggcgacaggtgatcggtcgtgatgttgtcgccgagcacggcgagcgcgcgcatgcccttgagcgtgcgctcgcccgcgagcgcgccttcccagtacggcgggcggcgaatgtacgtgctccgcggccgccagtcgtacagcggcgccgcgcgctcgccggcgtcggccgcgcgcgcgaacatcggctcgtagacggtgcggaactgctcgggcttcacgctcgacgcgacgatcgcgtcgatctcctcgtcggtcggccagatgtccttcagcgtgacgggcttgccgtccttgtcgtggccaagcgcgtccttctcgatgtcgaagcggatcgtgcccgcgatcgcgtacgcgacgacgagcggcggcgacgcgaggaacgcctgcttcgcatacggatggatgcgcccgtcgaagttgcggttgccggacagcacggccgtcgcgtacaggtcgcgatcgacgatctcccgctggatcttcgggtcgagcgcgccggacatcccgttgcaggtcgtgcacgcgaacgcgacgatgccgaagccgagcttctccagctcgggcagcaggttcgccgccttcaggtacagctcgaccgccttcgagccgggcgcgagcgagctcttcacccacggcttgcgcgcgaggccgcgcgcgttcgcgttgcgcgcgagcagcgccgcggcgatcacgttgcgcgggttgctcgtgttcgtgcagctcgtgatcgcggcgatgatcaccgcgccgtcgggcatctcgcccggtttctcctcccatttgccggcgatcccgcgcgcggcgagatcggacgtcggcagccgcttgtgcggattcgacgggccggccatgttgcgcacgacgctcgacaggtcgaacgtcagcgtgcgctcgtactgcgcgtgcgcgaggctgtcggcccacaggcccgccgccttcgcgtaggtttcgacgagcttcacctgctcgtcgctgcggcccgtcaagcgcaggtaatcgatcgtctgctcgtcgatgaagaacatcgcggcggtcgcgccgtactcgggcgccatgttcgagatcgtcgcgcgatcgccgagcgtgaggctcttcgcgccctcgccgcggaattccagatacgcgccgaccactttctcgcggcgcaggaattcggtcagcgcgagcacgacgtcggtcgcggtgatgccgggctggcgcttgccggtcagctcgacgccgacgatgtcgggcagccgcatccacgatgcgcggccgagcatcacgttctccgcctccagcccgcccacgccgatcgcgatcacgccgagcgcgtcgacgtgcggcgtgtggctgtcggtgccgacgcaggtgtccgggtacgcgacgccgtcctgcgcctggatcacgggcgacatcttctccagattgatctggtgcatgatgccgttgccgggcggaatcacgtcgacgttctcgaacgccttcttcgtccattcgatgaagtggaagcgatcctcgttgcggcgatcctcgatcgcgcggttcttcgcgaacgcgtcgggatcgaagccgccgcattcgacggcgagcgaatgatcgacgatcagttgcaccggcacgaccggattcaccttcgccggatcgccgccgcgttcggcgatcgcgtcgcgcaggcccgcgagatcgacgagcgcggtctggccgaggatgtcgtggcagacgacgcgcgccgggaaccacgggaaatcgcgctcgcgcttgcgctcgacgagctgcgtcagcgaatcggcgaggatcgccggatcgcagcggcgcacgaggttctcggcgagcacgcgcgacgtgtacggcaacgcgtcgtacgcgcccgggcggatcgcgtcgacggcggcgcgcgcgtcgaagtagtcgagcgacgtgccgggcaggggtttgcggttggcagtgttcattgcgtggggacagactgggtaacgatcgtcgcgaaacggccgggcgcgacgcccggccgccgggtgccgccgatcagcgcttctcgatcggcacgaacttcaggtcttccggcccggtgtagttcgcgctcgggcgga

SEQ ID NO: 14297 - DNA, 747 bp, Burkholderia mallei
atggacaagactctcgacaaacaagtcgcgatcgtcaccggcgcgtcgcgcgggatcggccgcgcgatcgcgctcgaactcgcgcgccgcggcgcaatggtgatcggcaccgcgacgaccgaagcgggcgccgagggcatcggcgccgcgttcaagcaagccgggctcgaagggcgcggcgccgtgctgaacgtcaatgacgcaacggcggtcgatgcgctcgtcgaatcgacgctcaaggagttcggcgcgctgaacgtgctcgtcaacaatgccggcatcacgcaggatcagctcgcgatgcggatgaaggacgacgagtgggacgccgtgatcgacacgaatctgaaggcggtgttccgtctgtcgcgcgcggtgctgcgcccgatgatgaaggcgcgcggcggacgcatcgtcaatatcacgtcggtcgtcggctccgcgggcaatccgggtcaggtcaactacgcggcggcgaaagccggcgtcgcgggaatgacgcgcgcgctcgcgcgcgaaatcggcagccgcggcatcaccgtgaactgcgtcgcgccgggcttcatcgataccgacatgacgaagggcctgccgcaagagcagcagacggcgctgaagacccagattccgctcggccgcctgggcagcccggaggacatcgcgcacgcggtggcgttcctcgcgtcgccgcaggcgggctacatcacgggcacgacgctgcacgtgaacggcggcatgttcatgtcg

SEQ ID NO: 14298 - DNA, 501 bp, Burkholderia mallei
atgacgacgctgaccttgatcgtcgcgcgcgcccgcaacggcgtgatcggccgcgacaaccgacttccgtggaaactccccgaggacctcgcgttcttcaagcgcacgacgatgggcgcgccgatcgtgatgggccgcaagacgcacgaatcgatcggccggccgctgccggggcgccgcaacatcgtcgtcacgcgcgacgccgcgcgccgcttcgacggctgcgacacggtcacctcgctcgacgacgcgctcgcgctcgccgcgcgcgacggcgcggccgaagcgttcctgatcggcggcgcgcaactgtacgaggaaggcctgcgccacgcggacaagctgatcgtcaccgaaatcgatcaggatttcgaaggtgacgcgtcgttccccgcgcccgatcccgcgcaatgggaagccgtgtcgcgcgacgcgcaccgcgcggcgcagcccaacgatttcacgtacgcgttcgtcgtctatcgccgcaggcgcgccggc

SEQ ID NO: 14299 - DNA, 450 bp, Burkholderia mallei
atgcaacccacgacgaacgcccccgagcgccccctcgactgcccgtgcggcggcgccgcgcccggcgcgaacgcgaacgcgcgcgcgccgcgctacgcggattgctgcgcccgcctgatcgacgggcacgccaccgcggcaacggcgctcgagctgatgcgctcgcgctacagcgcatacgtgctcggcgccaccgattatctgcgcgcgacctgggacccgagcacctgcccggccgagctcgacgccgacaccggccgcgcgcacgcgccgcgctggctcggcctcgtgatcaagcgccacgcgcaactcgacgcgacgcacgccgaagtggaattcgtcgcgcgctacaaaatcggcgggcgcgcgcaccggatgcacgagacgagccgtttcacgcgcgacgcgcaaggcgcgtggcgctacgtcgacggcgatgtaagcgagcgc

SEQ ID NO: 14300 - DNA, 1188 bp, Burkholderia mallei
atggccaaggaaaagtttgagcggaccaagccgcacgtgaacgttggtacgattggtcacgttgaccacggcaagacgacgctgacggcagcgatcgcgacggtgctgtcggcgaagttcggcggcgaagcgaagaagtacgacgaaatcgacgcggcgccggaagaaaaggcgcgcggcatcacgatcaacaccgcgcacatcgagtacgaaacggcgaaccgccactacgcacacgtggactgcccgggccacgccgactacgtgaagaacatgatcacgggcgcggcgcagatggacggcgcgatcctggtgtgctcggccgctgacggcccgatgccgcaaacgcgtgagcacatcctgctggcgcgtcaggtcggtgtgccgtacatcatcgtgttcctgaacaagtgcgacatggtggacgacgcggagctgctcgagctggtcgaaatggaagtgcgcgaactgctgtcgaagtacgacttcccgggcgacgacacgccgatcatcaagggttcggcgaagctggcgctggaaggcgacaagggcgagctgggcgaagtggcgatcatgaacctggccgacgcgctggacacgtacatcccgacgccggagcgtgcggtcgacggcgcgttcctgatgccggtggaagacgtgttctcgatctcgggccgtggtacggtggtgacgggtcgtgtcgagcgcggcgtgatcaaggttggcgaggaaatcgaaatcgtcggtatcaaggcgacggcgaagacgacctgcacgggcgtggaaatgttccgcaagctgctggaccagggtcaggcgggcgacaacgtcggtatcctgctgcgcggcacaaagcgtgaagacgtggagcgcggccaggttctggcgaagccgggttcgatcacgccgcacacgcacttcacggcagaagtgtacgtgctgagcaaggacgaaggcggccgccacacgccgttcttcaacaactaccgtccgcagttctacttccgtacgacggacgtgacgggctcgatcgagctgccgaaggacaaggaaatggtgatgccgggcgacaacgtgtcgatcacggtgaagctgatcgcgccgatcgcgatggaagaaggtctgcgcttcgcgatccgcgaaggcggtcgcaccgtcggcgccggcgtcgtcgccaagatcatcgag

SEQ ID NO: 14301 - DNA, 543 bp, Burkholderia mallei
atgacgaaatacgacgagcggttcaagcttgaagtggtgcagcggtatctgtctggcgacaaagggtgcaaagcgcttgcgagagagtttggggtgagcagcacacaggtggagcaatgggttgccagctacaagcgccatggtgccgatggattacggcgcaaagggcacgtgaagtacagcgcacagttcaagctggaggcgctggaacgcatgcagcgggagaatctatcccgcacgcacatgcaagcgctgctggacattcgtgatgcaggagccatcgcccgttgggaacgccagtatcatgagggtggtttcgccgccctcctaccacgtccgaagggacgccgccccaagatgtcgacttcgccgctttccgaacctgcgccgccagaatccgaaccggatactcgcacccgagagcaattgctcaaggaagttgagtacctgcgcgcggaggtagcctacctaaaaaaactcgatgccttgattcgggcggagcaacgtcatgacctgcccccttcgatagggccaatgggcttc

SEQ ID NO: 14302 - DNA, 1092 bp, Burkholderia mallei
atgagcctcaaatgcggcatcgtcggcttgcccaacgtcggcaagtccaccctgttcaacgcgctgacgaaggccggcatcgccgccgagaactatccgttctgcacgatcgagccgaacgtcggcgtcgtcgaggtgcctgacgcacgcctgaaggcgctcgccgaaatcatcaagcccgagcgcgtcgtgccggccgtcgtcgaattcgtcgacatcgcgggcctcgtcgccggcgcgagcaagggcgagggcctcggcaaccagttcctcgcgaacatccgcgaaaccgatgcgatcacgcacgtcgtgcgctgcttcgaggacgagaacgtcatccacgtcgccggcaaggtgagcccgctcgacgacatcgaagtcatcaacaccgagctcgcgctcgccgacctcggcaccgtcgagaaggcgctcgcccgctattcgaaggcggcgaaatcgggcaacgacaaggaagcggcgaagctcgtcgcggtgctcgacaaggcgcgcgcgcacctcgatcagggcaaggccgtgcgcgggctcgatctgtccgacgacgagagggcgctcctcaagccgttctgcctgatcaccgcgaagccggcgatgtacgtcgcgaacgtgaaggaagacggcttcgagaacaatccgcatctcgacgcggtgcgccggtacgcggaaagcgagaagtcgccggtcgtcgcggtgtgcgcggcgatcgaggcggagatcgccgatctcgacgatgccgacaaggaagcgttcctcgccgacatgggcatggacgagccgggcctcgaccgcgtgatccgtgcgggcttcaagctgctcgggctgcagacgtacttcaccgcgggcgtgaaggaagtgcgcgcgtggacgatccacatcggcgacaccgcgccgcaagcggcgggcgtgatccatacggatttcgagcgcggcttcattcgcgcgcagacgatcgcatacgacgatttcatcgcgtacaagggcgagcaaggcgcgaaggaagcgggcaagatgcgcgcggaaggcaaggaatacgtcgtgcacgatggcgatgtgatgaacttcctgttcaacgtc

SEQ ID NO: 14303 - DNA, 843 bp, Burkholderia mallei
atgctctccaaactcaaccaatggctcgacgcgcgccgccgcgatcgcgcgttgcgctcgcacccgattccggacgtgttgtggcgcgagacgctcgagcgattgccgttcctgtcttatttatccaacgaagatcgcgcgcggctgcgcgagacgacgagcctcttccttgcgcagaaatcgttctcgaccgcgcacgggctcgagctcaccgacgcgatcgtcgtcggcatcgccgcgcaggcatgcgtgccggtgctgaacctcggcctcgacctgtatcgcggctgggtcggcatcgtcgtctatccgggcgaattcgtgatccgcaagacggtcgaggacgaggacggcgtcgtgcacgaagtcgagcacgacgcgagcggcgaagcgtgggacggcgggccggtgatcctgtcgtgggaagacgtgcagatggcggacggctcggacgcgtacaacgtcgtgatccacgagttcgcgcacaagatcgacatgatgagcggcgcggcggacggccatccgcccctttttcgccgctggcacgcgccggcgctcgacgccgagcgctgggccgacgtgttcgaccatgcgtacgatcagttctgcgaccgcgtcgacgcggtgccagagcgcgcgtgggcgcgcttcgagcgcgattcgctgatctacccgtacgcggccgaccacccgtcggaattcttcgcggtctgcagcgaggcgctcttcgtcaagccgcgctcgttcgaagccgaatttccggagctctaccggctgctcgcccgttattaccggcaggatcccgcgcgcacggggtgcctcgcgggctccgccgcgcacgtc

SEQ ID NO: 14304 - DNA, 1014 bp, Burkholderia mallei
atgttccgattcgtcttgcgccgcgtgggcatggtgatcccgaccttcatcggcatcacggtgctcgcgttcgcgctgatccacctgataccgggcgaccccatcgaagtgatgatgggcgagcgcggcgtcgatccgacgatgcacgcgcaagcgctgcaccgcctcgggctcgacgagccgcttcccatgcagtatctgcactacgtcggccgcgcgctgcacggcgacctgggcacgtcgatcatcaccaacacgagcgtgatgggcgagttcctcgcgcgctttccggcgacggtcgagctgtcgctctgcgcgctcgcgttcgcgttcgcgctcgcgctcgggctgccggccggcgtgttcgccgcgctcaggcgcggcacgatcgccgatcacggcgtgatgggcacggcgctcaccggctattcgatgccgatcttctggtgggggctcatcctcatcatggtgttctcggcgacgctcggctggacgcccgtgtcgggccgcatcgcggtggaatacgagattcctcatacgacgggcttcatgctgatcgacacgctgctctccggcgaggagggcgcgttcgcgtcggcggtgagccacctgatcctgcccgcgatcgtgctcggcacgatcccgctcgcggtgatcgcgcggatgacgcgttcgtcgatgctcgaagtgctgcgcgaggattacatccgcaccgcgcgcgcgaaggggctgtcgcccgcgcgcatcgtcgtcgtgcatgcgctgcgcaatgcgctgattccggtcgtcacggtgatcggcctgcaggtcggcacgctgctcgcgggcgccgtgctcaccgagacactgttctcgtggccgggtgtcggcaagtggctgatcgacgcgatcggccgccgcgactatccggtcgtgcaaggcggcatcctgatgatcgcgacgctcgtgatcgtcgtgaacctggtcgtcgatctgctgtacggcgtgctgaatccgcgcattcgccatacgagg

SEQ ID NO: 14305 - DNA, 633 bp, Burkholderia mallei
atgcgcgtcgagccggccggccaggcccgttcgcgcgcgccgcagcatgcggcggcgccccgcgcgccccgcctctcccgtctttctcgaggaatacagatggagcaatttcacggcacgacgattctctccgtgcggcgcggcgacaaggtcgcgctcggcggcgacggccaggtcacgctcggcaatatcgtgatgaagggcggtgcgcgcaaggtgcgccgcatctacaacaaccaggtgctcgtcggcttcgcgggcggcacggccgacgccttctcgctgctcgaccgcttcgaggcgaagctcgaaaagcatcagggcaacctcacgcgcgcggccgtcgaactcgcgaaggactggcgcaccgaccgcctgctgcgccgtctcgaggcgatgctgatcgcggccgacgcgacgacgacgctcgtcatcaccggcaacggcgacgtgctcgacccggaaggcggaatctgcgcgatcggctcgggcggctcgtacgcgcaggccgccgcgcgcgcgctcgccgagaataccgatctgtccccgcgcgagatcgtcgagaaggcgctcgggatcgcgggcgacatgtgcatctacacgaatcacaaccggatcatcgagaccatcgag

SEQ ID NO: 14306 - DNA, 2227 bp, Burkholderia mallei
gtccgacatcgccgctcccaacgccgagatccgccgcagcgactacacgccgcctgcgttcctgatcgataccgtctcgctcgagttcgatctcgagccggcgcgcacgatcgtcacgaacacgatgcgcgtgcgccgcaacccggacgccgcgcccgcaccgcacttcgagctgatgggcgaagcgctcgtgctgatcggcgcgcgcgtcgacggcaagccgcacgacgcggtgcgcgtgcacgaacacggcctgagcgtcgagaacgtgcccgatgcgttcgagctgacgatcgagaacgcatgcgcgcccgagtcgaacacgacgctgtcgggcctgtacgtatcgagcggcaacttcttcacacagtgcgaggcggagggctttcggcgcatcacctacttcgtcgaccgtccggacgtgatggcgtcgtacacggtcacgctgcgcgccgaccaggccgcgtacccggtgctgctgtcgaacggcaatctcgtcgacgccggcgatctgccgaacggccgtcacttcgcgaagtgggaagacccgttcaagaagccgagctacctgttcgcactcgtcgcgggcaaactcgtcaagctcgaggaaacgatcaagtcggcgagcggcaaggacaagctcctgcaggtgtgggtcgagccgcaggatctcggcaagacccgccacgcgatggattcgctgatccattcgatccgctgggacgaacggcgcttcggcctcgagctcgatctcgaccgcttcatgatcgtcgccgtcggcgatttcaacatgggcgcgatggaaaacaaggggctcaacatcttcaacacgaagtacgtgctcgcgaacccggagacggcgaccgacgtcgacttcgcgaacgtcgaatcggtcgtcggccacgagtatttccacaactggacgggcaaccgcgtgacctgccgcgactggttccagttgagcctgaaggaaggcctcaccgtgttccgcgaccaggagttctcggcggacatgtccgcgggcgccgaagacgacgccgccgcgcgcgcggtcaagcgcatcgaggacgtgcgcgtgctgcgccagctccagttcgccgaggacgcgggcccgatggcccatccggtgcggcccgagcgttacgtcgagatcaacaacttctacacgatgaccgtctacgagaaaggcgcggaagtcgtgcggatgtaccagacgctgttcggccgcgacggtttccgcaaggggatggacctgtacttccggcgccacgacgggcaggccgtcacgtgcgacgacttccgccacgcgatggccgacgcgaacggccgcgacctcgcgctgttcgagcgctggtacagccaggcgggcacgccgcgcgtgacggttcgcaccgcttacgacgccgccgcgaagcgctacgcggtgacgctgcggcaaggctacggcgacgccgcgcccgccgcgcgcgacacgcagaaagggccgctcctgatcccgttcgcgatcggcctgatcggcgccgacggccgcgatctgccgctgcgcctcgaaggcgaagcggccgcgtcgggcacgacgcgcgtgctcgagctgaccaaggccgaggcgacgttcacgttcgtcgacatcgacgcggcgccgctgccgtcgctgctgcgcaatttctccgcgcccgtgatcgtcgaatacgactaccgcgacgacgagctcgcgttcctgctcgcgcacgacagcgatccgttcaaccgctgggaggcgggccagcgcctcgcgacgcgcgcgctgctcacgctcgcgtcgcgtgcggcggcgcagcagccgctcacgctcgacgacgcgttcgccgccgcgttcaagcgcgtgctgacggacgacacgctgtcgcccgcgttccgcgagctcgcgctcacgttgccgtcggaggcctacctcgccgaccagatgacgcaggccgatccggccgccgtccatcgcgcgcgccagttcgtgcgccgccagctcgcgacggcgctacgcgccgaatggctctcggtctacgagcgccaccagacgccgggcgcgtatgcgccgacgcccggcgacgcgggccgccgcgcgctgaagaacctcgcgctcgcctacctcgccgaactcgacgagccggccgacgcgatccggctcgccaccgcgcaatacgacgccgcgaacaacatgaccgaccgcgcgtgcgcgctcgtcgcgctgctg

SEQ ID NO: 14307 - DNA, 882 bp, Burkholderia mallei
atgacattcgaccaatggatgcgctcggtgctcgagcgtgtcgagacggccctcggccattatttaccggccgggactgtggcgcccgcgcaactgcacgaagcgatgcgctatgcggtgctcgggggcggcaaacgcgtgcgtccgctgctgtgccatgcggcgggcgagctcacgggcgcgtcggaggcggcgcgtgacgcggcgtcggctgcgctcgagatgattcacgtgtattcgctcgtgcatgatgatatgccgtgcatggatgacgacgcgctgcgtcgcggcaagccgaccgtccacgtcaagtacgacgagccgaccgcgctgctcgtcggcgacgcgctgcagtcgcaggctttcgtcgcgctgaccgacgccgccgcgctgccggccgaccggcaggcggcgctcgtgcgcgagctcgcgctcgcgagcggctcgatcggcatggcgggcggccaggcgatcgatctcgcgagcgtcggcgtggcgctcacgcgcgacgcgctggagaagatgcatcggatgaagacgggcgcgctgttgcgcgcgtcggtgcgcatgggcgcgcttgcgggcgagacgccgtccggcgacgcgatgcgcgcgctcgacgcctatgcggcggccgtcggcctggcgttccaggtggtggacgacattctcgacgtcaccaccgattccgcgacgctcggcaagacggccggcaaggacgctgcgaacgacaagccgacctacgtgtcgatcatcggtctcgacgcgtcgcgcgcgcttgccgcgcaattgcgcgccgatgcgcacgccgcgctcgagccgttcggcgcgcgcgcgcagcgcctggccgaactggcggacctggtggtgaaccgggtcagc

SEQ ID NO: 14308 - DNA, 414 bp, Burkholderia mallei
atgacgaagaaactcttgaccgaagccgaaatcctgaagatgagcgacaaggattacatgaatgaggatcagctcgccttcttcaaaaatcggctcgaacaattgcaggcggaaattctccgcaatgcgggccagacgactgagaatctgcgcgaaacggtgatcgtgccggaccctgccgatcgcgcgacgatcgaggaagagcacgcgctcgaactgcgcacgcgcgaccgcgaacgcaagcttctcaagaaggtccagcaatcgctcgcccgcatcgaatcgggcgattacggctggtgcgaagagacgggcgagccgatcggcatcccccgtctgctcgcacgtccgacggctacgctgtcgctcgaggcgcaggagcgccgcgagctgcgtcagaagctgttcggcgac

SEQ ID NO: 14309 - DNA, 639 bp, Burkholderia mallei
atgttcgatatgttcgtgcagtcgttctgggagacgctgatcatggtcggcatctccggagcggtcggcgcgctcgtcggcctgccgctcggcgtgctgctctatttgaccgatcgccagggcgtgctgcagaacctcgcggtgaaccgcgtgctgggcggcgtcgtcaacgcggtgcgctcgacgccgttcatcatcctgctcgtcgcggtgattccgtttacgcgtctcgccgtcggctcgtcgatcggcaccgcggcggccgtcgtgccgctcacgatcgcggcggccccgttcgtcgcgcggctcgtcgagacggcgctgcgcgaagtcgatcgcggcctcatcgaagccgcgcaggcaatgggcgcgacgacgggccagatcgtgttcaaggtgctgctgcccgaatcgctgcccggcatcgtcgcggggctcaccatcacgttcgtgtcgctcgtcggctattcggcgatggcgggcgcgatcggcggcggcggcctgggcgacctcggcatccgctacggctatcagcgctatttgcccgaagtgatgtggacggtcgtcgcgatcctgatcgtgttcgtgcagatcgtgcagtcgttcggcgactggctcgtgcggcgcctgagccacaag

SEQ ID NO: 14310 - DNA, 276 bp, Burkholderia mallei
atggctaactccgcacaagcacgcaagcgcgcccgccaggcagcgaaggcaaactcgcacaattcggcgctgcgctcgaaattccgcaccgcgatcaaggccgttcgcaaggcgatcgacgccggcgatcaggcaaaggccgccgagctgttcaaggccgcgacgaagacgatcgacacgatcgccgacaagaagatcgttcacaagaacaaggccgctcgccacaagagccgcctctccgccgccgtcaagggcctgcaggcacaagccgcgcag

SEQ ID NO: 14311 - DNA, 525 bp, Burkholderia mallei
gtgtccgaagtccaaacgaatcatccggccgcgccgaacgcggccagccgccgcgacgccgaacagggcgacgccgcgggccaggagtttctcgtcttcacgctcggcgacgaggaatacggcatcgacattctgaaagtacaggaaatccgcggctacgacagcgtcacgcggatcgcgaacgcgcccgatttcatcaagggcgtgatcaacctgcgcggcatcatcgtgccgatcgtcgacatgcggatcaagttccacctcggccgcgtcgagtacgaccatcagacggtcgtgatcatcctgaacgtcgcgcatcgcgtcgtcgggatggtcgtcgacggcgtgtccgacgtgctcacgctgtcgaccgagcagatcatgcccgcgccggaattcggcggcgtgctgacgaccgagtacctgacgggcctcggcacggtcgacggccggatgctgatcctgatggacatcgagaagctgatgacgagcaaggagatggcgctgatcgagacgctcggcgca

SEQ ID NO: 14312 - DNA, 4191 bp, Burkholderia mallei
atgtccgaccgtcaggattccgccgcaacgaccgaagccggacctccgcagcaccatcacccggtcctgcgtcgcgtgttcaagggcgtgctggcgatcgcgatcgccgcgtacttcatcgcggccgccgccttcctcgggctgcgctacctgctgctgccccgcatcgacgaataccgcccgcgcatcgaggcgttcgtctctcaaaaactccacgccgagctgcggatcggccggctcgcgccgcactggtcgggcatgcagccgggcgtcgacatcagccgcctgacgatccgcggccgcgacggccgcgtcgcgctatcggtgcctcatgcgacggccgcgctgtcgtggcgctcgctcgcgcgcttcgcgccgacgctgtcgagcctcgtcgtcgacgatccggacctgctgaccgagcgccgcgcggacggctcgctgttcgtcgcgggcgtcgcggtaccgaccacgaagacgggcgccgacgacacgttcagcgcgtggctgctcaagcaggaggcgatcgtgctgcgcggcggcacgctgcgctggcgcgacgcgcagcacgacgcgcccgagctcgcgctgacaggcatccgcatcgcggtgctcaacgacggactcgtccaccggatcgcgctgcaggcgcccgcgaacggcacgctgttccacggcccgctcgatttccgcgcgcgcttcgtccaccaggcgctcgcgccgatcggcaaaccgtcgaactggacgggcgacgcgtatctgtcgacggggcccgtcgacctgccgacgctcgcgcgctacgcgaacatacgcgtcaccgcgtacgcgggccggatcgacaacgcgatctgggcgcatttcggcgacggccatctgtaccgcgcgggcggcgagctgcgcggctacgacgtcgcgctgcgcgtgcgcccgacgcagccgcggctcgacattccggtcgcgcgcttcggctgggacgtcgcgatcgacccgaagcgcgactacacgctgcacctgtcgcggctgcacgccgagctcggccagccgccgctcgcggacggcacgccgctctcccgcgcgctggcgctgcacacgctcaccgcgcgctaccgcgtgccgaacgtcgacgaagggcagttgctgagcgtatcgggcgaccgcgtcgacctcggcatcctcgccgaattcatccgcgggctgccgctgccggcgcggctgcgcaacgagctcgtgcgcttcgatccgcgcgggctcgtcgcgaactacgcgatcgaggtcgagcgcgcgaagccggcgagccccgaattcgtcgacgaagagcgccgcagcggcaccgcgcccatcatccgctaccggttccagggcgacctgcaaggcatcagcttcgaggcgcaggagccgccgcccggactctcgccgcacggccatccgcgcgcgggaattcccggcgtcgaaaatctgtggggccacgtcgatgcggacgaaaaaggcggcgccgcgcgcttcgacacggtcgacgcggccgtcacggtgcccggcgtgttcgacgagccgcgcctcgcgttcgacaagctgcgcggccgcgcgagctggaccatcacgcccgcgcccggcgagcggcacgcgcgcgtcgacgtcgcggtgcccgagttccgcgtcgagaacgccgatgccgcgatcgcggtggcgggcagctacgcgaaccccggccacgggcgcggctcgctcgacctgaaagccgacttcgagcgcgcggccgtcgcgcggatcacgcgctatttgccgacgagcctgtccgatcacctgcgcctctatctcggccacgcgctgcaggcgggccaggtgaccaaaggcgcgacgatcgtcgcgaagggcccgctcgagacgttcccttacgagcacgatccgaaggcgggcgtgttccacatcgtcgcgcccttcgcgggcggcaggttcgagccgacgccgcagccgccgcgcacgctcgccaacggcacgccgaacgtatggcccgcgctcgacggcatcgacggcgtgttcgagctcgagcagaaccggctgcgcttcgacatcgaccgcgcgcgctacaaggacgtcgcgctcgcgaaggtgacggggcgcatcgacgatctcggcaacccgacgcactcgccgctcgtgatcgaaggccgcgcgcacggcccgctcgccgatctgctcgactacgcgaaccacagcgcgatcgccggaatgacgggccacatcggcaacctcgtgcgcgcgcagggcccggcgacgctcgcgctcaagctgacgatcccgcagcacgtcgcgcatccgcacgtcggcgtcgacgacgcgctcggcttcgccggcaacgcgatcgaggccgacggcgtgccgcccgtcacgcggctgcgcggcaacgtgcggttcacgcagcacacggcgagcgtcgatcggctcaccgcgcgctttctgggcggcgacgtgcgcgcgcgcggcgcgctcgcggagaacggccgctacgcgttcgacatcgacggccggctgtcgctcgacgccgcgcgcgggctgaacctgcgcggcgcggcggcggccgcgctcgagcgcgtcgtcggcgacgcgccgtaccggctcgcggtgcgcggcgcgaaaggcggcctgcccgacatcaccgcgagctcggacctcacgggcgtcgcgctcgagttccccgcgccgttcgcgaagccggccggcacgccgatgccgttcagcttcgtgctcgcgcccgagccgcaggcgagcggcaagccgctcgagcgcgcggacctggcgctcggcccgctcgcggcgacctacctgctcgacgtcgagcgcgggcggccggtgcgcgcggtgcgcggcgcgctcggcatgaaccggatgcccgacctgccgcaggaaggcgtgagcgcggcgatcgatgtgcacgagctcgacgccgacgcatggcaggcgttcgcgcagggcttcggcaagtcgcccgccgcgcgcgagcagccggccgcgtcgcccgtcgatctcgcgagcttcgcgccgaagcgcttcgcgctgcacttcggcacgctgaagctgctcaagcgcaactgggagaacgtgatcgtcggcgcatcgcacatcgacgacatctggcaggcgaacatcgcgtcgaaccaggtgtcgggctacctgtcgtgggcgccgggcggcggcccgacgggcgccggcgtgctgagcgcgcggctcgcgaagctcgtgattcccgagagcgccgagcacgatctcgtcggccgcgcgatcgacctgccgacgcccacccaccatgcgatgcccgcgatcgatctcgtcgtcgatcaggtggtcgcgcgcggccacgacatcggccggctcgaggtcgacgcacgcaacgtcgacgagaacggcatcccggtctggcagctcgacaagctcgagctcgcgaacccggccgcgaaactcaccgcgaccgccaactggcgcacgtcgcgccgcgcgctcgcgcacggcgccgacgaggaggacgcgccgcggcgcaccgtgtttgatttcacgctcgcgatcgacgacgcgggcgcgctgctcgagcgcgtcggcctgccgcgcacggtcgagaacggccgcggcacgctgtcgggcaaggtcgcgtggcgcggcggcccgaccgcgatcgactacccgacattgaacgggcgcctgtcgctcgacctcgcgcacggccagatcctgaaggtcgacccgggcgcggcgaagctgctcggcgtgctgagcctgcagggcctcgcccgcttcctcacgctcgacttccgcgacgtgatcggcaagggcctgccgttcgagacgatcacgggcacgggccggatcgacaacggcatcgcgcgcacgcaggacttcgaaatgaagacgtcgcccgcgaaggtgacggtgacgggctcggtcgatctcgcgcacgagacgcaggacctgaacgcgcacgtcgcgccgaaggtgagcgcgagcgcggccgcggtcggcgcggcgatcatcaatccgttcctcggcctgggcgtgctcgccgcgaacctcgcgctatcgcagacgctcgcgcacgcgttcgcgatggattacacgatcaccggctcgtgggcgcacccgcacatcgagcgtgtcggcggcgatcggggtaagatgggcttcgcgcccgcggccgtcgagcac

SEQ ID NO: 14313 - DNA, 1338 bp, Burkholderia mallei
atgacagaacaaaagcgaaagctcgagaagctgacgggcgtgaagggcatgaacgacatcctcccgcaggatgccggcttgtgggaattcttcgaggcgacggtgaagtcgctgctgcgcgcatacggctatcagaacatccgcacgccgatcgtcgagcatacgcagctcttcacgcgcggcatcggcgaggtgaccgacatcgtcgaaaaggagatgtacagcttcgtcgatgcgttgaacggcgagaacctgacgctgcgccccgagaacaccgcggccgtcgtgcgcgcggcgatcgagcacaacatgctgtatgacggcccgaaacgcctgtggtatctcgggccgatgttccgccacgagcgcccgcagcgcggccgttatcgccagttccatcaggtcggcgtcgaggcgctcggcttcgcgggcccggacgcggacgcggaaatcatcatgatgtgccagcgcctgtgggacgatctcggcctcaccggcatcaagctcgagatcaactcgctcggtctcgccgaggagcgcgccgcgcaccgcgtcgagctcatcaagtatctcgagcagcacgtcgacaagctcgacgacgacgcgcagcgccgcctctacaccaacccgctgcgcgtgctcgacacgaagaatccggcgctgcaggagatcgtgcggaacgcgccgcagctgatcgatttcctcggcgacgtgtcgcgcgcgcacttcgacggcttgcagcagctgctgaaggcgaacaacctgccgtttacgatcaatccgcggctcgtgcgcgggctcgactactacaacctgaccgtgttcgagtgggtgaccgacaagctcggcgcgcagggcacggtcgccgcgggcggccgctacgatccgctgatcgagcagttgggcggcaagccgaccgccgcgtgcggctgggcgatgggtgtcgagcgcatcctcgagctcctgaaggaagagcacctcgtgccggagcaggaaggcgtcgacgtgtacgtcgtccatcagggcgacgcggcgcgcgagcaggcgttcatcgtcgccgagcgtctgcgcgacaccggcctcgacgtgatcctgcattgcagcgcggacggcgcgggcgcgagcttcaagtcgcagatgaagcgcgcggatgcaagcggcgcggcgttcgcggtgatcttcggcgaagacgaggtcgcgaacggcacggtgagcgtgaagccgctgcgcggcacgggcgccgaaggcgagaagaacgttcagcagtccgtgccggtcgaaagcttgaccgaatttctaatcaatgcgatggttgcaaccgccgaagacggcgacgac

SEQ ID NO: 14314 - DNA, 993 bp, Burkholderia mallei
atgaacgctgaaggcttgaacaagagcgcgctcctgctgatgtcgatcggcgaggaagaggccgcgcaggtattcaaattcctcgcgccgcgcgaagtgcagaagatcggcgcggcaatggccgcgctgaagaacgtcacgcgcgagcaggtcgaggacgtgctcaacgatttcgtgcaggaagcggagaagcacaccgcgctgtcgctcgattcgagcgagtacatccgcacggtgctgacgaaggcgctcggcgaggacaaggcgggcgtgctgatcgaccgcatcctgcaaggcagcgacacgagcggcatcgaagggctcaagtggatggactcggcggccgtggccgagctcatcaagaacgagcatccgcagatcatcgcgacgattctcgtgcacctcgaccgcgatcaggcgtccgagatcgcgtcgtgcttcaccgagcggctgcgcaacgacgtgctgctgcggatcgcgacgctcgacggcatccagccgaccgcgctgcgcgagctcgacgacgtgctgacgggcctcttgtccggcagcgacaacctcaagcgcgcgccgatgggcggcatccgcaccgcggccgagatcctgaacttcatgacgagcgtgcacgaggaggcggtgatcgagaacgtcaagcaatacgatcccgacctcgcgcagaagatcatcgatcagatgttcgtgttcgagaacctgctcgatctcgaggaccgcgcgatccagctgctgctcaaggaagtcgaatcggaggcgctgatcatcgcgctcaagggcgcgccgcccgcgctgcgccagaagttcctgtcgaacatgtcgcagcgcgcggccgagctgctcgccgaggatctcgacgcgcgcggcccggtgcgcgtgtccgaagtcgagacgcagcagcgcaagatcctgcaggtcgtgcgcaatctcgccgagagcggccagatcgtgatcggcggcaaggcggaagacgcttatgtc

SEQ ID NO: 14315 - DNA, 1818 bp, Burkholderia mallei
atgccgcgcgcggcgccgcccgcctcacgtcgccggcctcacatcaggaagctcatgactcaatcgatgcaagcctcagcccccgccccggacgacccgacgcaaccccagccctcggtatccacgtggagcctcatcaagccctattgggtctccgaggaatggaaggtcgcgtggggattgctcgtcacgatcgtcgcgatcaatctcacgctcgtatggatcaacgtacggatcaactcgtggagcgcgtcgttctacaacgcgctgcaatcgaaggacgtgcgcgacttcccgagcctgctgatcacgttcgccgtgctcgcgttcgcgttcatcatcctcgcggtgtacggcctctatctgcggcagatgctcgggttccgctggcggcagtggctcacgacgcgcttcctgaacgaatggctcggcgatcgcaacttctaccggatcgagcgcgaccggctcgccgacaaccccgaccagcggatcgcggacgacttgcagtcgctcgcgtcgacgacgctgtcgctgtcgctcgacctgctgtcgacggtcgtcacgctgatctcgttcgcgacgatcctctggtcgatcgccggcgcggcgacgatctcgctcggcggccacgcgatcacgattcccggctacatggtgtgggtcgcgatgatctatgcgatcgcgggctcgtacgtgatgcaccgcttcggccatccgctcgtgtcgatcaactaccagcagcagcgcgtcgaggcggacttccgcttcagcctgatccgcatccgcgagaacgccgagcagatcgcgttctacaacggcgagcccgtcgagaccgcgcacgagcagggcctgttccagcgcatccgcgaaaactggtggcgcgtgatgcgctacacgaagcggctcacgttcgtgctgaacttctacgcgcagctcgcgagcctctttccgatcgcggtcgccgcgccgcgctacttcgcgggcgcgttcacgttcggcgtgctgatgcagatcagccgcgcgttcggcaccgtcagcgattcgttttcgtggttcatcaacagttacggcacgctcgccgagtggcgcgcgaccgtcaaccgtctgcgcgaattcaagcgcgtgatgggcgcgtcgcacctgaaggaaacgatgtcgcccgccaccgagcacggcggcatcaacctgcattacgtcgacgcgcggcagatcacgacgtcgggcctgaagctcgcgctgccgaacggcgcggcgctcgcgtcgatcggcgacgtcgcgatcgagcccggctcgcgctggctcgtacgcggaccgtccggctccggcaagagcacgctgatgcgcgcgctcgcgggcctctggccgttcggcgacggcgcgatcgacgcgcccgtcgacgcgcggatgatgttcgttccgcagcagagctacttgccgatcggcacgctgaaggcggcgctcgcgtatccgtcggccaccgatacgttcagcgacgacgcgtgcagcgaagcgctgcgcgcgtgcggcctcgccgactacgtcgagcggctcggcgagacgggccactggacgcgcatcctgtcgcccggcgagcaacagcgcctcgcgggcgcgcgcgtgctgctgcacaagcccgactacctgttcctcgacgaagcgacgagcgcgctcgatgccgacaacgaagcgcgcctctatcggctcttcgacgagcggctgccgaaggcggcgatcgtcagcatcgcgcatcgcgaatcggtcgcatcgttccatcagcagacgctcgacgtgcgccgcgacgaggcgcgggttgccgcg

SEQ ID NO: 14316 - DNA, 846 bp, Burkholderia mallei
atgggaaagctgtcactcgccgcgaagatcacgcacgtgccctcgatgtacctgtccgagctgccgggcaggcatcacggctgccgcgcggaggcgatccgcggccatcaggcgatcggcgagcgctgccgcgcgctcggcgtcgatacgatcgtcgtcgccgatacgcactggctcgtcaacgccggctatcacgtgaactgcaacgggcatttcgcgggcgtctacacgagcaacgagctgccgcacttcatccgcgacatgcgctacgaatacccgggcaatccggcgctcggccatctgatcgcggcgagcgcgaacgagcgcgggatcggcacgcgcgcgcacgagatcgacagcctcgagctcgagtacggcacgctcgtgccgatgcgctacatgaacgccgatcagcgcttcaaggtcgtgtcgatcgccggctggtgcatgtggcacgcgctcgacgagagccgccgcttcggcgaggcgctcaggcacgcgatcgacgcgagcgacgcgaacgtcgcgttcctcgcgagcggctcgctgtcgcaccgcttcaacgacaacggcagccccgaggaggcgatccacatgatcagccgcgagttctacaggcaagtcgacctgcgcgtggtcgagctgtggaagcagggcgatttcgcgacgttctgcaagatgctgcccgagtacaacgcgcactgccacggcgagggcggcatgcacgacaccgcgatgctgctcggcctgctcggctgggatcgctacgacaagccggtcgagatcgtgaccgactacttcgcgagctcgggcacggggcagatcaacgcgatcttcccgctgccg

SEQ ID NO: 14317 - DNA, 1017 bp, Burkholderia mallei
atgacgcgcaccgcggttcatgacgccgcgcggcgcgccgctccactcgatcacgacatgacgaacgaagaactcacgcaactcgcgaagtgctattacgtcgacgggttgacgcaggaagaactcgcgcagaagttcgcgatctcgcgcccgaaggtgggccggctgctcaagcgcgcgatcgaagagggcatcgtcgagattcgcgtgcgccatcatccgcgcgcggtacaggatctcgaacaggaactggtcacgcgcttcggcatccagcgcgcgatcatctcggtcgaccacaaggatcaggacagccagcgcgagctgctcgcggggctcgtcgcgagctacctcgaccgcgtgctcgcggacggggcgatcgtcgcggtcggcatgggccgcaacgtgagcgcggtgtcgcggcacgcggtatcgacgacgcagcgcaactgctcgttcgtttccgcgatcggcggctcgtatcgcggcggcgagacgatgaacgccgaccacatctgccggcgcctcgccgcgcgcttcggcggcgagagcgagacgctgtacgcgccggcgctcgtcaatgatccgcagctcttcaccgcgctgctcgagaacgacgtcgtgcgccagtcgctcgacaaggcgcgccgcgcgtcgatcgcgctcgtcggcatcggcgacattctcgaggacagcaacatggtccgcatgggctggttcacgcccgaggaaatggccgaggcaaagcgcgcgggcgccgtcggcgacatcatgggctacgacttcatcgacatccacggccgcccggcgacgacgatgctgcacggccgcgtgatcgggctcacgctcgaagacctgaagcggattccgaacgtgatcgcgaccgcgagcgagccgacgaaagccacgggcattctcggcgcgctgcgcgccggcgtgatcaacacgctcgcgaccacgcagtcgatcgcgcagacggtgctgagcctcgcgcaggccaccgagacggcgagcgcggcg

SEQ ID NO: 14318 - DNA, 192 bp, Burkholderia mallei
atgaaggcttccgaacttctccagaaagatcaggccgcgctcaacaaggagctgtcggacctgttgaaggcgcaattcggcctgcgcatgcaactcgcgacccagcagctcacgaacacgagccagctgaagaaggttcgtcgcgacatcgcacgtgtgcggaccgtcctgactcagaaggcgaaccagaaa

SEQ ID NO: 14319 - DNA, 3963 bp, Burkholderia mallei
gtcgcggttcgcggccagtatctgcatttcgtcaacgcgcatgagccgctcaccgccgacgacgaagcgcgcatcggcgcgctgatgcattacggcgcgccgctcgagcccgccgcggagaagggcgcgaccgagaccttcgtcgtgctgccgcgcttcggcaccgtctcgccgtgggcgagcaaggcgaccgacatcgcgcggcactgcggcctggcgcgcgtgcgccggatcgagcgcggcatcgagttcacggtgacgctgaaggcgggcgtcctgggcgtcggcgcgaagaaggcgctcgccgccgacgcgcgcgcggcggtcgcggccgcgctgcacgaccggatgacggaaagcgtcgtcgcgtcgcgcgaggacgcgcggcacctgttcgacgagctgccggccaagccgctcgcgacggtcgacgtgctcgccgaaggccgagccgcgctcgagcgcgcgaacgccgaactcggcctcgcgctcgccgacgacgagatcgactacctcgtcgacgcgttcatcaagctcgagcgcaacccgaccgacgtcgagctgatgatgttcgcgcaggcgaacagcgaacactgccgccacaagatcttcaacgcgcagtggacgatcgacgggcaggcgcaggacatgtcgctgttcgcgatgatccgcaatacggagaagatgagcccgcaaggcacgatcgtcgcgtattcggacaactcgtcgatcatgagcggcgcgtacgcggagcggtggttcccgcgcggcgcgggcgagccgggcgagcggtatggccggcataccgagctcacgcatacgctgatgaaggtggagacgcacaatcacccgagcgcgatctcgccgttccccagcgcggcgacgggcgcgggcggcgagattcgcgacgaaggcgcgacgggccgcggcgcgcggccgaaggcgggcttgacgggcttcacggtgtcgaacctggatctgccgggcgcgcgcgaatcgtgggaaaacgcgcgcgacgccgcgcagccggcggccgcgcgcaacgcgcagcagccgtgcgcgccgtacggccgcccggaccggatcgcgtcgccgctgtcgatcatgatcgacggcccgctcggcggcgccgcattcaacaacgaattcgggcgcccgaacctgggcggctacttccgcgtgtacgagcagaacgtcggcggccaggtgcgcggctatcacaagccgatcatgatcgcgggcggcatcggcaacatctcggacgcgcacacgcacaagcacgacgtgccggccggctcgctgctcatccagatcggcggcccgggcatgcgcatcggcatgggcggcggcgcggcgagctcgatggccaccggcgcgaacaccgccgagctcgacttcgattcggtccagcgcggcaacccggaaatcgagcggcgcgcgcaggaagtgatcaacggctgctggcagctcggcgagcacaacccgattctcagcattcacgacgtcggcgcgggcggtctgtccaatgcgttccccgagatcgtcgacggcgcgggcaagggtgcgcgcttcgagctgcgcaagatcgcgctcgaggaatcgggcctgtcgccgcgcgagatctggtcgaacgaggcgcaggagcgctacgtgctggcaatttcgcccgccgatctgccgcgcttcgaggcgatctgcgcgcgcgagcgctgcccgttctcggtcgtcggcgtcgcgaccgacgagcgccgcctccagcttgtcgacggcgaggcgacgggcgcggccgcgtatccggtcgacatgccgatggaggtgctgctcggcaagccgccgcggatgcaccgcgacgtgaagcgcgtgcacatcgagcgcgcgggcgtggacgtgacgggcgtcgcgcttgccgacgccgcgcgcgacgtgctccggcacccgaccgtcgcgagcaagtcgttcctcatcacgatcggcgaccgcacggtgggcggcacgtcggtgcgcgaccagatggtcggcccgtggcaggtgcccgtcgccgattgcgcggttaccgcgctcgactacgcgggcttcgccggcgaggcgatgacgatggccgagcgcacgccgctcgcggtgatcgacgcgccggcgtcgggccgcatggcggtgggcgaggcgatcacgaacatcgcggccgcgccgatcgcctcgctcgacaagctgaagctgtccgcgaactggatggccgcgtgcggcaccgagggcgaggacgcgaagctcttcgacacggtcaaggcgatcggcatggagctgtgcccggcgctcggcatcggcattccggtcggcaaggattcgctgtcgatgaagacgaagtggaacgacaacggcgtcgcgaaggaagtggtcgcgccggtgtcgctgatcatctcggcgttcgcgcccgtcgaggacgtgcgccgccatctgacgccgcagctgcgccgcgtcgcggacgtcggcgcgagcgtgctgatcgcgatcgatctcgggcgcgggaagaaccgcctcggcggcagcattctcgcgcaggtcacgcagcaggtcggcgacgcgacgcccgacgtcgacgatccggaagacctgaagcgtttcttcgcggcggtccagtcgctgaatgcgcgggacctgctgctcgcgtaccacgaccgctcggacggcggcctgtgggcgaccgtctgcgaaatggcgctcgccgggcacgcgggcgtgtcgctgaacgtcgacatgctgacgctcgatcagcagcacgaatccgactacggcgacgcgaaggactgggcgaagcagacgagcggccgccgcgaggatcgcacgatccgcgcgctcttctccgaggaactcggcgcggtcgtccaggtgcgcgcggcggaccgcgacgcggtgctcggcgcgctgcgcgagcatggcctgtccgcgtgctcgcacgtgatcggtgcggtcaacgagaccgacgcgatcgaggtgtaccgcgacgcgaagaagatctacgaggcgccgcgcgtcgagctgcagcgcgcatggagcgaggtgagctggcggatcgcgcggctgcgtgacaacccggcgtgcgcggacgccgagtacgacgcgatcctcgacgccggcgatccgggcctctcgcccgtgctgacgttcgatccggcggaggatgtcgccgcgccgttcatcgcgacgggcgcgcgtccgcgtgtcgcgatcctgcgcgagcagggcgtgaactcgcatctcgaaaccgcctacgcgttcgaccgcgcgggcttcgacgcgcatgacgtccacatgagcgacctgctcgccggccgcgcgacgctcgccgatttcgccggcgcggtcgcgtgcggcggcttctcgtacggcgacgtgctcggcgcgggcgagggctgggcgaagacgatccgcttcaacgacaagctcgccgacatgttcgccgcgttcttcgcgcgccccgacacgttcgcgctcggcatctgcaacggctgccagatgatgtcgagcctcgcgtcgatgatcccgggcgcgcaggcgtggccgaagttcacgcgcaacaagtccgagcagttcgaggcgcgtttctcgttcgtcgaagtgcaaagctcgccgtcgatcttcttcgcgggcatggaaggctcgcggattccggtggcggtcgcgcatggcgaaggctacgcggacttctcgcagcagggcgatcagagccgcgtcgcggtcgcgatgcgctacgtcgatcaccgcggcgacgcgaccgagcgctatccgttcaacccgaacggctcgcccgcgggcatcacgtcggtgacgacggcggacggccgcttcacggtgctgatgccgcacatggagcgcgtgcatcgcacggtgacgatgagctggcatccgcagggctggggcgaagcgagcccgtggctgcgcgtgttccgcaacgcgcgccgctggatcggc

SEQ ID NO: 14320 - DNA, 450 bp, Burkholderia mallei
gtgctgattacccgaaaactcgaattcgacgcggggcaccgcatccccgatcaccgcagccagtgccgcaatctgcacgggcatcgctacgtgctcgaaatcacgctgcgcggcgatctcgtcgagaccgagggcgcgcccgaccgcgggatggtgatggatttcgccgacgtgaaggcgctcgcgatggagcacctcgtcagcaagtgggatcacgcgtttctcgtctatgcgcgcgacgagatcgtgcgctcgttcctcgaaaagatggccgatcacaagacggtcgtcctcgaccggattccgactgtcgagaatctcgcggcgatcgcgttcgacatcctcgcgaacgtctatgacgcacattacggcgtcaatctgcgcctcgaacgcgtgcgtctgtacgaaacgccgaactgctgggccgacgtcgagcgcgatccgcgcgtc

SEQ ID NO: 14321 - DNA, 924 bp, Burkholderia mallei
gtgtgcccgtcgccccacgcgccccactgcggcgtcatgcagcacccgcacagttcggcaaccccatccgttataacctcgcgtatattacgattgcagctttcgtccacatcattgtttcccgccatgtccgctcccgttcgttccgcccgccgcctgttcctgcgtctcgccatgctgtccgcgctcgtcgccggcttcgccgcgccggccgcgcatgccgccgacgaactcgtcgtgtcggccgcggcaagcctgaccaatgcgttcaaggccgtcggcgacgcctacgagaagcaacatccgggcacgaaaatcctgttcaacttcggcgcatccgacgtgctgatgcagcagatcgcgaagggcgcgccggccgacgtgttcgcctcggccgaccagaaagcgatggaccgcgcggccgccgagcgcgtgatcgccgacggcacgcgccgcgacttcgccgcgaactcgctcgtgctgatcgtgcccgccgacagccgcgcgacgttcggctcgctgcgcgatctgaccgcgcccgccgtgaagcgcgtcgcgttcggcgatccggcgtcggtgcccgtcggccgctacaccgagggcgcactgaaggcggccggcgtgtggaacgacgtcggcgtcaagggcgtgctcgccgcgaacgtgcgccagagcctcgactatgtcgcgcgcggcgaagtcgatgcgggcttcgtgttcggcaccgacgcggccgtgatgcccgagcgcgtgaaggtggcgctgaccgtcccgacgcaaacgccgatcacctacccgatcgccgtcgtcaaggacagccggcatgcggccgccgcgcaaggcttcgtcgcgttcgtgctgtcgcccgcgggccaggcggtgctcgcgaagtacggcttcaagccggccgccggcggcgcgaac

SEQ ID NO: 14322 - DNA, 1200 bp, Burkholderia mallei
atgcctcacgtcgcacgacgccggcccgacggccggctgatcctgttgctcggcgcgctcgccgcgtgcgggccgatcgccaccgacatgtatctgccgagcctgcccgcgatcgccggcggcttcggcgtgaccgcggccgccgcgcagcgcacgctcacgagtttcatggccggcttctcgatcggcatgctgctctacggcccgctatccgatacctacggccgccgtcccgtgctgctcggcggcatcgcgctcttcacgctcgcgagcgtgggctgtttcgtcgccggctcgatcgacatgctgatcgccgtgcgcttcctgcaggcgttcggcgcgggcgccgcttcggtgctcgcgcgcgcgatcgcgcgcgacgcgcacgagccggccgacgcggcgaaggtgctgtcgatggtcgcgatcgtcaccgcgatcgggccgctcctcgcgccgctcatcggcgggcaggtgctgcgcttctccggctggcgcggcgtgttcgtcgtgctcgcgctgttcggcgcggtctgcgcgacggccgcgtacctgcgcgtgcccgagacctggccgcgcgagaagcgcgcgagctcggccgtgctcaactcgttcgccgcgtatgggcgcatcctcgtcgatcccgtcgcgtggggccatatgctgtgcggcggaatggcgttcgcgtcgatgttcgcgtacatcaccgcgacgccgttcgtctacatcgactacttccatgtgtcgccgcagcactacgggctgctgttcgggctgaacgtcatcggcatcatgctcggcaacttcctgaacgcgcgcctcgtcggccgggtcggctcgctgaagatcatcgcgggcgcgtcgttgctgagtggcgcggcgtcgttcgcggtcgcgttcttcgcgctgacggggctgggcggattgtggtcgatcgtcgcgagcctctttttcgtggtcggcatcctgtccgcgaactgcacgaccgacctgatgctgcgctatccgcacaacgcgggcgccgcggccgccgtgttcggcgcgatgcagctcgcgctcggcgcgctcgcgaacggcgcgccgttcgcgatgggcgtgacgatcggcgcgaccggcttgctgtgcctcggcgggcgcatgctcgtgctgcgctggcacggccggccggtgaagggcgcgctgggccgcgtcgacgccgcc

SEQ ID NO: 14323 - DNA, 870 bp, Burkholderia mallei
atgacgacgccgtacgcgcccgattcccgcgcaccgtccgcgcgcgcgccgatcggcgtcttcgattcggggctgggcggcctgtcggtactgcgcgcagtgcgcgagcggctgctcgacgaggcgctcgtctacgtcgccgattcacgccatgcgccctatggtccgcgcgatgacgtgttcatcgtcgagcgcacgctcgcgatcggcgaatggctcgtcgcgcaaggcgcgaaggcgctcgtcgtcgcgtgcaacacggccaccgcgcaatcgatcgcgatcgtgcgcgaacgtctgccgatcccgctcgtcggcgtcgagcccggcatcaagccggcggcgctgcattcgaagacgcgcgtcgcgggcgtgctcgccacccaggcgacgctgcgcagcgcgcgcttcgaagcgctgctcgcgcgccacgcggccgattgccgctttctctgccagccggggcacggcctcgtcgaggcgatcgagcgcggcgacaccggctcgcccgcgttgcgcgcgctgctcgcaagctacctcgagccgatgctcgaggccggcgccgatacgctcgtgctcggctgcacgcactacccgttcctcggcgcggcgatccgcgacgtgacgcgcaaccgcctgcatctgatcgacacgggcgacgcgatcgcccgccagctcgcgcgcgttctcgacgagcgcgggctgcgcgcgcccgcctcgccccggccggcgccgctgccgcgcttttgctcgacgagcgacggccggcaattgcaggcgctcgccgcgacgctgctcgggctcgacgcacccgtcgaatccgtcaccatttcttctcccagcaccgccgcatcggccgccgatccggca

SEQ ID NO: 14324 - DNA, 2291 bp, Burkholderia mallei
ggccagcagaaggtgcgcctcgaaaccggtgaaatcgcgcgccaggcaagcggcgccgtgatcgtcgacatcgaggacaccgtcgtgctcgcgaccgtcgtcggcgcgaagtcggcgaagccgggccaggatttcttcccgctcaccgtcgactacatcgagaagacctactcggccggcaagatcccgggcggcttcttccgccgcgaaggccgtccgtcggagcacgaaacgctgacgtcgcgcctcatcgaccgcccgctgcgcccgctcttccccgaaggcttctataacgaagtgcaggtcgtgatccacgtgctgtccgtgaacccggagattccggcggacatcccggcactcatcggcgcatcggctgcgctcgccgtgtccggtctgccgttcaacggcccggtcggcgccgcgcgcgtcgcgtacgtgaacaacgaatatgtgctgaatccgacgcgtgagcagatcaaggcgtcgcgcctcgatctcgtcgtcgcgggcacggagcgtgcggtgctgatggtcgagtcggaagccgaccaactgccggaggacgtgatgctcggcgcggtggtgttcggccacgagcagatgcaaacggcgatcgacgcgatccacgagctcgtgcgcgaaggcggcaagcccgagtgggactggcagccggcgccgaaggacgaggcgctgaacgcgcgcgtgaccgaactcgcgcagccggagctgctcgccgcctaccagatccgcgacaagcaggcgcgcttgacgaagctgaaggaagtgtacgcggcgacgtcggcgaagctggaggaagaagcggtggcggccggcacggtcgcggcggacaaggcgaccgtcggcaacatcctgttcgacctcgaggcgaagatcgttcgcggccagatcctgaacggcgagccgcgcatcgacggccgcgacacgcgcacggtgcgcccgatcgaaatccgcacgggcgtgctgccgcgcacccacggctcggcgctgttcacgcgcggcgagacgcaggcgctcgtcgtcgcgacgctcggcacgaagggtgacgaacagatcatcgacgcgctcgaaggcgaataccgcgagcgcttcatgctccactacaacatgcccccgttcgcgaccggcgaaacgggccgcgtcggctcgccgaagcgccgtgagatcggccacggccggctcgcgaagcgcgcgctcgtcgcgtgcctgccgagcgccgacgaattcggctactcgattcgcgtcgtgtcggaaatcaccgaatcgaacggctcgtcgtcgatggcgtcggtgtgcggcggctgtctcgcgctgatggacgccggcgtgccgatgaaggcgcacgtcgcgggcatcgcgatgggcctgatcctcgagggcaacaagttcgcggtgctgaccgatatcctcggcgacgaggaccacctcggcgacatggacttcaaggtggccggcacggcggacggcgtgaccgcgctgcagatggacatcaagatccagggcatcacgaaggaaatcatgcaggtcgcgctcgcgcaggcgaaggaaggccgcatgcacatcctcggcaagatgaaggacgcggtcgcgggcgcgaacacgcaactgtccgaattcgcgccgcgcatgatcacgatcaagatcaacccggaaaagattcgcgacgtgatcggcaagggcggctcggtgatccgcgcgctgaccgaagaaaccggcacgacgatcgacatctcggatgacggcgtcgtgacgatcgcgagcacgaacagcgaagggatggccgaggcgaagaagcgcatcgagaacatcacggccgagatcgaagtcggccacgtgtacgaaggcacggtgctcaagctgctcgatttcggcgcgatcgtgaacctgctgccgggcaaggacggcctgctgcacatctcggaaatcgtcaacgagcgcgtgaaggacatcaacgactacctgaaggaaggccagcaggtgaaggtcaaggtgatccagacggacgagaaggggcgcgtgcgtctgtcggcgaaggcgctgctgaacgaggcggccgcccaggcggatacgccgccgcagcagtaagcggcaaggcgacggccggcagcgcgaatgcgcgccggccgtttttcacaggatgggccggtttgcgtggcgcgcgtcgcgcgcgcaaacccgtcacgatcttggagcgacgtgcatgaaagcgatcgaaatcaccgaattcggcgcgcccgacgtgctgaagctgacggagcggccgcagcccgaac

SEQ ID NO: 14325 - DNA, 1686 bp, Burkholderia mallei
atggcggacattgtagcgccgccgcgcgcgggaacggaccttcgggcgatttcggcgctgctcgcgcgccgttttctctacaatgtgcggcttgcgccacgcgcgcgcccgttgctcacgtcgccttccgttctcccgcattcgtcgatgaatcaccacgcctgccgcatcgccgcctcgccaagtccgcccccgcccgccgccgtccgtgcgcggcgcacgctcgcgcgcggcgcgatgctcgtcgccgcgtgcgccgcgctcgcgttcgccgcgcccgccgacgcccgcaggaaaccgaagcccccccgctatccggccgcggtgtcggccgcgcgcaacgtgctgcccgcctcggtgctcgtcgcgctgcagcgcgcgcgcgtgccggcgtcgagcctgagcgtcgtcgtcgagcggatcggcgatcgcacgcccgccgtcgcatggaacgcgagccggccgatgcagcccgcctcgacgatgaaactcgtgaccacctacgcggggctgtcgctgctcggcgccgattatcgctggcgtacgagcgcgtacgccgacggcgacgtcgacgagaacggcacgctgcacggcacgctgtacatcaagggcaccggagacccgaagctcgtgccggaggaactgatcgacctcgtcaacaagatccgccgcgcgggaatcgtcaacgtcgacggcgcgctcgtgctcgacaagaccttcttcgcgccgcagacgcgcgacctgccgccgctcgacgacgacgcgagcgccccgtacaacgtcggccccgacccgctgctctacgcgttcaaggcgctgtcgtttacggtgacgccgaccgacagcggcgcgatcgcagtcgacgtcgtgccggcgctcgcgaacctgaacgtcgacaaccggctcgtcgagggacagggctcgtgcgacgcggcgcgcccgacgctcgtgaccgatgcgaacggcgagctcaccgcgtcgttcgcgggcgactatccgccgagctgcggcccgacgacgaccaatctcgcggtgctgaaccattccacgttcttcgcgcgcggctttctcgcgctgtggcggcagacgggcggctcgttctcggggacgatcgccgagggcaaggtgccgggccgcgcgcggcccgttgcgtcgcaccacggcccggtgctgtcgagcgtcgtgcacgacatcaacaagttcagcaacaacgtgatggcgcgcaacctgttcctcacgatcggcgcggtcgagcaccggccgcccgcgacgcccgcgcagtcggccgacacgatccgcgcgttcctcgcgcacagcgggctgcccaccgacgggctcgcgctcgagaacggctcggggctgtcgcgcgacgagcgcgtgagcgcgctcgggctcgccgacatgctgcaggcggccaacgcgagccccgtcgcgcaggcgttcgtcgattcgctgccgatcgcgggtgtcgacggcacgatgcggaaccggctgacgaacgcacccgtcggcggcaacgcgcacatcaagacgggcacgctgcgcgacgtgcgcgcgatcgcgggctacgtcgcatcggcggacggctcgagctatgtcgtcgtcagcttcatcaacgacgatcgcgcgtcggccgcgcgcgcggcgcacgacgcgctgctcgaatgggtgtacgaagggccacgc

SEQ ID NO: 14326 - DNA, 657 bp, Burkholderia mallei
atgagccttggactcgtaggtcgcaaggttggcatgacccgtatcttcacggcggaaggggattcgattcccgtcaccgtgctcgacgtgtcggacaaccgcgtgacgcagatcaagactgttgaaaccgacggctacacggccgtgcaggttgcattcggctcccgccgcgcgtcgcgcgtgacgaagccgctggcaggtcatctcgccaaagccggtgtcgaagccggtgaaatcctcaaggaattccgcatcgaagccgacaaggccgccgagctgtcgaacggcgccgtgatcggtccggatctgttcgaagtgggccagaaggtcgacgtgcaaggcgtgtcgatcggtaagggctacgcgggcacgatcaagcgctacaacttcggctccggccgcgcatcgcacggtaactcgcgctcgcacaacgtgccgggctcgatcggtatggcgcaggatccgggtcgcgtgtttccgggcaagcgcatgacgggtcacatgggtgacgagacggtgacggttcagaacctggaaatcgctcgcatcgacgccgatcgcaagctgctgctcgtcaagggtgcagttccgggtgcgaagggcggcaaggttttcgtgacgccggccgtgaagacgcgtgccgtgaagggggcgaaa

SEQ ID NO: 14327 - DNA, 1266 bp, Burkholderia mallei
atgtcagacgaatggatgttgccgattcgagacgagcggcgcgcggcgtcgcggttcgtcgtgctcgtcgtgctcgtcgtgctcgtcggggccggaaggagtgggttaacatcgcgttcggcgcgcggcgcggcgcctcgcgcgcggcggcatcgggtcggcggacgcgcgccgcgatgggcggaagcgaatgccacgcgacgttctcgaggcgcgtgcacgcgtgcggtcgcccgaacgtgcgcgcccggcgccgcccgcccaaaagggccgctgcgacacggcgcgcggacgaggcttccgaaccgacttcccaaaccggcgcgtgccgacgttatgggacaatccgacgtcccctgtagaaccgaacattgcatcgaggaaacgatgagcgattttcaaccaggcattctggctccgattccggccgcgagccgctacctgtctttccggatctcgcatccggagcatgcggcgagcgtgctcgccgcgttgcgcgacgcgctcgacggcgttgacacggtgatcggcctcgggccgtcgctcgtgcaggcgctcgacaggaagatcgacgggctgaaggagtttcccgagctgtcggtgccgggcgcgccggtgccgtcgactcccgcggcgctgtgggtctggctgcgcgccgacgatctcggcgcggccaccgtgcgctcgcgcgacatcgagcggctcgtcgcgcccgcgttcgagctcgatgcggcggcgaacgcgttccgttacgcggacgaccgcgacctgtccggctacgaggacggcaccgagaacccggagggcgacgaggcgctcgaagtcgcgttcgtgtccggcaagggcgcggggctcgacggcgcgagcttcgtcgcggttcagcaatgggtgcacgacttcggcaagatgcgcgagattccgggcgacgaaatggaccgcgtcatcggccgccgcaaggacgacaacgaggaactcgaggacgcgcccgcctacgcgcacgtgaagcgcaccgagcaggagagcttcaagccggaggcgaaggtgctgcgccgctcgtcgccgtgggcggacgagcgccgcgccggtttgtacttcgttgcgttcggccattcgttccgcgcgttcgaggtgcagatgcgccggatgatcggcgcgaccgacggcgtgcacgacggcctgttccgcttcacgcagccgatcaccggctcgttcttctggtgcccgcccgtcaagggcggcaagctcgatctgtcggcgctcgggctg

SEQ ID NO: 14328 - DNA, 1872 bp, Burkholderia mallei
gtgattccgcattcgttcctgcaggatttgctgaaccgcgtcgacatcgtcgacgtggtcggccggtacgtgcagctcaagaagggcggcgccaacttcatggggctgtgcccgtttcacaacgagaagagcccgtcgtttacggtcagcccgacgaagcagttctatcactgcttcggttgcggcgcgcatggcaccgcgatcggcttcctgatggagcacgcggggctcacgtttcccgaggcggtgcaggagctcgcgcaatcggtcgggctcacggtgccgcacgagccgtcgccgatgcgcggaggcggcggctcgagcgacggccatgcgccgcccgcggcgtcgaaatcggtcacgaccgcgctgtccgacgtgatgcagaccgcctgtgactattaccgcaagcagttgcgcggcgcgccgaacgcgatccagtacctgaagcggcgcggcctgacgggcgagatcgcgctgcgcttcgggctcggctacgcgccggacggctggcagaacctcgaggcggcgttcgacgactaccgccacgattcgctcgtcgacgcgggcctcgtgatcgtcagcgagaagaccgacgcgaacggcgtcgcgcgccgctacgaccggttccgcgagcggatcatgttcccgatccgcaacgtgaaggggcaggtcatcggcttcggcggccgggtgctggacggcggcgagcccaaatacctgaattcgccggagacgccgctgttcaacaagggcagcgagctgtacggcctgttcgaggcgcggctcgcgattcgcgagcacaagtacgcgctcgtcgtcgaggggtacatggacgtcgtcgcgctcgcgcaactcggctttccgaacgcggtggcgacgctcggcaccgcgtgcacgccgatccacgtgcagaagctgttgcggcagacggacacggtcgtcttcagtttcgacggcgacgcggccggccggcgcgccgcgcggcgcgcgctggaggcgtgcctgccgcacgcggcggacaaccggacgatccgtttcctgttcctgcccccggagcacgatccggacagctatgtgcgggaattcgggacggatgcgttttcggaacaggtgaagcgggcgatgccgctgtcccagttcctgctgaacgaggccacggcaggtaaggagcttgaccagccggaagggcgcgcgaaggcgctgttcgatgcgaagccgctgctgcaggcgctgcccgcgaacgcgttgcgcgctcagatcatgcacatgttcgccgatcggctgcagattccgttcgacgaagtcgccgcgcttgccgaagtggacgcgcggatcgccgcgccggcccgccaggcgcccgcccgcaacgagcggcggcgcgtgacggagagcgaaaagcgcgcattgcgcaatctggtgatgcacccgcgcatcgcggcggcgatcgacgacgaaagcgtcgcgacgctgcgggcgctgcccaggatcggggaactgttcgacgaggtgatcggccacgcgcgcgcgcttggggacggggcggaattccggcttttgtccgacgtgctacgcaattcggccaacgcgccgacctacgacgaaattttccgggaaattctggtctatgatgaaaatgtccgcgacttgatgcagcagaatccggaaagcgacgcggcgcaggaagggctgcgcgagcgcgaacggatcgcaggcgaggagcttcaggcagcggtgctcaagatgcgctatgacgcgtgctgcgaccggctcaacagcctgtcgaagcgctcggcgccctcttccgaggaattggcggaaatcaaggacttgcatcagaacctggcagacatgaaacggaggctcgggctg

SEQ ID NO: 14329 - DNA, 1398 bp, Burkholderia mallei
atgaagatcaccatcatcggcacgggttatgtgggcctcgtcaccggcgcgtgtctcgccgagatcggccacgacgtgttctgtctcgacgtcgatccccgcaagatcgacatcctgaacaacggcggcatgccgattcacgagccgggtctgcaggaaatcatcgcgcgcacgcgcgccgccggccgcatcgcgttctcgacggacatcgaggcgagcgtcgcgcacggcgagattcaattcatcgcggtcggcacgccgcccgacgaggacggctcggcggacctgcaatacgtgctcgaggccgcgcgcaacatcggccgccacatgacgggctacaaggtgatcgtcgacaaatcgacggtgcctgtccgcaccgcgcagcgcgtgcgcgcggtgatcgacgaggcgcttgccgcgcgcggcctcgcgggcagcgccgagcatcgcttctcggtcgtgtcgaatcccgagttcctgaaggagggcgcggccgtcgacgatttcatgcggccggaccggatcatcatcggcgtcgacgacgacgcggcgggcgcgatcgcccgcgagaagatgaagaagctctacgcgccgttcaaccgcaatcacgagcgcacgatctacatggacgtgcgctcggcggagttctcgaaatacgcggcgaacgcgatgctcgcgacgcgcatctcgttcatgaacgagatgtcgaatctcgcggatcgcgtcggcgccgacatcgaggcggtgcgccgcgggatcggctccgatccgcggatcggctatcacttcctgtatgcgggcgtcggctacggcggctcgtgctttccgaaggacgtgcaggcgctcattcgcaccgggagcgaaaacggtcagccgctcaggattctcgaggcggtcgaggacgtgaaccacgcacagaagaacgtgctgctcgacaagatcgaaaagcgctacggcgccgatctggcgggccgcacgttcgctgtctgggggctcgcgttcaagccgaacaccgatgacatgcgcgaagcgccgagccgacgcctgatcgcttcgctgctcgcgcgcggcgcgacggtgcgcgcgtacgatcccgtcgcgctcgacgaggcgcggcgcgtgttcgcgctcgatctgcacgacggggccgatgcgctcgcgcgtctcgcattcgtcgattcggccgacgacgcgctcgcgggcgcggacgcgctcgtcatcgtcaccgaatggaaggaattcaagagcccggacttcgcgcatctgaaatcggtgctgaaggcgcccgtgatcttcgacggccgcaacctgtatgaacccgacgcgatggccgagctcggcatcgattaccacgccattggacgcccctatgtcgagcccttctcttccgagcgcgga

SEQ ID NO: 14330 - DNA, 1011 bp, Burkholderia mallei
ttgttcggcctctggatcgagcgctcggccgacgtgcgcgtcacgggcaacgtgatcgtcggcaagcgcgatttgctgtcgcccaggcgcggcaacggcatccagctctacaacacgacgggcgcgcgcatcgccggcaacacgatcagctacacgcgcgacggcatctatgtcgacgtgtcgcatcacgcgcgcttcgagcacaacacgatccacgacgtgcgctacggcacgcattacatgaactcgtactacaacgtctgggacggcaacgacgtctatcacaaccgcggcggcctcgcgatcatggaggcgcgcgaccagatcgtgcgcggcaaccgggtatggggcaacaccgatcacggcatcatgctgcgcacgatccaggattcgctgatcgagaacaacgtcgtcgccggcaaccagcgcggcctgttcatctacgacgccgaatacaacacgatccgcggcaacctcgtcgtcgacaacaagatcggcgtgcatctgtggggcggctcgatccacaacgacgtgacgggcaacgatttcgcggacaaccgcgagcagatccgctacgtcgcggcgagcgacgtcgcgtggcccggcaactactggagcaactacctcggctgggaccggcgcggccgcggcgtcggcgacgtgccgtacaaggcgaacgatctcgtcgaccggctgacctggcgcgtgccgtcggtcaaagtgctgatgaacagtccgggcgtgcaggcgctgcgcgtcgtcgcgcggcagttttcgctgctcgcggtgccgagcgttgttgacgacaccgcgggcatgcccgccgggcaccgcggcttgccgcaatgggttggccaagcgatgatcaagcttgacggggtttttaaaaactttggggccgggggcccccgggcaacgggatttaattctccgaaaccgccccgggcgaacttgtttggccttaatggggccaaacggggccggggcaaaaagaaaccattgtttccaaat

SEQ ID NO: 14331 - DNA, 1865 bp, Burkholderia mallei
gtgcaaggcttgccgccgccccggcccccacttatgatgacccgcttttttgctcacgccggccgccatttgggcgtcgtgtgctataaagccgtcgtaaaagggcccgcatcgggctcgcccggtctatcaatacacactgtcatgtcgaaagcactcatcattgcggaaaagccttcggtcgcgaacgacatcgcgcgtgctttgggcggctttaccaagcatgacgaatactacgagagcgacgaatacgtgctgtcgtcggcggtcggccacctgctcgaaatcgccgcgcccgaggaatacgaagtcaagcgcggcaaatggagcttcgcgcatctgcccgtcatccctccccatttcgatctgaatccgatcgcgaaaagcgagtcgcgcctgaaggtgctgacgaagctgatcaagcgcaaggatgtcgaccgtctgatcaacgcatgcgacgcggggcgcgagggcgagctgatcttccgcctgatcgcgcagcacgcgaaggccaagcagccggtccagcgcctgtggctgcagtcgatgacgcccgccgcgatccgcgacggcttcgcgcacctgcgcaccgacatggacatgcagccgctcgccgatgccgcgcgttgccgctcggaggccgactggctcgtcggcatcaacggcacgcgcgcgatgacggcgttcaacagcaagggcggcggcttcttcctgacgaccgtcggccgcgtgcagacgcccacgctgtcgatcgtcgtcgagcgcgaggagaagattcgccgcttcgtgccgcgcgactactgggaagtgcgcgcggaattcgtctgcgccggcggtttctacgaaggccgctggttcgatccgaagttcaagaaggacgaattcgaccctgaaaaacgcgattcgcgcctctggagcctgcctgccgcggagacgatcgtcgccgcgtgccgcgaccacctcggcacggtcaccgaggaatcgaagccgtcgacgcagctttcgccgctgctgtacgacctgacgagcctgcagcgcgaggcgaacagccgcttcggcttctccgcgaagaacacgctcggcctggcgcaggcgctgtacgagaagcacaaggtgctcacctatccgcgtaccgacgcgcgcgcgctgccggaggactacctcggcacggtgaagtcgacgctcgagatgctcaaggagagcaacaactacctgccgcacgcgaagcaggtgctcgacaagaactgggtgaagccgaacaagcgcatcttcgacaactcgaagatcagcgatcacttcgcgatcatcccgacgctgcaggcaccgaaatcgctgtccgagccggaacagaagctctacgacctcgtcgtcaagcgcttcctcgcggtgttcttcccggccgccgaattcaaggtgaccacgcggatcaccgaggttgccggccatcacttcaagacggaaggcaaggtgctcgtcgagcccggctggctgcaggtctacggccgtgacgccgagggcgccgacgcgaatctcgtgccggtgcagaagggcgagaaggtcaagaccgacaagatcgccgcgcacggcctcacgacgaagccgcccgcacgctattcggaagcgacgctgctgtcggcgatggaaggcgcgggcaagctcgtcgaagacgacgaactgcgcgaggcgatggccgcgaagggcctcggcacgccggccacgcgcgcggcgatcatcgaaggcctgctcggcgagaagtacctcgtgcgcgaaggccgcgagctgattccgaccgcgaaggcgttccagctgatgaccctgttgcgcggcctcggcgtgaaggagctgaccgcgcccgagctgacggg

SEQ ID NO: 14332 - DNA, 702 bp, Burkholderia mallei
atgaccgattacgtttttgcgccgcccgccgtgccgtccgtcgagatcgccggctgcgccgcgcgctttgcggtgcgccgcgtgttctgcgtcggccgcaactatgcggaccacgcgcgcgagatgggcgccgatccgaaccgcgagccgccgttcttcttcacgaagccggccgacgcgatcgtgcccgcgagcggcacggtgccatacccgacgctcacgtccgagctgcatcacgagatcgaactcgtgatcgcgatcggccgcggcgggcgcgcgatcgccgccgacgcggcgctcgatcacgtgtggggctatggcgtcggcgtcgacctgacgcggcgcgacttgcaggccgaggcgaagaaggccggcaggccgtgggactgggcgaagggcttcgacgcgtcgggcccggtgacggcgctgcatccggccgcgtcgatcggccatccgcagcgcggccggatctggctcgccgtgaacggcgccttgcgccagcaaggcgatctcgccgacatgatctggccgatccccgacgtgatcgcgtatgcgtcgcgcgcggtcgaactgcgcgcgggcgacctgatcttcaccggcacgccggcgggcgtcgccgcgctgcagccgggcgagcgcgtgacgggcggcgtcgacggcgtcgcgtcgttcgagttcgtcgtcggagaaaaaccggccgcg

SEQ ID NO: 14333 - DNA, 1509 bp, Burkholderia mallei
ttggatcgacgctgcgcgtcgtacgccgtgcggcgcacggcgcgcagcgcgcggaggcaagccgtgcgctgcgacgcgtgccggcggcggggccggcggatcgggcagcaagcttcggccgagttcgcggaacgccggacggacatcggcgcgccgcgggaagcggacatggggcccgcgtcagccgctttggcccgcgtcgcgcgcgcgccgttcccgcccgactcccgagccgagcgcgagcaccgcgaacacgagcgcgccgctcgcgacctgctgccagtagaaattccagccgatcagcagcaggccgttcgcgacgaagctcacgagcagcacgccgagcagggtgccggcgacgttcggccggcgcgcctcggacagcgtcgcgccgatgaacgtcgcgccgatcgcgttcagcagatacgcgttgcccgcttgcggcgcgtaagaccggaccgtcgacgacagcacgagccccgcgacgccgtagacgagcgcgctcgcgacgaacacgcccgcggccagcgcgccgacgcgcagccccgagtggcgcgcgacgcccggctgcgcgccgagcgcgcgtgcttgccggccgagcgtcaagcactcgagcgcgacgtgcagcgcgccggcgagcgcggcgacgatccacagcggggcggcgacgccgagccagacgccgtgcgcgagcgcgtcgaacgcgggcggcggtgcggtgctcagcagatagatcggctgcccgccgtccgtcgcgagttgctggattgtctggccgatgaacagcgtgccgagcgtcgccagaaacggcgcgatgcccagccgcgtgacgagcagcgcattggccgcgccgagcgcgagcgccgcgccgaggcccgcgagcgccgcgctcgcgcagcccgcgcgatgcgcgagcgcgcagacgaacgcgaggctcgcgacgtcgatcgccgtgccgagcgacagatcgattgcgccgatcgacagcgcgagcgtcatcccgagcgcggcgatcgcgagcagcgcgaagttgttgacgagcacgcgctcgacgttcgcgagcgtcgcgaagccgggcgccgcgacggcgaagaacgcgagaacggccgcgagcgcgccgagcgcggcgaggcgcgacagacggtcggttgcgtcacgcatcgaatgcttcctgcgagcggcgccggcgcagcagcgcgacggccgcgacgacgaacaggatcagcgcgccctcgacgccgctcacccaatagctcgacacgctgttcaactggaagccgttcgcgagcaggccgacgaacagcacggcgacgagcgtgccgggaatcgtcggcacgagccggcgcgagaacacgacgccgagcagcaccgccgcgacgacgggcagcagatagtcgcccgcgcccggcgcgctgccgctcagcagcgcgcacgacgcgagcgcgccgaccgcgacgcccgtcgcgcaagtcgcggcgagcgcgagcgcgtcgccgtggccgccgcgcg

SEQ ID NO: 14334 - DNA, 1731 bp, Burkholderia mallei
atgcctcatgacgtcagtctgattgccttgctcgcggccggcttcggtctcgcgatgatcttcggttacctcgcgtcgctgctgaagatgccgccgctcgtcggctatctgctcgccggcatcgtgatggggcccggcacgcccggcttcgtcggcgatctcgcactcgcgcagcagctcgccgagatcggcgtgatgctgctgatgttcggcgtcggtctgcatttctcgctcggcgatctgctctcggtgcgcaagatcgcgctgcccggcgcgatcgtccagatcgcggtggcgaccgcgctcggcgccgggctcgcgctatggtggggctggagcgtcggcggcgcgctcgtgttcggcctttcgctgtcggtcgcgagcacggtcgtgctgttgcgcgcgctcgaagggcgggggctgatcgaatcggtcaacgggcggatcgcggtcggctggctcgtcgtcgaggatctcgtgatggtgctcgtgctcgtgctgctgccgccgctcgcggcgctgctcggcggcggcggcgcgcccgcgcacggcgacgcagccgtgcacgcgggcgaggcgggcggcagcctgtgggccgcgctcggcgtcacgctgctgaaggtcgcggcgttcgtcgcgctgatgctcgttgtcggcaagcgcgtgtttccgcgcattctgtggctcgtcgcgcgcaccggctcgcgcgagctgttcacgctttgcatgatcgcggcggccgtcggcgtcgcgttcggtgcggcgaagctgttcgacgtgtcgttcgcgctcggcgcgttcttcgccgggatgatgatgcgcgaatcggagttcagccgccgcgcggccgacgagacgctgccgttgcgcgacgcgttctcggtcctcttcttcatctcggtcggcatgctgttcgatccgcgcgtgctgatcgacgagccgctgcacgtgctggaagtggccgcgatcgtcgtgctcggcaagacgctcgcggcggtcgcgctcgtgctggcgttccgctatccgctgaacaccgcgctcacggtcggcgtgagcctcgcgcagatcggcgagttctcgttcattctcgccagcctcgggcgcgggctggggttgctgtcggccgaagggcagagcctgattctcgcggtcgcgctgctgtcgatcgcgctcaacacgctgctgttcgccgcggtcgatccggtgctcgcgtggatccgcaagcgctcggcgttcgcgcgccggctcgagtcgcgcgacgatccgctcgccgcgctgccgatgtcgacgccgcaggcgcatctgacggggcaggtcgtgatcgtcggctacgggcgcgtcggcacgcggatcgcgcacgcgctcgacgcgcgcgggatcgcgtacgtcgtcgtcgagcagaatcgcgagacggtcgagaagctgcgggcggacggcgtcgcggtcgagccgatcgtgctcgtgcaggcgcacatcgcgcgcgcggggatgctcgtcgtcacgctgccggacgtgttcgacgtgcggcagatcgtcgatatctcgcgcacgctgaatccggcgatcgagatcgcgctttgcacgaacagcgacgaggaggcggcgctgctcgcgaacgaagggatgggcgaagtgttcgtgagcgagaccgagctcgcgcatggcatgaccgagcacgtgctcgcgcggatgggcgcgggcgaggcgcacgcgcggcgctcggccgcgcat

SEQ ID NO: 14335 - DNA, 1068 bp, Burkholderia mallei
atggaagaaagcaagaaaggctccgggctgactgccgaaaagagcaaggcgctcgccgccgcgctcgcgcagatcgagaagcagttcggcaaagggtcgatcatgcggctcggcgacggcgaggcggtcgaggatatccaggtggtgtccacgggctcgctcggtctcgatatcgcgctcggcgtcggtggcttgccgcgcggccgtgtggtcgaaatctacgggccggaatcgtccggcaagacgacgctcacgctgcaggtgatcgccgagatgcagaagctcggcggcacggcggcgttcatcgacgcggagcacgcgctcgacgtccagtatgcgtcgaagctcggcgtgaacgtgccggagctgctgatctcgcagccggacacgggtgagcaggcgctcgaaatcgtcgacgcgctggtccgctcgggctcgatcgacatgatcgtcatcgactcggtcgcggcgctcgtgccgaaggccgaaatcgaaggcgagatgggcgacgcgctgcccggcctgcaggcccgcctgatgtcgcaggcgctgcgcaagctgacgggcacgatcaagcgcacgaactgcctcgtgatcttcatcaaccagatccggatgaagatcggcgtgatgttcggcaacccggaaaccacgacgggcggcaacgcgctgaagttctactcgtcagtgcgtctcgacattcgccggatcggctcgatcaagaagaacgacgaggtgatcggcaacgaaacgcgcgtgaaggtcgtcaagaacaaggtgtcgccgccgttccgcgaagcgatcttcgacatcctgtacggcgaaggcatttcgcgccagggcgagatcatcgatctcggcgtgcaggcgaagatcgtcgacaaggcgggcgcgtggtacagctatagcggcgagaagatcggccagggcaaggacaacgcgcgcgaattcctgcgcgaaaatccggaaatcgcgcgcgagatcgagaatcgcattcgcgagtcgctcggagtcgccgcgatgccgcagggcgccggttccgaggccgagatcatggacgaagaggag

SEQ ID NO: 14336 - DNA, 825 bp, Burkholderia mallei
gtggatctcgcttccgtgcaaaccttcatcgtcactcgcggcctcgacttcggcctgcaggtcatcgcgtcgatcgcgctctggatcttcggccgctgggcgatccggatcgtcacgaatctgatgggcaagctcatccgcaggagcggaaaagtcgattcgacgctgtcgcactatctggaatcggtcgtgagcgtcttgctcacggtgctcttgatcctcgcgatcctgcaggtgttcggcgtgcagacgacttcgttcgccgcactgctcgcgggcctcggcctcgcggtcggcaccgcgtggggcggcctgctcgcgcacttcgcggccggcgtgttcatgcaggtgctgcggccgttcaaggtcggcgacgtgatctcggcgggcggcgtgacgggcaccgtcaaggaattgggcctcttcggcacgacgatcgtcacggccgacaacgtcgtcacgctcgtcggcaacaacaagatcttctccgacaacatcgcgaactacagcgcgacgcccacgcgccgcgtcgatctgacggcgaagatcgcgaacggcgtcgacgcggccgatgcgatcaagcggctgaaggccgcgctcgaactgatcccgaacgtcgtcaagcacccggcgcccgatgtcggcgtgctgtcgttcacgccggaaggcccgctgctgttcgtacggccatcgacgcagcccgccaactactggcaagtgtattgcgacaccaatcgcgcgattctcgacacgttccgcgaggccggctatccgacgccggaaacgccggtcgcgcatcgcacgaccgccgacgtcgcgaaatcc

SEQ ID NO: 14337 - DNA, 3198 bp, Burkholderia mallei
atggcaaagttttttatcgatcgcccgatcttcgcgtgggtgatcgccatcatcctgatgctggccggcgtcgcggcgatcttcacgctgccgatcgcccagtatccgacgatcgcgccgccgtcgatccagatcaccgcgaactacccgggcgcttcggcgaagaccgtcgaagacaccgtcacgcaggtgatcgagcagcagatgagcggcctcgacaacttcctgtacatgtcgtcgacgagtgacgactcgggcaacgcgacgatcacgatcacattcgcgccgggcacgaacccggacatcgcgcaggttcaggtgcagaacaagctgtcgctcgcgacgccgatcctgccgcaggtggtgcagcagctcggcctgtcggtgacgaagtcgagcagcagcttcctgctcgtgctcgccttcaactccgaagacggcagcatgaacaagtacgacctggcgaactacgtcgcgtcgcacgtgaaggacccgatcagccggatcaacggcgtcggcactgtcacgctgttcggctcgcagtacgcgatgcggatctggctcgacccgaccaagctcacgaactacgggctcacgccggtcgacgtgacgagcgcgatctccgcgcagaacgtgcagatcgcgggcggccagctgggcggcacgccggccgtgccgggcaccgtgctgcaggcgacgatcaccgaggcgacgctgctgcagacgcccgagcagttcggcaacatcctgctgaaggtgaatcaggacggctcgcaggtgcggctgaaggacgtcgcgcagatcggcctcggcggcgagacgtacaacttcgacacgaagtacaacggccagccgaccgccgcgctcggcatccagctcgcgaccaacgcgaacgcgctcgcgaccgcgaaggcggtgcgcgcgaagatcgacgagatgtcggcgtacttcccgcacggcctcgtcgtcaagtacccgtacgacacgacgccgttcgtgcgcctgtcgatcgaggaagtggtgaagacgctgctcgagggtatcgtcctcgtgttcctcgtgatgtatctgttcctgcagaacctgcgggcgacgatcatcccgacgatcgcggtgcccgtggtgctgctcggcacgttcgcgatcatgtcgatggtgggcttctcgatcaacgtgctgtcgatgttcggcctcgtgctcgcgatcggcctgctcgtcgacgatgcgatcgtcgtcgtcgagaacgtcgagcgggtgatggcggaagagggcttgccgccgaaggaggcgacgcgcaaggcgatgggccagatcacgggcgcgctcgtgggcgtggcgctcgtgctgtcggcggtgttcgtgccggtggcgttctcgggcggctcggtcggcgcgatctatcggcagttctcgctgacgatcgtctcggcgatggtgctttccgtgctcgtcgcgttgattctgacgccggcgctgtgcgcgacgatcctcaagccgatcccgcaagggcatcacgaggagaagaagggcttcttcggctggttcaaccgcaccttcaactcgagccgcgacaagtatcacgtcggcgtccaccacgtgatcaagcgctcgggccgctggctcatcatctatctcgcggtgatcgtcgccgtcggcctgctgttcgtgcgcctgccgaaatcgttcctgcccgacgaggaccagggcctgatgttcgtgatcgtccagacgccgtcgggctcgacgcaggagacgaccgcgcgcacgctcgcgaacatttccgactacctgctcacgcaggagaaggacatcgtcgaatccgcgttcacggtcaacggcttcagcttcgcgggccgcggccagaactcgggcctcgtgttcgtcaagctgaaggactactcgcagcggcagagctcggaccagaaggtgcaggcgctgatcggccggatgttcggacgctacgcgggctacaaggacgcgctcgtgattccgttcaacccgccgtcgattcccgaactcggcacggcggccggcttcgacttcgagctgaccgacaacgcgggcctcggccacgatgcgctgatggccgcgcgcaaccagttgctcgggatggccgcgaaggatccgacgctgcggggcgtgcgtccgaacgggctgaacgacacgccgcagtacaaggtcgacatcgatcgcgagaaggcgaacgcgctcggcgtgaccgcggatgcgatcgaccagacgttctcgatcgcgtgggcgtcgaagtacgtgaacaacttcctcgacaccgacggccggatcaagaaggtgtacgtgcagtccgacgcgccgttccggatgacgccggaggacatgaacatctggtacgtgcgcaacggctcgggcgggatggtgccgttctccgcgttcgcgacgggccactggacctacggctcgccgaagctcgagcgctacaacggcatctcggcgatggaaatccagggccaggccgcgccgggcaagtcgaccggccaggcgatgacggcgatggagacgctcgcgaagaagctgccgacgggcatcggctattcgtggacggggctgtcgttccaggaaatccagtcgggctcgcaggcgccgatcctgtacgcgatctcgatcctcgtcgtgttcctgtgtctcgccgcgctgtatgaaagctggtcgatcccgttctcggtgatcatggtcgtgccgctcggcgtgatcggcgcgctgctcgccgcaacgctgcgcgggctcgagaacgacgtgttcttccaggtcggcctgctgacgacggtggggctgtcggcgaagaacgcgatcctgatcgtcgagttcgcgcgcgagctgcagcaaacggagaagatggggccgatcgaggcggcgctcgaggcggcgcggctgcggctgcgtccgattctgatgacgtcgctcgcgttcattctcggcgtgatgctgctcgcgatcagcaacggcgcaggctcggcgagccagcacgcgatcggcaccggcgtgatcggcgggatgatcaccgcgacgttcctcgcgatcttcatgatcccgatgttcttcgtgaaggtgcgggcagtgttcagcggcgagaaggaagacgccgacgaagcgctgcgcctcgcgcacgagcacatgcaccgtgacgacaagccggagcacggcgacgacgctggcaagaaggac

SEQ ID NO: 14338 - DNA, 2940 bp, Burkholderia mallei
atgcgcgcccgcgcccgtgcgctacgccgcgtgctcgacgatcagttgcacgcgcgtcgtgccgttccacgtatcgctcgcgagccggaacgcgagggtcgcgcgcgcgggcagcggctccgcgtgattgaaccagatcgcgttgaagcgctggcggccgcgcgtcaattgcagcttcaggtgcttgtccttgacgagcgcctgcgaggcgacgtcgaattcgcccgagaagagcggcgccgggaagccctggccccagacggccgcatcgagcagctcgaccacctgcggcgtgaagtaggcatcctcgagatcgccgtccgtctcgatcacccgcgcgagcgcgtcgtcggacagccattcgcgcgcgaccgtctcgaacgcggccgcgaagcgcggcacgttcgcggtctcgagcgtgacgcccgcggccatcgcgtggccgccgaacgtgacgatcagatcgggttcgcgcttcgagatcaggtcgatcgcatcgcgcagatggaagccgggaatcgagcggccggagcccttcacgcgcgcgccgccgtcgtccgcgtgcgcgaacgtgaacgccggccggtgaaagcgctccttgagccgccccgcgacgatcccgatcacgccctggtgccattcggggttgaagagcgtgatggtggccgcctcggcggggtcgaccgacgcgagatcggcgagtgcctgctgctgcatgccggcctcgatctcgcgccgctcgcggttcatcgcgtcgagctgctgcgcgagttcccacgcgcggcccacgtcgtcggtcgtcaggcattcgatgccgagcgacatgtccgacaggcggcccgccgcgttcaggcgcgggccgaggccgaagccgagatcgaagcccgatgcgctgcgcgcgtcgcgcgcggccgcgcgaaagagcgcggcgatgccgggctgcatccgtccgttgcggatgcgctgcaggccttgcgcgacgagcacgcggttgttgccgtcgagccgcacgacgtcggccaccgtgccgagcgcgacgagatcgagcagcccgtcgagccgcggctcggggcgggcgtcgccgaacgcgccgcgcgcgcgcagctcggcgcgcagcgcgagcagcacgtagaacatcacgccgacgcccgcgatatgcttgctcgggaacgcgcagccgggctggttcggattgacgatcgcgcgcgcggcgggcagcgtgtcgccgggcagatggtgatcggtgacgagcacgtcgatgccgcgcgcgttcgcggccgcgacgccgtcgacgctcgcgattccgttgtcgacggtgatcagcaggtcgggctttctcgcggccgcgagctcgacgatctcgggcgtgagcccgtagccgtattcgaagcggttcggcacgaggtaatcgatcttcgcgccgaacatccgcaggccgcgcacggcaaccgcgcaggcggtcgcgccgtcgcagtcgtaatcggcgacgacgagcatcttgcggccggcctcgagcgcgtcggcgaggagcgcggcggcctgcgcgcagcccttgagctgcgcgggcggcacgaggcgcgacagcgcggtttcgacgtcggcgggcgaggcgattccgcgcgccgcgtagaggcgggcgagcacgggatgcagcccgtggcgggcgagcgcgtcgagcgcggcgggaacggcggagcgggtgacgatgcgggtcatgcgaagcggttgtcgttattcgaacagggaggcaagcgcgcggcggcgccagaatttgcgcagatcgccgcgcgtcgcggcgagcgtcgcggcgctcgtgtcgccgcacagcgtgagcgcgagctcgccgatgcggccttgcgcgagcgcggcgagcgccggtgcgaaccagtcgcgttcgagcgcggcgagcgcgtcgtgccagcgcgcccagtcctgctcgatgaacggcgtggtcagcgcgtcgagttcgacgagcgtcgcgccgtccggcggcgacgcggcgcctgccgcgagcgcgtcgaacgcggcgggcggcccgcccgcggccgcgcccgcggcgagcgcgagcccgcgggcgccgggcgagcgcgacagcacgcgcgcgaacgggctcgtcacgggcttcatcgcgccttgcgcatggaaccagatcgagttgacggccggctcgccgcgcgcgtcgcgcgcctcgttgacgggatgccggaaccacgccatctgcacttcgttctgcagtttcatccacgcgcgcgagcgctcacccgtgcgcgtctcgtgcggcagccagatctcgatgttgcgcccgctcgcgcgcagcggcgcggcgcccgcgagccccgcgagctgcgggctcgacagataccagcgcgacgcgtgcggcgcctgcaccttcacgccgagctcttcgatcagcgggcgggcggtgtccaggagcgcggcggcttcttcgccggtgatctcgagcgacgcgggatcgatcagcacgaggtgatcggtcgcgatccgcacgtgcacgggctcgacgcacgcccatgtgtcgtcgccgggcgcaccgccgtcggcgacgagcatgtacggcgcgagcggcgcgtcgtcggcgtcgtcggcgatcgcgccgaaccggcgcgcgagccagcgttcgtgcggcagcgtgcgctggaaatcctcgccgagcgtgtgctcgacgagccgcgcgcgggcgacgagcttcgcgagcgcgggacgatcgagcgtatgaagggaggacgcggcgtcggcggtcgacggcagcgcgaagggcacgaggaaatgaagacgttgggcgcgcatgatggagcgcattgtaggccaaacggcgcgggtggtcgccgcgaccgggcgggccgggtgggggaatgcgggtgcgtggagcgtgcggcgtgcgtgggtaaaatgatcgaccggcgggcgctgcgcgcgcgg

SEQ ID NO: 14339 - DNA, 2526 bp, Burkholderia mallei
atgaccgccgcgatgccgcggcgcggcgatccgacaggcggcgcgttccggccgggctcgccgccgaagacatcgacatccaccgacgcgacaggagcgcttgccatgcacgacgcacatgtccatcacgatcacagcggcgacacgaacgaacggcgcgatccgcaccgcccgcacgaaacgaagacgccgggcgaaacggcggtcgatccggtctgcggaatgaaggtgccgatcgacacaccccgtcgatacgactatcaaggccgcacgtatcgcttctgcagcgacaagtgcgcgacggcgttccgcgcgtcgccgcagcggttcgtcggcacgccgaagcagcgggccggcgcatccgcggcgaagccgggcacggtctacacgtgcccgatgcacccgcagatacgcgcgaacgcgccgggtgcctgcccgatctgtggaatggcgctcgagccgctcacgccggacgccaccgaagacggcaatcccgagctccgatcgatgacgcggcgcttccagctcgggctcgtgctggccgtgccgctcgtgctgatgacgatgggtgcgatggtgctgccgttcgacatcggcgccggcatcgacgcgctgctcgcgcgctggccgcggccgttcggaatgccggcatcgtggtcgcaatgggtgcaggccgcgctcgcgacgcccgtcgtgctgtggggcggctggccgtttctcgtgcgcggctggaagtcgttcgtcacgcggcggttgaacatgttcagcctgatcgggcttggcgtctgcgtggcgtatctgttcagcgtgttcgcgctgctgttccccgacacgctgccgcaggcgtttcgcagcggccacgaaatcccgctctacttcgaggcgtccgcggtgatcgtgacgctcgtgctgctcggccaggtgctcgagttgcgcgcgcgctcgcgcacgtcgagcgcgatccgcgacctgctgcagctcgcgccgcacacggcggtgcgcgtgaatcccgacggctcggagcaaaccgtgccgctcgacgcggtcgtcgtcggcgacacgctgcgcgtgaagcccggctcgaaggtgccggtcgacggcatcgtcgtcgccgggcattcgagcgtcgacgaatcgatgatcaccggcgagccggtgcccgccgagaagaccgagggcagcccggtgacgggcgcgaccgtcaaccagacgggcaccttcgtgatgcgcgcgcagaagatcggcaccgacacgctgctcgcgcggatcgtgcagatggtcgccgaggccgggcgctcgcgcgcgccgatccagaaactcgccgatcaggtgtccggcgggttcgtgctcgccgtcatcgtgctcgccgcgctcgcgttcgccgcctgggcggcgttcggtccggctcccgcgctcgcgaacgcgctcgtggtggcgatcagcgtgctcatcatcgcctgcccgtgcgcgctcggcttcgcgacacccgtgtcgatcatcgtcggtgtcggccgcggcgcgcgcgagggcgtgctcatcaaggatgccgaagcattggagctgatggagaaagtcgataccgtcgtcgtcgacaagaccggcacgctgaccgaggggcgcccgcgcgtgcagacgatcgtcgcgctcggcgggcagtccgagcgcgcgctgctgggcgatgcggcgagcctcgagggcgcgagcgagcatccgctcgcgcaggcgatcgtcgagcacgccgcgcggatgggcgccgagcgcaagcccgtcgcgtcgttcgattcggtgcccggaaaaggcgtgaaaggcaccctcgacgcccgcacggttgcgctcggcaacgcgcacctgatggcggatctcgcgatcgactgcacggcggccgacgccgattcgaaccgcctgcgcgaagccggccagacggtgatgtacgtcgcgatcgacgggcggctcgccggttatatcggcgttgccgacccgatcaaggagacgacgccggacgcggtgcaactgctcaaggcgtcgggcacgcgcatcgtgatgctgacgggcgacaaccccgtcaccgcgaacgcggtcgcccggacgctgtcgctcgacggcgtgaaggcgggcgtgctgcccgaggacaagtacaggcacgtgcaagcgctgcagcaacaagggcacgtcgtcgcgatggcgggcgacggcgtcaacgatgcgccggcgctcgcgcaagcgaacgtcggcatcgcgatgggcacgggcaccgacgtcgcgatgaacagcgcgcggatcgtgctcgtgaagggcgacctgcgcggcatcgcgcgggcgcgcgcgctcagcgtcgcgacgatgaagaacatccggcagaacctgttcttcgcgttcgtctacaacgcggtcggcattccggtcgcggcgggcgtgctgtatccgtggttcggcatcacgctgagcccgatcttcgcgagcgccgcgatggcggcgagctcggtttccgtcatcggcaacgcgctgcggctgcgcggcgcgaagacg

SEQ ID NO: 14340 - DNA, 903 bp, Burkholderia mallei
atgaaaacatcgaacgagccggtctggcgctcgctgctctacgtacccgctcacgtgccgcgcttcgtcgcgaaggcggccggctgcgatgccgacgcattgattctcgatctggaagacagcgtgccgcccgaatggaaggcccccgcgcgcgacggactcgccgatacggtggccggcctcgccgccgtcgggcacgaggtgctcgtgcgcgcgaacgggccgctcgagccgcttgtggccgatctgcgtgcggcgctcgccgcgggcgtgcacggcatcgtgctgccgaaggtgcgcggcgcgtcgcacatcgaagcgatcgacgaactgctcgacgcgctcgaggccgagcacggcatcgcggcgggccgcacgcgaatcgtcgcgatcatcgagacgcccggcgcattccaggcgatggagcgcatcgcccgcgcttcgccgcgcatcgccgcgatgatgctcggcggcggcgatttcgcgctgcattgcggcgccgaggcgcgcgcggacgtgctgcgcgtgccgaagcagttgctcgtgatcgccgcgcgcgcggctcgcgtgcagccgctcgggctcgtcggcgggctcgacgagattcgggatctcgacacgttcgagcggctcgcgcgcgaatcggcggacctcggctacgccggcgcgacgtgcatccatcccgcgcaggtcgaagcgctgaaccgcgcgtttcgcccgtccgacgccgcggtccgcgccgcgcgcgagatcgtcgccgcttacgacgacgcgcgcgcgaacggccgcggcgcgctgcgcgtcggcgacaggatggtcgacgcgccgggcgtcgcgcacgcgcgcaacgtgctcgcgcgcgccgacgcgatcgcgcgccgcccaaggcgttgcgcggccgcg

SEQ ID NO: 14341 - DNA, 1410 bp, Burkholderia mallei
ttgcttcgcgtttcccttttcccgcccgcggcctgcgccgcccatcgcgcccccaaaatccccccgcctccgccgttcgcctgcgcaaccgattccgagaaataccccggtttccccgctttcctcgaccgatcgcccgttgaccgccgcgggaataatcggtgtcactggaaagcggcatcccgccgcgcccacatggaggcccgcgtggcagaggacagcgatctcgaccggacagaagccgccactcccaagcgccgcgagaaggcgcgcgaggaggggcaggtcgcgcgctcgcgcgaactggcctctttcgcgctgctgtcggcgggcttctacggcgcatggatgctgtccgggccgatcggcgagcatctgcgcaccatgctgcacaccgcattctcgttcgaccgcgcagccgcgttcgatacgaaccggatgctgtcgcacgcgggcacgctgagcctcgaagggctctacgcgctcgcgcccgtgctcgcgctcacgggcgtcgcggcgctcgccgcgccgatggcgatgggcggctggctcgtgtcgacgaagacgttcgagctgaagttcgagcgcctgaacccgatcacgggcctcggccgcattttctcgattcagggcccgattcaactcgggatgtcgatcgcgaagacgctcgtcgtcggcggaatcggcggcatcgcgatctggcgcagcaaggacgaattgctcggcctcgcgacgcagccgcttcacgcggcgctcgccgacgcgctgcacctcgtcgccgtgtgctgcgggatgacggttgcggggatgctcgtcgtcgccggcctcgacgtgccgtaccaactctggcagtacaacaagaagctgcgcatgacgaaggaagaagtaaagcgcgagcatcgcgagaacgaaggcgatccgcacgtgaagggccgcatccgccagcagcagcgcgcgatggcgcgccgccggatgatggcgaacgtgccgacggccgacgtcgtcgtcacgaacccgacgcacttcgcggtcgcgctcaagtacacggatggcgagatgcgcgcgccgaaggtcgtcgccaagggcgtgaacctcgtcgccgcgcgcatccgcgagctcgcggccgagcaccacgtgccgctgctcgaagcgccgccgctcgcgcgtgcgctctatcacaacgtcgaactcgagcgcgagattcccggcacgctgtattcggccgtcgccgaagtgctcgcgtgggtgtatcagctcaagcgcttccgcgccgaaggtgggatcgcgcccgagacgcccgtcgatctcgacgtgccggccgaactcgacaagggcgcgcacgtcgcgccgcaagacgaacgcgaagaggccgaagacgcgctcggcggccgcgccgccggaggtgccgca

SEQ ID NO: 14342 - DNA, 1452 bp, Burkholderia mallei
atgaacctgaacgatcagatcgatacgctcgacagccgcttcgatcagctcatccgcacggtgtgcgaagtcgcgagcgctgctcggcacaccgccgtaaccgccgccgcggacaagaccgccgcgcaggccgccttcgaagcagccgccgagaaacacacgcaagccgccagcatgtccgtcgagcaagcgacgctcgaagccctcgccgcccaggcggccgccgacaaggaagccgccgacgcgctcgccaggcaggccgcagccgtccaggccgcggccgaagcggccgccgcgcaggcggtcaccgacaagaccgcggccgaagcgctcgcgatgcaggcggcggcggagcgcgccgccgccgagcgagcggcggcgcaagcggccgaagacaaagccgccgccgaggcgctcgccgcgcaggcggcggcggatcgcactgccgccgaacacgcggcaacgcaggcggcggcggacaaagccgcggccgaatcgctcgtcgcccaagcagcggcggagcgcgcgaccgccgagcacgcggtgacccaggcggcggcggagcgcgccgcatccgagcaggcggcggctcgagcggcggccgagaagaccgcggccgagacgctcgccgcgcaagcggccgccgagcgcgccgcggccgaacacgcggccgagcaggccgccgccgacaaggcgcaagcgcaagcgctcgcgcaacaggccgccgccgatcgggcggcggcggagcaagccgccgcgcaagccgaggccgatcgcgccgccgcgcaacacgccgccgcccaggcggcgacggaccgcgcggctgccgaggcgcgcgcgaccgagcaagccgccgacgccaaggccgcggccgaatcgctcgccgcgcaggccgccgccgatcgcgccgccgcggagcaggccgccgctcaggcgacggccgacaaggatgcggccgagtcgctgttcaagcaggccgcggccgagcgctcggccgccgaggccgccgccgcgcgcgcggcgagctacaaggcaacagcggaggcgctcgccgcgcaggccgagcgcaaccgggcgatgatcgaggccgagcccgccgcgcccgtggcgacggcgcaaaccgcgaacggcacgctttcgctgcacgtcgcacggccgtcgcaggacgagatctcgctcgcgctcggcgagcattcggtgtcgctgccgccgcaccagctcagccagttgatcgaggaactggcgcacgcgcgggcatcgatgacgatcgagcagccgagcggattgccgaacggctggcgcttcgtgacgacacgcaacccgctgatggcggtccagaagcaggcgaacggcgatcgtctgctggtcgcgcggcacagcggctatggctgggtaccgttcacgttctcgccggatgtcgtgattcagctgtacatgctgctcacgcagaag

SEQ ID NO: 14343 - DNA, 1692 bp, Burkholderia mallei
atgacccgcatcgtcacccgctccgccgttcccgccgcgctcgacgcgctcgcccgccacgggctgcatcccgtgctcgcccgcctctacgcggcgcgcggaatcgcctcgcccgccgacgtcgaaaccgcgctgtcgcgcctcgtgccgcccgcgcagctcaagggctgcgcgcaggccgccgcgctcctcgccgacgcgctcgaggccggccgcaagatgctcgtcgtcgccgattacgactgcgacggcgcgaccgcctgcgcggttgccgtgcgcggcctgcggatgttcggcgcgaagatcgattacctcgtgccgaaccgcttcgaatacggctacgggctcacgcccgagatcgtcgagctcgcggccgcgagaaagcccgacctgctgatcaccgtcgacaacggaatcgcgagcgtcgacggcgtcgcggccgcgaacgcgcgcggcatcgacgtgctcgtcaccgatcaccatctgcccggcgacacgctgcccgccgcgcgcgcgatcgtcaatccgaaccagcccggctgcgcgttcccgagcaagcatatcgcgggcgtcggcgtgatgttctacgtgctgctcgcgctgcgcgccgagctgcgcgcgcgcggcgcgttcggcgacgcccgccccgagccgcggctcgacgggctgctcgatctcgtcgcgctcggcacggtggccgacgtcgtgcggctcgacggcaacaaccgcgtgctcgtcgcgcaaggcctgcagcgcatccgcaacggacggatgcagcccggcatcgccgcgctctttcgcgcggccgcgcgcgacgcgcgcagcgcatcgggcttcgatctcggcttcggcctcggcccgcgcctgaacgcggcgggccgcctgtcggacatgtcgctcggcatcgaatgcctgacgaccgacgacgtgggccgcgcgtgggaactcgcgcagcagctcgacgcgatgaaccgcgagcggcgcgagatcgaggccggcatgcagcagcaggcactcgccgatctcgcgtcggtcgaccccgccgaggcggccaccatcacgctcttcaaccccgaatggcaccagggcgtgatcgggatcgtcgcggggcggctcaaggagcgctttcaccggccggcgttcacgttcgcgcacgcggacgacggcggcgcgcgcgtgaagggctccggccgctcgattcccggcttccatctgcgcgatgcgatcgacctgatctcgaagcgcgaacccgatctgatcgtcacgttcggcggccacgcgatggccgcgggcgtcacgctcgagaccgcgaacgtgccgcgcttcgcggccgcgttcgagacggtcgcgcgcgaatggctgtccgacgacgcgctcgcgcgggtgatcgagacggacggcgatctcgaggatgcctacttcacgccgcaggtggtcgagctgctcgatgcggccgtctggggccagggcttcccggcgccgctcttctcgggcgaattcgacgtcgcctcgcaggcgctcgtcaaggacaagcacctgaagctgcaattgacgcgcggccgccagcgcttcaacgcgatctggttcaatcacgcggagccgctgcccgcgcgcgcgaccctcgcgttccggctcgcgagcgatacgtggaacggcacgacgcgcgtgcaactgatcgtcgagcacgcggcg

SEQ ID NO: 14344 - DNA, 1905 bp, Burkholderia mallei
atggtttcgatacgattgcccgacggctcggttcgccaatacgagcatccggtgacggtcgccgaagtggcggcgtcgatcggccccggtctggcgaaggccgcgctcggcggcaagctcgacggcgaactcgtcgatacgtccgcgctgatcgatcgcgacgcgtcgctcgcgatcgtcaccgacaaggatgccgacgggctcgacatcattcgccattcgaccgcccacttgctcgcctacgcggtgaaggagttgcatccggacgcgcaggtgacgatcggccccgtgatcgacaacggcttctactacgatttctcgtatcaccgcccgtttacgcccgaggatctggaggcgatcgaaaagcgcatgcaggaactcgcgaagcgggacgagcccgtcacgcgccgcgtcgtgtcgcgcgacgaggccgtgtcgtacttccgcagcatcggcgagaaatacaaggcggagatcatcgaatcgattcccgcgagcgacgagatcaagctgtattcgcacggcagcttcaccgatctgtgccgcggcccgcacgtgccgtcgacgggcaagctgaaggttttcaagctgatgaaggtcgcgggcgcgtactggcgcggcgattcgaagaacgagcaactgcagcggatctacggcacagcctggacgaggaaggaagaccaggacgcgtacctgcacatgctcgaagaggcggaaaagcgcgatcaccgcaagctcggcaagcaactcgacctgttccacatccaggaagaggcgcccggcatggtgttctggcatccgaagggctggacgctgtggcagcaggtcgagcagtacatgcgccgtcgcctcgacgcggccggctatctcgagatcaagacgccgatgatcatggatcgttcgctgtgggaggcgtccggccactggcagaactatcgcgagaacatgttcacgacggaatcggagaagcgcgactacgcgatcaagccgatgaattgtcctggccacgtgcaggtgttcaagcacgggctgcgctcgtatcgcgatctgccgctgcggtacgccgagttcggttcgtgccaccgtaacgaggcgtcgggcgcgctgcacgggctgatgcgcgtgcgcggcttcgtgcaggacgatgcgcatattttctgtaccgaggaccagatcaattccgaggcgatcgcgttcaacaagctcgcgatgagcgtctacgaggatttcggcttcgatcggatcgacatcaagctgtcgctgcgtcccgagcagcggatgggttcggacgagacgtgggaccacgcggaagagggcctgcgcaacgcgctgaaggcatgcggcctcgagtgggaggaactgccgggcgagggcgcgttctacggcccgaagatcgagtaccacatcaaggacgcgctcggccgctcgtggcaatgcggcacgctgcaactcgacatgatgctgcccgagcggctcggcgccgagtacgtggccgaggacaacagtcgccgccggccggtgatgcttcaccgggcgattgtcggctcgatggagcgtttcctcgggattctgatcgagcaccatgctggtgcaatgccggtctggctcgcgcctgcccacgctgttgtgctgaatattgccgaaagtcaggcggaatatgctcggactgttgctcaatcgttgcaaaaacaagggcttagagtgtcggccgatttgcgcaacgagaaaattagctataaaatacgcgagcacacgctcgaaaaagttccctacctgctcgtcgtaggcgacaaggagcgtgaagcacaaacggtagccgtgcgtgcccgtggcggcgtcgatctgggtgtcatgcccgtcgaagccttcgttgagcgtctgcgtgaggacatccaggcgttcaag

SEQ ID NO: 14345 - DNA, 303 bp, Burkholderia mallei
gtggctaaactggcactgatcgaacgtgaaaagaagcgcgctcgccttgcgcaaaagtacgctccgaagcgtgctgaactgaaggcgatcatcgacgacgcgagcaagtccgacgaagagcgttacgccgctcgcctggaactgcaacaactgccccgcaacgcgaacccgacccgcaagcgtaaccgctgcgcgatcacgggccgtccgcgcggcacgttccgcaagttcggcctcgcgcgcaacaagattcgtgaaatcgcattccgtggcgagattcctggcctgaccaaggcgagctgg

SEQ ID NO: 14346 - DNA, 1245 bp, Burkholderia mallei
atgacggtccggcatacggtcagcgcgcgtagcctgcgcgccctcgactggctcaacttcttcgtcgcgaacgtgcagacaggcttcggtccgttcatcgcgtcgtatctcgcgtcgcacaagtggacgcagggcgaaatcggcatggtgctgtcgatcggcacgatcagcgcgatggtgagccaggtgcccggcggcgcggccgtcgatgcgctgaagaacaagaaaggcgccgccgcgtgggcgatcgccgcgatcatcctgtccgcggtgctgctcgccgcgagcccgaccgtcgtgcccgtgatcgcggccgaggtgttccacggcttcgcgagctgcatgctcgtgccggcaatggcggcgatctcgttcgcgctcgtcggccgcgagagcctgggcgaccggctcggccgcaacgcgcgctgggcgtcgctcggcagcgcggtcgcggcgggtctgatggggctcacgggcgagtacttctccgcgcgcgcggtgttctggctgacggcggccctcgcgctgcccgcgctrgtcgcgctcgcgatgatcgagccgacgcaccatcatcatcacgcggcgccacgcgccgacgaagacgaagacgaagaacgcgaaacgctgcgcgaactgctgcgcgacaagcggatgctgatcttcgccgcctgcgtcgtgttgttccatctgtcgaacgcggcgatgctgaacctcgccgcgggcgaagtgacggcgggcatgggcgagaacgtacagctcgtgatcgccgcgtgcatcatcgtcccgcaggcgatcgtcgcgatgctttcgccgtgggtcggacgctccgcgcagcgctggggccgccggccgatcctgctgctcggtttcgccgcgctgccgctgcgcgcgctgctgttcgccggcgtctcgagcccgtacctgctcgtgccggtgcagatgctcgacggcatcagcgccgccgtgttcggcgtgatgctgccgctcatcgcggcggacgtcgcgggcggcaaggggcgctacaacctgtgcatcgggctcttcggactcgcggcgggcgtcggcgcgacgctcagcaccgcgctcgccggcttcgcggccgaccacttcggcaacgcgatgagcttcttcgggctcgccgccgcgggcgcgctcgcgacgctgctcgtgtggttcgcgatgcccgagacgcgcgacgcggcgctcgccgaagacgctcggcactcgagcgccgagccggcgcag

SEQ ID NO: 14347 - DNA, 405 bp, Burkholderia mallei
aacacgatccgcggcaacctcgtcgtcgacaacaagatcggcgtgcatctgtggggcggctcgatccacaacgacgtgacgggcaacgatttcgcggacaaccgcgagcagatccgctacgtcgcggcgagcgacgtcgcgtggcccggcaactactggagcaactacctcggctgggaccggcgcggccgcggcgtcggcgacgtgccgtacaaggcgaacgatctcgtcgaccggctgacctggcgcgtgccgtcggtcaaggtgctgatgaacagtccggccgtgcaggcgctgcgcgtcgtcgcgcggcagtttccgctgctcgcggtgccgagcgtcgtcgacgacgcgccgcgcatgcgcgccgcgcacgccggctggccgcaatgggtgggcaagcga

SEQ ID NO: 14348 - DNA, 1008 bp, Burkholderia mallei
atgagcttcaacctgcacaaccgcaacctgctgagcctgatccaccacaacgcgcgcgagctgcgctatctgctcgacctcgcgcgggatctcaagcgcgcgaagtacagcggcaccgagcagccgcgcctgctgcgcaagaacatcgcgctcatcttcgagaagacctcgacccgcacgcgctgcgcgttcgaagtcgccgcatacgatcagggcgcgaacgtcacgtacatcgatccggcttcgtcgcagatcggccacaaggaaagcatgagggacacggcgcgcgtgctcgggcggatgtacgacgcgatcgagtaccgtggcttcagccaggagatcgtcgaggagctcgcgcaccacgcgggcgtgcccgtcttcaacgggctcaccgacgaataccacccgacgcagatgctcgccgacgtgatgacgatgcgcgagcacagcgacaagccgctgcacgacatccgctacgcctatctcggcgacgcgcgcaacaacatgggcaattcgctgctcctgatcggcgcgaagctcgggatggacgtgcggatcggcgcgccgaagtcgctctggcccgcggccgacttcatcgcgcagtgcgaggcgttcgcggccgagagcggcgcgcggctcacgctgaccgaggacccgtacgaagcggtcaagggcgtcgacttcatccacaccgacgtgtgggtgtcgatgggcgagcccgtcgaagcctgggacgagcggatcaacgcgctcctgccgtatcaggtgaaccgcaagctgatcgaatcgacgggcaatccgcgcacgcgcttcatgcactgcctgccgtcgttccacaactgcgagacgaaggtcggcaagcagatcgccgagcgctatccgcacctgcaggacggtatcgaagtcaccgacgaagtgttcgaatcgccgcgctgcatcgcgttcgagcaggcggaaaaccgcatgcacacgatcaaggcggtcctcgtgtcgacgctcggcggcatc

SEQ ID NO: 14349 - DNA, 1899 bp, Burkholderia mallei
ttgctcgctcgtcgcgggctccaggttcagatacgcgccgcccgaggtctgccgcacgcccttgcccaccgcgtcctcgaactgcgccgacagcacgagcgcgcgcagcttgccgcccgcggcgaagcggttcgagatgtagcgcgcgagcgccgcgcgcacgtgctcgacgagcaggatcgaatccttctccttcggcccccattgcgcgagcgattcgagaatcagcttcatgttgcgaatcgagatcttctcggcgagcaggcgctggaacacctccgcgatgcgctgcaccgaaatgtgccgatagctctccttgatgagctccgggtacttctggtccatgtcgtcgagcaggcgcttggcttcctgcacgccgaagaattccgatacgttggcgagcatcaccgcgagaaactgcccgtacagatcgtcgatcgccgagcgcgtgagcacgtcgatcttcgcgagcgcgtcggtctgcgcgcccggcacccaccacgcgtcgccgcccgcgccgtccggcagcgtcacgacgtcgacgggcagcccttcgagcgcgagcgtcgagccgaccacgcggtgccggtcgaagcagatcgcgaacgtcgccgcgcggatctcgttgatcagcacgatcgcctcgcgcggatgcacctgcggcgaatacacgacgcggatgtcgggcaggcgcagccccatgtcgacgaacgcgcgccgccggaacgcgccgatcacgccttcctgctcgaacatcggctgcgccgcctcgggcaccatcagcatcagcggcaccgtctccggaatcagcttgtcgatgtcgacatcgccggcgccgccgtcggccgctttcgccgcgccgccgcccgagagcgcgcccgcgaccttgccgacgagcccgccctcgcgcgccggctcgcccggcttgcgccattcgcggcgcacgtacagcgcgccgagcgcgagcgcgatcagcaggaagacgatcagcggaaagccgggcagcaggccgatcgcgagcgcgagcacggccgtgacgacgagcacgaacgggttcgagaacagctcgccgacgatgttcgcgccgaggttgttgcccgagccgcccacgcgggtgacgacgaagcccgcgccgatcgcgatcaggagcgccgggatctgcgcgacgaggccgtcgccgatcgacaggatcgtgtaggtcgtgagcgcgtcggacaccgacatgccgtgctgcatcacgccgaccgagatgccgccgatcaggttcacgaagatgacgacgatgccggcgatcgcatcgcccttgatgaacttcatcgcgccgtcgaacgagccgtacagctggctttcacgctcgagcgccgagcggcgcgccttcacgccttcgttgtcgatgatgccggcgcgcaggtccgcgtcgatgctcatctgcttgccgggcatcgcgtcgagcgagaagcgcgccgcgacttcggcgacgcgctccgagcccttcgtgatcacgatgaactgcacgatcgtcacgatcacgaacacgacgaagccgaccacgaggttatcgccgatcacgaactgcccgaacgtcgtgatgatcttgccgccctcggcggtgagcaggatcatccggctcgtgctgatcgacagcgcgagccggaacagcgtcgtgatcagcaggatcggcggaaacgtcgagaactcgaggatgttgacgatgtagaacgagcccatgaacacgagcagcgccgtcacgatgttcaggccgatcaggaaatcgagcacgtacggcggcagcggcacgatcagcatcgcgatcacgagcaccatcaggcacaggacgatcagttcggggcgcgcttgggccttgatcaggagattcttcagcatgactatcgaccggat

SEQ ID NO: 14350 - DNA, 609 bp, Burkholderia mallei
atgatggttctgtattccggcacgacttgtccgttctcccagcgttgccggctggtgctgttcgaaaagggcatggatttcgagatccgcgacgtcgacctgttcaacaagccggaagacatcgcggtgatgaatccgtacggacaggtgccgattctggtcgagcgcgatctgatcctgtacgaatcgaacatcatcaacgagtacatcgacgagcgcttcccgcacccgcagctgatgccggccgatccggtgcagcgcgcgcgcgcgcgcctgttcctgctcaacttcgagaaggaactgttcgtgcacgtgagcacgctggagaacgagaagggcaaggccgcggagaagagccacgagaaggcgcgcctcgcgatccgcgatcgcctgacgcagctcgcgccgattttcctgaagaacaagtacatgctgggcgaagagttttcgatgctcgacgtcgcgatcgcgccgctgctgtggcgtcttgatcactacgggatcgagttgtcgaagaatgccgcgccgctgatgaagtacgcagagcggattttcagccgtcctgcttatatcgaagcgctgacgccgtccgaaaaggtcatgcgtcgt

SEQ ID NO: 14351 - DNA, 2622 bp, Burkholderia mallei
atgaaagccgccgaaatccgcgagaaattcctcaagttcttcgaatcgaagggccatacgatcgtccgctcgtcgagcctcgtgcccggcaacgaccccacgctgctcttcaccaattcgggaatggtgcagttcaaggacgtgttcctcggcgcggagacgcgcccgtattcccgcgcgaccaccgcgcagcgcagcgtgcgcgcgggcggcaagcacaacgatctcgagaacgtcggctacaccgcgcgtcaccatacgttcttcgagatgctcggcaacttctcgttcggcgattacttcaagcgcgacgcgatccattacgcgtgggagctgctgacgagcgtctacaagctgcccgccgacaagctctgggtcaccgtctaccatgacgacgacgaagcctacgacatctgggcgaaggaagtcggcgtgcctgccgagcggatcatccggatcggcgacaacaagggcgcgcgctacgcgtcggacaacttctggcagatgggcgacaccggcccgtgcggcccgtgctcggaaatcttctacgaccacggcccggacgtgtggggcggcccgcccggatcgcccgaggaagacggcgaccgctacatcgagatctggaacctcgtgttcatgcagttcaaccgcgacgcgcagggcaacatgacgcgcctgccgaagccgtgcgtcgacaccggcatgggcctcgagcggatcgcggccgtgctgcagcacgtgcacagtaactacgagatcgatctgttccagcagttgatcaaggcgtcggcgcgcgagacgggcgtcgccgatctcgcgaacaactcgctgaaggtgatcgccgatcacatccgcgcgtgctcgttcctgatcgtcgacggcgtgatccccggcaacgaaggccgcggctacgtgctgcgccggatcgtgcgccgcgcgatccgccacggctacaagctcggccgcaaggcgccgttcttccacaagctcgtggccgacctcgtcgccgagatgggcgccgcctatccggagctgaaggaagccgagccgcgcgtgaccgacgtgctgcgccaggaggaggagcgcttcttcgagacgatcgagcacgggatgtcgattctcgaggcggcgctcgccgaactggacgccgcgggcggcaagacgctcgacggcgagctcgcgttcaagctgcacgacacgtacggcttcccgctcgatctgacggccgacgtgtgccgcgagcgcggcgtgacggtcgacgagccggcgttcgacgacgcgatggcgcgccagcgcgagcaggcgcgcgcggcgggcaagttcaaggcgacgcagggcctcgaatacacgggcgcgaagacgacgttccacggctacgaggaaatcgcgttcgacgacgcgaaggtcgtcgcgctgtacgtcgaaggcgcgtcggtcggcgaagtgaaggcgggcgagagcgcggtggtggtgctcgaccacacgccgttctacgcggaatcgggtggccaggtcggcgaccagggcgtgctcgcgaacgcggccacgcgtttcgcggtcggcgatacgctgaaggtccaggccgacgtgatcggccaccacggcgagctcgagcagggcacgctgaaggtgggcgacgtggtccgcgcggagatcgacgccgcgcgccgcgcgcgcaccgcgcgcaaccactcggcgacgcacctgatgcacaaggcgctgcgcgacgtgctcggctcgcacgtgcagcagaagggctcgctcgtcgacgcggacaagacccgcttcgacttcgcgcacaacgcgccgctgaccgacgacgaaatccgccgcgtcgaggccatcgtcaacgagcaggtgctcgcgaacgcgccgggcatcgtgcgcgtgatgccgtacgacgacgcggtgaagggcggcgcgatggcgctcttcggcgagaagtacggcgacgaggtgcgcgtgctcgatctcggcttctcgcgcgagctgtgcggcggcacgcacgtgcaccgcacgggcgacatcggcctgttcaagatcgtcgcggaaggcggcgtcgcggcgggcattcgccgcgtcgaggcgatcacgggcgataacgcggtgcgctatgtgcaggcgctcgacgcgcgcgtgaacgcggcggccgccgcgctgaaggcgcagccgtccgagctgctgcagcgcatcggccaggtgcaggatcaggtcaagtcgctcgagaaggagctgggcgcgctgaagtcgaagctcgcgtcgagccagggcgacgagctcgcgcagcaggcggtcgaagtgggcggcgtgcacgtgcttgccgcgacgctcgacggcgccgatgcgaagacgctgcgcgaaaccgtcgacaagctgaaggacaagctcaagagcgcggcgatcgtgctcgcggcggtcgacggcggcaaggtgagcctgatcgccggcgtcacggcggatgcaagcaagaaggtgaaggcgggcgagctcgtgaacttcgtcgcgcagcaggtgggcggcaagggcggcggccggtcggacatggcgcaggcgggcggcacggagccggcgaagctgccggcggcgctcgcgggcgtcaagggctgggtcgaggcgcggctg

SEQ ID NO: 14352 - DNA, 930 bp, Burkholderia mallei
atgaacctcaagaacgccctccttttgatcgtcctcgccgcgctctggggcgcgtcgttcctcttcatccgcgtcggcgtcgcggcattcggcgtcgcgccgctgatggcgctgcgcgtcgacatcggcgcgctgttcctcgtcgcgctgatgctcacgcgctacgcgccgcgcgagctgatcgcgctgctgcgccagcacgcgtggccgctcttcgtcgtcggcctgctcaattccgccgcgccgttctgcctgttcgcgttcgccgagctcacgctgtcggcgggcgtcacgtcggtcatcaatgcgacaacgccgctctggggcgcgctcgtcgcctacctgtggctgaaggattcgctgtcgctgccgcgcgcgctcggcctcgtgatcggcttcgccggcgtgctcacgctcgtctgggatcaggtgttctcgccgcacggggcgaatccggcatcacccgcgacggccgcgctcgccgccgccgcggcgctcggcgcgacgctgctgtacggcatcgccgcgaacttcacgaaacgcaagctcacgggcgtcgatccgctcgtcagcgcgacgggcagcatggtcggcgcgacgatcctgctgttgccgttcgcgctcgccacgtggcccgccgcgcctgtctccgcgcacgcatggggctcggtgctcgcgctcggcatcgcttgcacgggcgtcgcctatttcattttcttccacctgatcgcgcatatcgggccggcgcgcgcgatcaccgtcacgttcgtgatcccggtgttcggcatcctgtggggcgcgctctttctcggcgagcgcgtgtcgttcgcgatgctcgagggctgcgtgatcgtgctgctcggcaccgcgctcgccaccggcgcgatcaggcgcattcccggcgttcggccccagcgcaacgagacggcc

SEQ ID NO: 14353 - DNA, 672 bp, Burkholderia mallei
atgaaacgcacagttcactggaaggccggcgcgacgctcgccgtggtcgcgacgttcgccggcccggcatccgccgccacgaatgcagcgcccgcgccgaacgccgacggcggcaagccggtgatcgtcgtgctcggcgacagcctgtcggccgaatacggcctgccgcgcgatacgggctgggtcgcgctgatgcgcgcgcgcctcgcggccgagcgaatcgattatagcgtcgcgaacgcgagcatctccggcgacacgacgagcggcggccgcgcgcggctgcccgcggtgctcgcacggctcaagccggccgtcgtcgtcgtcgaactcggcgcgaacgacgcgctgcgcggcgtgccgctcgccgcgaccgaaggcaacctgcgcgagatcgtcgcgcaggcgcggcaggcgcgcgcgcaggtgctgctcgtcggcatgtacgtgccgtcgaattacggcccggactacacgcaaaagttccacggcgtctacacggggctgtccaaggagatgcgcgtgccgctcgtgccgttcctgctcgccggcatcgagaacaagcccgacatgttccaggccgaccagatccatccgacgcaggccgcgcagcgccagttgctcgacaacgtatggccggccctcaagccgctgctgcggacgtcatcgcgc

SEQ ID NO: 14354 - DNA, 1773 bp, Burkholderia mallei
atggctgcaatcaaaacttccctgccgcgtcgcaagttcgacgtggtgatcgtcggcgcgggcggctcggggatgcgcgcgtcgctgcaactgtcgcgcgcgggcctctccgtatgcgtgctctcgaaggtgttcccgacccgttcgcacacggtcgccgcgcaaggcgggatcggcgcgtcgctcggcaacatgagcgaagacaactggcactaccacttctacgacacgatcaagggctccgactggctcggcgatcaggacgcgatcgagttcatgtgccgcgaggcgccgaacgtcgtgtacgagctcgagcacttcggcatgccgttcgaccgtaacgcggacggcacgatctaccagcgtccgttcggcggccacacggccaactacggcgagaagccggtccagcgcgcgtgcgcggcggccgaccgtaccggccacgcgctgctgcacacgctgtatcagcaaaacgtcgcggcgaagacgcagttcttcgtcgaatggatggcactcgacctgatccgcgacgcggacggcgacgtgctcggcgtgacggccctcgaaatggaaacgggcgacgtctacatcctcgaaggcaagaccacgctgttcgccacgggcggcgcgggccggatcttcgcggcgtcgaccaacgcgttcatcaataccggcgacggcctcggcatggccgcgcgttcgggcatcgcgctgcaggacatggaattctggcaattccacccgacgggcgtcgcgggcgcgggcgtgctgatcaccgaaggcgtgcgcggcgaaggcggcattctgcgcaacgcgaacggcgagcgcttcatggagcgctacgcgccgacgctgaaggatctggcgccgcgcgatttcgtgtcgcgctcgatggaccaggaaatcaaggaaggccgcggcgtgggcccgaacaaggaccacgtgctgctcgacctgtcgcacatcggcgccgagacgatcatgaagcgtctgccgtcgatccgcgaaatcgcgctgaagttcgcgaacgtcgactgcatcaaggaaccgattcccgtcgtgccgacgatccactaccagatgggcggcatcccgaccaacatccacggccaggtggtgggcacgtcgcgcgatcacaaggagccgatcaacggcttctatgcggtgggcgaatgctcgtgcgtgtccgtgcacggcgcgaaccgcctcggcacgaactcgctgctcgacctcgtcgtgtttggtcgcgcggccggcaaccacatcgtcgagcacgtgaagaaccagcgcgatcacaagccgctgccggccgacgccgccgacttctcgctgtcgcgcctcgcgaagctcgagaagtcgacctcgggcgagtacacgcaggacatcgccaacgacatccgcgcgacgatgcaaaagcatgccggcgtgttccgcacgtccgcgctgctcaaggaaggcgtcgagcaaatggcgggcctgaaggagcgcgccgccgccgtccacctgaaggacaagtcgaaggtgttcaacaccgcgcgcgtcgaagcgctcgaactggcgaacctgatcgaggtcgcgcgcgcgacgatggtgtcggcggaagcgcgcaaggaaagccgcggcgcgcacgcgcacagcgattacgagcaccgcgacgacgagaactggctgcgtcacacgctgtggtacagcgaaggcgatcgcctcgactacaagcccgtccaaatgaagccgctgacggtcgagtccgtgccgccgaaggcgcgtacgttc

SEQ ID NO: 14355 - DNA, 756 bp, Burkholderia mallei
atgaacgacgaacaactcctccgctattcccgccacatcctcgtcgacgagatcggcatcgaggcgcagcagcgctttctcgacgcgcacgcgatcgtcgtcggcgcgggcgggctcggttcgcccgccgcgatgtatctcgcggcggcgggcgtcggcacgatcacgctcgtcgatgccgacaccgtcgatctcacgaacctgcagcggcagatcctgcacgcgacggattcggtcggccgcaagaaggtcgaatcgggccgcgacgcgctcgcgcggctcaatccggacgtgaaggtgaacgcggtcgccgagcgcgtcgacgacgcgtggctgaacgcgcacgtgccgcacgcgagcgtcgtgctcgactgcaccgacaacttcgcgacgcgccacgcgatcaaccgcgcgtgcgtcgcgcatcgcgtgccgctcgtatcgggtgcggcgctgcgcttcgacgggcagatcagcaccttcgatttccgcgagcccggctcgccgtgctacgcgtgcgtgttcccggaggatcagccgttcgaggaagtcgcgtgctcgacgatgggcgtgttcgcgccgaccgtcggcatcatcggcgcgatgcaggcggccgaggcgctgcgcgtgatcggcggcatcggcgcgacgctcgtcggccggctgatgatgctcgattcgctgcggatggaatggaacacgatgaagatcgcacggcagccggattgcccggtgtgcggcgcgggcggcgcgcat

SEQ ID NO: 14356 - DNA, 888 bp, Burkholderia mallei
atgtcgcacggcggcagcccgctcgggcgaccgccgcgcagccctcgccccacccgcgctcccccagccgcgcgtccgccttcagcgcctccgcggccccgaaaccgcgagcccgccgccgaacccgttaaaattggacgtttttgtcccgccgtcgcgcaccgccgcgacggcgccttgcgaggttcaatgttgctgaaaaccacgagacggctcgtcgtcgcatcgctcgccgcgctgctcgccgcgtgcggctcggcgcccgtcggccccggcttctaccgggtcgagcgcggcgacacgctctccaagatcgcgcgatcgaatcgccaatcggtcgcgaatatcgcccgctggaaccagatcacgaatcccgacgcgatcgaagtcggccaggtgctgcgcgtcgcgccgccgccgggcaccgcgtcgacctcgggcacgacgggcgcatcgcgcggcccgagccgccaggcgccctcgtcgtccgccacgtcgcccgcgtcgtccgtgaaaccggcgtcgagcatctcgctcgtctggcccgccgccggcagtgtgatccgctcgttcgacggatcgaaatcgaaaggcatcgacatcgcgaacaccgccggcacgccggtcatcgcggcggcggccggcacggtcgtctatgcgggcaacggcctgcgcggctacggcaacctgctgatcgtcaagcacgacgccgatttcctgacgacctacgcgcacaaccgcgcgctactcgtgaaggaaggccagacggtcgcgcaggggcagaaaatcgcggagatgggcgataccgataacgaccgcgtcgcgctgcacttcgagctgcgctacggcgggcgctcgatcgatcccgcgcgctacctgccgtcgcgc

SEQ ID NO: 14357 - DNA, 1302 bp, Burkholderia mallei
ttgcgcaagacgcatcccgcgccgttgcctaaacttgaacgtgttacctgttacgaaacgaaaggaatcgtcatgaagagcccgaacgtgtcccgtcagactttcgatgaagtgatggtgccggtgttttcccccgcgccgttcatccccgatcgcggcgaaggctcgcgcgtctgggacacggaaggccgcgattatgtcgatttcgccggcggcatcgccgtcaccgcgctcggccacggtcatccggagctcctcaaggtgctcgacgagcaaagccgcaagctctggcacatcggcaacggctacacgaacgagcccgtgctgcgcctcgcgaagcgcctggaatcgctcacgttcgccgaccgcgcgttcttcgcgaactccggcgccgaagccaacgaggccgccctcaagctcgcgcgccgcgtcgcgttcgaacgccacggcgccgacaagtacgaaatcgtgtcgttcctgcagtcgttccacggccgcacgttcttcaccgtgagcgtcggcggccaatcgaagtactccgaaggtttcggtccggtgcccgaaggcatcaagcatctgccgttcaacgacatcgccgccgcccaggccgcgatcggcccgaagacctgcgcggtcatcgtcgagccgatccagggcgagggcggcgtgattcccgccgatcccgccttcctcaaggcgctgcgcgaagcgtgcgacgcgcacggcgcgctcctcatcttcgacgaggtgcaaacgggcgtcggccgcaccggccacttctacgcgtacatggacacgggcgtcacgcccgacatcctgaccaccgcgaaggcgctcggcaacggcttgccgatcggcgcgatgctcaccaccgaggcgctcgccgcgcacttcaaggtcggcgtgcacggcacgacgtacggcggcaatccgctcgcgtcggcgatcgccgagaaggtcgtcgagctcgtcggcgatcccgcgctgctcgagggcgtcaagcaacgcagcgcgcgcctcacggccacgctcgagaagatcaacgcgcgcttcaagctcttcaaggagattcgcggcaagggcctgctgatcggcgccgagctcgtcggcgcgctcgacggccgcgcgaaggacttcgtgtcggccgcggccgagcacggcgtcatcatgctgatcgccggcccgaacgtactgcgcttcgcgccgtcgctcgtgattccgctcgacgtgctcgacgagggcctcgcgcgcttcgagaaggcggtcgagcaggtgctcgcgcaagccgaagccgcgccgcgc

SEQ ID NO: 14358 - DNA, 2406 bp, Burkholderia mallei
gtgcgcgcggccggcgcatgccgcgcgtgccccgcgcccttgccgcccgagcgccggccgcgcgccggcttttttgcgcgccgctgccgtgcgcgacatgcgcggcgcgcgcggcgaaacgagccgaacgcgcgggcggaacacgccggccgccacggctcgggacttgattgccgatgcatcgcccgcatctgcaaaagccaccagcaagcgctatgctttaagtctcgcaagagcaacggcgccggccgcaccggccgggccgtcttcgtccagagccaccaggaggttcacgtgccccgcaaaacccccatcgagcgctatcgcaatatcgggatcagcgctcacatcgacgccggcaagaccacgacgaccgagcgcatcctcttttataccggcgtgagccacaagatcggcgaggttcacgacggcgcggccacgatggactggatggaacaggagcaggagcgcggcatcacgatcacgtccgcggcgacgacggcgttctggaaaggcatggccggcaattatccggagcaccggatcaacatcatcgacaccccgggccacgtcgatttcacgatcgaggtcgaacgctcgatgcgcgtgctcgacggcgcgtgcatggtctacgattcggtgggcggcgtgcagcctcaatccgaaaccgtctggcgccaggcgaacaagtacaaggtgccgcgcatcgcgttcgtcaacaagatggaccgcgtgggcgccgatttcttccgcgtgcagcggcagatcggcgagcgcctgaagggcgtcgccgtgccgatccagattccggtcggcgcggaagaacacttccagggcgtcgtcgacctcgtgaaaatgaaggcgatcgtctgggacgacgagagccagggcgtgaaattcacgtacgaggacatcccggcgaacctcgtcgagctcgcgcacgaatggcgcgagaagatggtcgaggcggccgcggaagccagcgaggagttgctcgagaagtacctgaccgatcacaactcgctcaccgaggacgagatcaaggccgcgctgcgcaagcgcacgatcgccaacgaaatcgtgccgatgctctgcggcagcgcgttcaagaacaagggcgtgcaggcgatgctcgatgcggtgatcgactatctgccgtcgcccgcggacgtgcccgcgatcctcggccacgatctcgacgacaaggaagcggaacgccatccgagcgacgacgagccgttctccgcgctcgcgttcaagatcatgaccgacccgttcgtcggccagttgatcttctttcgcgtgtactcgggcgtcgtcgaatcgggcgacacgctgctcaacgcgacgaaggacaagaaggagcggctcggccggatcctgcagatgcacgcgaacgagcgcaaggaaatcaaggaagtgcgcgcgggcgacatcgcggccgcggtcggcctgaaggaagcgacgacgggcgacacgctgtgcgacccgggcaagccgatcatcctcgagaagatggagtttcccgagcccgtgatctcgcaggcggtcgagccgaagacgaaggccgatcaggaaaagatggggctcgcgctgaaccgtctcgcgcaggaagacccgtcgttccgcgtgcagaccgacgaggagtccggccagacgatcatctccgggatgggcgagctgcacctcgagatcatcgtcgaccggatgaagcgcgagttcggcgtcgaggcgacggtcggcaagccgcaggtcgcgtaccgcgagacggtgcgcacggtggccgaggacgtcgagggcaagttcgtcaagcagtccggcggccgcggccagtacggccacgcggtgatcaagctcgagccgaaccccggcaagggctatgaattcctcgacgagatcaagggcggcgtgattccgcgcgagttcatcccggcggtcaacaagggcatcgaggagacgctgaagagcggcgtgctcgcgggctacccggtcgtcgacgtgaaggtgcacctgacgttcggctcgtaccacgacgtcgactcgaacgaaaacgcattccgcatggccggctcgatggcgttcaaggaagcgatgcgccgcgcgaagccggtgctgctcgagccgatgatggcggtcgaggtcgagacgcccgaggatttcatgggcaacgtgatgggcgacctgtcgagccggcgcggcatcgtgcaggggatggaggacatcgcgggcggcggcggcaagctcgtgcgcgccgaggtgccgcttgccgagatgttcggctactcgacgtcgctgcgctcggcgacgcaaggccgcgcgacctacacgatggagttcaagcactacgcggaaacgccgtcgaacgtgtcggaagcggtcatcaacgcgaagcaggtcgggcgcggc

SEQ ID NO: 14359 - DNA, 1449 bp, Burkholderia mallei
atggtaaaattcgcggttctccccttcacgtttgaaccgcggccgcgagcctccagcccgatcatgtccgacacccgtcccgatacccttttcgccctcaccgcgctctcgccgctcgacggccgctacgccagcaagaccgaggcgctgcgcaactggctctccgaagccgccttcatgcgccaccgcgtcaccgtcgaggtgcactggctgatcgcgctgtcgcgcgccggcttcgccgaagtgccgcgcttctcggaagccgccgagcagttcctgctgcagctcgtcgagcgcttcaccgcgcacgacgccgcgcgcatcaaggaaatcgagcgcgtgacgaaccacgacgtgaaagccgtcgaatactggctgaaggaatccgtcaagggccaggtcgagctcgagcaggcgagcgaattcatccacttcgcatgcacgtcggaagacatcaacaacacgtcgcacggcatgatgctcgccggcgcgcgccagcacgtgatcctgcccgcgctgcgcacggtgcacgggcgcctcgtcgcgctcgcgcacgcgcacgccgagcagccgatgctctcgcgcacgcacggccagccggccagcccgacgacgctcggcaaggaaatcgcgaacgtggccgcgcggctcgcgcgcgcgatcgaacgcatcgagaaggtcgagatcctcggcaagatgaacggcgcggtcggcaacttcaacgcgcatctttccgcgtatccggagttcgactgggaagcgttctcgcgcgacgtgatcgagcaccgcctgaagctcaccttcaacccgtacacgatccagatcgagccgcacgactacatggccgagctgttcgacgccgtctcgcgcgcgaacacgatcctgctcgacctcgaccgcgacgtgtggggctacatctcgctcggctacttcaagcagaagacgaaggcgggcgaaatcggctcgtcgacgatgccgcacaaggtcaacccgatcgacttcgagaattcggaaggcaatctgggcctcgcgaacgcgacgctgcgccacctcgccgacaagttgcccgtgtcgcgctggcagcgcgacctcaccgattcgacggtgctgcgcaacatcggcgtcgcgttcggctattcgctgctcgcgtacgacgcgctgatccgcggcctcgacaagctcgaagtcaatccgcagcgcctgaacgacgacctcgacaattgctgggaagtgctcgccgagccggtgcagacggtgatgcgccgctacggcatcgagaacccgtacgagcagttgaaggagctcacgcgcggcaagggcatcacgcgcgacgcgctgcagcagttcatcggcacgctcgcgattgccgaggacgcgaaggcgcgcctgctcgcgatgacgcccgcgtcgtacatcggcaaggcggtcgagctcgcgaagcgcatcgcg

SEQ ID NO: 14360 - DNA, 1443 bp, Burkholderia mallei
gcctgcgcgcggcccgggggacggccgagcgccggccggaaaacggccggcggccgcccgcgccccgcgaacgggccgcgacatgcgccgaccatggatttgtcgtcgaaacgctataatatgggactaaacgatagcctcttggacatgcagctcctcacgatcggaatcaaccaccacactgcgcctgtcgccttgcgcgaacgcgtggcgtttccgctcgaacagatcaagcccgcattgtcgacgttcaagagcgtcttcctcggccatccggcgccgaacgcacccgaagcggcgatcctgtcgacctgcaatcgcactgaactgtattgcgcgaccaacgatcgcgccgcgcgcgacgccgcgatccgctggatgtccgactaccaccggattcccgccgacgagctcgcgccgcacgtgtacgcgctgccgcaatccgaggcggtgcgccacgcgtttcgcgtcgcgtccgggctcgattcgatggtgctcggcgaaacgcagatcctcggccagatgaagaacgcggtacgcaccgcgtccgaggcgggttcgctcggcacctacctgaaccagctgttccagcgcacgttcgcggtcgcgaaggaagtgcgcggcacgaccgagatcggcgcgcagtcggtgtcgatggcggctgcggccgtgcgcctcgcgcagcgcatcttcgagcaggtcgcgcagcagcgcgtgctgttcatcggcgcgggcgagatgatcgagctctgcgcgacccacttcgccgcgcagggcccgcgcgagctcgtcgtcgcgaaccgcaccgccgagcgcggcgcgaagctcgccgagcgcttcggcggccgcgcgatgccgctcgccgatctgcccgcgcgcatgcacgagttcgacatcatcgtgtcgtgcacggcatcgacgctgccgatcatcggtctcggcgccgtcgagcgcgcggtgaaggcgcgccgccaccggccgatcttcatggtcgacctcgcggtgccgcgcgacatcgagcccgaagtcggcaagctgaaggacgtgttcctctataccgtcgacgatctcggcgcgatcgtgcgcgaaggcaatgcgtcgcggcaggcggccgtcgcgcaggccgaggcgatcatcgagacgcgcgtgcagaatttcatgcagtggctcgacgcacgcagcatcgtgcccgtgatccgtcacatgcatacgcaggcggacgcgttgcgccgcgcggaagtcgagcgcgcgcgcaagatgctcgcgcgcggcgacgatccggacgccgtgctcgatgcgctgtcgcaagcgctcaccaacaagctgattcacggcccgacgagcgcgctcaaccgcgcgaacggcgccgatcgcgattcgctgatcgacctgatgcgcggcttctaccagcacgcgccccgctcgtcggacacgtcggaccgt

SEQ ID NO: 14361 - DNA, 786 bp, Burkholderia mallei
atgaaagcgatcacttcccgcgacaatccgctgtacaagcgcctgaaggcgctcgcgggatcgacgcaccagcagcggcgcggcgagcaggcgctcctcgaagggttccatctcgcgagcgcctatctcgatgcggccggacagccgcagctgtgcgtcgtcaccgacggcgcgctcgcgcatgaggaggcgcgcgggatcgtcgcgcgcatcgagccggcgcgggtcgtcacgttgcccgatgtgctgttcggacagctatcgaacgtcgtcaacggcgtcgggctgctgctgctcgtcgcccggccggcgccggcgctgccggcgcgtgtcgcgggcacgtcggtcgtgctcgacggcgtgcaggacgcgggcaacgtcggctcgatcctgcgcagcgcggccgcggcgggcgtggagcgggtgttctgcgcgccgggcaccgcctacgcgtggtcgtcgaaggtgctgcgctcggcgatgggcgcgcatttcctgctcgacatccacgaggacgtcgacgccggcacgctgatcgagcggctcgcgattccggtcgcgctgaccgattcgcacggcgcgcgcgcgatctacgactgcgatctggccgggccgctcgcgtgggtgttcggcaacgaaggagcgggcgtgtccgcccggtggcgcgaggcggcgacgcatcgcgtgacgattccgcagccgggcggaatggagtcgctcaatgtggccgcggctgcggcggtttgtctcttcgagcaatgccggcagcaacgcgcgcttcgcgcg

SEQ ID NO: 14362 - DNA, 2556 bp, Burkholderia mallei
cgaacgaccgatcccagggtctgccgacagaggggcgctgccttcccctgcaagcagacgctggcactcatacgctgcgcgtcctcacgaccggctacgcgcggctcaatccggaggagtcccgtgagcaatttcaacattcgcaaggttgccgtgctcggcgccggcgtgatgggcgcgcagatcgccgcgcatctcgtcaatgcgcgcgtgcccgtgctgctgttcgatctgccggccaaggaaggcccgaaaaacggcatcgcgctgaaggcgatcgagaacctgaagaagctgtcgcccgcgccgttcggcgtgaaggacgacgcgaaatatctcgaagccgcgaactacgaggacgacatcgcgaagctcgccgaatgcgacctcgtgatcgaggcgatcgccgagcggatggactggaagcacgacctgtacaagaaggtcgcgccgcacatcgcatcgcacgcgatcttcgcgaccaacacgtcgggcctgtcgatcacgacgctgtccgacggcttcgccgacgagctgaaggcgcgcttctgcggcgtgcacttcttcaacccgccgcgctacatgcacctggtcgagctgatcccgaccgcgcacacgcggccgcaaatcctcgaccagctcgagacgttcctgacgagcgtcgtcggcaagggcgtcgtgcgcgcgaaggacacgccgaacttcatcgcgaaccgcgtcggcattttctcgatcctcgccgtgatcaccgaggccgagaagttcggcctgcgcttcgacgaagtcgacgacctgacgggcagccgcctcggccgcgcgaagtcggcgacgttccgcacggcggacgtggtcggcctcgacacgatggcgcacgtgatcaagacgatgcaggacaacctcgccgacgatccgttcttcccggtctacaagacgcccgccgtgctcgcgaagctcgtcgagcagggcgcgctcgggcagaagacgggcggcggcttctacaagaaggaaggcaaggcgatcaaggtgctcgacgcgaagacgggcgcctatgtcgactcgggcgcgaaggcggacgaaaccgtcggccgcatcctgaagcgcccgcccgccgagcgcctgaagctgctgcgcgagacgcagcatccgcatgcgcagttcctgtggtcgatcttccgcgacgtgttccattacatcgcgttccatctcgaatcgatcgccgacaacgcgcgtgacgtcgacctcgcgatccgctggggcttcggctggaacgaaggtccgttcgagggctggcaggccgcgggctggaagcaggttgccgagtgggtgcaggaggacatcgcggccggccgcgcgctcgcgaacgtgccgctgcccgcatgggtgctcgacggcgtcgtcgccgagaagggcggcgtgcacacggccgaaggctcgtgggcgccggcggcgcagcgtttcgcgccgcgcccggatctcgccgtctacgacaagcaggtgttccgcgcgcccgtgttcggcgaagcggggcgcgacccgaagacgttcggcaagacgctgttcgagaccgactcggtgcgcgcatgggtggacgaccgcgcgggcgaggacgacgtggtgatcgtgtcgttcaagtcgaagatgaacacgatcggcccgggcgtgatcgacggtctcgcgcaggcgatcgagcttgccgagaaggactacaaggcggtcgtgatctggcagccgagctcgctcaagctcggcaacccgggcggcccgttctcggccggcgcgaacctcgaagaggcgatgcccgcgttcatgatgggcggcgcgaagggcatcgagccgttcgtgaagaagttccagcaaggcatgctgcgcgtgaagtacgcgaacgtgccggtcgtcgcggcggtgtcgggcctcgcgctcggcggcggctgcgagctgatgctgcatagcgcgaagcgcgtggtgcacgtcgagagctatatcggcctcgtcgaggtcggcgtcggcctcgtgccggcgggcggcggcctgaaggaagcggcgctgcgcgcggcggacgcggcgacggcggcgggcatgacgagcgagctgctcaagttcctgacgaagccgttcgagaacgcggcgatggcgaaggtgtcgatgtccgcgcacgaagcgcgcgcgatgggctacgtgaagccgtcggacacgatcgtgttcaacgtgttcgagctgctcgacgtcgcgaagaaggaagcgcgcggcctggccgccgcgggctaccgcgcgccgctgaaggcgaaggaaattccggtggcgggccgctcggcgatcgcgacgatcaaggcgcaactcgtcaacatgcgcgacggccgcttcatcagcgaccacgatttcctgatcgcgagccggatcgcggaagcggtgtgcggcggcgacgtcgaggcgggcagcacggtcgacgaggaatggctgctcgcgctggagcgtcgcgcgttcgtcgagctgctcggcacgcagaagacgcaggaacggatcatgggcatgctgcagaccggcaagccggttcgcaac

SEQ ID NO: 14363 - DNA, 2475 bp, Burkholderia mallei
atgacctatcaagttctcgcacgcaagtggcgtccgaaggatttcgcttcgctcgtcggccaggagcacgtcgtcagggcgctcacgcacgcgctcgacggcgggcgtttgcatcacgcctatctattcacgggcacgcgcggcgtcggcaagacgacgctgtcgcgcatcttcgcgaaagcgctcaattgcgagacgggcgtcacgtcgcagccgtgcggcgtgtgccgcgcgtgtcgcgaaatcgatgaagggcgcttcgtcgactatgtcgaaatggatgccgcgagcaatcgcggcgtcgacgaaatggccgcgctgctcgagcgcgcggtgtacgcgcccgtcgatgcgcgcttcaaggtctacatgatcgacgaagtgcacatgctgacgaaccatgcgttcaacgcgatgctcaagacgctcgaagagccgccgccgcacgtcaagttcatcctcgcgaccaccgatccgcagaagattcccgtcaccgtgctgtcgcgctgcctgcagttcaatctgaagcagatgccggccgggcacatcgtgtcgcatctcgagcggattctcggcgaagagcgcatcgcgttcgagccgcaggcgctgcgtcttctcgcgcgcgcggcgcagggcagcatgcgcgatgcgctgtcgctgaccgatcaggcgatcgcgtattcggcgaacgaagtgacggaaaccgccgtgtccggcatgctcggcacgctcgaccagacctatatggtgcggctgctcgacgcgctcgccgcggccgacggcccgcagattctcgccgtggccgacgagatggcgctgcgcagcctgtcgttctcggccgcgctgcaggatctcgcgagcctgctgcaccggatcgcatgggcgcagttcgcgccggcgtcagtgctcgacgaatggccggaggcggccgatctgcgccgcttcgccgaactgctgagcccggagcaggtgcaactctattatcagatcgcgacggtcgggcgcggcgagctcgggctcgcgcccgacgaatacgcgggcttcacgatgacgctgttgcgcatgctcgcgttcgagccggcgacgacgggcggcggcgcgccggcaggcggggtgcctgctcgggtggcgggcgccgcgccgaagtcgggcgcgcgtgctgctgcggcggtcggcgcgtcggcggtgcccgcagttactggagctactggggctactggggcggcgcttgcgccgaaggcggctgccgctcgtgcggcaacgcgcgccgaggcgccgccggccgcgccggcgcggccggcgacggcggaacggggcgacgacgcatccgacggcgacgcgccggtgcccgcgaaggcgaacgcacgcgcatcggccgactcgcgttgcgacgaacgcgacgcgcagccgcccgccgattcgggcagcgcgtcgggcgcggcatcgagtgcgccgccggacaccgcgttcgaatccgcgccgcgagcggccgcgccgtccgctgcgacgcccgccgccgtgcccgatgcgcgcgcgccggccgccgcctcggccgaggatgctgtcgaggcggccgcgcccgccgcgcctgagtcacgcccgccgacgcccgccgccggcgcgcccgtgtcgcgcgcgaccggcgcggccgccgcgctcgacgtgctgcgcaacgcgggcatgcgcgtgtcgtccgggcgcggcgccggcgccgcgcgcccggccgccgggccggccgcgtcgccgacgaagcccgcgccgcgcgcgcaggtgtccgtgccgacgccgcgcgcccgcgcggcaaccggcgacgcgccgccgaacggcgccgcgcgcgccgaagcgagagccgagtctcgcggcgcgccgccgccgtgggaggacatcccgcccgacgattacgtgccgttgtcgatggacgatggcttcatcccgccggacgacggtttcgttccggtgttcgacagcgggcccgacgatgtccgcgtcgcgccgaagccggcccccgcgccgcccgtcgacacgcgcccgctgccggagccgattccgctcgatgccatcggctacgacggcgaatggccgacgctcgcggcgagcctgccgctcaagggcgtcgcctatcagctcgcgttcaacagcgagttgacggcggccgacggcggcacgctgaagctcgccgtgccggtgccgcaatatgcggacgccgcgcaggtcgcgaagctgaaggcggcgctcgcggatgcgctcggcaagccggtcgacgtcgcggtcgaggtcggcccggcgcgccgcaccgcggcggcgctcgccgccgccgagcgcgcgaagcgccagcgggaggccgagcaggagatgagcgccgatccgttcgtccagcaattgctgcgcgaattcggcgcgagcatcgtcgaaggctcgattcgacccgtcggcgccgaagcgggcgccgcggacggcgcctcgccgacgctgcac

SEQ ID NO: 14364 - DNA, 1113 bp, Burkholderia mallei
atggcactcgaaaccttcgtcaattccgaaccgttcacgttcggcgtcgagctggaaatccagatcgtcaatacgcacaactacgatctgaccaaagcggcatccgatctgatgcggctcatcaaggatgcgaaatttcccggcaacatcacgccggaaatcaccgaaagcatgatcgagctctcgacgggcatatgcagaacgcacgatcaggcattgggcgaactgcacgccatccgcgacacgctcgtgagcgcggccgaccagctcaacgtcggcctttgcggcggcggcacgcacgcgttccagcaatggagcgagcggcagatcttcgacgcgccgcgcttccagtacatttccgagctgtacggctacctcgcgaagcagttcacggtgttcggccagcacgtgcacatcggctgcccggacgccgacagcgcgttgttcctgttgcactcgatgtcgcgtttcattccgcacttcattgcgctttcggcgtcgtcgccgtacgtgcagaacgtcgacaccggatttcattcggcacgcctgaattccgtgttcgcgtttccgctgtcgggccgcgcgccgttcgtgctcacctggcacggcttcgaggaatacttcacgaagatggtgaacacgggcgtcgtcaacagcatgaaggacttctactgggacattcgcccgaagcccggctacggaacgatcgaagtgcgcgtgatggacacgccgctgtcggtcgaccgcgcggccgcgatcgcgtgctacatccagacgctcgcgcgctatctgctgatcgaccggccgctcaagctgtcggaggacgactatctcgtctacacgttcaaccgtttcgaggcgtgccgcttcggactcgagggcacctgcgtgaatccgcagacgggcgagcgccggacgatcgccgaggacatcctcgacacgctcgatcgcatcgcgccgcacgcggcggcgctcggctcgcgcgcggcgctcgacgagatcggcgcgctcgcgaaggcgcgcgtcaacgacgcctcgtggctgcggacgatcttcaagcaggaaaaatcgctgaacgaaacggttcgccagcagtgcctgcggtggcgcgaa

SEQ ID NO: 14365 - DNA, 1094 bp, Burkholderia mallei
atgagcctcaaatgcggcatcgtcggcttgcccaacgtcggcaagtccaccctgttcaacgcgctgacgaaggccggcatcgccgccgagaactatccgttctgcacgatcgagccgaacgtcggcgtcgtcgaggtgcctgacgcacgcctgaaggcgctcgccgaaatcatcaagcccgagcgcgtcgtgccggccgtcgtcgaattcgtcgacatcgcgggcctcgtcgccggcgcgagcaagggcgagggcctcggcaaccagttcctcgcgaacatccgcgaaaccgatgcgatcacgcacgtcgtgcgctgcttcgaggacgagaacgtcatccacgtcgccggcaaggtgagcccgctcgacgacatcgaagtcatcaacaccgagctcgcgctcgccgacctcggcaccgtcgagaaggcgctcgcccgctattcgaaggcggcgaaatcgggcaacgacaaggaagcggcgaagctcgtcgcggtgctcgacaaggcgcgcgcgcacctcgatcagggcaaggccgtgcgcgggctcgatctgtccgacgacgagagggcgctcctcaagccgttctgcctgatcaccgcgaagccggcgatgtacgtcgcgaacgtgaaggaagacggcttcgagaacatccgcatctcgacgcggtgcgccggtacgcggaaagcgagaagtcgccggtcgtcgcggtgtgcgcggcgatcgaggcggagatcgccgatctcgacgatgccgacaaggaagcgttcctcgccgacatgggcatggacgagccgggcctcgaccgcgtgatccgtgcgggcttcaagctgctcgggctgcagacgtacttcaccgcgggcgtgaaggaagtgcgcgcgtggacgatccacatcggcgacaccgcgccgcaagcggcgggcgtgatccatacggatttcgagcgcggcttcattcgcgcgcagacgatcgcatacgacgatttcatcgcgtacaagggcgagcaaggcgcgaaggaagcgggcaagatgcgcgcggaaggcaaggaatacgtcgtgcacgatggcgatgtgatgaacttcctgttcaacgtctga

SEQ ID NO: 14366 - DNA, 2004 bp, Burkholderia mallei
atgttcggtaaattgacgctttcggcgatcccgttcgatcagccgatcatcatgggcgcgggcgcgttcatggcgctcgtcgtgctcgggattctgggcgcgctcacctatacgaagcgctggaaatggctgtggtgcgagtggctcacgaccgtcgaccacaagaagctcggcgtgatgtacatcatcgtcgcgctcatcatgctgctgcgcggcttcgccgacgcggtgatgatgcgcctgcagctcgcgctcgcgtacaacgggcccggctatctgccgccgcaccactatgaccagatcttcaccgcgcacggcgtcatcatgatcttcttcatggcgatggcgttcatgatcggcctgatgaacatcatcgtgccgctgcagatcggcgcgcgcgacgtcgcgtttccgttcatcaattcgctgagcttctggatgacggcggtctcggcgatcctgatcaacatctcgctcgtcgtcggcgagttcgcgcagacgggctggctcgcgtatccgccgctctcggagctgcagttcagtccgggcgtcggcgtcgactattacctgtgggcgctgcagatatccggcgtcggcacgctgctcacgggcgtgaacttcttcgtgacgatcctgcgcatgcgcgcgcccggcatgacactgatgaagatgccggtgttcacgtggacggcgctctgcacgaacgtgctgatcatggcgtcgttcccgatcctgacggtcacgctcgcgctgctcggcctcgaccgctacctcggcatgcacttcttcacgaacgacgccggcggcaacgcgatgctgtatctgaacctgatctgggcgtggggtcatccggaagtctacatcctgatcctgcccgcgttcgggatcttctcggaagtggtcgccacctacgcgaagaagccgctgttcggctacaagacgatggtgtacgcgtcgtgcgcgatcatggtgctgtcgttcctcgtgtggctgcaccacttcttcacgatgggttcgggcgcgaacgtgaacgcgttcttcgggatgatgacgatggtgatcgcgatcccgaccggcgtgaaagtgttcaactggctgttcacgatctatcgcggccggctcgaattctcgacgccgatcctctggacgatcggcttcatggtgacgttcacgctcggcgggatgacgggcgtgatgatggcgattcccggcgcggacttcgtgctgcacaacagcctgttcctgatcgcgcactttcacaacgtgatcatcggcggcgtgctgtttggctatctcgcgggcttcaattactggtttccgaaggtgttcggcttcaagctgaacgagacgctcggcaaggccgcgttctggttctggcaggtcggcttctatgtcgcgttcgtgccgctgtatgtgctcggcttcatgggcatgacgcgccgcctgaatcactacgacaaccccgcctggcatccgtggctcatcgtcgccgcgtgcggcgcggcgttgatcgcgatcggcatcgcatgccagttgctgcagctcgccgtcagcctgcgcgatcggcggctgcccgagaaccgcgatccgacgggcgatccgtggggcggacgcacgctcgaatgggcgacggcttcgccgccgcccgcgtacaacttcgcgacgatcccgaccgtgcacgcgctcgacgagttcgcataccgcaaggagcgcggactcggcatcggcaagccggcggagtatcgcgacatccacatgccgtcgaacacgagcgcgggccttttcgtcggcgtgttcagcctcgtgctcggcttcgcggcggtatggcacatctggtggctcgcgatcgcggcgctcgccggcatcctcgtgacggtgattgcgtatagcgcgggcgagaacgacggctattacattccggccgacgccgtgcgcaggatcgaggaaaaacgcggcggcgcgcgtttcgtcgcgcggccggcgcaagtcgaactggaggcaaac

SEQ ID NO: 14367 - DNA, 537 bp, Burkholderia mallei
atgcccacggaaaaagaacagggagagcctgcatcgcgccacgaagcgcctgccaagagcagacaagcagggaagaacgtttgggcacaagcaatcaattttggatcgatcatgaagacgttttccgcaaaagcccatgaggtgacgcgcgaatggtacgtgattgacgcgacggataaggttctcggccgtgtcgccagcgaagtggcacgccgtctgcgcggcaagcacaagcccgagttcactccgcacgtcgacaccggtgatttcatcatcgtcatcaacgcgagcaagctgaaggtcacgggcaacaagacgctggacaagaagtactaccgtcactcgggctacccgggcggcatctatgaaacgacgttcggcaagatgcaggaacgcttcccgggccgcgcgctcgagaaggcggtcaagggcatgctgccgaagtgcccgctcggctacgcgatgatcaagaagctgaaggtctacgctgaagccacgcatccgcattcggctcaacagccgaaggcgcttgagatc

SEQ ID NO: 14368 - DNA, 927 bp, Burkholderia mallei
atggagcaggtgaatcgcgtcattcggcaaagcctcgcgtccgacgtgctgctgatcaatcagatcgccgagtacatcatcggcgcgggcggcaaacggctgcggccggcgcttcttctgctcgtcgcgggcgcgctcggcgaaaacacgagccagaagcacgtgctcgcggccgtcgtcgaattcatccatacggcgacgctgctgcacgacgacgtcgtcgacgaatccgagctgcggcgcggccgcaagactgcgaacgcactgttcggcaatgcggcgagcgtgcttgtcggcgattacctctattcgcgctcgttcgagatgatggtgggcgtcggcaagatgcgcgtgatggaaatcctgtccgaagcgacgacaatcatctccgaaggcgaagtgctgcaattgctgaacatgcacgacgcggacgtcgacgaagcccgctacatgcaggtgatccgctataagaccgcgaagctgttcgaagcggccgcgcggctcggcgcggtgctcgccggcgccgacgcgccgacggaagccgccgcggccgagtacggccgccggatcggcaccgcgttccagatcatggacgactggctcgactacgcgggcaccgccgaatcgatgggcaagaacgccggcgacgacctgcgcgaaggcaagccgacgctgccgctcatctatctgatcgagcgcggcacgcccgagcagtcgacactcgcgcgcgaagcgatcgagcacggcggtaccgatcgcttcgacacgattttcgacgcgatcacgcgttcgggcgcgctcgaccatacgctcgaatgcgctcgccaagaagcgcaggcggccgcagcagcaatttcttcatttccctcttccaatttcaaagagagcctgctagaattatgttcttactcgatgtcacgtcagtct

SEQ ID NO: 14369 - DNA, 642 bp, Burkholderia mallei
atggcgacgacgcgcaaaccccgcggcggcgctggcggcgcgacccagcccgcgctcgatttcgacgcgccgggcgagatcgtctgcggcgtcgacgaagccgggcgcggcccgctcgccgggcccgtcgtcgcggcggccgtcgtgctcgatccggcgcggccgatcgtcggcctcgacgattcgaaggcgttgtccgcgaagaagcgcgagcggctcttcgacgaaatcgtcgcgtatgcgctcgcgtacagcgtcgcctcggcgagcgtcgaggaaatcgacagcctcaacatcctgcatgcgacgatgctcgcgatgaagcgcgcagtcgaagggctctcggtgctgccgacgctcgcgaagatcgacggcaaccgctgcccgatgctcgcgatccgcagcgaagcgatcgtcggcggcgacgcgcttgtgccgagtatctcggccgcgtcgatcctcgcgaaggtcacgcgcgaccggatgctcgtcgaactgcatcagcagtttccgatgtacggtttcgatgcgcacgcgggctacggcacgccgcagcatctggccgccttgcgcgagcatgggccgtgcgagcatcatcgccgctcgttcgcgccggtgcgcgaagccttcgatctgattcga

SEQ ID NO: 14370 - DNA, 1788 bp, Burkholderia mallei
gtgatcaaggaggtgcgcgtgtctttcacgctgcatggcattcccgtttcaagaggtatcgcgatcggacgagcgtatctgatcgcgccggcggcgctcgacgtcgcgcattacctgatcgaggccgaacggatcgaggccgagatcgagcgctttcgcacggcgctcggcgccgtgcggcgcgaactcgacgtgctgcgcgcggatctgaccgacgacaccccgaccgaggtcgccgcgttcatcgacgtgcacgcgatgatcctcggcgacgcgatgctcgtgcaggaaaccatcgatctcatccgcacgcgccgctacaacgtcgaatgggcgctgaccgagcagctcgacgtgctcgccggccacttcgacgacatcgaggacgagtacctgcgcgagcgcaaggccgatatcgaacaggtggtcgagcgggtgctgaaggcgctcgcgggcgcgccgtccgctgcgcaggcgctcgaccgcgcggcgggcaacggtcgcgacgagatgatcgtcgtcgcgcacgacatcgcgcccgccgacatgatgcagttcaagacgcagtcgttccaggcgttcgtcaccgacttgggcgggcgcacctcgcacacggcgatcgtcgcgcgcagcctcgggattccggccgcggtcggcgtccagcacgcgagcgcgctgattcgccaggacgatctcatcatcgtcgacggcgatcaggggatcgtgatcgtcgatcccgcgccgatcgtgctcgaggaatactcgtaccggcaatcggagaaggcgctcgagcagcgcaagctgcagcgcctgaagttctcgcccgcgcagacgctgtgcggcacgaagatcgacctgctcgcgaacatcgagctgcccgacgacgcgaaggcggccgtcgacgcgggcgcggtcggcgtcggcctgttccgcaccgagttcctgttcatgagcaaggtgcggatgccggaggaagaggagcagttcgccgcgtacaagcgcgcggtcgagctgatgcacgggatgcccgtcacgatccgcacgatcgacgtcggcgcggacaagccgctcgacgtgtacgacgaaggctacgagaccgcgccgaatcccgcgctcggcctgcgcgcgatccgctggagcctgtcggagccgcagatgttcctcacgcagttgcgcgcgatcctgcgcgcgtcggcgttcggccaggtgaagatcctggtgccgatgctcgcgcacgcgcaggagatcgaccagacgctcgacctcatcaacgaggcgaagcggcaactcgacgcggcggggctcgcatacgatccgaacgtgcgggtcggcgcgatgatcgagattccggccgcggcgatcgcgctgccgctgttcctcaagcgcgtcgatttcctgtcgatcggcacgaacgacctgatccagtacacgctcgcgatcgaccgcgcggacaacgcggtcgcgcatctgtacgatccgctgcatccggctgtgctgcatctgatcgcgttcacgctgcgcgaagcgaagcgcgcgggcgtgccggtgtcggtgtgcggcgagatggcgggcgatccggcgctcacgcgtctgttgctcggcatggggctcaccgagttctcgatgcatccgagccagttgctcgtcgtcaagcaggaaatcctgcgcgcgcacctgaaggcgctcgagaagccgaccgcggacgtgctcgcgtcgttcgaaccggaagaagtgcaggccgcgctcgcgcggctcgcgagcgcggagccgagggcggacgtcgccgcg

SEQ ID NO: 14371 - DNA, 897 bp, Burkholderia mallei
atgaccaccgtcaatctcgccgcctaccgtttcgtctcgctcgattcgatcgagcaatggcggccgctcgtcgccgcgcgctgcaacacgctcgggctgcgcggcacgatcctgctcgcgcccgaaggcatcaatctgttcatcgcgggcccacgcgaggcgaccgacgcgttcgtcgattacatccgccacgatccgctcttcgagggcaagttcgcggacctgccgttcaaggagagcctgtccgattcgcagccgtttcgccggatgctcgtgcgcctgaagcgcgagatcatcacgatgaagaagccggcgatcaagccggagctcggccgcgcgccgtccgtcgacgcgcgcacgctcaaagcgtggctcgaccaggggcacgacgacgcgggccgccccgtcgtgatgctcgacacgcgcaatgcgttcgaagtcgacgtggggacgttcgatcgcgcgctcgattaccggatcgacaaattcagcgagtttcccgccgtgatcgaggcgaaccgcgcggacctcgagggcaagacgatcgtgtcgttctgcacgggcggcatccgctgcgagaaggcggcgatccacatgaaggacgtcggcatcgagaacgtctatcagctcgagggcgggatcctcaagtatttcgaggaagtcggcggtgcccattaccacggcgactgcttcgtgttcgattaccgtaccgcgctcaacccgcagctcgcgccgacagccgacgtcacgtgcttcgcgtgccgcgcggtcgtgccggccgatgcgcaacagtcgccgctctacgtgcccggcaagtgctgccccgcgtgccatccgggcgattccggcacgccgggccggcgcgcggagccgggcgccgaaccggcgcgcgccgtg

SEQ ID NO: 14372 - DNA, 165 bp, Burkholderia mallei
atggcgaaaggcgcacgcgacaaaatcaagctcgagtccaccgctggcacggggcacttctatacgaccacgaagaacaagcgcaacatgccggaaaagatggagatcatgaagttcgatcccgtcgcccgcaagcacgtggcgtacaaggaaaccaagatcaag

SEQ ID NO: 14373 - DNA, 1470 bp, Burkholderia mallei
atgacccagtgggaagtcgttatcggcctcgagacgcacgcgcagctgtcgaccgtctcgaagatcttctcgggcgcgtcgacgcagttcggcgcgcaaccgaacacgcaggcgtgccccgtcgatctcgcgctgccgggcgtgctgcccgtgctgaaccgcggcgcggtcgagcgggcgatccgcttcggcctcgcgatcggcgcgacggtggcgccgcgcagcgtcttcgcgcgcaagaattacttctatccggatctgccgaagggctatcagatcagccagtacgagattccggtcgtgcagggcggccagatcacgatccaggtgcccgccaacgaaaaggccggcaagcaggcgtattcgaagacggtcaacctgacccgcgcgcacctcgaggaggacgcgggcaagtcgctgcacgaggatttcgcggggatgacgggcatcgacctgaaccgcgcgggcacgccgctgctcgagatcgtcaccgagccggaaatgcggagcgcggccgaggcggtcgcgtacgcgaaggcgctgcacggcctcgtcatgtggctcggcatctgcgacggcaacatgcaggaaggctcgttccgctgcgatgcgaacgtgtcggtgcgcccggtcggccaggagaagttcggcacgcgcgccgagatcaagaacctgaactcgttccgctttctcgaagacgcgatcaactatgaggtgcgtcgccagatcgagctgatcgaggacggcggcgaagtcgtccaggaaacgcgtctgtacgacccggacaagcgcgagacgcgctcgatgcgcagcaaggaagacgcgcacgattaccgctatttccccgatccggacctgatgccgctcgtgatcggcgcggactggatcgcacgcgtgaagggcgagatgcccgagctgccggccgtgatgcagcagcgcttcatcgagcagtatggcgtgtccgcgtacgacgcgggcgtgctgacgtcgacgaaggcgatggccgaatatttcgaggcgctggtcgcgaaggcgggcgcggcgaatgcgaagctcgccgcgaactggctgatgggcgacgtgtcgtcgcaactgaaccgcgacggcatcgatatcgacgcgtgcccggtgtcggccgcgcagctcgcgctcgtgctgcagcggatcgccgacggcacgatctcgaacaagatcgcgaaggaaatcttcgtgacgatctgggacgagaaagcggccgacgaaggcgcggccgatcgcatcatcgaagcgaagggcctgaagcagatctccgatacgggcgcgctcgaggcgatcatcgacgaggtgctcgccgcgaacgcgaagtcggtcgaggaattccgcgcgggcaaggacaaggcgttcaacgcgctcgtcggccaggcgatgaaggcgacgaagggcaaggcgaatccgcagcaggtcaacgagctcctgaagaagaagctcggc

SEQ ID NO: 14374 - DNA, 468 bp, Burkholderia mallei
atgaaactgcacatcgtcgcggtcggccacaagatgcccggctggatcgcgtccggcttcgacgagtacgcgaagcggatgccgcccgagctgcgcatcgagctgcgcgaagtgaagcccgaactgcgctcgggctcgcgcacggccgacagcgtgatggccgccgagcagcagcggatcgaagccgcgctgccgaagaacgcgcgcgtcgtcgcactcgacgagcgcggccgcgactggaccacgatgcagctcgcgcaggcgctgcccgcgtggcagcaggacggccgcgacgtcgcgttcgtgatcggcggcgccgacgggctcgccccggcgctcaagtcgcgcgccgagctgctgctgcgcgtgtcgagcctcacgctgccgcacggcatggtgcgcgtgctgctcgccgagcagctttaccgcgcgtggagcatcacgcagaatcacccctaccatcgcgcg

SEQ ID NO: 14375 - DNA, 1347 bp, Burkholderia mallei
atgggggaggcggccaacgaacgcgcggccggccggtcggctccgatcggtcgaaccggagacaaaccggaggcaaaccggcctcgacgccgcgcgccgttccactacaatcgtcatcttgacgtcgcggcgcgtcggaggcagcggcgcgccggcgccgcacgccgcacgccgcacgccgcacgcggcgccttaggcgcgcgcctgcgtgatggttgcggcatcgcattcgctcgcgttcatgcgcacgcttcgttcgacaccgtgcaaagccggctccattccttcttttccgcacgcagcatggccaactccggcaatccgcggcccatgcgcagggtgcgggggctggccgggctcgtcctgttcaactgcatcgtcggcctgagctcgtgggcgagccgccgcgacgatgcggtgctgccttatctcgtgctcgcgaacggcatcggcttgtccgcgctgctgctcagcctgtgcgccgacaagctgacgcgcggcaagctcgcggtgctgcccaaggtgctgatcgtcgcgcccgtcagcgtgctcgccggcttcgagatcgccgcgtcgacggtcgggcacgtgccgcatctgatcgggcgggcgagcgttcgcgaatggctcgggtacggctcgtcgttcgtggtgacgggcatcgcgtgcgcgttcgtttcattgttcatgcaggcggcgcggatgcgcgcctcgctcgagacgcagcgccgcgaagcggccgaggcgcgccaggcggagacggccgcgcgcctcgcgctgctgcaggcgcagatcgagccgcatttcctgttcaacacgctcgcgaacgtgcagagcctgatcgagcgcgatccggcgcgcgcctcgacgatgctcgacagcctgaaccggtacctgcgcgcgagcctcggccgcacccgcaaggcggcgtcgacgctcggcgaggagctcgagcttatcgaggcgctgctgcagatcgcgtcgatccggctgggcgagcgattgcgctatgcgatcgacgtgccggcgccgctgcgcgagctcgcgttctcgccgctgctgttgcagccgctcgtcgagaatgcgctgctgcacgggatcgagccgtcgctcgacggcggcgagattcgcgtgtgcggccggcgcaacggcaagctgctcgaactcagcgtgatcgataccggcgtcggcctcggcaacggcgaaaccaggctgcacggcggcgtcgggctcgccaacgtcgtcgcgcgcctcacgagcctctacggcgcgcgcggccgcgtgtcggtcggcgcgacggccggcgccacgcggggcgtgaccgcggccttgcagattccaatcgac

SEQ ID NO: 14376 - DNA, 969 bp, Burkholderia mallei
ttgatcgaccgcttcttcgcgcgccgcgcgacggggccgcacgcgcgcgccgcgctcggcatcggcgacgattgcgcgctgcttgcaccagaaccgggcaagctgctggcggtttcgacggacatgctggtcgaaggccggcacttcctcgccgatgtcgatccgcgcgcgctcggccacaagacgctcgccgtcaatttgtccgatctcgccgcgatgggcgccgcgccgcgcgcgttcacgctcgcgtgcgcgctgccgcgcgccgacgccgactggctcgaggcgttttccgacggccttttcgcgctcgcggagcgccacggctgcgagctgatcggcggcgacacgacgagcgggccgctcaacctgtgcgtcacggtgttcggcgacgtcgcgtgcggcgccgcgttgcgtcgagacgccgcacgcgacggcgacgacgtctgggtatccggcacgctcggcgatgcgcgcgccggcctcggcgtgatccgcggcgaatggcgcgcgggcgagcgcgaggcggcggcgttccggcgcgcgctcgaatggccgcagccgcgcgtcgcgctcggcgtcgcgctcgcgggcatcgcgcacgcggcgctcgacgtgtccgacggcctcgcgggcgatctgccgcacatcctcgagcgctcgaacgtgcgcgccgacgtggacgtcgacgcggtgccgcgctcggccgcgctcgcgaccctgcccgccgacgtgcagcgccgctgcatgctcgaaggcggcgacgactacgagctgtgcttcaccgccgcgccgtccgcgcgcaccgcgatcgacgcggccggcgcgcgcgcgggcgtggccgtcacgcgcatcggtacaatacgcggcttgtccgcgccgacggacgcgcgcgccgtgacgtggcgcgacgcgtcgggcgcgccgctttccctcacgctgcacggtttcgatcatttccatgccaac

SEQ ID NO: 14377 - DNA, 1524 bp, Burkholderia mallei
atgaagaacgatcccaaccgccgttcccggacgcgcacgccgggtagcccgtgcgtcgaagcgttcgacgacccgatcgccgccgtcgcgcggctctccgagatctacgagacgaacaccgcgttcctgcgcgacgcgttcgcgcgctatcgcggcaacgaagcgttcgacgagcacgtgcgcgcgtgctatccgttcgtgcgcatccgcaccgacgtcaacacgcacatcgattcgcgccgctcgtacggcttcgtcgccggcccgggcgtgttcgagacgaccgtcacgcgcccggacctgttcgcgaactactaccgcgagcaattgcgcctgctcgcgaagaaccatcacgttcggatcgaagtcggcgtatcggcgcagccgatcccggttcacttcgcgttctccgaaggcattcacctcgaaggcgatctcgaccgcgaccgcttggtcgcgatgcgcgacgtgttcgacacgccggatctcgcgtatctcgatgaccggatcgtcaacggcacgtacgagcccgcaccgggcgagccgcatccgctcgcgctcttcacggscgcgcgcgtcgatttttcgctgcatcggctgcggcactacacggcgacgctgccgacgcatttccagaactacgtgctctatacgaactaccagttctacatcgacgaattcgtgaagctcggccgcacgatgatgtcggcgagcgacgatcccgaggtgcgcgcataccgcagcgaatacacggcgttcgtggagccgggcgacgtgatcacgtacaacgcgaatctcggcgaggacgcgagcgaaggcacgccgccgccgcgcctgccgcagatgcccgcgtatcacctcaagcgcgcggacggcagcgggatcacgatggtcaacatcggcgtcgggccatcgaacgcgaagacgatcaccgatcacatcgcggtgctgcgtccgcacgcgtgggtgatgctcggccattgcgcggggctgcgcaacacgcagcgcctgggcgactacgtgctcgcgcacggctatgtccgcgaggatcacgtgctcgacgcggatctgccgctgtgggtgccgattccggcgctcgccgaagtgcaggtcgcgctcgagcgcgcggtcgcgcaggtcacgcagctcgaaggcgccgagctcaagcgcgtgatgcgcacgggcaccgtcgcgagcgtcgacaaccgcaactgggagttgcgcgaccatcgcgagccggtgcagcggctgtcgcagagccgcgcgatcgcgctcgacatggagagcgcgacgatcgccgcgaacggctttcgcttccgcgtgccgtacggcacgctgctgtgcgtgtcggacaagccgctgcacggcgagctgaagctgccggggatggccgatcagttctaccgcgggcaggtcgatcagcatttgcagatcggcgtgaaggcgatggagattctccgcacgaatgggctcgatcggttgcatagtcgcaagctgcgcagcttcgcggaagtggcgtttcag

SEQ ID NO: 14378 - DNA, 1536 bp, Burkholderia mallei
atgattgccaacgccaacgccaacgccaacgccaacgccaacgccaacgccaacgccgcccgtccgcgcggcacgctgatgatccagggcacgacgtccgacgcgggcaagagcacgctcgtcgcgggcctgtgccggctcgcgcgccgcacgggcgcgcgcgtcgcgccgttcaagccgcagaacatggcgctcaacagcgcggtgacggcgaacggcggcgagatcggccgcgcgcaggcgctgcaggcgctcgcggcgggcatcgaagcgcataccgatctgaacccggtgctgctgaagccgacgggcgatcgcggcgcgcaggtgatcatccacggcacggcgcgcgcgaacctggacgcgcgcgcctatcacgactacaagccgaccgcgatgcgggcggtgctcgaatcgtacggccggctgcgcggcgcgtacgacgcggtgatcgtcgaaggggcgggcagccctgccgagatcaatctgcgcgaaggcgatatcgcgaacatgggtttcgccgaagcggtcgattgcccggtcgtgctcgtcgcggacatcgatcgcggcggcgtgttcgcgcatctcgtcggcacgctcgcgtgcctgtcggacagcgagcgcgcgcgcgtgcgcggcttcgtgatcaaccgctttcgcggcgatccggcactgctcgagccggggctgcgctggctcgaggcgcggaccggcaagcccgtgctcggcgtgctgccctatttgcacgggctcacgctcgacgccgaggacatgctgcccgcgagcgcgcgcacgtcggcggcgcggcgcgacgcgggcgtgctgcgcatcgtcgtgcccgcgttgccgcgcatcagcaaccataccgatttcgacgcgttgcgcgcgcatccgcgcgtcgatttcacgtactggaagcgcgggcccgtgcccgacgccgatctgctgatcctgcccggctcgaagaacgtgctcgccgatctcgcgtggctgcgcgacgcgggctgggacgcgctgatcaagcgccatctgcgctacggcggcaaggtgatcggcatctgcggcggcatgcagatgctcggccgcacgctggccgatccgcacggcgtcgagggcgcggccggcgcgacgagcgcgggcctcggcctgctcgactacgcgacgacgctgaccccggagaagacgctcgtcaacgcggcggggcggctcgcgttcggcggcgacgcgcgcgtcgcgggctacgagatccatatgggccgaaccgaagggccggcgctcgcgtcgcccgcgctcatgctcgcggggcgcggcggcgagcggcccgacggcgcggtgtcggcggacgggcagattctcgcgacctacctgcacgggcttttcgacacgccgcacgcatgcgcggcgctgctcgaatgggcggggctcgacggcgcggaggcgctcgactatccggcgctgcgcgaggcgtcgctcgaacggctcgccgacacgttcgccgagcatctcgatctcgatcgcgtgttcgcggcgttcgcg

SEQ ID NO: 14379 - DNA, 3780 bp, Burkholderia mallei
cttgcgctgacggccggccagtacggcatctggctcgatcaaatgctcaatccggatctgccgtgttacatcctcggcgcgattcttcgaatcgacggtacgttcgacgaggcgttgctgacgtcggtcgtcaacgaagtcgtcaatgcgaacgattccctgcgcgcggtgctggtgagcgaaggcggttcggtgcggcagcgtgtcctgtccgacgtggagctggagattgcgcatatcgatttttccggctccgcgcacccgcacgacagcgcgtggcgatacatgcgaacggcgttcgatacggcgttcgcgctcgacggactgctgtgcgatttccgcatcgtacgcgagagcccgtctcgcacgtactggatgtatcgctgccatcatctggttgcggacggtcagagcgtgtcgatgatctgccggatgatcgtcgatctctataaccgccgtgcgagcgcggacatggcgcgcatcgagcctacgccctcctatttcgattcgctcgacgacgaccgcaagtatgccgagtcgtcccgttacgagcgcgacgcgcagttctggcaggacaaattttcgtcgcttccgccgccgttgctttcgtcgcgctcgagcgaggcggccgcacgccccgcgtcgtttcccgacggccaggtgaatctgacgatcgagcgcgcgaagtacgatcggctcgggcggatcgccgaggcgagcggatgtacgatcgtccacgtgatgttcggcgtgctcgcgctctacttctcgcgagcgtttcaggtcgacgaggtggtgatcggcatgccggtgcacaaccgaagcaccgcacagcagaagcgcgcgatcggcatgttcgcttcggtggtgccgattcgcatcccggtcgacgggaacgagcgtttcgtatcattgctgaacggcgtgtcggccgagttgcggcattgctatcgccatcagcgttttccgatcgcggagttgaaccggcgtctggggctcgtgcgaaccggtcgcaggcagcttttcgatctcacgctgtcgttcgagaagttcccgctcgatttctacatcggcgacgtcaagctagggctgacatcgatgcggcaccgtttcgagcagacgccgatcacggtcaacgtccaggattatcacgaggaccaagacctcgtcatgcagttcaattacgacgtcaatgcgttctctcatgcggaggtcgacaacattggcacgcgcatcggcgggttgctcgatgcattgatcgagcatcacgacgatatgccggtgggcatgctgccgttgctagacgaagccgaacgcaagcaggtggtgtacgagtggaacgcaacggagcgtgactatccgatcgagcaatgcattcatcagttgttcgaagcgcaggtggatcggaagccggaggcgattgcgctgacgttcgacgggcggcgactgagctacgcggaactcaacgcccgagcgaaccggcttgcgcactatctgcaggggcgcggcgtgggcccggaccgactggttgcgctttgcgccgaacgcggaatcgagatggtggtggggctgctggcgatcctgaaggcgggcggcgcgtatgtgccgctggatccgagccatccgcccgagcgtttgcgccggatgctggacgatacgaacccggtggcggtgctcgtcgacgacatcggcgcggacgcgctcgcatcgttcgaatcacatgtcgcggcccgttcgccccgtgtgcacctgtcgcgcgacatcgcgcaatggcgggcatgcagcccagcgaatccgcctaccccgcgggagcgcgccgcgcggcgtctcgcatacgtgatctacacgtcgggctcgagcggcgagccgaagggagtgatgaacgagcatcgcggggtggtgaaccggctgtggtggatgcaacagacgtacgcgctggacgagcgcgacgcggtattgcaaaagacgccgttcagcttcgacgtatcggtgtgggagttcttctggccgctgatgtcgggcgcgcggctggtgatcgcgaagccggaggggcacaaggatccggcgtacctgtcggagttgatcgatcgcgaacgcgtgacgacgctgcacttcgtaccgtcgatgctgcaggcgttcctggaggatgagggcgcggctcggggctgcgggagcgtgaagcgggtgatgtgcagcggagaggcgctgccgccgtcgctggtgaagcgcttctatcgttgcttgccggatgcgcgcttgcacaatctgtacggtccgacggaagcggcggtggacgtgacggcgtgggcgtgcgatgcggaagaagggggcgcgtcggtgccgatcggtcggccgatcgcgaacacgcggatctacgtattggacgagtatggccagccggtgccgcgaggggtggcgggggaactgtatatcggcggcgtgcaggtggcgcgagggtatctgaaccggccggagctgacgcgggagcggttcgtcgacgatccgttcgtggcgggcggtcgactctataagacgggagatttggcgcgttggcgcacggacgggagtctggagtatctgggtcgaaacgatttccaggtgaagatacgcggtttccggatcgagttgggggagatcgaggcgcaactggcgaaggtggcgggcgtgcgcgagacggtggtgttggcgcgcgactcgggttcgcctgtcggcgagaaacgcctcgtcgcgtactacacggggaatgccgatgttgcggcgttgagggaacaggcaacacgacatctgccggcctacatggtgccatcggcgtacgtgcggctggacgcgtggccgctgacgccgaacggcaagctggaccggcgcgcactgcccgcgccggcggacgacgcgtacgcccgcgccgaatacgaagcgccgcagggcgcaaaggaagaagcactggccgcgatctggaaggacctgctgcccgtggagcgcatcagccgccatgacaatttcttcgaactcggcgggcattcactgctcgtgatcggcttgagcgagaagcttcgggcggcgggcttgcatgccgacgtgcgtgtcgtctaccgggcgtcgacgctggccgatctcgccgcgcatctggggaccgacaatcaggacatccggataccgccgaatctgattgccgacggcgacgagcacattacgccggcccaactgacgctggtggcgctgagccaggagtcgatcgacgcgttggtggcgaaggtggaaggcggtgcggcgaacgtgcaggacatctatccgttggcgccgttgcaggaaggcattctgtttcatcacctgatgtcgggggaaagcgatccgtacgtgctgtcgggcgtgctggcgttccgcagccgcgaggtgatggagcggtttgtgtcggcattgcagcaggtgatcgatcggcacgacatcctgcgcaccggcttcttctgggagggactcgagcaaccggtgcaggtcgtgcagcgccgggcgacgttgccggttagcgtcgtcgagctcgatgcacgcgaaggcgacatcgtgcggcaactggagacccgcttcgattcgcgcggctatcggatggacgtgagccgcgcgccgttgatgcacgttcacgcggcttgcgacggcgagcacgaacgctgggtggcgcgcgtgctgtttcaccatctgtcgatcgatcatacgacgctcgagcgtgtgatcgaggaggcgcgcgcgatcgggcagggccgagcggaggacttgccgcagccggtgccg

SEQ ID NO: 14380 - DNA, 1141 bp, Burkholderia mallei
atggcaaaagagaagtttgagcggaccaagccgcacgtgaacgttggtacgattggtcacgttgaccacggcaagacgacgctgacggcagcgatcgcgacggtgctgtcggcgaagttcggcggcgaagcgaagaagtacgacgaaatcgacgcggcgccggaagaaaaggcgcgcggcatcacgatcaacaccgcgcacatcgagtacgaaacggcgaaccgccactacgcacacgtggactgcccgggccacgccgactacgtgaagaacatgatcacgggcgcggcgcagatggacggcgcgatcctggtgtgctcggccgctgacggcccgatgccgcaaacgcgtgagcacatcctgctggcgcgtcaggtcggtgtgccgtacatcatcgtgttcctgaacaagtgcgacatggtggacgacgcggagctgctcgagctggtcgaaatggaagtgcgcgaactgctgtcgaagtacgacttcccgggcgacgacacgccgatcatcaagggttcggcgaagctggcgctggaaggcgacaagggcgagctgggcgaagtggcgatcatgaacctggccgacgcgctggacacgtacatcccgacgccggagcgtgcggtcgacggcgcgttcctgatgccggtggaagacgtgttctcgatctcgggccgtggtacggtggtgacgggtcgtgtcgagcgcggcgtgatcaaggttggcgaggaaatcgaaatcgtcggtatcaaggcgacggcgaagacgacctgcacgggcgtggaaatgttccgcaagctgctggaccagggtcaggcgggcgacaacgtcggtatcctgctgcgcggcacgaagcgtgaagacgtggagcgcggccaggttctggcgaagccgggttcgatcacgccgcacacgcacttcacggcagaagtgtacgtgctgagcaaggacgaaggcggccgccacacgccgttcttcaacaactaccgtccgcagttctacttccgtacgacggacgtgacgggctcgatcgagctgccgaaggacaaggaaatggtgatgccgggcgacaacgtgtcgatcacggtgaagctgatcgcgccgatcgcgaggaagaaggtctgcgcttcgcgatccgcga

SEQ ID NO: 14381 - DNA, 1200 bp, Burkholderia mallei
gtgctcaccggctttccgtggctcgcgagcggctacgcgcaggtcgacgggccgcttgcgggctatgcgtcgatcgtcggcgtctacggcatcggctgggtgctcgcgctcgtcgcggcgctcgtcgtgcaggcgatcgtccgcgcgcgcgaaggcggcggcgggcacggccgccttcgcgacaacggcggcggaaacggccgggccgccgcgggcgccggcgccgcgccgcgggcgtcgcgcgtcgcggcgccggcgctcgcggcgcttgccgcgctcgcgctcggcccgctgctcgcgctcgtgccgtggaccgtgcccgcgaacgcgccgctcacggtgcgcctgctccagggcaacgtgaagcaggacatcaagttcgaggaggcgggcatcaaggcggcgatcgagatgtaccagaagatgatcaccgagaaacccgccgatctcgtcgtcacgcccgagacggcgatcgcggtgctgatccaagagttgcccgagccgttcgcgcgcgcggtgcgcaatttcagcgacgcgaccgacacggcggtgctgttcggcgcggtcggcggcaccgtgacggccgacggccggatcgtcgactacacgaacagcctgtacggcgtgacgccgcactcgcgcgacatctaccgctacgacaagcaccatctggtgccgttcggcgagttcatcccgtggggctttcactggttcgtcgatctgatgaagatgccgctcggcgatttcgcgcgcggcgcgccggtgcaacagccgttcatcgtgcgcaatcagccggtgatggccgacgtctgctacgaaaacatcttcggcgaggaaatcgcggcgacgatccgcgacaatccggtgtcgccgggcgtgctcgtcaacgtgacgaatctcgcgtggttcggcgatacgatcgcactcgaccagcacctgcagatcgcgcggatgcgctcgctggaaaccggccggccgatgctgcgcgcgacgaacaccgggatgacggccgcgatcgatgcgcagggccgcgtgatcggccggttgaagccgtttacgatcggctcgctcgacgtgcggatcgagggcaccgccgggcgcacgccgtacgtgacgagcggcaacgcgacggtgctcgcgctgtcgctgctgctgctcgcattcggcttcgcgttcggcccggggctgcgccggcgcggc

SEQ ID NO: 14382 - DNA, 189 bp, Burkholderia mallei
gtggtcaccatgtctgaaaaaactgtcaaggttcagctcgtgaagagcctgatcgggacccgcgagtcgcaccgcgccaccgtgcgcggtctgggtctgcgccgtctcaactcggtcagcgagctgcaggatacgccggcggtgcgcgggatgatcaacaaggtctcgtaccttgttaaggtcatcggc

SEQ ID NO: 14383 - DNA, 1386 bp, Burkholderia mallei
atggcagtcagcgtgttcgatcttttcaaaatcggtatcggcccttcgagctcgcatacggtcgggccgatgcgcgccgcactgatgttcgcgcaagggctcgagcgcgacgcgctgctcgccgcgaccgcgagcgtgaaggtcgagctgtacggctcgctcggcgcgaccggcaagggccacggcaccgatcgcggcgtgatgctcggcctgatgggcgacgcgcccgacaccgtcgatccgtcgacgatcgccgcgcggctcgacgcggtgcgcacctcgaaaacgctcgcgctgctcggcacgcatccggtaccgttcgtgccgaaggaacacatcgcgttctaccggcaggcgctgcccgagcacccgaacgcgatgaagctgcgcgcggccgacacggcgggcgcggtgctgcgcgaggcgacgtatctttcggtgggcggcggcttcgtcgtcacctcgggcgcgccgaacacgaaagtgctcgccgccgccgaacagatgccgcacccgtttcgcacgggcgccgagttgctcgcgctcaccgcgtcgaccggcaagtcgatcgcgcagctgatgtgggagaacgagcgcgcgtggcacaccgaggaggaaacgcgcacgggcctgctgaagatctgggacgtgatgcaatcgtgcgtcgcgcgcggctgcgaaatcggcaaccccgacgcggacggcaacctgcccgggccgttccaggtcaagcgccgcgcgccgcagctctatcgcacgctgacgggccatccggaacgcgcgctgcaggacccgctgtcgatggtcgactggatcaacctgtatgcgatcgcggtcaacgaggaaaacgcggcgggcgggcgcgtcgtcaccgcgccgaccaacggcgcggcgggcatcatcccggccgtcctccattactacacgcgcttcacgccgggcgcgaacgagcagggcgtgatcgatttcctgatgaccgcggcggcgatcggcatcctctacaagctcaacgcatcgatctcgggtgccgaagtcggctgtcagggcgaagtcggcgtcgcgtgctcgatggcggcgggcgcgctcgccgcggtgctgggcggcacgccgcagcaggtcgagaacgcggccgagatcgggatggagcataacctcggcctcacctgcgatccggtcggcgggatggtgcagattccgtgcatcgagcgcaacgcgatggcgtcggtgaaggccgtcaacgccgcgcgaatggcgctgcgcggcgacggcagccactacgtgtcgctcgactccgtgatcaagacgatgcgcgaaaccggcgcggacatgaagacgaagtacaaggagacctcgcgcggcgggctcgcggtgaatatcgtcgagtgc

SEQ ID NO: 14384 - DNA, 357 bp, Burkholderia mallei
atgcctcgagtcaaacgtggggtaaccgcacgggcccgtcacaagaagatcatcaacctggccaagggttatcgcggccgtcgcaataacgtctaccgcatcgccaagcaggcggtgatgcgcgctggtcagtacgcgtaccgcgaccgccgcaacaagaagcgtgtgttccgcgcattgtggatcacgcgtatcaatgcggccgtgcgtcagcacgacatgacctacagcgtgttcatcaacggcctgaagaaggcgtcgatcgaactcgaccgcaaggtgctggccgacatggcggtgttcgacaaggcagcctttgccgcgatcgtgaagcaggtgaaggccgccgttgcagcc

SEQ ID NO: 14385 - DNA, 1578 bp, Burkholderia mallei
gtgctcgcggcgcggcacacgatctcgtggctgtggatcgtgcccgtcgccgcgctcgtcgcgctcggtctgtacgacctgaaccaggaccgccacgcgatcctgcgcaactacccgctctggggccatctgcggttcctgttcgaattcatccgaccggaaatccgccagtacttcgtcgaggacgacaccgacgagaagccgttctcgcgcgcgcagcgcagcgtcgtctaccagcgcgcgaagaacgtcgccgacaaccggccgtacggtaccgagctcgacgtgaaggcggtcgcgcacgaatggatcagccattcgctcgcgccgacgaagctcgacggccacgatttccggattcgcgtcggcgcgacgcgcaagcagccttatgacatctcgatcttcaacatctcggcgatgagcttcggcgcgctgtcggcgaacgcgatccgcgcgctgaatctcggcgcgaagcaaggcggcttcgcgcacgacacgggcgaaggctcgctgtcgaagtatcaccgcgagcacggcggcgacatcatctgggaaatcggctccggctacttcggctgccgccgcgacgacggcacgttcgatccggagaagttcgcgaaacaggcgcgcgagccgcaggtgaagatgatcgaggtgaagctctcgcagggcgcgaagcccggccacggcggcgtgctgcccgccgcgaagatcacgcccgagatcgccgagatgcgcggcgtgccgatgggcaaggattgcgtgtcgcccgccgcgcactcggcgttctcgacgccgcgcgggctgctcgaattcgtcgaccggctgcgcgagctctcgggcggcaagccgacgggcttcaagctgtgcgtcggccatccgtgggaattcttcgggatcgcgaaggcgatgctcgagacgggcatcgtgccggacttcatcgtcgtcgacggcgcggaaggcggcacgggcgccgcgcccctcgaattcaccgatcacgtcggcgtgccgctgcaggaagggctgctgctcgtgcacaacacgctcgtcgggatcgggctacgcgaacaggtgaagctcggcgcgagcggcaagatcatcaccgcgttcgacatcgcgcgcacgctcgcgatcggcgcggactgggtgaactccgcgcgcggcttcatgttcgcggtcggctgcatccaggcgcagcactgccacaccgaccgctgcccgacgggcgtcgcgacgcaggacccggtgcgccagcgcgcgctcgtcgtgccggacaaggccgatcgcgtctacaacttccatcgcaacacgctgcacgcgttgcaggagctcgtgcaggcggcggggctgtcgcacccgtccgagctgcgcgcgcatcacatcgtgcagcgcgtcgcgccgcacgaagtccggctgatgtcgcaactgctgaagtatctggagccgggcgcgctgctcaacggcggccattgcggcttctcgctgtacgagacgtggtggccgctcgcgcgcggcgattcgttctcgcccggcgaaggcgcgtacgcgcgcgtcggcacgggcgcgccggcgcgcccg

SEQ ID NO: 14386 - DNA, 816 bp, Burkholderia mallei
atgaagccgaatcgctatctgcaggtgctgatgctcgcgatcggcttcggtttcctctatatcccgatcgcgagcctcgtcgtctattcgttcaacgattcgaagctcgtcaccgtgtggtccggtttctcgacgcgctggtacgcggcactcgtcgaggacgacgagctgatcgcggccgcgtggctgtcgctgaagatcgcggtgatgaccgcgttcgcatcggtgttcatcggcacgtgggcgggcttcgtgctcgcgcggatgggccgctttcgcggcttcgcgctctacagcgggatgatcaacgcgccgctcgtgattcccgaggtgatccagggcatctcgctgctgctgctgttcatcgagctcggcaaatggttcggatggcccgccggccgcgggatgttcacgatctggctcggccacgtgatgctgtgcatctcgtacgtcgcgatcatcgtgcagtcgcgcgtgcgcgagctgaacccgtcgctcgaggaggcggcgctcgatctcggcgcgaccccgttcagggtgttcttctcgatcacgctgccgctgatctcccaggcgctcgtgtccggctggctgctgtcgtttacgctgtcgatcgacgatctggtgctgtcggcgttcctgtccggacccggctcgacgacgctgccgctcgtcgtgttctcgcgcgtgcgcctcggcctgaatccggagatgaacgcgctcgcgacgctgttcatcgtcgcggtgacgatcggcgtcgtggcggcgaactatgtgatgctgcgtcaggagaagaggcggatggccgaagccgcc

SEQ ID NO: 14387 - DNA, 1785 bp, Burkholderia mallei
atgggacactacgccgcgccgttgcgcgacatgcaattcgtgttgcacgagcttctgaacgtcgaagccgaggtcaagcagatgcccaagcatgctgatctcgacgccgacacgatcaaccaggtgctcgaggaagcgggcaagttctgctcggaggtgcttttcccgctcaaccaggtcggcgaccgcgagggctgcacgtatgtcggcgacggcgtcgtgaagacgccgacgggcttcaaggaagcgtaccagcagtacatcgacgcgggctggcccgcgctcggctgcgatcccgattacggcggccagggcctgcccgcgttcgtcaacaacgcgctgtatgaaatgctgaactcggcgaaccaggcgtggacgatgtatccgggcctgtcgcacggcgcatacgagtgcctgcacgcgcacggcgcgcccgagctgcagaagctctatctgccgaagctcgtatcgggcgaatggacgggcacgatgtgcctgaccgagccgcactgcggcaccgatctcggcatcctgcgcacgaaggccgagccgaacggcgacggcacgtattcgatcagcggcaccaagatcttcatctcgagcggcgaacacgatttgtcgaagaacatcgttcacctcgtgctcgcgcgcctgccggacgcgccgaagggcacgaagggcatttcgctgttcatcgtgccgaagttcgtgcccgacgcatcgggcgagccgggcgagcgcaacggcgtgaagtgcggctcgatcgagcacaagatgggcatccacggcaacgcgacctgcgtgatgaatctcgacaacgcgaagggctggttgatcggcgagccgaacaagggcctgaacgcgatgttcgtgatgatgaacgccgcgcgcctcggcgtcggcatgcaggggctcggcctcaccgaagccgcttaccagaactcgctcacgtacgcgaaggagcgcctgcagatgcgctcgctgacggggccgaaggcgccggacaagccggccgacccgatcatcgtccacccggacgtgcgccgcatgctgctcacgcagaaggcgtacgcggaaggcgcgcgcgcgttcacgtactggtccgcgctgcagatcgacaaggcgctgtcgcacgccgacgaggcggtgcgcaaggaagcggaggatctcgtcgcgctgctcacgccgatcatcaaggcgttcctgaccgacaacgcgttcgagtgcacgaaccacgcgatgcagatctacggcggccacggcttcatctccgagtggggcatggagcagtacgtgcgcgacgcgcggatcaacatgatctatgaagggaccaattcggttcaggcgctcgacctgctcggccgcaaggtgttgggcgacatgggcgcgaagctgaagaagttcggcaagatcgtcgccgaattcgccgaagcggaaggcgtgaagcccgagatgtccgaattcatcacgccgcttgccgacatcggcgaaaaggtgcagaagctgacgatggaaatcggcatgaaggcgatgcagaatccggacgaagtgggggcggccgccgtgccgtacctgcgcaccgtcggtcacctggtgttctcgtacttctgggcacgcatggcgcgcatcgccctcgacaacgaagcgtcgggcgatccgttctacaagtcgaagctcgcgaccgcgcgcttctacttcgcgcgcctgctgcccgagacggcggcgtcgatccgtctcgcgcgcgccggcgcgaagtcgatgatggacgtcgacgaagcgctgttc

SEQ ID NO: 14388 - DNA, 1272 bp, Burkholderia mallei
atgttcttgctgctggcgctgatcgtctatcgcatcggcgcgcacatcccggtgccgggcatcgacccggatcagctggcgaagctgttccagagccaggcgggcggcatcctgggcatgttcaacatgttctcgggtggcgcgctgtcgcgcttcacgatcttcgcgctggggatcatgccgtacatttcggcgtcgatcatcatgcaactgatggcgatcgtgtcgccgcagctcgaggcgctgaagaaggaagggcaggccggacagcggaagatcacgcagtacacgcggtatttcaccgtggtgctcgcgacgttccaggccttcggcatcgcggccgcgctggagaatcagccgggcctcgtgaccgatccgggcgcggtgttccgtctgacgacggtcgtcacgctggtgacgggcacgatgttcctgatgtggctcggcgagcagatcaccgagcgcggtctcggcaacggcatctcgatcatcatcttcggcgggatcgcagcagggttcccgaatgccgtcggtgggctgttcgagctggtgcgcacgggttcgatgagcatcatttcggcgatcatcatcgtcgttctgatcgccgcggtgacttacctggtcgtgttcatcgaacgcggtcagcgcaagatcctcgtgaactacgcgaagcgccaggtcggcaacaagatttacggcgggcagtcgtcccacctgccgctgaagttgaacatgtcgggcgtgattccgccgatcttcgcatcgtcgatcatcctgtttccggcgacgatcctgagctggttcagctcgggcgagcgcaagggctggatgtccgacacgctgcacaacgtcgcggaagcgctgaagccgggccagccggtgtatgtgctgctgtacacgctggcaatcgtgtttttctgcttcttctacaccgcgctggtgttcaacagcagggaaaccgcagacaacctgaagaagagcggtgcattcgtgccgggcattcgtccgggcgaccagaccgcgcggtacatcgaccggatcctcacgcgtctcacgctggccggtgcgatctacatcgtcttcgtgtgtctgctgccggagttcctggtgctgcgctggaacgtgccgttttattttggtggaacgtcgctgctgatcattgtcgtcgtcacgatggacttcatggcgcaggtgcagtcgtacgttatgtcgcaacagtatgagtcgctgctcaagaaagccaatttcaagggcggcaacatcccaatgcgt

SEQ ID NO: 14389 - DNA, 882 bp, Burkholderia mallei
atgatggcggcaattaccgcaagcatggtggcagaactgcgcgcgaagaccgacgcaccgatgatggaatgcaagaaggcgctgacggaagccgacggcgacatggccaaggccgaagagctgctgcgcgtgaagctcggcaacaaggcgagcaaggccgcgtcgcgcgtgacggccgaaggcgtcgtcgcatcgttcgtcggcgcgaatgccggcgcgctcgtcgagctgaactgcgaaaccgatttcgtcgcgaagaacgacgatttcaacgcgttcgcgaagacggtcgcggagctcgtcgcgacgcagaacccggccgacgtcgccgcgctgtcggcgctgccgctcgacggcaagaccgtcgacgaagtgcgcctcgcgctcgtcggcaagatcggcgagaacatctcgatccgccgtttcgtgcgtttcgaaacgtcgaacaagctcgcgacgtacctgcacggcagccgcatcggcgtgatcgtcgagtacacgggcgcgcaagagcaggtcggcaaggatgtcgcgatgcacgtcgccgcgatgaagcccgtctcgctgtcggccgacgaagtgccggcggacctgatcgagaaggagcgccgcgtcgccgagcagaaggccgcggaatcgggcaagccggccgagatcgtcgcgaagatggtcgacggcagcgtccagaagttcctgaaggaagtgtcgctgctgaaccagccgttcgtgaagaacgacaagcagacgatcgagcagatgctcaaggccgcggatgcggcggtgcagaagttcgccctcttcgtggtcggcgaaggcatcgagaagcgccaggacgacttcgccgcggaagtggccgcgcaagtcgccgccgcgaagcagcag

SEQ ID NO: 14390 - DNA, 1107 bp, Burkholderia mallei
atggcccgctggggtacgtccggccggaaggatccggcctcgttcaacgtctcgacgggaattcagatggcctacgaagcagcttcagaacgctatgcggacatgcagtatcgcgtgagcggcaaatccgggctcaaattgccggcgctttcgctcggcttgtggcacaacttcggcgacacgacgccgatctcgacgcagcgcgagatcctgcgcaccgcattcgatctcggcatcacgcacttcgatctcgcgaacaactacgggccgccgtacggcagcgccgaaacgaacttcggccggctgctgcgcgaggatttcaagccgtatcgcgacgagctgctgatttcgacgaaagccggctgggacatgtggcccggcccgtacggcagcggcggcggctcgcgcaagtacgtgctcgcgagcctcgaccagagcttgcggcgcatggggctcgactatgtcgacatcttctattcgcaccgcttcgacgcgcacacgccgctcgaggaaaccgcgagcgcgctcgcgagcgccgtgcagcagggcaaggcgctctacgtcggggtctcgtcgtattcggcggcgagcacgcgcgagatcgcgaagctgctcgccgaatacaaggtgccgctgctgatccaccagcccgcgtacaacatgctcaaccgctggatcgagcgcgagctgctcgacgcgctcgacgagacgggctcgggctgcatcgcgttcacgccgctcgcgcaggggcttctgacctcgaagtatctgaacggcgtgccggcggatgcgcggatcaacaagccgggcggcggatcgctgaaggaagctcacctgagcgcggagaacctcgagcacgtgcgcaagctgaacgagatcgcgcagcggcgcggccagagcctcgcgcagatggcgcttgcctgggtgctgcgcgattcgcgcgtcacgtccgcgttgatcggtgcgagccgcgcggagcaggtgcgcgagaacgtcgcggcgctcgcccatctcgcgttcagcgacgacgagatcgccgagatcgaccgctatgcgaccgaaggcgggatcaatctgtgggaaaagccgtccaccgatcaggcgatc

SEQ ID NO: 14391 - DNA, 309 bp, Burkholderia mallei
atgtacgcggtcataaaaaccggcggcaagcagtacaaggttgccgttggcgaaaaactgaaagtagaacagataccggcagacattgacgcagaaatcacgctcgaccaggttctcgcagtgggcgaaggcgaatcgattcagttcggtacgccgctggtcagtggggcttccgtcaaggctaccgtcgtatctcacggtcgtcatgccaaggtcaccatcttcaagatgcgtcgccggaagcactaccaaaagcacggcggccaccgccagaactacaccgagctgcgcatcgacgcaatcaacgcg

SEQ ID NO: 14392 - DNA, 711 bp, Burkholderia mallei
gtgccgtgcgccgatggccgctacttcaccgcagatctttcgaaccgaccgatacccgacaccatcatgcaacaccacgcttgcagcccaccgcggctgattctcgcctccagttcgcgctaccggcgcgaactcctcgaacgcctgcgcgtgccgttcgacgtcgtcgcgcccgaaatcgacgaaacgccgctgccggacgaaacgccctgcgcgaccgcgctgcggctcgccgccgcgaaggcccgcgccgcggccgaacgtgcccgggcgcctcacggcgcgctcgtgatcggctccgaccaggtcgcaaccttcgacgggctgcagatcggcaagccgggcacgcacgcgcgcgcactcgcgcaactgcaggcgatgcgcggccgcgatgtcgaattccacagcgcgctttgcctgtatgacagccgcagcggcgcgacgcagagcgaggacatcgtgacgcgtgtgcggtttcgcacgttgaccgacgtcgaactcgacgcctatttgcgcgcggagacgccgtatgacgtcgcgggcagcgcgaaatcggaagggctcggcatcgcgctcctcgacgcgatcgattccgacgacccgaccgcgctcgtcggcctgccgctcatcgcgctcacgcggatgctgcgcgcggcgggctatcctctcttcggcgcgccggcgcccgccgccgacggagtgaacggacga

SEQ ID NO: 14393 - DNA, 1116 bp, Burkholderia mallei
atgaagttcattgacgaagcgcgaatcgaggtcatcgccggagacgggggcgatggcagcgcgtcgatgcgccgcgagaaattcgttccgttcggcggaccggacggcggcgacggcggccgcggcggcagcgtgtacgtgatcgcggatcgcaacatcaatacgctgatcgactaccggtacgcgaagaagcacatggcgcgcaacggcgagaacggccgcggttcggattgctacggcaagggcggcgacgacatcacgctgcgcatgccggtcggcaccgtcatcaacgacatggacacgggcgagctgatcgccgatctgaccgagcacgaccagaaggtgctcgtcgcgaagggcggcgcgggcggcctcggcaacctccatttcaagtcgagcacgaaccgcgcgcctcgccagaagacggacggcaagccgggcgagcggcgcatgctgaagctcgagctgaaggtgctcgcggacgtcggcctgctcggaatgccgaacgcgggcaaatcgacgttcatttcgtcggtgtcgaacgcgaagccgaagatcgccgattatccgttcacgacgcttgcgccgaatctcggcgtcgtgcgcgtcgggccgggcaagagcttcgtgattgccgacattccgggtctgatcgaaggcgcggccgaaggcgcgggcctcggccatcagtttctgcggcatctgcaacgtacgggcctgctgctgcatctcgtcgatctcgcgccgttcgatgagcgtgtcgatcccgtcgcggaagcgagggcgatcgtcggcgagttgcgcaagtacgacgaatcgctgtacgagaagccgcgctggctcgtgttgaacaagctcgacatggtgccggaggacgagcgccgcgcgcgcgtcgccgatttcatcgagcgcttcggctggacggggcccgtgttcgagatctccgcgctgacggggcagggctgcgagggcctcgtttatgcaatccacgattatctcgtcgagcattcggacgcgcatcgcgccgagctcgccgaggatttggcgtcggacgtgcgctttcgcgatgcgcccggcgcaggcggcgagccgcacgagcgcgacgccggcgcgcac

SEQ ID NO: 14394 - DNA, 1515 bp, Burkholderia mallei
gtgcgcggcgcttgcgcgtcgcgcgcgatgttcgatactggcggcaagcggcaagcggcaagcggcaagcggcaagcggcaagcggcaagcggcaagcggcaagcggcaagcggcaagcggcaagcggcaagcagcaagcagcaagcagcaagcagcaagcagcaagcagcaagcagcaagcagcaagcagcaagcagcaagcagcaagcagcaagcagcaagcagcaagcagcaagcagcaagcagcaagcagcaagcagcaagcagcaagcagcaagcagcaagcagcaagcagcaagcagcaagcagcaagcagcaagcagcaagcagcaagcagcaagcagcaagcagcaagcagcaagcagcaagcagcaagcagcaagcagcaagcagcaagcagcaagcagcaagcagcaagcagcagtcgacctgcgccggtgctgatggttcgacgccgaatcgaacgcaagcattgcggcgcgtgcccgccgcgcagcacccgcgagccgcgcacccgagccagccgctgcgttgtctttccgtcgcgaattcccacgttgaaaccgaacgtcacgatgcccgaaatcgtcaccctcacgccgaatcccgccatcgacgtcgcgacgtgcgtcgagcgagtcaccgacacccgcaagctgcgctgcggccccgcacgacgcgatccgggcggcggcggaatcaatgtcgcccgcgtgctgacgcgcctcggcgccgattgttcggccgtctacctggcgggcggcggcaccggcctcgcgctgcgcggcctgctcgccgacgaaggcgtgcgggcgcatggcatcgacatcgccggcgagacgcgcgaaaacttttcggtgctcgaaacgtcgacgggccgcgaattccgcttcgtgttgcccgggccggcgctcgcggcgcacgaatggccgcgctgcgtcgaagcgctcgggcggctcgccgacgcgtcgcgctatctggtgatgagcggcagcctgccgcccggcatgccggacgattgctacgcccggctcgcgcggcgcgcgagcgcgcgcggcgtgcgcacggtcgtcgatacgtcgggaccggcgctcgccgccgcgctcgatgcgggcgtctatctggtgaagccgagcctcggcgagttgcgcgcgctgaccggcctgccgctcgaagacgacggcgcgcgccttgccgccgcgcgcgcgatcgtcgccggcgggcgcgcgcagatcgtcgcgctgacgctcggcgacgcgggcgcgctcgtcgtgtcgcgcgacgatgcggtgcgtctgccgggcgtgaaggtggcggtgcgcagcgcgatcggcgcgggcgacagcttcgtcgcggggctcgtcgccgcgctcaatcgcggcgcgaacgtcgccgacgcggcgcgccatgcgctcgccgccgcgtcggcgtcgctgctgagcacgggccccgcgctgggcacgaaggaagacatcgcgcggatctatcgcgaactgccggggacgatcgacgcg

SEQ ID NO: 14395 - DNA, 2415 bp, Burkholderia mallei
atgtcaggcacccaacttctcccgtcggaacgcaccacgctcccgttgctgccgctgcgggatgtcgtcgttttcccgcacatggtgatcccgctcttcgtgggccggccgaagtcgatcaaggccctcgaagtggcgatggaaggcggcaagcacatcatgctcgtcgcgcagaagaccgccgcgaaggatgagccgaccgaaaaggacatgtacgatgtcggctgcatcgcgaacatcctgcagatgctgaagctgcccgacggcaccgtgaaagtgctcgtcgagggcctgcagcgcgcgcaggcgctgtcgatcgaagaacaggagacgcagttctcctgcgaggtgatgccgctcgagccggaccacgccgacagcgccgagacggaagcgctgcgccgcgcgatcgtgtcgcagttcgatcagtacgtgaagctgaacaagaagattccgccggagatcctgacgtcgctgtcggggatcgacgaggcgggccgcctggccgatacgatcgccgcgcatcttccgctcaagcttgaccagaagcagcacatcctcgagatgttcccggtcatcgagcgcctcgagcacctgctcgcgcagctcgaggccgagatcgacatcctgcaggtcgaaaagcgcatccgcgggcgcgtgaagcgtcagatggaaaagagccagcgcgagtactacctgaacgagcaggtcaaggcgatccagaaggaactgggcgagggcgaggaaggcgcggatctcgaggagctcgagaagcgcatcaacgccgcgcgcatgccgaaggaagcgaagaagaaggccgacgccgagctcaagaagctcaagctgatgtcgccgatgtcggccgaggcgaccgtcgtgcgcaactacatcgacacgctgatcgcgctgccgtggcgcaagaagagcaaggtcaacaatgatctgtcgaacgccgagaaggtgctcgacgaggatcactacggcctcgagaaggtcaaggaacggatcctcgaatatcttgcggtgcagcaacgcgtcgacaaggtgaaggcgccgatcctctgcctcgtcgggcctcccggcgtcggcaagacctcgctcggccagtcgatcgcgcgcgcgacgaaccgcaagttcgtccggatggcgctcggcggcgtgcgagacgaggccgagatccgcggtcaccgccggacctacatcggctcgatgccgggcaagatcctgcagagcctgtcgaaggtcggcgtgcgcaatccgctcttcctgctcgacgaagtcgacaagatggggatggatttccgtggcgatccgtcgtcggcgctgctcgaggtgctcgatccggagcaaaaccacacgttcgccgatcactacgtcgaggtcgatttcgatctgtcggacgtgatgttcgtcgcgacgtcgaattcgctgaacattccgccgccgctgctcgaccggatggaagtgatccgcctgtcgggttacaccgaggacgagaaggtcagcatcgcgcagcgctacctgctgccgaagcagaagaagaacaacggcttgaaggaaggcgagatcgacgtcgccgagcaggcgatccgcgacatcatccgctactacacgcgcgaagccggtgtgcgttcgctcgagcgcgaggtatcgaagatctgccgcaaggtcgtgaagatgctgctgctgaagaaggcatcgggcgcgatcaaggtcgacggcgagaacctcgacacgttcctcggcgtgcgcaagtacgatttcggccttgccgcgaaggagaaccaggtcggtcaggtcacgggcctcgcctggaccgaggtgggcggcgatctgctgacgatcgaggcggccgtgatgccgggcaagggcaacgtgatccgcacgggctcgctcggcgacgtgatgaaggaatcggtcgaggccgcgcgctcggtcgtgcgctcgcgctcgcgccggctcggcatcaaggatgaggcgttcgagaagcaggacatccacatccacgtgccggaaggcgcgacgccgaaggacgggccgtccgccggcatcgcgatgacgacggcgctcgtatcggtgctcacgggcattccggtgcgcgccgacgttgcgatgacgggcgagattacgctgcgcggcgaagtgctgccgatcggcgggctgaaggagaagctgctcgccgcgcatcgcggcggcatcaagctcgtgctgattccggaagagaacgtgaaggatctcgccgatattccggacaacgtgaagaacgcgatcgaaatcgtgccggttcgctggatcgacaaggtgctcgaacttgcgctcgagcgtttgccgaacgcgctgccggaagaggaggcgaaggccgcgcccgtcgcggagcccgcgaaggacgccggctcgaccgaagtcgtcaagcac

SEQ ID NO: 14396 - DNA, 417 bp, Burkholderia mallei
atgctgttcaagcgcgatcttgcgccacctgcgcgccgtgcccgcgcgcccgcgcgcaggcacgggtttcgctacgatatccgtagcacaacccgcttcggcaagaagggagtcgcaatgtctgaagtcaacaaggagaaactgatgtcggatatcaaaactgttctcgcggacgcggaagatctgctgaagcaggccgcgagcagcacgggcgaccgtgcgaccgagctgcgcgagaaggcgctcgcacgcctgaaacaggcgaaggagaaggcgaccgatgtccagatggtcgtggtcgaaaaaggcaagaaggcggcgcgcgccaccgacgactacgtgcacgagcatccgtggacgtcgatcggcatcgcggccggcgtcggcgtattgatcggcctgctgatcaaccgcaag

SEQ ID NO: 14397 - DNA, 969 bp, Burkholderia mallei
atgaagaccacctttctggatttcgagcagccgattgccgagctcgaggcgaaaatcgaagaactgcgtttcgtgcaggacgattcggctgtcgacatttcggaagaaatcgagcggctgtcgaaaaagagccagcagctcacgaaggatctgtacgcgaacctgacgccctggcaggtgtcgcagatcgcccgccatccgcagcggccgtacacgctcgattacgtgagcgagctcttcaccgattttcacgaactgcacggcgaccgcgcgttcgcggacgaccagtcgatcgtcggcggccttgctcgcttcaacggccatgcgtgcatggtgatcggccatcagaagggccgcgatacgaaggagcgcgccgcgcgcaatttcgggatgccgcgccccgaaggctatcggaaagccgagcgcctgatgcgcgtcgctgaaaagttcgggctgccgatcttcacgttcgtcgacacgccgggcgcctatccgggcgtcggcgcggaagagcgcggccagtcggaggcgatcggccacaatttatacgtgatggccgagctgaagacgccgatcatcgcgacggtgatcggcgagggcggctcgggcggcgcgctcgcgatcgcggttgccgatacggtgatgatgctgcagttctcgacgtactcggtgatctcgccggaagggtgcgcgtcgatcctgtggaagagcgccgcgaaggcgccggaagcggccgaggcgctcggcctgaccgcgcatcgcctgaaggcgctaggcctcatcgacaagatcgtcaacgagccgctcggcggcgcgcatcgcgatccgaagggcatggccgcgctgctgcgccgcgcgcttggcgattcgctgcgccagttccagggcatgagcgtcgatgcgctgcgcgagcgccgcttcgagcgcttgatggcctacggcaagttcaaggaaacgacgccgcgcgca

SEQ ID NO: 14398 - DNA, 1395 bp, Burkholderia mallei
atgaaacacatcgtcaaacacattcacttcgtcgggatcggcggcgcgggcatgagcggcatcgccgaagtgctcgtgaacctgggctaccaggtgagcggctccgatctcgcgcgcaacgcggtgaccgagcgcctcgaggcgctcggcgcgcgcgtgtcgatcggccacgatgcggcgaacatcgaaggcgcgaacgcggtcgtcgtgtcgaccgcggtgcgctcggacaacccggaagtgctcgccgcgcgccgcctgcgcgtgccgatcgtgccgcgcgcggtgatgctcgcggagctgatgcgcctgaagcaggggatcgcgatcgccggcacgcacggcaagacgacgacgacgagcctcgtcgcgagcgtgctcgccgcgggcgggctcgatccgacgttcgtgatcggcgggcgtctcacgagcgccggcgcgaacgcgcggctcggcatgggcgacttcatcgtcgcggaagccgacgagtcggacgcgtcattcctgaacctgtatccggtgatcgaggtcatcacgaacatcgacgccgatcacatggatacctacggccacgacttcgcgcggctcaagcaggcgttcatcgaattcacgcagcggctgccgttctacggcagcgcggtcgtgtgcatcgacgacgcgaacgtgcggcagatcgtgccgctgatctcgaagcccgtcgtgcgctacggcttcgcggcggatgcgcaggtgcgcgcggagaacgtcgaggcgcgcgacggccggatgcacttcacggtgcggcgcgaggggcgcgagccgctgcctgtcgtcctgaacctgcccggcctgcacaacgtgcagaacgcgctcgcggcgatcgcgatcgcgaccgatctcgatgtggccgacgcggcgatccagcaggcgctcgcggaattcaacggcgtcggccggcgcttccagcgctacggcgagatcgcggcggcgggcggcggcgcgtatacgctgatcgacgactacggccaccatccggtcgagatggcggcgacgatcgcggcggcgcgcggcgcgttcccgggccgccggctcgtgctcgcgttccagccgcatcgctacacgcgcacgcgcgactgcttcgacgacttcgtcaacgtgctgtcgacggtcgacgcgctcgtgctgaccgaggtgtacgcggcgggcgaggcgccgatttcgaccgcgaacggcgacgcgctgtcgcgcgcgctgcgcgcggcgggcaaggtcgagccggtattcgtcgcgacggtcgacgaggtgccggacgcgctcgcgaagctcgcgcgcgacggcgacgtggtgatcacgatgggcgcgggctcgatcggcggcgtgccgggcaagctcgcgcaggacacgcaacagaaggga

SEQ ID NO: 14399 - DNA, 405 bp, Burkholderia mallei
gtgcgcgagcgcggcgatgccacgcgcgtcgacgtgttcgacggcgcggtgcggatcgcgcctcggcgcgcggtgggccgcgcgccattgatcacggcgggccacggcgcggatttcacgcgcgacgcgctcgccgggccgccgcgtgtgctcggggcgagcgccggcgcatgggtggacggcatcctcgtcgcgtcgaacctgcggctcgccgatctgctcgccgaaatcgaccgctaccgcccgggccgcgtgcgctgcgacgcggcggtcgcgaacctgcgcgtatccggcacgtacccgctcgacgacaccgaccgcatcctcgacacgctgcgcgagacgctgcccgtcgatgtcgagtacctgagccgctactgggtgaccgtcgtcgcggcgcgcgat

SEQ ID NO: 14400 - DNA, 1497 bp, Burkholderia mallei
atgaaagcccgctcccccgccatgctcgccgcgcccgcgcattgcgccgacacgcctcgaacgcccgatatgcccgatatgcccgatatgcccgacacgcgcggcacgcccgcgcacgacgcctcgccgcgccccgagcacaagccgcacggcaagatgctgcatccggtcgtgatgatgatctgggtgctcgcggccgcggtcgcgctcacgtggctcgtcgattccggccgctacgcgcgcaacggcaagctcgtcgtgccgggcacctatcaggtcgtgccgaaggcaacgtcgctcgcgacgctcgtcgcgcccgccgtcagcaagagcacgccgcagctcgcaatgcccgcgagcctcgtgtccgcgttcgtcgcggtgccgggcgggctcgtgaagaacgcgccgctcatcgtgatggtgatgttcgtcggcggcatgttcggcgtgatgcgcaggacaggcgtcgtcgacgcgggcatcgaccggctgctgcagctcaccggcaacgacgtctatctgctgacgccgctcctgatgatcctgatcgggctcggcagcacgctgctcggcttcatctccgagtatctggtgatcattccgatggtgatggtgatcgcgaagcggctcgggctgtcgaacctgttcgcggtcgcgctcgtcgcgctcgccgcgaagatcggctacatcgcgtccgtcacgaatccgctcgcgctcgcggtcgcgcagccgctcgtcggcgtgccgctgttcagcggcgtcgcgctgcgcgccgcggtattcgccgtctatctggcgctcggcatcctctatctgctgcatcacgtgaagcgcagcggctatcggcgcgagcgcgcgaaggccctcgcgcacgcgcacggcgtcgcgcgcctgtcggtgcgccaccaggcgacgctcgcgctgctcgcggcggcggtcgcgatgctcgtcttcggcacgcgcgagctgaagtggggcaacatcgagcttgccgcgttctacgcgttcgtcgcgatcgcggccgacgcgttcgtcgacggcatgaagagcatgatgctcgcggcgctgctgatggggctcgccgcgtcggtcgagttgctgctgcagaacagcctcgtgctcgacacgctgatccatctgttcacccggctcgcgaacggccaatcgccggtgtgggtcgcgaacgggctgatggccgtgcagatggtgctcgacgtgttcattccgtcggtgtcgggcaaagcggccgtgagcatgccaatcatcgggccgatcgcgcagctctccggcgtgagcgggcagacctcggtgctcgcgttcgtgctgggcggcgggctcacgaacctcgtcacgccgacctccggcatgctgctcgcgtatctcgcgaccgcgcgcgtcgatttcggcgcgtggctgcggttcgtgctgccgctgttcgccgtgctgctcgcgctgtcgtgcggcgtgctcgcgttcgccgtgcagatcggctac

SEQ ID NO: 14401 - DNA, 1959 bp, Burkholderia mallei
atgtgcggaatcaccggcttcgtgggccctgtcgcatgcgcgccgcagacggctcgcgcgaccctcgcgcgaatgacggacagtctcgcgcatcgcggcccggacgataccggtttgtggatcgatcacgacgcgggcgtcgcgctcggccatcggcgcctgtcgatcgtcgacttgtccgagcacgggcatcagccgatgctgtccgcgtgcggccgttatgcgatgacgttcaacggcgagatctacaactttcgccagttgcgcagcgagctcgagcgcgaacatcgcgcgcccgaatggcgcggtcattcggatagcgaagtgttgctcgcggcgttctgcgcgtggggcgtcgatcgcgcgttgcaaaaggcggtcggcatgttcgcgctcgcgctgtggaaccgcgaatcgcgcgtgctcacgctcgcgcgcgatcgcatcggcgagaagccgctctattacggccgcatcggcggctcgttcgtgttcggctccgagctgaaggcgctgcggcgttttcccggcttcgacgcgcatccgatcgaccgcgacgcgctgtgcctgtatctgcgccacgcgagcgtgcccgcgccgtacacgatctacgaaggcatccgcaagctgccgcccggcacgtacgcgcagctcgaggacctcgccgaagcgcccgcgccgcgccgctactggtcgctcgagcgcgcgatcgccgcaggccgcgcgaatccgttcgacggcgacgcgaacgccgccgtcgcgcagctcgattacgtgttgcgcgacgcgatcgccgagcagtcggtcgccgacgtgccgctcggcgcgttcctgtcgggcggcgtcgattcgtcggtgatcgtcgcgctgatgcagacgcagaccgcgcagccggtgcagaccttcacgatcggctttcacgaggcgggctacgacgaggccggctatgcgaaggcggttgcgcggcatttgggcacgtcgcacaccgagctctacgtgaagccggccgacgtgctcgcgaccgtcccgcgcatgccgtgcgtctacgacgagccgttcgccgattcgtcgcagattccgacgctgctcgtttccgagctcacccgccggcacgtgaaggtgagcctgtccggcgacggcggtgacgagctgttcggcggctacacgcgctatttcctgacgccgcgcctatgggggcggctgcgccgcgtgccggccgcggtgcggatgcggatcgcggccgcgctgcacgcgctgcggcccgaccatgcggatcagatcgcctcgctcgtgcagggcgcgtggagcgcgtccgcgcagcgcgacgcgtcgccgcgcgtcggggaccgcctgcacaagctcgcgaacgtgatgacggcggacagccgcgcgtcgctgtaccggttgctgatgtcgtcggtccatcatccggagcgcttcacgctcgcggggcacgagccgcagacgctgatcgacacgccgggcgcgtggcccgccgggctgtcgttcgccgagcaggccatggccgtcgatacgctcacgtatctgccgaccgacatcctgacgaaagtcgaccgcgcggcgatggcggtgagcctcgagacgcggatgccgtttctcgatcaccgcgtcgtcgagttcgcgtggcggctgccggaggcgctgcgcatcccggatgggcaggacaagtggttgctgcgcaagctgctgtatcgctacgtgccgcgcccgctgatcgaccggccgaaacagggcttctgcgcgcccgtcggcgcgtggctgcgcggcgaattgagcgactgggcggcggagctgctgcgccccgcgcgcctgcgcgacgaaggctacctcgacgcggcgcgcgtcgagcgcctgtggcggcagcaccagtcgggccggatgaactggcagcacccgctctggacggtgctgatgttccaggcatggctcgagcggcag

SEQ ID NO: 14402 - DNA, 4191 bp, Burkholderia mallei
atgggcgaagtgcagagcagcgcgccgtcggacagccagcagaagctcgcggcgctcgcgcaacgaggcagcaatgcggacgccgtgcagacggtgtccaacatggggctcgcgatcaacgcggcgcaggtcacggcggccggcacgagcgcatgggcggccggcacgttccagtgcttcgccgggcgcgtgatcgcgccgctcggcggcgcgatgctcggcggcgcgctcgccgaggcgctcggcgcggatcgcccggtcacatgggtgctggacaagatggggctgccggccgtcgcgaagcccggcaaggcgcccgctcgcgtcgggcacaagatcgtccatgagaacgccttcatcggcgcgctgaccggcctgctggcggggatcgcggtcggcgtggcgatcgccgccgcggccgccgcgatcgtggcgacgggcggcgcggccgcggtcgccatcgcggcggccggcccgttcgtggtcgggttcgtctcgggcgcggtgggcggtttcgtcggcgcggcagtggccaagggcatcggccataccggctcggtgacgggcgcgatcgcgcacggctcgcccaacgtctcgttcgaaggcgcgccggttgcccgcgtgaccgatccggtgacctgcagcaaggatcccggcatgccgccgccgcagatcgcacagggcagcctgaccgtatcggtcaacggcctgccgctcgcgcggatcggccacaagatcacatgttcggcggtcattcaggaaggctgcacgacgatcagcgcggacgagacgaccggcacgttcggcaagatcgacgcgaacgtgtcgcttctcgagcaactggtgctgacggccaccgacgtcatcatgatgcgttcggccaccaaggaaggcggcttgctggacggcgtgctgcgcgagctgctcggcgagccgatcgacatggcgacgggcgattacgccgactaccggacggacttcacgtggccgcacgtgctgccgctcacgctttcccgggcgtacgcggggcggcagccggtcgaggggctgctcggcgacaggtggatcagcaactggtcgcagcggctgcgctatcggcggcccgcggacggcccggccaccgtcacgtttttcgacgcggacggccagcagctcgtgtacccggttccgcacgagccgttcaacgcgatcaacttctgggcgccgcactacgcgttgcacggcagccgcgcgcgggccgtcgttttcgacgagcgctcgcagcaatcgctgattttcgagcccgcgcatgccgaggacgacgtcgcgcgcctcacccgcatcgaggatcgcaacggcaacacgatcgacttcgagtacaacgcgctcggccggctatgcaccgtgcggcacagcggcgggatgacgctgtgggtcacctgcgattcccgcgggttgttgcagagcgtgtcggagcagccgggcggggagggcgaactggttcgctatcgtttcgacggcaagcgcctgaccgacgttcacagccgcttccagggcgaatttcatttcggctataccgacgagggctggctgaatcactggcgcgacagcggcgcgacccaggtggcgctgcgctatgacgagcgcggacgggtgatcgccacgcgcacgaataccgcgctgtacgacgatcgcttcgagtatgacgacgaggcgcggctgacgacgtacatcgacgcgcttgggcatcggcatcaacgctggttcgatgcgcagaaccggttgattcggtcgcgggatccgctggggcgggtaatgtgcgcgagctacgacgaaaacggatggctcgcctcccgcacggatccgctcggccgtgtcagcacgtatcgccacgattgccgcggccgcccgcttcaggtcaccgacgctttcgggcgggtgagccgctatgggtggaacggcgccggccaactcgtcgaacagcaggatcacaacggcaaggtgcagtggcactacagcgccgagggcaatctggtcgcgttgcgggcgcgatccggcgagacgcgctttcgctatgacgcgcgcgggctgctcgtcggccgaaccgatccggacggtgccgtgcatgcgtggcggtatgacggcgccgggcgccccgagcgctggaccgatccgctggggcggcatacctatctcgagcatgaccgttacggcagattgatcgcgcgcatcgatgccgcgggccatcgcacgacgtacggctatgagcgagggccgtccaacccgcgcgagcagctcgcgagcatcacctatccggacggcgcgattgcgcgcttccagtacgattcggaaggcttgctgacggaagcggtcaatccgttgggccagcgcactcgctatgcgtggggcgcgttcgatctgctagcgagcgtgacggaccccggacaggcgacgacgcgctatcaccgcgacggcgcggctcgcctgatcggcgtgaccaatgcggcggggcagcactggaagttcgagcgggacccggcgggccaactgatcgcgcaaaccgactggagtggccgccgcacgcggtatgtcctcaatccgatgggacaggtaacggaaaagcatctgcccgacggcgtggcgatacgttacgaatacgacagccaggaccggctcgttgcattgaccggaccgcgtcggcgtcacgtgtttgcctggacggcgagcgggttgctgactcgggcggaggtctggacgcgaaacgacgaagcgggcgaatggcggcgcgacgaccggctggacctggagtacgacgacgcctgtcggcttgtcgaggaaagtcagcatggccgggccgtaggctacgaatacgatccgatggggcgcacgcggtcgatggctacgccgagcgggcgcacgctttggcagtacgatgcggcaggccagctcggctcgatggaaagtaacggccaccggttccatttcgattacgacgggctcggcctggaaacgcttcggcgctacacgccgacgcaggcgcacgtggcgcggcacccgcagtgggtcgagccgtattccgaaggctatgcgcaacagcaagatcacgacggacggtggcgattgacgaagcaagcctgcgcaacctgggcggagcttcgcgagcgcggcgcggcgcgtacgcgccattacgagtgggacgccgcggggcgctgcgtcgggatgcacgaggcgcgccgagggctgccgatcgcgcaggaccgctggcgctacgatgcccgcggccaagtcgtggatgcgcattacgagcgcactgaaacgcgcagcgggcgcgagcgctacgagtacgatgcgctcgggaacgtctcgacacggcagatcgacgcgggcgaggcgatgacgcacgtctatcacggcgaccaattggtcagcgccgggccgagtcgttacgaatacgacgcgcgcgggaggatgatcgcgcgaacggaaaggcgcgacggcttccggccgcggacgtggcgttatcagtgggacgacttcgatcagctcgagcaagtcctgaccccggagggcgagcgctggcggtatcggtacgatgcgttcgggcggcgcatcagcaaggcgtgcctgtcgacgccgaaagccggccggccggcgcggatcgactatttgtggtgcggcagccggctgatagaggcatggcgcgcgtacggcgaacgagacggcacgcaatacgaaatccagcgctggcactatcgaccgggcacccattcggttttggcgcaggagcgactgaaatacgacgacaagccggatctgcagaacagcgagtggtttgcgctcgcttgcgatcccaatggcgctccgcatacgctgtacagttcggacggcaggatcatgtggagtgcgcggcgcgaactctggggccgcgtggcggacgatccggaccgcgataccgtccggcatgcggtgcgcgagcagttgcgaaccagcctgctgacaggcgatgcattcgatcctccggactgcgaactgcgatttccggggcaatgggcggacgaggaaagcggcttacattacaacttccaccggtattacgatcctgcgaccgggcagtatctgagtcccgatccgttgggtctcgccggcgggctgagaacgcatgcgtatgttcacgatccgctgcagtgggtggacccgctggggctgcaggga

SEQ ID NO: 14403 - DNA, 1767 bp, Burkholderia mallei
atgagtctcatcgaagtcaaggttccggatatcggcgatttcagcggcgtcgatgtcatcgaggtcaacgtcaaacccggcgacgtgatcgaaaaagagcaaacgctcatcacgctcgaatccgataaagcctccatggaagtgcccagcgacgtcgccggcaccgtgaaggaaatcaagatcaaggccggcgacaaagtctcgcaaggcaccgtcatcgccatcgtcgaagcatcggcaggcgccgccgcacccgcacccgcgaaagcccccgaagcaccgaagcccgcagcagctgcaccggctccggccgccgccccggcacccgcgccgcaagccggcagctccagcggctccgccgacatcgagtgcgacatgctcgtgctcggcgccggccccggcggctactcggccgcgttccgcgccgccgacctcggcatgaagacggtgctggtcgaacgctactcgacgctcggcggcgtgtgcctgaacgtcggctgcattccgtcaaaggcattgctgcacacggcgctcgtcgtcgaggaagcgcaggcgctcgcgtcgcacggcatcacgttcggcaagccgcaggtcgagctcgacaagctgcgcgatttcaagggcggcgtcgtcaagaagctgacgacgggcctcgccggcatggcgaaggcgcgcaaggtcgaagtggtcacgggcgtcggcgcgttcgtcgatccgtatcacatggaagtgcagggcgaaaacggcaagaagatcgtcaagttcaagcaggcgatcatcgccgccggctcgcaggcggtgaagctgccgttcatgccggaagacccgcgcgtcgtcgattcgacgggcgcgctcgaactgcgtcagttgcccaagcgcatgctcgtgatcggcggcggcatcatcggcctcgaaatggcgacggtgtactccacgctcggtgccgagatcgacgtcgtcgaaatgatggacggcctgatgatgggcgcggaccgcgatctcgtgaaggtctgggaaaagtacaacgcgaagcgcttcggcaacgtgatgctcaagaccaagacggtcggcgcgcaagcgaaggaagacggcatctacgtgacgttcgagggcgagaaggcgccggcgcaagcgcagcgctacgacctcgtgctcgtcgcggtgggccgcagcccgaacggcaagaagatcggcgccgacaaggcgggcgtggcggtcaccgaccgcggcttcatcgaggtcgacaagcagatgcgcacgaacgtgccgcacatcttcgcgatcggcgacatcgtcggccagccgatgctcgcgcacaaggccgtgcatgaaggccacgtcgcggccgaagccgcgcacggcgagaaggcatacttcgacgcgctgcagatcccgtcggtggcgtacaccgatccggaagtggcatgggccggcaagacggaagaccagtgcaaggccgaaggcatcaagtacggcaaggcggtgttcccgtgggccgcatcgggccgcgcgatcgcgaacggccgcgacgagggcttcacgaagctgctcttcgacgaggaaacccaccgcgtgatcggcggcggcatcgtcggcctgaacgcgggcgacctgatcagcgaagtgtgcctcgcggtcgagatgggcgcggacgcggaagacatcggcaagacgatccatccgcacccgacgctcggcgaatcgatcggcatggccgccgagctgtacgaaggcgtttgcacggatctgccgccgcagcgcaagaag

SEQ ID NO: 14404 - DNA, 1011 bp, Burkholderia mallei
atggatctggaccagattgtcgccgacgcgcagcagtcgttcgaaggggctgcggatatcaccacgctcgagaacgagaaggcgcggtttctcggtaagtcgggcgcgctgaccgagctgctgaagggcctcggcaagctcgatcccgagacgcgcaagacggaaggcgcgcgcatcaatgtcgcgaagcagcaggtcgaagccgcgctcaacgcgcgccgccaggcgcttgccgacgcgctcctgaaccagcgtctcgccgccgaggcgatcgacgtcacgctgcccggccgaggtgccggggcgggaagcctccatccggtgatgcgcacgtgggagcgtgtcgaacagatttttcgctcgatcggtttcgacgtggccgacggccccgagatcgaaaccgactggtacaacttcaccgcattgaacagcccggagaatcatccggcgcgctcgatgcaggatacgttctacgtcgacggcaaggacgcggacggccgcccgctgctgctgcgcacgcacacgagcccgatgcaggtccgctatgcgcgaatgaaccggccgcccatcaaggtgatcgcgccgggccgcacgtaccgcgtcgacagcgatgcgacgcactcgccgatgttcaaccaggtcgaaggcttgtggatcgacgagaacgtcagcttcgcggacctgaagggcgcttatacggatttcctgaagaaattcttcgagcgcgacgacattctcgtgcgcttccgtccgtcgtatttcccgttcaccgagccgtcggccgagatcgacatgatgttcgagcacggcaagaacgccggcaagtggctcgagatttccggttccggccaggtgcatccgaccgtgatccgcaacatggggctcgatcccgagcgctatatcggtttcgcgttcggcagcggcctcgagcggctgacgatgctgcgctacggcgtgcaggatctgcgcctgttcttcgagaacgatctgcgcttcctgcggcagttcgcg

SEQ ID NO: 14405 - DNA, 888 bp, Burkholderia mallei
atggtccgaagaataacgagtagcgcgtccgcgatcctgcgattggggctcgtcgcgggactttccggatgcagcgagctgcatgtgctcgatcccaaaggcgcggtgggcgccgcggagaaatcgctgatcgcgacctcgacgtgggcgatgctgatcgtcgtcgtgccggtgatccttctcacgctgctgttcgcatggcgctaccgcgcgtcgaaccgcaacgcgacctacgcgccgaaatgggcgcattccaccgcgatcgagatcgtgatctggacggtgccgtcgctgatcatcctgttcctcggcatcctcacgtggaagaccacgcacgcgctcgatccgtaccggccgctcgaatcggcggtgaagccgatcgacgtcgaagtcgtcgcgctcgactggaagtggctcttcgtctatccggatctcggcattgcttcggtaaaccaactggcggtgcccgtcggcacgccgatcaatttccggatcacgtccgattcggtgatgaactcgttcttcatcccgcagctcggcacgcaggtctatgcgatggccggcatgcagacgcgcctgcacctgatcgccgacgagccgggcgacttcgccggcatctccgcgaactacagcggccgcggcttctcggacatgaagttccgcacgctcgcgacctcgcgcgacgcgttcgacgcgtgggtcgcgaaggtgcgcgcgtcggccgaccggctcgacatgaccgcgtacggccagctcgcgcagccgagcgagaagcagccggtgcgctactactcgacggtcgatcctcggctcttcaataacatcatcgcgaagtacaacgatggccgcgtcctcgatctgacggacgccgcctgtcggacgaagggg

SEQ ID NO: 14406 - DNA, 1473 bp, Burkholderia mallei
atgagtcgcgaagtgttgatgttggtggatgcgctggcgcgcgagaagaacgtcgacaaggacgtcgtgctgggcgcgctcgaagcggccctcgcgtcggcttccaagaagctgttcgacgaaggcgccgagatccgcgtacatatcgatcgcgagagcggtgaacacgagacgttccgtcgctggctcgtcgtgcccgacgaggcgggcctccaagagccggatcgcgagatcctgctgttcgaggcgcgcgagcagaagcccgatgtcgaggtcggcgactatatcgaagaatcggtgccgtcgatcgagttcggccggatcggcgcgcaggccgcgaagcaggtgatcctgcagaaggtgcgcgacgcggagcgcgagcagatcctgaacgattacctcgagcgcggcgagaagatcatgacgggcacggtgaagcgcctcgacaagggcaacttcatcgtcgaatcgggccgtgtcgaggcgctgctgcgccgcgaccaactgattccgaaggaaaacctgcgcgtgggcgaccgcgtgcgcgcgtacatcgcgaaggtcgaccgcaccgcgcgcggcccgcagatcgagctgtcgcgcaccgcgcccgaattcctgatgaagctcttcgagatggaagtgccggaaatcgagcaggggcttctcgagatcaaggcggcggcccgcgatccgggcgtgcgcgcgaagatcggcgtcgtcgcgtacgacaagcggatcgatccgatcggcacgtgcgtcggtattcgcggctcgcgcgtgcaggccgtgcgcaacgagctcggtggcgaaaacatcgacatcgtgctatggtcggaggatcccgcccagttcgtgatcggcgcgctcgcgccggcggccgtccagtcgatcgtcgtcgatgaagaaaagcattcgatggacgtcgtcgtcgacgagaacgaactggctgtcgcgatcggccgcagcggccagaacgtgcgtcttgccagcgaactgaccggctggcagatcaacatcatgacgccggacgaatccgcccagaagcagaacgaagagcgcgacgcgctgcgcggcctgttcatggcgcgcctcgacgtcgacgaggaagtcgcggacatcctgatcgacgaaggcttcacgagcctcgaagagatcgcctacgtgccgctcaacgagatgctcgagatcgaggcattcgacgaggacaccgtgcacgaactgcgcaaccgctcgcgcgacgcgctgctcacgatggcgatcgcgaacgaggagaaggtcgagacggccgccctcgatctgaagagcctcgacggcgtcacgcccgaactgctcgcgaagctggccgagcagggcgtgcagacgcgcgacgatctcgcggagcttgccgtggacgagctggtcgacatgaccggcatggaagaggaagccgcgaaggcgctgatcatgaaagcacgcgaacactggttccag

SEQ ID NO: 14407 - DNA, 747 bp, Burkholderia mallei
atgacgcaccgtttcccctggctgcgcacggccgccgcgctgtgcgtggccggtgcggccctcctggccgcgccggcgcacgcgggcctcttcgatgacgacgaagcccgccgtgcggtgctcgatctgcgcagcaagtccgacagccaggcgagccagctcgccgcggcgcaacgcacgatcctcgatcagaccaaccgcctcgaccagttgaaccagcaggtcgcgacgctgcgcggcgagaacgaggacctgacgaaccgcctgacgacgctcgagcgccaacagaaggagtactacaccgatctcgatacgcgcctgaagaaattcgagccgcagaagacgacggtggacggcgtcgaaggcacggtgcagccgggtgaaacggacgcgttcaacgcggcgtcgcaacagttccgcaacggcaacttcaagggcgccgcggcttcgttccgcgcgttcatcgccaaatacccgcaaagcccctatcagccgaccgcgcaatactggctcggcaacgcgcagtacgcgctgcgcgactacaagggctcgacggcgacgtggcaaggcctcgtgaagaactatccgcagcacccgcgtgcggcggacgcgctgatcgcgatcggcaccaatcaactcgagcaaggccagaaggcggccgcgaagaagacgttcgagcaggtcgtgtcgcagttcccgggctcgaatgcggcggaaaccgcgcagagcaagctggacgcgatcaag

SEQ ID NO: 14408 - DNA, 1620 bp, Burkholderia mallei
atgacgctgaattcgctccccgtttggcccgcgctgcaagcgcactacgaagagatccgcgacgcgcatctgcgcgactggttcgcccccgccaacgaccgcgcgccgacgcgcgccgaacgcttcacgttcgaaggcggcggcctcgccgccgatttttcgaagaaccgcctcaccgacgcgacgctcgccctcctcgtgcggctcgcgcgcgaagcgggcgtcgaggcgcgccgcgacgcgatgttcgcgggcgaaaccgtgaatccgaccgaaggccgcgcggcgctgcacaccgcgctgcgcgcgaatgcgccggacgcgccgttccaggcgcaggtcgcggccgagcgcgcgaagatggcgcgctttgccgacgcggtgcgcagcggcgcatggacgggctacaccggcaagcggatccgccacgtcgtgaacatcggcatcggcggctcggacctcggaccgaagatggtcgtccacgcgctgcatcacgtcgcgacacccgacatcgcgacacacttcgtgtcgaacgtcgacggcgcggacctcgcgcgcgtgctcgagcggatcgatcccgaagagacgctcgcgatcatcgtgtcgaagaccttcacgacgctcgagacgatgacgaacgcgcgatcgctgcgcgactggttcgtcgcgaacggctgcccggaaggcgcgctcgcgaagcacttcgtcggcgtgtcggcgaatcccgccgaggtcgtcaagttcggcatcgccgaagcgaacgtgttcgagatgtgggattgggtcggcggtcgctattcgctgtggtcggcggtcggcctgtcgatcatgatcgcgatcgggcccgagcgcttcgacgaactgctcgccggcgcgcgcgacatggacgagcacttccgcaccgcgccgctcgagcgcaacctgccggtgctgcagggcctcgtcggcatctggtatcggaacttcttcggcgcgcagagctatctcgtcgcgccgtactcggaagcgctgcattatctgccgtcgtacctgcagcagctcgagatggagagcaacggcaagtccgcgcggatcgacggcgcgttcgtcgattacccgacatccgccgtcacgtggggcgagcccggcacgaacggccagcatgcgttcttccagatgctgcaccagggcccgacgctcgtgccgatcgatttcatcgcggtactcacgcccgagcatccgctcgcgagccatcatccgaagctgctcgcgaactgcttcgcgcaaagcgaggcgctgatgctcggccgcacgctcgacgaggcgcgcaagatcgccggtccggccaagcccgaactcgcgccgcatctgacgttccccggcaaccggccgacgacgacgctcctcgtcgacgcgctcacgccgcgcacgctcggcgcgctgattgcgctgtacgagcacaaggtgctcgtacaggcggccgtgtggaacatcaatccgttcgaccaatggggcgtcgagctcggcaagatcctgggcaaggtcgtcgaggcggacctgacggccgcgcaggtcgatccggcgaagcacgattcgtcgacgtcggcgctgatcgcgcgcgcgaggaaggcgctcggcgaa

SEQ ID NO: 14409 - DNA, 630 bp, Burkholderia mallei
atgagcgttcaagtgttgatcgcggacgaccatccgctcgtgctgctgggcgtgcgccacatgctggcgggcatgggcgacgtatcgatcgtcggcgaagcgcatgacccggcggggctgctcgcgctgctcgcggccacgccgtgcgacatcgtcatcaccgatttcgcgatgcccgagcagccggccgccgacggcctcgcgatgctcaccgcgatccgcgacggctatccctcggttcgcgtgatcgtgctgacgatgctcgacaatccggtgctgatgcacacgatgcgccaggcgggcgcgctcgcggtgctcagcaagcgcggcgacctcgacgagctgccgcgcgcgctcgccgccgtgtaccaggggcggccgttcgtcggcacgcacgcgggcgcggcgggcgggggagcgatgcgcgggaccgacgcgccgcggcaactgagcccgcgcgagatcgaggtggtgcggctatgcgcgaccgggatgacgatgaccgacatcgcgaaccgctatggccgcagcatcaagacggtcagcacgcacaagcacaacgcgatgggcaagctcgggctgaaatcggacgtcgatctgttcatgtacgcgacggagaacgggctggtc

SEQ ID NO: 14410 - DNA, 597 bp, Burkholderia mallei
atgacacgcaaaacccgtatccaaccgatcgagcaccccggcgaggacgccgaccacggctgcgatcgccccagcaagtcccagttgaagcgcgacatgcacgcgctgcaggaactgggcgccgccctcgtcgagctgccgaaggacgcgttcaagcgcatgccgatgccggaggatctcgccgacgcggtgcgcgaggcgcgccgcatcaccgatcacgaaggcaagcgccgccaactccagtacgtcgggcgcgtgatgcgctcgctcagcgccgacgagacggccgcgctgcgcgcggcgctcgacgcgcagcgcggcgtgaacaaggccgagacggcccgcctgcactggatcgagcgcacgcgcgagcaactgctcgcgaacgacgatgcgctgaccgcgttcgtgcgcgagcatccgtcggccgacgtgcaggaaggccgcacgctgatccgcaacgcacgcaaggaggcgcagcaaggcaagccgccgcgctacttccgcgagctgttccagtggatcaagacggcgagcggctcggcgagcgacgcgcccgacctttcagcggatgccgacgatgacgacgacgaagcg

SEQ ID NO: 14411 - DNA, 2046 bp, Burkholderia mallei
gtgcaggaacgcgttgcggcgcggcaggcacgcctcgaacgccgcgcggccggcctgcgtgagcttcacgttcgtcacgcggttgtcgcgcgcatcggcctcgcgctcgatccagccgagcgtctcgagcgtcttcaactggcgcgtgagcgcgcccggatcgacgcgcagcagctcgacgagccgcttctgcgacgacgcgccgccatgctgctcgagcgcgaccatgatgcgccagcgcggcagcggctggccgacgtgcgcctcgaatgcggacatgaacgcgcggtacgtgcgcccgaactgctgcaagatcgcgatgcggtcctgttcttccatgcgctggcttcggctccgatatgcgtgaatgaggggacgagacggcgctcactcggcgaggacggccggctcgagcttgcggcgcagctcgacgggcggcacgcagcggctttgccacaccgccgcgagcgcgacgaacgcgccgacgccgatgccgatatggatcgcgccgacgagcgattcgcgcgccgcttcgagcaaatgggcgccatgatgcccggcgcgcacgagttcgtccaccacgcgcgactgcgcggcgcggtcgatcagcacctgaggatcggcaaggcgtgcctgccagcgcaacgcgccgtccgcggcgagcgcgtcgcgcacgccgttcgcgtagagctgattgacgagcgtgccggtgagtgccgtgccgagcatgccgcccaccatgcgcagcgactgcagcagcgcggtcgcgatcccgagatgctcgcggcccgccgtctgctgcgcgaacacggtcaggttcggcagcacgaagccgaggcccacgccgcccgcgaccatcagcgccatcagcgcccagcccgacgtcgcatgcgtcgacgcgacgacgcccgcgcacgcgagcgcgaacagcaggaagccgacgtacagcatcgcgttcggacggcggatccgcgtgatcacgcggccgttcatgatgctgccgatcgtgatgaacacgacgagcggcgtgatgacgacgcccgcctgctgcggcgacatcccgaagccgccctggaacagcagcggcgcgtagaagagcagcgagaacatcgcgaagccggcgaggatcgcgaggatgaacagcgtggacagcgcgcggttcgagaacatgtcgaacggcaggatcggctgcgcgcagcgcttctcccagcgccacagcgcgacgccgcccgcgagcgcggcgacgagcagcagcgtcggccagccgccgattccgtatttcggcagccattcgacgaacagctgcatcgcgccgagcgtcacggcgatgaggagcgcgcccggccagtcgagccgcatcttccgcgtgtgctcgacgtgccgcatgtgcggcagatagcgccagacgaaaaagatcgacagcaggcccaccggcagattcacgtagaacaccgcgcgccagccgtaattctgcgtgagcacgccgccgagcgacgggccgaccgcgttcgcgatcccgaacgccgagctcatcagcacctgccagcgcagccgcacgaccgaatcggggaagagatccggaatgcacgcgaacgcggtgccgacgagcatcccgccgccgatcccctgcaagccgcgcgcgagcacgagcgacagcatgtcctgcgccatcgcgcacagcaccgacgcgcccgtgaacacgacgagcgacgcgatcacgaacggcttgcgcccgtagtaatcgccgagccgcccgaagatcggcacggtgatcaccgacgcgagcaggtacgacgtggcgacccacgcgtacagatcgaagccgcgcagctcggcgacgatcgtcggcagcgcggtgccgacgacggtctggtcgagcgcgacgagcatcgtgacgaaggagatgccgagcatcgcgagcagcgactcgcgaaacggaaggacttgcccgctcgaatggtgggcggcggtatggacagccatcttttgttcgtgcaacttttgatgcgtcaacgaatcgaaaattctatcatgcatcaggtaatc

SEQ ID NO: 14412 - DNA, 216 bp, Burkholderia mallei
atggccaaagacgatgtaatccagatgcagggtgaggtgatcgaaaaccttccgaatgcgaccttccgggtgaagctggaaaacggccatgtcgtattgggacatatctccggaaagatgcggatgcactacatccgtatctttcctggcgacaaggtgacggttgaattgacgccttacgatctgtctcgtgcgcggatcgtgttccgggcgaag

SEQ ID NO: 14413 - DNA, 1305 bp, Burkholderia mallei
atgtcgcgtcaacaacaggctcaggaactgcaaaagcaatgggaaaccgatccgcgctggaagggcatcaagcgcgcgttcaccgctgaggacgtcgtgcgcctgcgcggctcgatccagcaagagcacacgctcgcgaagcgcggcgcggaaaagctctggacgctcatcaacaacgagccgttcgtcaacgcactcggcgcgctgacgggcaaccaggcgatgcagcaggtcaaggccggcctcaaggcgatctatctgtcgggctggcaagtcgcgggcgacgcgaacgtcgcgggcgaaatgtatccggaccagtcgctgtacccggcgaactcggtgccgctcgtcgtcaagcgcatcaacaacacgctcacgcgcgccgatcagatccagtggtcggaaggcaagaaccccggcgacgaaggctatgtcgacttcttcgcgccgatcgtcgccgacgcggaagccggcttcggcggcgtgctgaacgcgttcgaactgatgaaggcgatgatcgaggcgggcgcgtcgggcgttcacttcgaagaccagctcgcctcggtcaagaagtgcggccacatgggcggcaaggtgctcgtgccgacccgcgaggcggtcgcgaagctgacggccgcgcgtctcgccgccgacgtgatgggcacgccgaccgtgctggtcgcgcgcaccgacgccgaagcggccgacctgatcacgtccgacatcgacgacaacgacaagccgtacctgacgggcgagcgcacggtcgaaggcttcttccgcacgaagccgggcctcgagcaggcgatctcgcgcggcctcgcctatgcgccgtacgccgacctgatctggtgcgaaaccggcaagccggatctcgaatacgcgaagaagttcgcggaagcgatccacaagcagttcccgggcaagctgctgtcgtacaactgctcgccgtcgttcaactggaagaagaacctcgacgacgcgacgatcgcgaagttccagaaggaactcggcgcgatgggctacaagttccagttcatcacgctcgccggcttccatgcgctgaactactcgatgttcaacctcgcgcacggctacgcccgcacgcagatgagcgcgttcgtcgaactgcagcaagccgagttcgcggcggccgacaagggcttcaccgcggtcaagcaccagcgtgaagtcggcaccggctacttcgacgcggtgacgcagacggtcgagcgcgaagcgtcgacgaccgcgctgcacggctcgaccgaagacgaacagttcttcgacggccagaaagtcgcc

SEQ ID NO: 14414 - DNA, 543 bp, Burkholderia mallei
atgcgcgcgaaagcgccccccgccagcccgtcgcgaaagcaggccgctcatgccggcgcggcgcgccccgctcacgtgcgcctcgcgccgtctgaaacacacgagcccgccgagccgcacgagccgctcggcccggacgatccgctcgcgctgccgcacaacccgtacaagggcaatcgcggcctgatgcgcgcgtggtacgcgctgaagaattcgtacaacggctttcgcgtcgcgatccgcgaagagagcgcattccggcaggagctcacgctcgcggcgatcatgctgccgatcgccgtgttcgtgcccgtcgagccggcgtcgcgcgcgctgctgatcggcaccgtgctgctcgtgctgatcgtcgagctgctgaactcgagcgtcgagacggcgatcgaccggatctcgctcgagcgccacgagctgtccaagcgcgcgaaggatctcggcagcgcggccgtcacggtcgcgctctgcacgtgcttgagcacctggggcctcatactcggccccctcgtctggcgccggctcgccggc

SEQ ID NO: 14415 - DNA, 411 bp, Burkholderia mallei
atggacttgtataacggcgaaatcatcgcctggcacagtgctacccgagcgagcttcgatttgatcagcagcatgctcaagaaggccttctcaaggctgacgcgcggtgaacgtccgttgctgcattcggatcagggctggcagtaccaaatgccagcctatcgtcgcttgctggatcagcgcgccgttcaacagagcatgtcacgcaaaggcaactgcctggacaatgccgccatggagagcttctttggtaccctcaaggcggagtttttccacctcaacgagttcgacagcgtcgaacaattgcaggccggaatccggcagtacatccgttactacaaccacgaacgcatccggctgaagttgaaagcgctgagtcctgttcaatacagaacccagcccctgctggcc

SEQ ID NO: 14416 - DNA, 600 bp, Burkholderia mallei
aggctgggggtgagcgaggcggaccacgaggcgtacttcagggcgaagctgggggacatcgatgagccgacggcgccgttcggtctgctgagcgttcagggagacgggcgtgagatagcggaggcggcgcggacgttgaagccggagctgtcgggggcgcttcgcggacatgcgcgccggctgggggtgagcgcggcgagcatgatgcatgtggcgtgggggctggtgctgtcgcgcacgacggggcggcaggacgtggtgttcggcacggtgctgttcgggcggatgcagggaggcgcgcaatcggatcgagcgctgggcttgttcatcaacacgttgccggtgcggatgagggtagcgcagacgggcgtggaggcgagcgtgaagggggcgcatgcgcagctggcggaattgatgcgtcacgagcatgcgccgctggtgctggcgcagcgttgcagcggggtgccggcgcagacgccgttgttcacgtcgctgctgaactatcggtacagcaagccgaaggtcgcggccgcgcatattgccgacggcatcgaattgctcgactgacctgccccctacaaacagggccagccggagtct

SEQ ID NO: 14417 - DNA, 1656 bp, Burkholderia mallei
atggcaacggttggcggacaaattgcgcacgcgccgatgacgggcgacgaaaagcgcgtgatcttcgcatcgtcgctcggcaccgtgttcgagtggtacgacttctatctggccggctcgctcgcggcctacatcagcaagagcttcttttcaggcgtcaacccgaccgccgtgttcatcttcacgctgctcggcttcgcggcgggcttcgccgtccgaccgttcggcgcgatcgtgttcggccgcctcggcgacctcgtgggacgcaagcatacgttcctcatcacgatcgtgatcatggggatctcgacgttcgtcgtcggcttcctgccgggctacgcgtcgatcggcatcgccgcgcccgtgatcttcatcgcgatgcggctgctgcaaggcctcgcgctcggcggcgaatacggcggcgcggcgacatatgtggccgagcatgcaccctcgcaccgccgcggcttctatacgtcgtggatccagacgaccgcgacgctcggcctgttcctgtcgctcctcgtgattctcggcgtgcgcaccgcgatcggcgaggaagcattcggcagttggggctggcgcgtgccgttcgtcgcgtcgatcctgctgctcgccgtatccgtgtggatccgcctgcaactgaacgaatcgccggtgttcctgcggatcaaggccgagggcaagacgtcgaaggcgccgctcaccgaagcgttcggccagtggaagaacctgaagatcgtgatcctcgcgctcatcgggctgacggcgggccaggcggtggtctggtacacgggccagttctatgcgctcttcttcctcacgcagacgctgaaggtcgacggcgcgagcgcgaacatcctgatcgcgctcgcccttctgatcggcacgccgttcttcgtgttcttcggctcgctgtccgacaggatcggccgcaagccgatcatcctcgccggctgcctgatcgccgcgctcacctacttcccgctcttcaaggcgctcacgcacttcgcgaatccggcgctcgaggcggcgacgcaaaaggcgccgatcacggtggtcgccaatcccgacgaatgctcgttccagttcaacccggtgggcacggcgaagttcacgtcgtcctgcgacatcgcgaaaagcgcgctcgcgaaatcgggcctcaattacgagaacgtcgccgcgccggcgggcacgcttgcgcagatcaagatcggcgacacggcgatcgccacgtacgacggcaaggccgccgacgcaaaagaccaggcgaaggcgttcgacaagacgctcgcgtcgacgctgaaggcggcgggctacccggcgaaagccgacccggcccggctcaactggccgatgacgacggtgatcctcgcgatactcgtgatctacgtgacgatggtgtacgggccgatcgcggcgatgctggtcgagatgttcccgacgcggattcgctatacgtcgatgtcgctgccgtatcacatcggcaacggctggttcggcggcttcctgccggcgacggcgttcgcgatcgtcgcggcgaagggcgacatctattcggggctctggtatccgatcggcgtcgcgctcgtcacgttcgtgatcggactgctgttcgtgaaggaaaccaaggattcgaatatctacgcgcaggat

SEQ ID NO: 14418 - DNA, 885 bp, Burkholderia mallei
atgacttccctcctcgatctcgcgcaggcgcagcactatccggcaggcgccctctacatcgtcgcgacgccgatcggcaacgccgccgacatcacactgcgcgcgctgcacgtgctcacgctcgccgatcgcatcgccgccgaggacacccgcaacacgggccaactgctcgtgcgctacggaatctcgaagccgctcgtcgccgtgcacgagcacaacgaacgcgcggccgccgcgaagctgatcgatcacctgggcgcgggcgagcggatcgcctatgtgtcggacgccggcacacccggcatttccgatccgggcgcaaaactcgtcgacgccgtgcgcgccgccggcttcggcgtgatcccgctgccgggcgcgaacgcggccgcggcggcggtcagcgtcgcgggcgactgggcgggcgccttcacgttcgcgggtttcctgccgccgaagccgaagcagcgcgacgccgcgctccagccgctgaagacgcatccgtacgcgctcgtgttctacgaggcgccgcaccggatcgtcgagacggtcgaagcgctcgcggcggcgctcggcggcgaacgccggctgttgatcgcgcgcgagctcaccaagctacacgaggagttgttcgagggcacgctggctgatgggccaacgtggctgcgcgcggacgcgaaccggcagcgcggcgaattcgtgctcgtcgtcgagggcgcgccgcagggcgcgcaggacgaagacgaacgcgcgcacgacgcgctgctcgagctactgctcgacgaagtgccggtgaaaagcgcggcgaagctcgcggcggcgctaacgggggcgccgcgcaacgcgctctacgcgcgcgcactcgcgctgaagaaagaggaagaagag

SEQ ID NO: 14419 - DNA, 4308 bp, Burkholderia mallei
gtggctcgtcaaaccctcggccgacgcgcgcgcggcggccgcgaaacaggccgacgcggcgatccccgtcacggcggccatcgtcggcacgatgaacctgcccgtctatctaaccggcgtcggcgccgtcacgccgcagtacgacgtgaccgtgagaagccaggtcgacggccagatcacccatgtgcggttccacgaaggccagcaggtgcgcgcgggcgacgtgctcgtcgagatcgatcgccgcgcgctccaggcgaccgccgaccaggcgacagcgaagctcgagcaggacaaggcgacgctcgccaacgcccggctcgagctcgcgcgccatcagcggctcgccgaaatgaacgcggcgccggtgcagatgctggatacatggaaagcgcgcgtcaacgagctgcatgcgcagatccgcggcgatcaggccgccgtgcagaacgcccgcgtggccgtcgattacacgacgatccgcgcgcccatctcggggcgcatcggctttcggctcgtcgaccagggcaacctcgtgaaggccaacgatacggcgctgctcacgctcgtcacgacttcgccgatcaccgcgatctattccgaatcgcaggatgcactgccggcgatccaggcggcgctgcggcgcggcgaggtcgaggccgtcgcgatgagcacggacggcgagacgacgctctcgcatgggcgcctgcgcacgatcgagaaccgcgtcgatccgaccagcggcgtggtccggatgaaagcggtgttcgagaatgccgacggcgcgctgtggcccgggcagtcggtgatgatccgcaccgtcgtcgacgtgctgcgcaacgcgacggcggtgccggaggacgcgatccagatcgggccggacggcagcttcgtctatgtgatcggcgccggcgacaaggtcgcgatgcggcccgtcgaggtgtcgcatcgggtgctcggctacgcggccgtcaagcacggcctgcaagccggcgagcgcgtcgtcgtgcagggccagtaccggttgcaggacggcgcgcgcgtcgccgcgacgatgatgccggcgcacgacgcgcccgacgccgccgccgccggcgcgcggaacgctcgcgcgccggcggcgggccgcgaagcgcccgccgtgcccgcgacgaacgcgcgccgatcatgagccggaacctgttcgcggtgttcatccgctacccggtcgccacctgcctgatgacggcgggcatcctgttcgcgggcgtggccgcgtattttcatctgcccgtcgcgccgctgccgcaggtcgagttcccgaccatccaggtttcggccgttctgccgggcgccgatcctgtatcggtcgcctcgacgctcgcgcagccgctcgagacgcagttctcgaagattccgtacgtcacgcagatgacgtcgcaaagcacgctcagctcgacgtcgatcgtgctgcagttcagtctcgagcgcagcatcgacgcggccgccaacgacgtgcagtccgcgatcgacgcggcggccgcgcaattgccggcggatctcccctcgccgccgacgttccagaaggtcaacccggccgactcgccgatcatgctgctgagcgcgatatcgtcgacgctgccgctcacgacgatcgacgactatgtcgagacgcgactcacgaaaagcctgagccagatcgacggcgtcggcagcgtgtcgatcggcggccagcagaagccgtcgatccgcatccagctcgatccggtcaagctcgcgtcgcgcgggctgtcgtccgaggacgtgcgccgcgcactgtcggggctgtcgggcgtgaatccgaaaggcgtgttcaacggcacgacgcgctcgtacacgatctacacgaacgggcagctgaccgagccggcgcagtggaacgacgcgatcgtcgcgtaccgggacggcacgccggtgcgcatccgcgacatcgggcaagcggtgctcggccccgaggacaacacgctcgccgcatggatcgacggccggcgcgcgatctcggtcggcatctacaagaagcccggcgcgaacaccgtctcgaccgtcgacaagatccgtgccaggctgcccgaactcgaggcgtcgctgccgccgtcgctgaagatcgccgtgctggccgaccgcacgcagacgatccgcgcatcgctgctcgacatcgagctcacgctgctgctgaacgtcgtgctcgtcgtcgtcgtgatctacgcatttctcggcagcgtgcgcacgacgatcatcccggccgtcacggtgcccgtgtcgctgttcggcgcgtgcgcgctgatgtgggtgtgcgggtacagcctcgacaacatctcgctgatggcgatgacgatcgcggtcggcttcgtcgtcgacgacgcgatcgtgatggtcgagaacatcgcgcgccacgtcgaggccggcgagctgccgctgcaggccgcgctcaaggggctgagcgaaacgagcttcacgatcgcgtcgatcagcctctcgctcgtcgcggtgctgctgccgctgctgctgatgagcggcatcatcggccgcatgttccgcgagttcgccgtcacgctgtcgatgacgatcatcgtgtccgcgttcgtctcgctgacgctcacgccgatgatggcgtcgtacctgctgcgcgcgcatcgccacgacgcagggcgcccgccgcggcccggcctcttcgagcgcgcgttcgcgcgaacggcggccgcgtacgagcgcgcgctcgacgtcgcgctgcggcaccgtttcgtcacgctgtgcgcgttcctcgcgtcggtcgcggcctcggtgtttctctacgtcgggattccgaaaggctttttcccgcagcaggacacgggcgtgatcaccggcatttcggaggccgcgcagaccatttcggtcgaggacatggcgcgccactcgatggcgctcgcggcgatcatccgcgccgaccccgccgtcgagcattgtcagatggcggtcggcggcagcgcgtatgcgggcacgaccgtgaacaacggccgctggtacatcacgctgaagccgcgcgatcagcgcgacgccaccgccgacgaggtgatccgccggctgcggccgcagttcgcgaaagtgcccggcgtgcgcatgtacctgcaggccgcgcaggacgtgatcatcggcgcgcgcctcgcgcgcacccaataccagctgacgctgcaaagcgccgatgtcggcgcgctgacgacgtgggcgccgcgcctgctcgcgcggctgtccgggctgccgcagttgcgcgatgtcgcgagcgaccagcaggtgaacggctcggcgctcagcgtcgcgatcgaccgcgatcaggccgcgcgttacggcctcacgcccgaggcgatcgacggcacgctgtacgacgcgttcggctcgcgccaggtcgcgcaatactttacgcagttgtcgacctacaaggtcatcatggaaacgctgccgtccctgcagcgcgacccgggcacgctcgacaggatctacatgaaagcgccgtcgggcgcgctggtgccgctgtcgtcggtcgcgcgctggacgaccgacacggtgcagccgctgtcggtcaatcaccagtcgcatttcccgtcggtcacgatcagcttcaacctcgcgccgggcgtctcgctcggcgaggcgacggccgcgatcgaggccgcgcgggcctcgctgcgcatgccgcccgccgtcgtcggctcgttccagggcaccgctcaggcgttccagagcacgctcgcgacgatgccgatgctgatcctgtccgcgctgatcgtcgcgtacctggtgctcggcgcgctgcacggcagcttcatccatccgtggacgatcctgtcgacgctcccgtcggccggtgtcggcgcgatcgcgacgctgtggctgttcaagtacgacttcaacctgatcgcgctgatcggcgtgattctcctcatcggcatcgtcaagaagaacggaatcatgatggtcgacttcgcgatcgccgcgacgcgcgagcggaacatgacatcgctcgacgcgatccgcagcgcgtgcctgctgcgcttgcggccgatcatgatgacgacgatgaccgcgctgttcggcgcgctgccgctcatgttcacgcccggcatgggatcggagctgcggcagccgctcggctacgcgatggtgggcggactgctggtgagccaggtgctcacgctgtttacgacgcccgtcatctatctgtatctcgatacgctgtcgaaccgtctgaaggcgcgcttgcgtccgctcggcgccgacatgccgtcgaacgcgcacgtggagggcccgacccaggac

SEQ ID NO: 14420 - DNA, 1752 bp, Burkholderia mallei
atgcaaaaactgttcaataaatcggccatcgcaatcggcatttccacccttctcgttctgtccggctgcggctcggtcgacggcccgtcgctgtcggccagcggcgtcaagcccgccaccgtcggcaatacggggacttcggggacgtccggcacttccggtacgtcgggtacttccggcacgtccggcacctccggtacgtcaggtacttccggcacgtccggtacgtccggcacctccggtacgtctggcacgtccggtacgtctggcacctccggcacctccggcacgtcgggtacttccggtacgtctggcacctccggcacgtctggcacctccggtacgtccggtacgtccggcacctccggcacgtctggcacctccggtacgtccggcacgtctggcacgtctggcacgtctggcacgtccggcacgtctggcacgtctggcacgtctggcacgtccggtacgtctggcacctccggcacgtcgggtacttccggcacgtcgggcacctccggtacgtcgggtacttccggtacgtccggcacctccggcacctccggcacctccggcacctccggtacgtcgggtacctccggcacgtcaggcacttccggtacgtcgggcacgtccggcaccgcctcctccccgctcggcaacatcctcgcgcaaaccggcaacctgatcaccgcgacgggcaccgtcgtctccgccaccggcaaccaaatctccggcacgtcggtgccgggcgtgaacggcgcgacgacgacgaacctcggcaacgccgtcagctcgctcggcaacggcgtccagacgctcggcaacggcacagccgccggcctcggcacgctcggcacgtcgacgaatccgctcggcccgacgctcacgtcgacctccggcgtcgtctcgaacgtcggcaacgcggtctcgtcgctcggcggcgtcgtgacgagcatcggcaccggcccgctcgcgcccgtcacgtcgccgctcggcggcgcggtcggcacgctcggcagcaccgtcacgcaagtcggctccggcctgaacaacgtgctcacgagcgcgcccgtccagcagctcgaaaccggcgtcagctcgatcatcaatccgatctcgaacgtcgtttccggcacgacgcagacgatcggcaccgccaccgggctcggcgcacccgtcaataatctgctgaccaccgtcggcaatgggctgaacgcggccggcgcgaaggtatcgggctcgacgaacaaccaggtggtgcaggcggtcggcggcgtcgtcagccagctcggcaacacggtcacgagcgtcggcggtctgctgacgggcggcaccaccaacccgctcgcaccgatcaccggcatcgccggttcgctgagcggcacgctcggcgccaacgcgggcctgaacgcaggcgcgacgcaacccggcacgacgacgaacccgctcgcccccgtcaccggcctgctcggcggcctgtcgggttcggcgggcggcaacgcggcggccggcctcaccgccgtgctcgcgcccatcacgaatgtcgtcggctcgctgaccgccggcgtgaacggcaccgtcgccgccccgtcgcccgccccgaccaccggctcgacgacgaccgcgcccgccacgggtgtggtcggcagcctgacgggcggcacgaccgcgagcggcacgtcgacgacgaacctgctcgcgcccgtgaccaacctgatcggcgggctgctcggcggcgtgtcgggcaag

SEQ ID NO: 14421 - DNA, 1119 bp, Burkholderia mallei
atgaacgtaggtctcgtaggttggcgcggcatggtcggcagcgtgctgatgcagcgcatgcaggaagaaggcgatttcgatctgatcgagccggtgtttttcagcaccagcaacgcgggcggcaaggcgccgtcgttcgcgaaaaacgagaccacgctcaaggatgcgacgagcatcgacgacctgaagaagtgcgacgcgatcatcacgtgccagggcggcgattacacgagcgacgtgttcccgaagctgcgcgcggccggctggaacggctactggatcgatgcggcgtcgtcgctgcggatgaaggacgacgcggtgatcattctcgatcccgtgaacctgaacgtgatcaaggacgcgctcgtcaacggcacgaagaacttcatcggcggcaactgcacggtcagcctgatgctgatggcgctgggcggcctgttccgcgagaacctcgtcgactggatgacggcgatgacctaccaggccgcgtcgggcgcgggcgcgcagaacatgcgcgagctgctcgcgcagatgggcgcgctcaacggcgcggtggcggcgcagctcgccgatccggcctcggcgatcctcgatatcgaccgccgcgtgctcgccgcgatgaacggcgacgcgatgccgacgagccagttcggcgtgccgctcgccggctcgctgattccgtggatcgacaaggatctcggcaacggcatgtcgaaggaagagtggaagggcggcgcggaaaccaacaagatcctcggcaagccggcgatgggcgagccgggctcgattccggtcgacggcctgtgcgtgcggatcggcgcgatgcgctgccactcgcaggcgctcacgatcaagctgaagaaggacgtgccgctcgacgagatcaacggcatgctcgcatcggcgaacgactgggtgaaggtcgtgccgaacgagcgcgaggcgtcgatgcgcgatctgtcgccggcgaaggtgacgggcacgctgtcggtgccggtcggccgcctgcgcaagctcgcgatgggtggcgaatacctgtcggcatttaccgtcggcgatcaattgctgtggggcgcggccgagccgctgcgccggatgctgcgcattctgctcgacaag

SEQ ID NO: 14422 - DNA, 855 bp, Burkholderia mallei
atgaacacgacgaaaccctcgcccgccaccgccgccgagctgctgcgcgcgtcgccgctcgatgcgctcgacgcgcgcatcctgctcgcgcacgcgctcggctggagccgcacgcagttgatcacgcgcgccgacgaaccgctcgacgcggccgcgcgcgcgcgctatctggcgcttcaggcgcgccgcgcggcgggcgagcccatcgcgcagctcaccggcgcgcgcgagttcttcggtctcaaattcgacatcacgccggacgtgctgatcccgcgcccggagacggagctgctcgtcgagacggcgctcgacgcgatcgacggcatcgcatcgccatgcgtgctcgatctcggcacgggcagcggcgcgatcgcggtgtcgatcgcatccgagcggcccgacgcgcgcgtgtgggcgctcgagcgctcggtcgccgcgctcgatgtcgcgcgccgcaacgcgcgcaagctgctcgatccggcgcgcgcgggcggcccgctgcggtttctcgaaagcgactggtacgcggcgctcgatccgggcctgcgctttcacgtcgtcgtcagcaacccgccgtacatcgcgcggcacgatccgcacctcgccgaaggcgacctgcgcttcgagccgcgcggcgcgctcaccgacgagaacgacgggcttgccgcgatccgcacgatcgttgcgggcgcgcatgcgttcgtcgcgcccggcggcgcgctgtggctcgaacacggttacgatcaggcggccgcggtgcgcgcgctcctcgacgcggcaggcttcgccgacgtcgaatcgcgcgcggatctcgcgtcgatcgagcgcgcgagcggcgggcgcctgcccggc

SEQ ID NO: 14423 - DNA, 973 bp, Burkholderia mallei
tcggtgaagaacgcggccgtgaacgtgccgtacggcggcgcgaagggcggtatccgcgtcgatccgcgcaagctctcgcgcggcgagctcgagcgcgtgacgcgccgctacacgagcgaaatcggcatcatcatcggcccgaacaccgatatccccgcgcctgacgtcaacacgaacgagcagatcatggcgtggatgatggacacgtactcgatgaaccagggccagacggccacgggcgtcgtgaccggcaagccgatctcgctcggtggctcgctcggccgcaaggaagcgacgggccgcggcgtgttcgtcgtcggctgcgaggcggcgaagaagaaggggctcgagatcgaaggcgcgcgcatcgcggtccagggcttcggcaatgtcggcgggatcgccgcgaagctgttccaggaagcgggcgcgaaggtgatcgcggtgcaggatcacacgggcacgattcaccagccggcgggcgtcgatacggtcaagctgctcgagcacgtcggccgcacgggcggcgtcgcgggcttcgaaggcgcggaaccgatgccgaacgacgagttctggaccgtcgaaaccgatatcctgattccggccgcgctggaaaaccagatcaccgagaagaacgcgtcgaagatccgcacgaagatcatcgtcgagggcgcgaacggcccgacgacgacggccgcggacgatatcctgagcgcgaacggcgtgctcgtgatccccgacgtgatcgcgaacgcgggcggcgtgaccgtgtcgtatttcgaatgggtgcaggatttctcgagcttcttctggacggaggacgagatcaatcaccgtctcgagcgcgtgatgcgcgaggcgttcgccggcgtatgggcggtggccgaagagcacaacgtgtcggtgcgcacggcggcgttcatcgtcgcgtgcaagcgcatcctgatggcgcgcgaaatgcgcggtctgtacc

SEQ ID NO: 14424 - DNA, 636 bp, Burkholderia mallei
atgagtgcaatcgtagacatcatcggccgcgaaatccttgattcgcgcggcaaccccaccgtcgagtgcgacgtgctgctcgaatcgggcacgatgggccgcgcagctgtgccgtcgggcgcgtccacgggctcgcgtgaggcgatcgagctgcgtgacggcgaagccggccgctacggcggcaagggcgtgctgaaggcggtcgagcacatcaacaccgagatctccgaagcgatcatgggcctcgatgcgtccgagcaggcgttcctcgacaagacgctgctcgagctcgacggcaccgacaacaagtcgcgcctcggcgcgaacgcgatgctcgccgtgtcgatggcggtcgcgaaggccgccgccgaggaagccggcctgccgctgtaccgctacttcggcggctcgggcgcgatgcaattgccggtgccgatgatgaacatcgtcaacggcggcgcgcacgcgaacaacagcctcgacatccaggaattcatgatcgttccggtcagccagccgacgttccgcgaagcgctgcgttgcggcgcggaagtgttccatgcgctgaagaagatcctcggcgaccgcggcatgagcacggcggtcggcgacgaaggcggcttcgcgccgaacttc

SEQ ID NO: 14425 - DNA, 975 bp, Burkholderia mallei
ctcgtcgatcgcttcggccgcgctgtcacgtatgtgcgtctgtcggtgacggaccggtgcgacttccgttgcgtgtaccgcatggcgcaggacatgcgattcccgccgcgctcggacgtgctgacgctcgacgcgctcgccgctctcgcgcgggcgtgcgtcgcgctcggcgtgcgccggatccggctcacgggcggcgagccgctcgtgcgccccggcttgacgacgctcgtcgagcgcatcgcgcgcctgcccgggctcgacgaactcgccctgacgaccaacggggcgcgcctcgcgcagttcgccgcgccgttgaaggcggcgggcctcgctcgcgtcaacgtcagcctggacagcctgcgcgaggaccgtttcggcgcgttgacgcgcacgggccgcctgcgcgacgtgccggccggcatcgccgcggcgaagcgcgccgggtttcggcgcatcaggctgaactgcgtgatcctgcgcggccgcaacgacgacgaagtgctggatctcgtgcgtttcgcgcgcgcgcagcggctcgatctggcgttcatcgaggaaatgccgcttggcgcgatcgatgagcacgaccgcgcttcgtgcttcgtgtcgagcgacgaggtactcgcgcggattcgcggccgttacgcgcttttcccgagcgacgtttcgacgggcggccccgcgcgttatttccgcatggcggacagcgagattcgcatcggcgtgatcgcgccgcacagccacaacttctgcggcgactgcaaccgggtgcgcgtcacggcgagcggccgcctgctgcagtgtctcggcaacgagcacggcgccgagctgcgcgacgtgctgcgcacgagccccggcgacgatgcgcggctgcgcggcgcgatcgccgccgcgatgccgctcaagcccgagcggcatcggttcgatctggacgcgccgcacatcgtgcgcttcatgaacatgacgggagga

SEQ ID NO: 14426 - DNA, 465 bp, Burkholderia mallei
atgagcactgaaaaaatcaacttcgacattcacaagatcctcacgctgctgccgcaccgctatccgattctgctcgtcgatcgcgtgctcgaactcgaaccgcacaaggccatcaaggcgctgaagaacgtgacggtcaacgagccgttcttcaccggccacttcccgaagcggccggtgatgccgggcgtgctgatcatcgaggcgctcgcgcaggcggccgcgctcctcacgttcgccgaggcgcagccgaaggatccggagaacacgctgtattacttcgtcggcatcgacaacgcgcgcttcaagcgcgtcgtcgagccgggcgaccagttgatcctgaacgtgacgttcgagcgctatattcgcggcatctggaagttcaaggccgttgcggaagtggacggcaaggtcgcggcggaagccgagctgatgtgcacggtcaagacggccgacgcggcgccc

SEQ ID NO: 14427 - DNA, 852 bp, Burkholderia mallei
atgagcgggcgttcgtttctgatcggcctgatcggcgccgggatcggcggctcgctgtcgcccgcgatgcacgaggcggaggggcgccggcagggtctgaactacgtgtaccggcgcatcgatctcgacgcgctggggctgacggccgacgcgctgcccgagctgctcgcgaccgccgagcggatgggcttcgacgggctgaacatcacgcatccgtgcaagcagcgcgtgatcgagcatctcgacgaattgtcggcggacgcggccgcgctcggcgcggtcaacacggtgtgcttcgcgcacggccggcgcatcggccacaacaccgattggtcgggcttcgcgaaggcgttcgcgcgcgggctgccgggcgcgtcgctcgagcgcgtcgtgcagcttggcgcgggcggcgcgggcgcggccgtcgcgcacgcggcgctcacgatgggcgccgcgcaactcgcgctcttcgacgtcgaccccgtgcgcgcgcgctcgcttgccgaccagttgcaggcgcgctttccgcacgcgcggctgagcgccggcggcacgctcgccgacgcgctcgcgaacgcgaccggcctcattcacgcgacgccgacgggcatgctcgggcatccgggcctgccgctgccggcgcacctgctgcgaagcgggctctgggtggccgacatcgtctattttccgctcgagaccaagctgatccgcgcggcgcgcgcgctcggctgccgcacgctgccgggcggcggcatggcggtctatcaggcggtcgatgcgttcgagctcttcacgggccgcgcgccggatgccgagcgaatgttcgagcacttccgggcgctcgtcgcgcgc

SEQ ID NO: 14428 - DNA, 843 bp, Burkholderia mallei
atgtcgcgccgcatgaccctacaaggatcgaacaagatgaacctgatgaatcccgaattcgcgatgcccgacgtgcagagcaccgtcgatacccggcagatgccgatccagcgcgtcggcgtgcgcgcggtccggcatccgctgacggtgcgcaccgcggaaggcgagacgcaggccaccgtcggcacctggaatctcgacgtgcatctgcccgccgatcagaagggcacgcacatgtcgcgcttcgtcgcgctgctcgaggagcgcggcgggccgctgaccgccgatgcgttccgcacgatgctggcgacgatgctcgagaagctcgaggcgcgggcggggcgcatcgaggtgtcgtttccgtatttcgtgaacaagacggcgcccgtgtcgggcgtgcgcagcctgctcgattacgaggtgacgctgacgggcgacgtgcgcgacgggctcacacgcgtgttcgcgaaggtgcttgtgccggtgacgagcctttgcccgtgctcgaagaagatttcccagtacggcgcgcacaaccagcgctcgcacgtgacgatcgacgcggagctcgcggccgacgtgccggtcgaagatctgatccggatcgcggaggaagaggcctcgtgcgagctatggggcctcctgaagcgtcccgacgagaagttcgtcaccgagcgcgcgtacgagaatccgaagttcgtcgaggatctggtgcgcgacgtcgcgcggcggctcgatgcggacgagcggatcgtcgcctatgtgctcgaggcggagaatttcgagtcgatccacaatcacagcgcgtacgcgctgatcgagcgagacaagcggcgaggcgcg

SEQ ID NO: 14429 - DNA, 2463 bp, Burkholderia mallei
atggggcaaattctaacacccgcggctagaccctttcgcatttatggcaaaatgccccgctccattcacccgcccggtccggccgacggcgcagccggccggaccgggcgatttctgcaggcagtagacgcacatcacgacatgacggaaaccgtagcactcaagatcgtacagcgcatcgccgacgaactctcggtccagccgcggcaggtcgccgcggcggtgcaactcctcgacgaaggctccaccgttccgttcatcgcccgctaccggaaggaagtcacgggcaatctggacgacacgcagttgcgccagctcgaagagcgcctgctgtatctgcgcgagctcgaggaacgccgcgcgacgatcatcgcgagcatcgacgagcagggcaagctgacggacgaactgcgcgcggcgatcgacgcggccgacagcaagcagacgctcgaggatctgtacctgccgtacaagccgaagcgccgcacgcgcgcgcagatcgcccgcgaagccgggctcgagccgctcgcgcaggcgctcctcgcgaatccgctgctcgatccccaggcggaagcggccgcgtacgtgaacacggatcgcggcgtcgccgacgtgaaggcggcgctcgacggcgcgcgcgacatcctgtccgagcaattcggcgagacggccgaactgctcggcaagctgcgcgactatctgttcgagcgcggcgtcgtgtcgtcggccgtcgtcgacggcaagcaaggcgaggaaggcgagaaattccgcgactactacgactactcggaaacgatcaagaccgtgccgtcgcaccgcgcgctcgcgctgttccgcggccgcaacgccggcgtgctgaccgtgaagctcggcctcggcgaagagctcgatgcgcaggtgccgcacccgggcgaggcgatgatcgcgcgccatttcgggatcgcgaaccagaaccggccggccgacaagtggctgtccgacgtgtgccgctggtgctggcgcgtgaaggtgcagccgcacatcgaaaccgaattgctcacacaattgcgcgagacggccgagcatgaggcgatccgcgtgttcgcgcgcaacctgaaggacctgctgctcgccgcgcccgcgggcccgaaggccgtgatcggtctcgaccccggcctgcgcacgggcgtgaaggtcgccgtcgtcgaccgcacgggcaagctgctcgcgaccgacacgatctatccgcacgagccgcgccgcgactgggacggctcgctcgcgaagctcgcgcgcctcgccgcgcagacgcaggccgagctcgtcagcatcggcaacggcaccgcgtcgcgcgaaaccgacaagctcgcgagcgagctgatcgccaagcatcccgagctcaagctgcagaagatcgtcgtgtcggaggcgggcgcgtccgtctactcggcgtcggagctcgccgcgaaggaattccccgagctcgacgtgtcgctgcgcggcgcggtatcgatcgcgcgccggctgcaggatccgctcgcggagctcgtgaagatcgagccgaaggcgatcggcgtcggccagtatcagcacgacgtgaaccagcgcgagctcgcgcgctcgctcgacgcggtcgtcgaggattgcgtgaacgcggtcggcgtcgacgcgaacaccgcgtctgccgccctcctcgcgcgcgtgtcgggcctgaactcgacgctcgcgcgcaacatcgtcgactatcgcgacgcgaacggcccgttcccgtcgcgcgagcacctgcgccgcgtgccgcgcctcggcgacaagacgttcgagcaggcggcgggcttcctgcgcatcaacggcggcgagaatccgctcgaccgctcgtcggtgcacccggaggcataccccgtcgtcgagcggatgctcgcgaagatcagcaagcgcatcgacgacgtgctaggcaaccgcgacgcgctcgcgggcctgtcgcccgccgaattcgtcgatgaacgtttcggtttgccgaccgtgcgcgacatcctgtccgagctcgagaagcccggccgcgatccgcgccccgaattcaagaccgcgacattccgcgaaggtgtcgagaaagtgtcggatctcgcgccggggatggtgctcgaaggcgtcgtgacgaacgtggcggcattcggcgcgttcgtcgacatcggcgtgcatcaggacgggctcgtccacgtgtccgcgatgtcgacgaaattcatcaaggatcctcacgaaatcgtgaaggccggccaggtcgtcaaggtgaaggtgctcgacgtcgatgtgaagcgccagcggatttcgctgacgatgcggctcgacgacgacgcggcgcccagcgcgcccggcaatcgcggcggcgccgagcgcggcgcaatgcgcggcggcgcccgggcgcagcgctcgcgcgagccggaaccggcgggcgcgatggccgccgcgttcgcaaagctcaagcagcgt

SEQ ID NO: 14430 - DNA, 1353 bp, Burkholderia mallei
atggccaacatgacacaggcagccgccgacggcgagctggatctttcgacgctcgccctgccgcaggccgcgcgaatgccggcgttctcgctgacgatggcgtggtgggccgtctgcagcgcggtgttctacatcgtcgtcggcgcgacgctcgcgctcgattacggcgcgcgcaacgcgctgatcggcatggtgctgtcggtcgtctcgtacggcctcgtgaacgcggcgatcagccgctacgcgattcgcacggggctgtccgtcgcgttgttctcgcgcgtgctgttcggcagcgctggcgccgcgctcgcgacgctgatcttcttcgcgaccgcgatctactacgcggtattcgaaggctcggtgatcgccgtcgccgcgcatggcctgatgcccgcgctcgactacaagtgggccgcgctgatcgtcgtctgctacagcgtgccgctcgtgttcggcagcgtccagcactggctcgacaagttcaacggcgtgctgctgccgttctatctgctcggcctgctcgcggccgtcgcgctcgcgacgcaccgctacggctaccacgccgcctggctcgatttcggcccgaagggcggcgcgcccgcccacggctggtggcactgcttcgtctactacatgggcgtgtgggtgctgatgatgttcacgttcgactacgcccgcttcggccgcgaggcggacgcgggctatcacggccgctggaacttcggcatgccgttctatctcgtcacgttcgtcgtcaacggcgcggccggtatctatctcgtcagcacgattccggggctcggcgcgctctccgaagtgtccgtcgtcaccgcgctgctcaagctgatgggcgtgtgggggctgctgttcgtgtgggtcacgcaatcgcggatcaacaccgcgaactactatctcgcgaccgtcaacatgcaggcgttctttcaaaaagccgccgggctgcgcgcgccgaaatacgtgtgggcgctcgtcgtcggcgcggtggtctacgcgctgatgatggccgacatcttctcgaagctgctgcaggcactcgcatggcagggcgtgttcatcgtcgcgtgggtcggcgtcgcgctcgcgcacatcctctcgacgcgctacgaggaactgctcggcagcggcatcgagtgccgcgacacgcacgttcccgcgttcaatccgggcggactgagcgcgtggttcgcgggtgtgttcgccggcatgatgctgaccacggcgacaggtttcgcgcaatcgctgtccgcgccggtgacgttcgtcgtgtcatgggccgtctatcgcggcatgctcgcgtcggcgaaacggacgtggttcgtgcgggagagg

SEQ ID NO: 14431 - DNA, 1050 bp, Burkholderia mallei
atgacgcggcgttcgacgaaagacaacctgggcctgcgccggccgacgattccggtcgcgtacctgcggcatctgctgacggtgttcgaggagcgcggcatcgacgcgcgcgacgcccgcgcgggcaccggcctgcgcgacgacgtgctcggcgagccggacgcgcgcatcgcgccgtcgcaatgggggcggctcgtgctgaacgcgatccggctgagcggcgacgagggcatcggcttcgagctcgggctgcggctgcggatgtcggtgcacggctttctcggctacgcggcgttgacggccgccgacctgcgggcgtcgctgctcgtcaatgcgcgctacttccggatgcgcaaccgccaataccggctgcactacgcggagcgtgacgacggcgcgacgctttcgctgcacggcgtgcaggcgagccccgtgctccagcatcatgcgatgttcgagatcgtgctgaccgggatcgcgcagaacgtcggcacggtggccgggcgcgccgatccgccgatcgagctgcagttcgcctggccggaacccgactactacgcgcgctatcgcgaccgcctgccgcccgtgcgcttcggctgcgcggcgaacgcggtgtgggtgtcgcgcgacgcgctcgactggccgctgccgctcgcggacgacgtcgcgcaccggcaggcgctcgcgcaggtcgagcgcgaatacgcggacgtgcgccacgaggagggcgacctcgtcgcgcgcgtgcgcgccgagctcacgctgacggcacacggctatccggggccggacgcgctcgcgcggcgcctgctgatgtcgacgcgcacgctgcgccggcggctgctcgacgcgggctgcggctatcgcgcgctcgtcgacgaggcgcggctgcgcgacgcgcgccggctgctgcgcgcgtcggatctcgatctgaagacgatcgcggcgcggctgcagttcaacgatccggcgaatttcacgcgcgcgttccgcaagtggacggggctcacgccgagcgcgtaccgggaagcgggcggcggcgacgagcga

SEQ ID NO: 14432 - DNA, 3222 bp, Burkholderia mallei
atggtggcgccggagacggcgcgtcgcaaagggaaaggacattcgctgacgatcgtgtgcgcgatcgcctcaggcctgctgcttgcggcgcctgcgtgggcggacacggtgtcgccgtcgggcacggataacgtctacggcgtcgacgcgaccgatcccggcgtgtcgacgaaccagggcaatacggcctacggggcgcaggcgggcgcgaaggtcacgggttcgtacaacaccgcgatcgggtatcaagcagggcagaacgtgaacgtcatcgataccgtatcgatcggcaagcaggccaccgcgagcgcgaatgacgcgatcgcgatcggcacgaacacgaaggcgagcgggccggccgacatctacatggggctgaacgcaggcgccggcgccggctcgacgacgagcccggacggcaccgtcacgctcggcattcgcaacatgggcctcggggaatccgcgggctcgtacgtgacgggccagaacaacacggggatcggctatcagtcgggcatgaacgtgacgggcgaccagaacgtcggcctcgggcagcaggcgggacaattcgtgaccgggaccggcaactcggcgatggggcatctggcggggtcgacggtgtcgggcagctacaacgccgcgttcggcgagtatgcggggaccaacacgagcggcggcgccaatgccgcgttcggcttctatgcggggcgctacatcaacggcacgaacaacacggcgctcggcgcgtacgatctgccggtcgtcaatggcacctggtacggttcgtacgtgacgggcagcaacaacctcggcgccggccataattcgggcgcctacgtgagcggcgcgagcaacgtcgggctcggcgacggcgcgggcacgttcgtgaccggcagcaacaacgtcgccatcggcacggcagcgggctcgggcgcgtataccagcggtccgagcggcgcgacgctcaacgcggcgctcgtcgcgagcaacaccgtgagcatcggtacccgcgccacggcgagccagagcgacgcgatcgcgatcggcaagggcgcgaccgcgagcggcgcgcaatcgatcagcatcggcaccggcaacgtcgtgagcggcaagggaagcggcgcgatcggcgatccgagcaccgtcagcggcgcggggtcctattcgatcggcaacaacaataccgtcgcgaacagcaacacgttcgtgctcggcaacggcgtgacgacgacgcaggacaacagcgtcgtgctcggcaatcagagcaccgaccgcgcggccgtcgcggtttcgagcgaaaccatcaatggcacgacgtacaactacgcgggcgtcgcgagcccggccaacggcgtcgtcagcatcggcggcgtgggcacggaacgccagctcatcaacgtggcggcgggccaggtgagcgcgaccagcacggacgcgatcaacggcagccagctgtacgcgacgaaccaggcggtgatcgccgaggacgcgaaagtgaattcgctcggcggcggcgtggcgagcgcgctcggcggcaacgcggcgtacaacgcgacgaccggcgcgatcaccgcgccgagctacgcggtctacgggaccacgcaaaactccgtgggcggcgcgatcgatgcgctgcaggccctcgcgccgctgcagtacacgtccggcccgggcgtgaccacgccgaacgcgccgggatcggcgccgacgaacacggtgacgctcgtcggcgccggcgggccgggagccaacaccacgccggtgacgctcacgaacgtcgcgccgggcaaactctccgcgaccagcacggacgcggtcaacggctcgcagctctacgcgaccaaccagcaggtcgcgaacctcgtgagctcggtgaacaacggcggcgtcggcccggtgcagtacagcgatcctagcgcgccgacgacgcccaacggcggcaagccctcgcaggacctgacgctcgtcggcgcggcaagcggccctgtcgcgctgcataacgtcgcgccgggcacggcgtccaccgatgcggtcaacgtcgggcagctcggcgcggtgacgaccggcctgggcggcggcgcggcgatcgatccgaagacgggcgccgtgaccgcgccgtcgtacacggtctacaacgccgacggcacgacgtcgaacgtcagcaacgtcggcgcggcgatcgatgcgatcaactcgaccggcatcaagtatttccacgcgaacagcacgaagccggacagccaggcgctcggcgcggacagcgtcgcgatcggcccgaacgccgtcgcgaacaacgcgggcgacgtcgcgctcggttcgggagcggtcacgtcgcaagcgggcggcacgctgagcgaaacgatcaacggcgtgacctactcgttcgccggcacgacgccgatcggcacggtgagcgtcggcgcgccgggcgtcgagcgcacgatcaccaacgttgccgcggggcgcatcgggcagtcgagcacggacgcgatcaacggctcgcaactgtacggcaccaaccagtcgatcgaggcgttgacggacaagatgaacagcctcggcaacaccgtggcgaacacgctcggcagcggcgcgtcgtacaacccgcaaacaggcgcggtgaacggcccggccaactcgggcggcgtggtcacgcccacggtgatccaggaggcggcgaacaaatgggtgagcgccaatccgtcgacctacgtggcgcccgtcgcgacgggcacgaacggcatggcggtcggcagcggcgcggtttcgacgggccagaactcggtcgcgctcggcacgaacgcgtcggacggcggccgctcgaacgtcgtgagcgtcggggcgccgggcgcggagcgccaggtgacgaacgtggcggccggcacgcaggcgaccgatgcggtcaacctcgggcagatgaacggcgcgctcgcgcagcaaaccgacagcttcaatcagcggctgggcgcggttcagcaggacgtcgacaacgtcgcgcgcgccgcctacggcggcatcgcggccgcgaccgcgctcacgatgatccccgaggtcgacaaggacaagacgatcgcggtgggcatcggcggcggcacgtatcgcggctaccaggcggtggcgctcggcgcgacggcgcgcatcaccgagaacatcaaggttcgtgcgggcgtcggcatgagctcgggcgggacgacggccggcatcggcgcatcgatgcagtgg

SEQ ID NO: 14433 - DNA, 2082 bp, Burkholderia mallei
atggcagtggactacacgactcgagacggcgtcgccgtcatcacgctcaacaatccgcccgtcaacggcctcggcctgtcgacgcggctcggcatcatggaggggctcgaacgcgcgcagcgcgacccggccgtcgcggcgatcgtgctcacgggcgcgggccgcgcgttctcgggcggcgcggacatcaccgaattcaacacgcccaaggcgctgcaggagccgacgctgcacaccgtgatcgacgcggtcgaggcgagcggcaagcccgtcgtcgtcgcgatccatagcgtcgcgatgggcggcggcctggagctcgcgctcggcgcgcactatcgcgtcgcgtcggccggcgcgcagatcgcgctgccggaggtgaagctcggcctgttgcccggcgcgggcggcacgcagcggctgccgcgcgcggtgggcctcgagaccgcgctgaacatgatcgtctccggcgcgcccgtgccgtccgagcagctcgcgaagagcggcctcttcgacgcgttcgtcgagggcgacctgctcgaggcggccgtcgcgttcgcgcgcaaggccggcgcggcgagcggcccgcatccgcgcgtgcgcgatcgcgagatcgtccatgagaacgcggcgggcttcatccagttcgcgcgcaacagcgtgaaggccgtcgcgcagcattatccggcgccgcacaagtgcatcgacgcgatcgaggcgggggtgttgcaaggcttcgacaaggggctcgcgttcgagcgcgactgcttcgtcgcgctcgtgcagacgcccgagagccgcgcgctgcgccatgcgttcttcggcgagcgcgcggcgggcaagattgccgacgtgccggccgacacggccgtgcgcgggatcgaatcggtcgcggtgatcggcgccggcacgatgggcggcgggatcacgatgaacttcctgaacgcggggctgcccgtcacgctgctcgagacgaagcaggaggcgctcgagcgcgggctcgcgacgatccgcaagaactacgacgcgcaggtgagcaagggcaagctcacgcaggagaagctcgacgcgcggatggcgttgctgcgcccgacgctgtcgtacgacgacctgaaggacgccgatctcgtgatcgaggcggtgttcgaggagctcggcgtgaaggagcaggtgttcaagcggctcgacgaggtcgcgaagccgggcgcgatcctcgcgtcgaacacgtcgacgctcgacgtgaacaagatcgccgcgttcacccgccgcccgcaggacgtcgtcggcctgcacttcttcagccccgcgaacgtgatgaagctgctcgaggtggtgcgcggcgagcacaccgcgaaggacgtgctcgccaccgtgatgcagctcgcgaagaagatccgcaagacggcggtcgtctccggcgtgtgcgacggcttcatcggcaaccggatggtcgagcagtacatccgccaggcgctcttcatgctcgaggaaggcgcgctgcccgcgcagatcgaccgcgcgatcgaggcgttcggcttcgcgatggggccgttccggatgagcgatctcgccggcaacgacatcggctgggcgatccgcaagcgccgctatgtcgagcagccggatctgcattactcgaagatcgccgatcgcctctgcgagcagggccgcttcggccagaagacgggcgcgggctggtacgactacgtgccgggcgagcggcgcgcgaagccgtcgaagctcgtcgacgagatgatcgtcgcgtattcgagcgagcgcggcgtcgcgcggcggcagatcggcgacgccgagatcgtggagcggctcgtctacgcgctcgtcaacgaaggcgcgaagatcctcgaggagaagatcgcgtcgaaggcgtccgacatcgacatggtgtatctcaccggctacggttttccgctctggcgcggcggcccgatgctgtatgcggacacggtcggcctctacaacgtcgagcgcgcgatgcgcggctatgcgcagcgcgcgaacggcgacgcgtggcagatcgcgccgtcgatcgtcgagctcgcgaagagcgggcgcggtttcaacgcg

SEQ ID NO: 14434 - DNA, 1731 bp, Burkholderia mallei
atgaacgagtcgcgcgacgtgcctgccgtgccggttcgcgcgcgcggcggcttcgtcgcgatcgcgcccgccgcgcgtcgctcgcgggccgtcgctcggccacgccgcccccccgcctcgaacgccaacccgagcgtccaggccccaggaccgaagcccgacgcaaccggcagtctctcgccgcgcgaaccattcaatatccattccaaatgctttcaattcacattcgcgtcacatcgcccccgtatcgtcctggcgtttttgaaagaaatcacaccaacgggaagccgaaacatgaagcgagtgagactggccgcgctccttggcgcgagcgtcttcgcggcggcgggctgcggcagcgacgagccgaagacgccgggcgcgtcggacaacggcgcgcaaacgggcgccgcgcgcaacgtcatcttctttctgggcgacggaatggggatgacgacgctcacggccgcgcgaatctatgcgctcggcgaggacggcgcgctcacgctcgacacgctgcccgagaccgcgttcgtgaagacctattcgaacgatgcgcaggtgacggacagcgcgccgtcgatgtccgcatatatgacgggcgtgaagacgaacaacgaagtgatctcgatgacgcccgacacgaaggcgatcgagccgagcgcgagtctcaccggcaactgcggcgcgaacaacggcaagccggtgccgacgctgctcgagatcgcgaaggcgaaggggctcgccaccggcgtcgtgacgacgacccgcgtcacccacgcgacgcccgccgcgacctacgcgcacgtgtgccaccgcgacgccgagaacgacatcgccgcgcagctcgtgccgggcggcgcgggctacaacgcggcgctcggcggcggcgtggatgtcgtgctgggcggcggcgcgcaattcttcgtgccgaaggaagcgggcggcaagcgcgcggacggccgccatctcgtgaacgagccgaaggcgaagggctacgcgatcgcgcagaaccgcgacgagctcctcgccgccgatgcgacgaagcgcggcaagctcgcgggcctgttcgcgtcgagccacatgagctacgacctcgaccgcggcgcgacgaaagagccgagcctcgccgacatggcgacgcgcgcgctcgacgtgctgcagaagaacccgaacggctatttcctgatggtcgaaggcgggcgcatcgatcacgcgctgcacgacacgaacgcgaagcgcgcgctgcaggatacggtcgcgttcgacaacgcgatcaaggcgacgctcgacaaggtgcgccagaccgatccggagttgaagaacacgctcgtcgtcgtgacggccgaccacgatcacacgctggtgctcaacggctacgcggcgcgcacgggcaagacggaagcgggcaagccgggcgtgctcggcgtgctgcgcaactatcagacgggcgcggtcgcgaaggacgcggacggcgcgccgtacacgatcatcggcttcggcaacggcgagaaccgcgtgcaaggcagccgcgcgggcacgagcctcaccgacgcggtgacgggcgcggacgattatcgccaggaagcggtcgtgcgcatggccaagggcggcgagacgcacggcggcaccgacgtgttcctcggcgcgatcggccgcggcgcggacggctttcacggcgtgatcgagaacaacaaggtgttcgagctcgtgcgcggcgcggcgcagctc

SEQ ID NO: 14435 - DNA, 384 bp, Burkholderia mallei
atgaacaaacacggaatcgtccttttcggtcacggcgcgcgcgacgcgcgctgggccgggccgttcgagcgcctcgcggcgaagctgcgcgcggcgcgcggcgccgaggcgagcgtcgtgctcgcgtttctcgaattgatggagccgtcgctcgccgcggccacggccgcgctcgccgcacaaggctgcgacacgatcaccgtgattccggtgttcttcggcgagggcggccacgtccggcgcgatctgcccgggctgatcgatgcgtgccgcgccgcgcatccgggcgtcgacatccgctgcgcgaccgcggtcggcgaggacgatgcggtgctcgatgcgatcgtcgcgtactgcatgcgcgcgagcgcggatcccacgagt

SEQ ID NO: 14436 - DNA, 312 bp, Burkholderia mallei
atgagcgagattcgcaagaacgatcatcgtttgatgcaggtcctgctcgcaccggtgatttccgaaaaggcgacgctggttgccgacaagaacgagcaagtcgtgttcgaagtcgcgccggatgccacgaagcaggaagtgaaggcggctgtcgagctgctgttcaaggttgaagttgattccgtcaacgtgctggtccagaagggcaagcagaagcgtttcggccgttcgatgggccgtcgcaaggacgtgaagaaggcatacgtctgcctgaagcccggccaggaaatcaactttgaagcggaggccaag

SEQ ID NO: 14437 - DNA, 930 bp, Burkholderia mallei
atgcgccccgccctgcgccgcgccgcacgcatcgcactcgccgccctcttctgcgcgagcgcatgcgcgcatgcgctcgccgccgcgcatgcggacatcgccgtcaccgacgacgccgggcacgcgatcacgctcgccgcgcccgcacggcgcgtcgtgagcctcgcgccgcacgtgaccgagctgatctatgcggcgggcggcggcgcgaagctcgtcggcgcggtgtcgtacagcgactacccgcccgccgcgaaggcgattgcgcgcgtcggctcgaacaaggcgctcgatctcgaacggatcgcggcgctcaagcccgatctgatcgtcgtctggcgccacggcaacgccgagcacgagaccgagcggctgcgcgcgctcggcattccgctttacttcagcgagccacggcatctcgacgatgtcgccgcatcgctcgacaagctcggcctgctgctcggcacgcacgagatcgcgtcggccgcggccgacgcgtaccggcggcgaatcgcgcagctgcgcgcgcgctacgcggacaagccgcccgtcacggtgttcttccaggcgtgggacaaaccgctcatcacgctgaacggcgatcacatcgtgagcgacgtgatcgcgctgtgcggcgggcgcaacgtgttcgcgcggctgcagccggtcgcgccgtccgtcaccgacgaagcggtgctcgcggcgaatcctgaggcgatcgtgacgacggcggcgggcgcgagcccgacgcacgacgcactgcccgacttcacgcgctggcgcgcatggccgaagctgaccgcggtcgcgcggggcaatctgttcgcgatcgacggcgatctgctgacgcggcccgcgccgcgcatcgcgcagggcgccgagcaactgtgccgggatctcgacgtcgcgcgcgcgagacggccgaagccg

SEQ ID NO: 14438 - DNA, 468 bp, Burkholderia mallei
atgttcaacgtcgttctcgtcgagcccgaaattccgccgaacaccggcaacgtgatccggctgtgcgccaatacgggcgcgcggctgcatctgatcgagccgctcggctttccgctcgacgacgcgaaaatgcggcgcgcggggctcgactaccacgaatacgcgcagatgcgcgtgcatcgcgactgggacgcgttcgtcgccgccgaggcgcccgatcccgcgcggatgttcgcgttcacgacgcgcggctcgggccgctttcacgaccgcgcgttcgagccgggcgactggttcgtgttcggcgcggagacgcgcgggctcgcgcccgcgctcgtcgatcgcttcgctcccgagcagcgcgtgcggctgccgatgcggccgggcaatcgcagcctcaatctgtcgaacacggttgcggtcgtcgtgttcgaggcatggcgccaggcggggttcgaaggcggggct

SEQ ID NO: 14439 - DNA, 1686 bp, Burkholderia mallei
atgatggagttccccatgtcgtacaaccgccgctcgaagaacatcacgcaaggcgtggcccgttcgccgaaccgctcgatgtattacgcgctcggctatcagaaggaagatttcgacaagccgatgatcggcatcgcgaacggccactcgacgatcacgccgtgcaacgcgggcctgcagcgtctgtcggacgccgccgtcgcggccgtcaaggacgccggcgcgaatccgcagatcttcggcacgccgacgatctcggacggcatgtcgatgggcaccgaagggatgaagtactcgctcgtgtcgcgcgaggtgatcgccgattgcatcgagacctgcgtgcagggccaatggatggacggcgtcgtcgtcgtgggcggctgcgacaagaacatgccgggcggcatgatcgcgctcgcgcggatcaacgtgccgggcatctacgtgtacggcggcacgatccgccccggccactggaaaggccacgacctgacgatcgtgtcgtcgttcgaggcggtcggcgagttcaccgccggacgcatgtcgcaggaggatttcgaaggggtcgaaaagaacgcgtgcccgacgacgggctcgtgcggcggcatgtataccgcgaacacgatgagctcgtcgttcgaggcgctcggcatgtcgctgctgtactcgtcgacgatggccaatcccgatcaggagaaggtcgattcggcggcggaatcggcgcgcgtgctggtcgaggcggtgaagaaggacctgaagccgcgcgacatcatcacgaagcagtcgatcgagaacgcggtgtcggtcatcatggccacgggcggctcgaccaacgcggtgctccactatctggcgatcgcgcacgcggccgagatcgactggtcgatcgaggatttcgagcgcatcaggaagcgcgtgccggtgatttgcgacctgaagccgtcgggccagtacgtcgcgaccgatctgcacgcggcgggcggcattccgcaggtgatgaagctgctgctcgacgcgggcctgctgcacggcgactgcatgacgatcacgggccgcacgctcgccgaggagctgaaggacgtgccgagcgtgccgcgcgccgatcagaaggtgatccatccgatcgaccaggcgctgtacaaggaaggccacctcgcgatcctgaagggcaacctcgccgaggacggcgcggtcgcgaagatcaccggcctgaagaacccggtcatcaccggcccggcgcgcgtgttcgacgacgagcagagcgcgctcgccgcgatcctcgacgacaggatccgcgcgggcgacgtcgtcgtgctgcgctacctcggcccgcaaggcggcccggggatgcccgagatgctcgcgccgacatcggcgatcatcggcaagggcctcggcgaatcggtcggcctgatcaccgacggccgcttctccggcggcacgtgggggatggtggtcggccacgtcgcgccggaagcgttcgtcggcggcacgatcgcgctcgtgcaggaaggcgattcgatcacgatcgacgcgcacaagctgctgctgcaattgaacgtcgacgacgccgaactcgcgcgccgccgcgccgcatggaagcagccggcgccgcgctacacgcgcggcgtgctcgcgaagtacgcggcgctcgcccgcccggcgaaccagggcgccgtcacgggc

SEQ ID NO: 14440 - DNA, 987 bp, Burkholderia mallei
atgactgaccttaccgctacccccgcacccgccgaaccggccgcttccgcctacgatccgaccgccaagcagaaggcgcaggcgaagaccgcgcgcattccgatcaagatcgtcccgatcgagaagctgaagaagcccgaatggatccgcgtgaaggcggccaccagcagctcgcgcttcaacgagatcaagacgatcctgcgcgagcacaacctgcatacggtgtgcgaggaagcgagctgcccgaacatcggcgaatgcttcggcaagggcaccgcgacgttcatgatcatgggcgacaagtgcacgcgccgctgcccgttctgcgacgtcggccacggccggcccgatccgctcgacgcagacgagccgaagaacctcgcgcgcacgatcgcggcgctcaagctcaagtacgtggtgatcacgagcgtcgaccgcgacgatctgcgcgacggcggcgccggccacttcgtcgagtgcatccgcgaagtgcgcgagcagtcgcccgcgacgcgcatcgagatcctgacgccggacttccgtggccgcctcgaccgtgcgctcgcgatcctgaacgcggcgccgcccgacgtgatgaaccacaatctcgaaacggtgccgcgcctgtacaaggaggcgcgccccggctcggactatgcgcattcgctgaagctcctgaaggatttcaaggcgctgcatccggacgtcgcgacgaaatcgggcctgatggtcggcctgggcgagacgaccgacgagatcctgcaggtgatgcgcgacctgcgcgcgcacgacgtcgacatgctgacgatcggccaatacctgcagccgtccgagcaccatctgccggtgcgcgagtacgtgcatccggacacgttcaagatgtacgaggaagaggcgtacaagatgggcttcacgcacgcggccgtcggcgcgatggtgcgctcgagctatcacgccgatctgcaggcgcacggcgccggggtggtt

SEQ ID NO: 14441 - DNA, 3393 bp, Burkholderia mallei
atgaagcccgcagacacgctcgaagacgtcggccgcgcgcagttcgtcgcgcacatggcccgaaggccgcgccgcgcgcgcaggcgagaagcgcccggcgtcgccgacacgccgctgtggtacaaggatgcgatcatctaccagttgcacgtgaagtcgttcttcgacgccaacaacgacggcgtcggcgatttcgccggcctgatcgcgaagctcgactacatcgcggagctcggcgtcgacacggtgtggctgctgccgttctatccgtcgccgcgccgcgacgacggctacgacatcgccgactaccgcggcgtgcatcccgactacggcacgctcgcggacgtgcgccgcttcatccgcgaggcgcacgcgcgcgggctgcgggtgatcaccgagctcgtgatcaaccacacgtcggatcagcatccgtggttccagcgcgcccggcgcgcgaagcgcggctccgtccaccgcgactactacgtgtggtccgacaccgatctcaagtacgcgggcacgcggatcatcttcctcgataccgagacgtcgaactggacgcacgatccggtcgcgggccagtactactggcatcgcttctattcgcatcagcccgacctgaacttcgacaatccggccgtggtgcgcgaagtgctgcagatcatgcgcttctggctcgatctcggcatcgacgggctgcggctcgacgcggtgccctacctcgtcgagcgcgagggcacgagcaacgagaacctgccgcagacgcacgcgatcctcaagctgatccgcgcgacgatcgacgccgagtacccgaaccggatgctgctcgccgaagcgaaccagtggcccgaggacgtccaggaatatttcggcgacgaggacgagtgccacatggccttccacttcccgctgatgccgcgcatctacatgtcgatcgcgagcgaggaccgctttccgatcatcgacatcatgcggcagacgcccgccctcgcgccgagcaatcaatgggcggtgttcctgcacaaccacgacgagctcacgctcgagatggtcaccgattcggagcgcgacctgctctggcaagcctacgcgagcgagcgccgcgcgcggctgaacctcggcatccgccgccggctcgcgccgctgatggagcgcgaccgccgcaggatcgagctgatcaactcgatcctgctgtcgatgcccggcacgcccgtcatctactacggcgacgagctcggcatgggcgacaacctgcacctcggcgatcgcgacggcgtgcgcacgccgatgcaatggtcgtcggaccgcaacggcggcttctcgcgcgccgatcccgagctgctcgtgctgcctccggtgatgggcacgctgtacggctacgacgcgatcaacgtcgaggcgcagacgcgcgatccgcattcgctgctgaactggacgcggcgcatcctgtcgacgcgccgcgcgacgcgcgtgttcggacgcggcgcgatccgcttcctgcgcccgggcaaccgcaagatcctcgcgtatctgcgcgagctcgacggcgaaacgccggtgctctgcgtcgcgaacctgtcgcgcgcgtcgcaggcggtcgagctcgacctgtcggaattcgccggctgcgtgccgaccgaaatgacgtcggactcgccgttcccgccgatcggccaactgccgtatctgctgacgttcccgccgtacggcttcctgtggttcgcgctgtccgagcacggccgcgagccggcctggcatcagcagtacgccgagccgctgcccgaatacctgacgctcgtgatgcggcgcggcgagacgcagccgggcgccgcgctgctcgacacgctcgcgcaggacgcgctgccgtcatggctcgcgcggcggcgctggttcgcatcgaaggagcggcgcgtcgacagcgcgcgcttcgacgcgctcacgccgattccgggcgagccgtttcagtatgcggaggcgcgcgtcgccgtcgacggccgcgaagaacgctacgtggtgccgctcgcgagcgcctggggcagcgagacgcctcagccgctgttcgcgcagctcgcgctcgcgcgcgtgcggcgcggccatacggtcggcctgctgaccgacgcgttcgcgctgccgtcgttcgcgcacggcgtgctgcgccagctgcgcgcgggcgcggccgtgccggtggcgggcggcgggcgtctcgaattccggcccgagccggacctggcgcggctcgatcccggcgatgcgcccggcgtgcggtggttcgccgccgagcagagcaacagctcgctcgtgatcggcgaggcgatcgtgctgaagatcgtgcgcaagctcgccacgggcgtccacccggaagcggagatgggccggcacctgcggcgcatcggctaccggaacgtcgcgccgctcgtcggcgaggtcgtgcgcatcggcgcggacggcgcgccgcacaccgtcgcgatcctgcaggaatacgtcgacaatcagggcgacgcgtggacgcgctcgtgcgattttctcaagcgcgcgatcgaggagctcgcgctgcccgcggcaaacgacgccgacgcggcggcgccgagcgccgagccggagatgatcgacggctacgcgacgttcgcgggcatcgtcggcaagcggctcggcgaactgcacgcggcgctcgcgcagccgagcgacgatgcggcgttcgcgccgcagcgcgtgtcgcccgcgcgcgtcgacggctggatcggcgatgcgctgggctggttcgaacgcgcggcgagcctgctggccgaacggctcgacacgctcgaaggccaaacgcgcgcggccgccgagctgctcgtcgcgcagcgcgccgcggtggccgaggcgctgcgtgcgctggtgccgcgcgagctcgacggatgctgcatccggattcacggcgacttccacctgggccaggtgctcgacgtgcaaggcgacgcgcttctcatcgatttcgagggcgaacccgcgcgcccgctcgggcagcgccgcgcgcaatcgcatccgttacgcgacgtggccgggttcctgcggtcgctgtcgtacgcgagcgcggccgcgcagttcacgatcgaaaaggcgccgcagcaggccgccgagcgcaagcgcgcgctgttcgagcgcttcgggcaggcggccgcggaccgcttcgtcgcgcaataccgcgaagcgctgtcggccgcgtcgcgcgaattcgtcgagccgcgctatgcggaccggctgctcgcgctgttcctcatcgagaaggcgtcctacgagctgtgctacgaagccgcgaaccggccggactggctgagcgtgcccgcaaacggcctcgccgcgctcgtcgcgcgcctgatcggcggcgccgcgccgcagcaggaggacgcgcga

SEQ ID NO: 14442 - DNA, 468 bp, Burkholderia mallei
atgccgcgtcgtcgcgaagtccccaagcgggaagtgttgccggatccgaaatacggcaacgtggatgtagccaagttcatgaacatgctgatgctgtccggcaagaagtcggtggctgagcgcatcgtttatggcgcattcgaacaaatccagaccaagggtggcaaggacccgctggaagtgttcacggtcgcgctgaacaacgtgaagccggtggtcgaagtgaagagccgtcgcgttggtggtgcgaactatcaggttccggtcgaagtgcgcccgtcgcgtcgtatggcattggcgatgcgctggttgcgcgaggctgcgaagaagcgtagcgagaagtcgatggctctgcgccttgcaggtgaactctccgaggcggctgaaggccgcggcggcgcgatgaagaagcgcgacgaagttcaccggatggcggaagccaaccgtgcgttctcgcacttccgtttc

SEQ ID NO: 14443 - DNA, 564 bp, Burkholderia mallei
gtgcgcatcgcgatccgctcgttggagggcgccatgccgaacatcggtccgacctcggtcgaggcgtgcgtcgtcgacatcacgacgctcacgctcgacgcgatcgtcaatgcggccaacgcgtcgctgctgggcggcggcggcgtcgacggcgcgatccaccgcgcggcggggcccgagctcgtgaaggaatgcgcgacgctcggcggctgcgcgacgggcgacgcgaagctcacgcgcggctatcgcctgcccgcgaaatacgtgatccacacggtcggcccggtatggcgcggcggcgggcatggcgaggccgagctgcttgcgtcgtgctaccggcgctcgctcgaggtggcggccggcgcgggctgtgcgtcgatcgcgtttccggcgatcagttgcggcgtatatcgcttcccgcccgccgacgcgactgcgatcgcggtgcgcacggtggccggcgcgctcgcgggcgagctggccgatgcacgattcgagcgcgtcgtgttcgcgtgcttctccagcgatatgctcgatttctatcgcacggcgctcgtccggttc

SEQ ID NO: 14444 - DNA, 549 bp, Burkholderia mallei
atggcgagggcggcggtgatcgtggtggacatgcagcgcgggctgctgcagcgggcgaagcccgcgcatcggctcgacgaggtcgtcgcgggcatcaaccggctgacggcggcggcgcgcgcggcgggcgcgcccgtctgtttcgtgcagcacgacggcggcgcggacgacgacgtcgtgcccggcacgcccggttggcggctgcacgcggagctcacgtgcgccgacgccgactggcgaatccgcaagcgcgcaagcgatgcgttccacggcacgccgcttgccgcgcaacttgccgcgcacggcgttgacgcggtcgtgatctgcggctacgcgtcggaattctgcgtcgattcggcggcgcgccgcgcggcgctcctcggctatcgaacgacggtcgtctccgatctgcacacgacgaacgatcgcgctcacctgagcgcggcgcaaatcgtcgcgcatcacaatttcatctggagccactgttcgttctcgggcaacggcgttgcgccgcggccgctcgacgaggtgatcgccgcggagttcgca

SEQ ID NO: 14445 - DNA, 2361 bp, Burkholderia mallei
atgcccgatctgctcgcgaacctgaaccccgaacaactcgccgccgtcacgttgccgaacgagccggcgctgatcctcgccggggcgggcagcggcaagacccgcgtgctcatcacgcggatcgcgtggctgatccggcaaggctatgcggcgcccgccaccgtgctcgccgtcacgttcacgaacaaggccgcgcgcgagatgatggcgcgcctggccgcgatgatgccgatcgacacgcgcggcatgtggatcggcacgttccacggcctgtgcaaccggatgctgcgcgcgcactaccgcgacgcggggctgccgcagacgttccagatcctcgataccgccgaccagctctccgcgatcaagcggctgatgaaggcggcgaacgtcgacgacgagaagtacccgccgaagaacgtccagtacttcatcaacaacgcgaaggagcaggggctgcgccccgagaaggtcgacgcgaccgacagcttcaaccgcaagttcgtcgagctgtaccaggcgtacgagcagcagtgccagcgcgagggcgtcgtcgatttccccgagctgctgttgcgctgctacgagttgctcgcgcacaacccgccgctgcgcgcgcactaccaggcgcgcttcaagcacatcctcgtcgacgagttccaggatacgaacaagctgcagtacgcgtggctcaagctcctcgcgggcggccacaacgcgatcttcgcggtcggcgacgacgaccagtcgatctatgcgtttcgcggcgcgaacgtcggcaacatgcgcgatttcgagcacgaattccgcgtgcgcaacctgatcaagctcgagcagaactaccgctcgcacggcaacatcctcgacgcggcgaaccacctgatcgcgaacaacgcgcaccggctcggcaagaacctgcgcaccgacgcgggccacggcgagcccgtgcgcgtgtacgaagcggccaccgacgcgcaggaagcggcgtggatcgtcgaggagatccgctcgctcgtgaacgcggggctcgcgcgcagcgaggtggcggtgctgtaccggagcaacgcgcagtcgcgctcgatcgagcacacgctgatgacggcgggcatcgcgtaccgcgtgtacggcggcctgcgcttcttcgagcgccaggaggtgaagcacgcgctcgcgtatctgcgcctcatcgacaatccgaacgacgacaccgcgttcgcgcgcgtcgtcaactttccgacgcgcggcatcggcgcgcgctcgatcgagcagctcgccgacgcggcgcgcctgtacgactgctcgatggcggccgcgattccgtacgtggcgggcaaggcgggctcgagcctggcgtcgttcgcgaacctgatcgcgaagatgcgcgcggagaccgcgcagatgagtctgcccgagacggtcgagcacgtcgtgcgcgcgagcggcctcgccgatttctaccagggcgagcgcgaagggcaggatcgcctcgagaatctgcaggaactggtgaacgcggccaccgcgttcgtctccgaggagggctacgggctcgacacgcccgcgcgctcgattccgctgcatgcgcgcgcgagcgcggcgccggagctcgccgcgggcggcgccgatccggccgacgcggtgctcgcgcccgcgaacctcgccgatcccgcgcagaacccggacgcgatgacgccgctcgccggcttcctgtcgcacgcgtcgctggaggcgggcgacaaccaggcgcaggcgggccaggacgcggtgcaactgatgacggtccacgcggcgaaggggctcgagttcaccgcggtgttcatcaccgggctcgaggaagggctcttcccgcacgagaacagcgcgctcgaatccgacggcctcgaagaggaacgccggctgatgtacgtcgcgatcacgcgcgccaaggagcggctctacctgtcgttcgcgcagagccggatgctgcacggccagacccgctacaacatccgctcgcgctttttcgacgagctgccgcagcacgtgctcaagtggctcacgccgaaggtcgaggcgggcgcccgctggggcggccgctcggacaacgccggctggggccgcgactggttcgcgcggccgggcggcggcgcgcggcagggcgtggtcgacgcggcggtgtccgcgccgctgcccgcgttcgcgaaccagcagcgcgaggcgcagaacggcttgcggatcggccagcaggtgttccacacgaagttcggcgaaggcacggtgacggcgctcgaaggcagcggcaccgacgcgaaggcgcaagtcaaattcaagcggcacggcgagaagtggctcgcgctcgcggtcgcgaaactgcaggcggtcgaa

SEQ ID NO: 14446 - DNA, 720 bp, Burkholderia mallei
atggatctcgaaagcattctgttcacccaaggcttcggttcgcgccgccagtgccgcgcgctcgtcgaagcgggacacgtcgccgtcggcggcgcgacgtgcgccgacgcgcacgcatcgttcgacaccacgcagctcgtgttcgaagtcgacggcgtcgcctggccgtaccgcgcgcgcgcttacgtcgcgctcaacaagccggccggctacgaatgctcgcgcgagccgcagcatcattcgagcgtgttcgcgctgctgccgccgcagttcgccgagcgtggcgtccagtgcgtcggccgcctcgaccaggacacgacgggcctgctgctcctgtccgacgacggccagttcgtccacgcgtacacgtcgccgaaacgcaaggtgccgaaaacctatgtcgcgacggtgcgccacccgctcgacgacgcgcagctcgacgcgctgcgcgcgggcgtgctgctgcacggcgagccgaaaccggtcgccgcgctcgccgccgttgcccgaggagaacgactcctcgaaatgacgatcgccgaaggaaaataccaccaggtgaagcgcatggtcgccgccgcgagcaaccgcgtcgaggcgttgcaccgctcgcgcatcggcggcttcgcgctgcccgaggatctcgccgaaggcgcgtggcgctggctcgacgaacgcgatctcgccgccttgcgcgacacggcggaaaccctgtcaggg

SEQ ID NO: 14447 - DNA, 1179 bp, Burkholderia mallei
atgactgacgtagtgatcgtatcggccgcgcgcaccgcggtcggcaagtccggcggctcgctcgcgaagatcgccgcgccggagctcggcgcgagcgtgattcgcgcggtgctcgaacgtgcgggcgtgaagcccgagcaggtcagcgaagtgattctgggccaggtgctgacggcgggctcgggccagaatccggcgcgccaggcgctgatcgcggcggggctgccgaacgcggtgccgggcatgacgatcaacaaggtgtgcggctccggcctgaaggccgtgatgcttgccgcgaacgcggtcgtcgcgggcgatgcggagatcgtcgtcgcgggcggccaggagaacatgagcgccgcgccccacgtgctgccgggctcgcgcgacggcttccggatgggcgatgcgaagctcgtcgacagcatgatcgtggatggcctctgggacgtctacaacaagtaccacatgggcatcaccgcggagaacgtcgcgaaggagtacggcatcacgcgcgaggcgcaggaccagttcgccgcgctctcgcagaacaaggcggaagccgcgcagaaggcgggccgcttcgacgacgagatcgtgccgatcgagatcccgcagagaaagggcgagccgctgcgtttcgcgaccgacgagttcgtgcgtcacggcgtgacggccgagtcgctcgcgagcctgaagcccgcgttcgcgaaggaaggcacggtgacggccgcgaacgcgtccggcatcaacgacggcgcggccgcggtgctcgtgatgtcggcgaagaaggccgaggcgctcggcctcgagccgctcgcgcggatcaaggcgtacgcgaacgcgggcgtcgatccgagcgtgatgggcatgggccccgttccggcgtcgcgccgctgtctcgagcgcgcgggctggtcggtgggcgacctcgacctgatggagatcaacgaggcgttcgccgcgcaggcgctcgcggttcacaagcagatgggctgggatacgtcgaaggtcaacgtgaatggcggcgcgatcgcgatcggccatccgatcggcgcgtcgggctgccggattctcgtcacgctgctgcacgaaatgctcaagcgcgatgcgaaacgcggcctcgcatcgctttgcatcggcggcgggatgggcgtcgcgctcgcgctcgagcgtccg

SEQ ID NO: 14448 - DNA, 1674 bp, Burkholderia mallei
atggatatcaaacgcaccgtcctatgggtgatcttcttcatgtcagcggtcatgctgttcgacaactggcaacggtcccacggacgcccgtcgatgttcttcccgaacgtcacgcagacgaacaccgcgtcgaacgcgactaacggcaatggcgcgtcgggcgcgagcgcggcagcggcggcgaatgcgctgccggcggccgcgacgggcgcggcccccgcgacgaccgcgcccgcggcgcaggcgcagctcgtgcgcttctcgaccgacgtctacaacggcgagatcgacacgcgcggcggcacgctcgcgaagctgacgctgacgaaggcgggcgacggcaagcagcccgacctgtcggtgacgctgttcgatcacacggcgaaccacacgtatctcgcgcgcacgggcctgctcggcggcgatttcccgaatcacaacgacgtctatgcgcaagtggccggcccgacgtcgctcgcggccgaccagaacacgctgaagctgtcgttcgaatcgccggtgaagggcggcgtgaaggtggtgaagacgtacacgttcacgcgcggcagctacgtgatcggcgtcgacacgaagatcgagaacgtcggcgccgcgcccgtgacgccgagcgtatacatggagctcgtgcgcgacaactcgtcggtcgagacgccgatgttctcgcatacgttcctcgggccggcggtgtacacggatcagaagcacttccagaagatcacgttcggcgacatcgacaagaacaaggccgattacgtcacgtccgccgacaacggctggatcgcgatggttcagcactacttcgcgtccgcctggattccacaatcgggcgcgaagcgcgacatctacgtcgagaagatcgacccgacgctgtaccgcgtcggcgtgaagcagccggtcgaggcgatcgcgccgggccagtcggccgacgtgtccgcgcgcctgttcgccggcccggaggaagagcggatgctcgaaggcatcgcgccgggcctggagctcgtgaaggattacggctgggtgacgatcatcgcgaagccgttgttctggctgctcgagaagattcacggcttcgtcggcaattggggctgggcgatcgtgctgctcacgctgctgatcaaggcggtgttcttcccgctgtcggcggcgagctacaagtcgatggcgcggatgaaggaaatcacgccgcggatgcaggcgctgcgcgaacgcttcaagagcgatccgcagaagatgaacgcggcgctgatggaactgtacaagacggagaaggtgaacccgttcggcggctgcctgccggtggtgatccagattccggtgttcatctcgttgtactgggtgctgctcgcgtcggtcgaaatgcgcggcgcgccgtgggttctgtggattcacgacctgtcgcagcgcgacccatacttcatcctgccggtgctgatggccgtctcgatgttcgtgcagacgaagctgaacccgactcccccggacccggttcaggcgaagatgatgatgttcatgccgatcgcgttctcggtgatgttcttcttcttcccggccggcctcgtgctgtactacgtggtgaacaacgtgctgtcgatcgcgcagcagtactacatcacgcgcacgctcggcggcgccgcggcgaagaaaaaggcgagc

SEQ ID NO: 14449 - DNA, 1761 bp, Burkholderia mallei
atgaacatgcccagcgcggaattctccacgtcggaatccctttcccctcagaaaaccggctccatcggcgccaccgtgctcatgaaggcactggccgacgagaacgtcgaattcatctggggctaccctggcggctcggtcctctacatctacgacgagctgtacaagcaagacaagattcaacacgtgctcgtgcgccacgagcaggccgccgtgcacgccgcggacgcgtactcgcgctcgacgggcaaggtcggcgtgtgtctcgtcacgtccggcccgggcgtgacgaacgcggtgacgggcatcgccaccgcctacatggattcgatcccgctcgtcgtgatcagcggccaggtgccgaccgcggcgatcggccaagacgcgttccaggagtgcgataccgtcggcattacgcggccgtgcgtgaagcacaatttcctcgtgaaggacgtgcgcgagctcgcgcaaaccgtcaagaaggcgttctacatcgcgcgcaccggccggcccggtccggtcctcatcgacatcccgaaggacatctcgaagacgccgtgcgagtacgagcccgtcaagaacgtgtcgctgcgctcgtacaacccggtcacgaaaggccattcggggcagatccgcaaggcggtgtcgctgctgctgtccgcgaagcgtccgtacatctacacgggcggcggcatcatcctcgccgacgcgtcgcgcgagctgaaccagttcgccgacctgctcggctatcccgtcacgaacacgctgatgggcctcggcggctatcgctcgtcggacaggaaattcctcggcatgctcggcatgcacggcacctacgaagcgaacatggcgatgcagcactgcgacgtgctgatcgcgatcggcgcgcgcttcgacgaccgcgtgatcggcgatccggcgcacttcgcgtcgcgcccgcgcaagatcatccatatcgacatcgatccgtcgtcgatctcgaagcgcgtgaaggtcgacatcccgatcgtcggcgacgtgaaggaagtgctcaaggagctgatcgagcagttgcagacggccgagcacggctcggatgccgacgcgctcgcgcagtggtggaaggaaatcgaaggctggcgcgggacggattgcctgaagtacgaccgcgcgagcgagatcatcaagccgcaatacgtcgtcgagaagctctgggagctcaccgacggcaacgcgttcgtctgctcggacgtcggccagcaccagatgtgggccgcgcagttctaccgcttcaacaagccgcgccgctggatcaactcgggcggcctcggcacgatgggcttcggcctgcccgccgcgatgggcgtcaagatggcgcacccggacgacgacgtcgtctgcatcacgggcgagggctcgatccagatgtgcatccaggagctgtcgacctgcaagcagtacgacactccggtgaagatcatttcgctgaacaaccgctacctcggcatggtccgccaatggcagcagatcgaatacagcaagcgctattcgcattcgtacatggatgcgctgcccgatttcgtgaagctcgcgcaggcgtacggccatatcgggatgcgcatcgaaaaatccgcggacgtcgagccggcgctcaaggaagcgctgagcctgaaggaccgcaccgtgtttctcgacttccagaccgaccccaccgagaacgtctggccgatggtccaggccggcaagggcatcaccgagatgctgctcggatcggaagatctg

SEQ ID NO: 14450 - DNA, 1554 bp, Burkholderia mallei
atgatgaacatcaacacgatttcccatggcacgctccggacgactttgatcgcggccaccgtggcagccatgctctccctctccgcttgcggcggctccggcacgatcagcaagggcctcgacggctcgggctccggcagcggcggcggcaatgcgatttccacgacgggcggctccggctcgggcggctcgggcggctcgggcggctcgggttcgggcggcagcggcagctccggctcgacgggcggcctgtcgggcggcggcggctcgacctccggcggcacgtcgacctcgtcgagcatcaacgcgctcggcacgatcgccggcaacacgggcggcatcatcagcggcgccggctcgaccgtgtcgggcctcggcaccgtcgtcggcagccagacgctgcccggcgtgaacccgcaaacgacgcaagcgctcggcggcatcgtgcaggatctcggcggcgcggtcagcgcgctcggctcgggcgtgacgagcggcatcggccagctcggttcgtcgaccaacccgatcggcacgacggtcgcgagcacgggcggcgtggtcagccaactgggcggcgccgtcacgcagacgggcaacctcgtgacgagcctcggcaccggcccgctcgcgccgctcgccccgctcacgtcgccgctcggcggcgcggtcagcacgctcggcaacacgatcacggcgggcggcacgacgctcaccaccgcgctgtcgacgggccccgtccagcaactgacgcagacggtcagctcggcgatcacgccgatcacgtcgatggtcacgggcacgacgcagacggtcggcaacgtgacgggcctcggcgcgcccgtcaacacgctgctcggcacgatcggcggcgggctgaaccaggccggcgcgctgatctcgaagacgggcaacaacccggtcacgacgggcctcggccaaacggtgtcggcgacgggcaacacgatcacgtcggtcggcggcctgctgacgggcggcagcggcgcgacgaacccgctcgcgccgatcacggccgccgtcggcggcctgacgggcacgctcagcggcgtcagcggcgcaacctcgggcaccccgctcgcaccgctcacgaacgtcgtgtcgacggtcaccggcgcgctctccggcgccaccggcagcgcgacgtcgacgagcccgctcgcgcccatcacgggcctcgtatcgacggtcaccggcgcactctccggcgccaccggcggcgcgacgggctcgaccagcccgctcgcgcccgtcaccggcctcgtgtcgacggtcaccggcgcgctctccggcgccaccggcggcacgacgtcgacgagcccgctcgcgcccgtcacgaatctcgtgtcgaccgccacgggcgcgctcggcggcgcgaccgccgcgccggcgacgagcacgacgacgagcgcgacgaacccggtcgcgagcctcaccgcaccgttgaccggcacgagcagcggcacgagcggcgcgaccaacctgctggcgcccgtcacgtcgctcgtcggcggcctgctcggcggcatcaagaag

SEQ ID NO: 14451 - DNA, 1107 bp, Burkholderia mallei
atgtccggcaacaccctcggcacgcttttcactgtcacgaccttcggcgaatcgcacggccccgcgatcggctgcgtgatcgacggctgcccgccgggcatggcgctcacggaagccgacgtccagctcgagctcgaccgccgcaagcccggcacgtcgcgccacgtcacgcagcgtcaggagcccgaccaggtcgagatcctgtccggcgtgttcgagggcgtgacgaccggcgcgccgatcgcgctcctgatccgcaacaccgaccagcgcagcaaggactacggcaacatcgccgagacgttccgcccgggccatgccgattacacctactggcagaagtacggcgtgcgcgactatcgcggcggcggccgctcgtccgcgcggctgacggcgcccgtcgtcggcgccggcgcgatcgcgaagaagtggctgcgcgagcgcttcggcgtcgaggtgcgcggctacatgagcgcgctcggcgaaatcgagatcccgttcgtcgactggtcgcacgtgcgcgagaacccgttcttcgcgccgaacgccgacatcgtgccgcaactcgaggactacatggacgcgctgcgcaaggacggcgattcgatcggcgcgcgcatcgatgtcgtcgcgtcgggcgtgccggtcggctggggcgagccgctgttcgaccggctcgacgccgacatcgcgcacgcgatgatggggatcaacgcggtgaagggcgtcgagatcggcgcgggtttcgcgagcgtcgcgcagcgcggttcggtgcacggcgacgagctgacgccggacggcttcgtcggcaatcacgcgggcggcgtgctcggcggcatctcgacggggcaggacatcacggtgtcgatcgcgatcaagccgacgtcgagcattcgcacgccgcgccgctcgatcacgcgggcgggcgaacccgccgtcgtcgagacgttcggccgccacgacccgtgcgtcgggattcgcgcgacgccgatcgccgaatcgatgctcgcgctcgtgctgatcgatcacgcgctgcggcaccgcgcgcagtgcggcgacgtgtcgagcgcgacgccgaggatcgccgcgcgcgcgccggacgcgcaa

SEQ ID NO: 14452 - DNA, 1728 bp, Burkholderia mallei
atggaggatcgcatggcgagcacgattgccgactacctcgcgcggacgctggccgccgccggcgtcacgaagatctggggcgtgacgggcgacagcctgaacggattgtccgacagcctgcgccgcgacggcggcattcgctggatgcatacccggcatgaagaggtggcggcgttcgccgcgggcgccgaagcggcgcagaccggccggctggccgtatgcgcgggcagttgcgggccgggcaatctgcatctgatcaacggcttgttcgattgccatcgcaatcatgtgccggtgcttgcgatcgccgcgcagatttcgtcgaccgaaatcgggctcggctattttcaggaaacgcatccgcaggaactgttccgcgaatgcagccattacgtcgagttcgtgacgaacgcatcgcaatttccgcgcgtgctcgagcgcgcgatgcgcgccgcgatcggcgagcacggcgtcgcggtgatcgtgctcccgggcgatgtcgcgctgagcgcggcgcccgcgcggacaccgtcgtggttcgatttcgcctcgccggtgacgacgcccgccgacgccgatctggagcggctcgcggcgttgctcgacggctccgatgcagtcacgctgctgtgcggcagcggttgcgcgggcgcgcacgacgaagtcgtcgcgttggccgatgcgctcgcggcacccgtcgtgcatgcgctgcgcggcaagcagcacattgaatacgacaatccgaacagcgtcggcatgacggggctgatcggcttcagctccggctatcacgcgatgcaatcgtgcgacacgctgctgatgctcggcaccgatttcccctatcgcaatttctatccgacgcgcgcccggatcgcgcagatcgaccgccgcgcgtcggcgctcggccgtcgcgcgccgctcgacgtcggcctcgtcggcgacgtgcgcgccacgctgtccgcgctgttgccgcgcatccggcgcaagacgcggcgcggtttcgtcgagcgtgcgcttgcgcattatgccgccgcgcgcaaggggctcgacgaactggcgagaccgtcgccggccgggcggccgattcatccgcagtacttgacgcgcgtcgtcgacgagctcgccgccgccgatgcgatcttcgccgcggacgtcggcacgccgacgctgtgggcggcgcgctatctgacgatgaacggccgcaggcggctgcacggatcgttcaatcacggctcgatggcgaacgcgttgccgcaggcgctgggcgcgcaggccgcgcatcccgggcggcaagtcgtgtcgctgtcgggcgacggcgggctgtcgatgctcctcggcgatctgctgagcgcgcggcaactcgatttgccgatcaaggtgatcgtctacaacaacagctcgctgggcttcgtcgcgatggagatgaaggcgggcggttatctggatacgggcaccgatctgcacgagaccgatttcgcggcgatcgcgaagggggcgggcctctacagcctgcgcgtgaccgaatcggaagcgttgcccgatgcgctcggcaagctgctcgcgcacccggggcccgcgctgctcgacgtcgtcaccgacaagcacgagctcgcgatgccgccgaagatcgaatgggcgcaggcgaagggattcagcctctacatgttgcgcgcggtgctgagcgggcgcggcgacgaagtgctcgagctcgcgcagacgaatctgcgg

SEQ ID NO: 14453 - DNA, 978 bp, Burkholderia mallei
ttgcgcctcgcgctcgtcgtcggcctgtgcgcgctcgcgttcctcgtgctctatctcgatcgcgacggcctgcgcgattcgacgaagagcgagccgatgagcatcgccgatctcgtgtacttcacgatggtgacggtcgcgacggtcggctacggcgacatcgtgcccgtcaccgcgcgcgcgcgtctcatcgatgcattcttcatcgtgccgatccgcatcggtatctggttcatctttctcggcaccgcttatcaattcgtgattcaacgagtcatcgaggaataccgcatgaaacgcctgcaaaagaatctgcgcgatcacgtcgtgatttgcggctacgggctgagcggctcgatcgccgtgcgcgaactgctcgagagcggcgtcgatccggcgacgctgatcgtcatcgattcgcaggagcaggcgctcgaggcggccgccgcgctcggcgtgacggggctttgcggcgaccccgcgcacgaggatctgctgcagcaggcgcaggtgcgcagcgcgaaggcggtcatcatctcggtcaccgacgatccgaccgcgatcctgctcacgctgtcggtgcgcagcatcgcgcccgatacgaagatcgtcgtgcggatccaggagaacctgtaccagcggcaactgcggcaggcgggcgccgacgtgatcgtgtcgtcgacgaagatcggcgcgctgctgctcgccgacgcggtcgagagccgctacatcgtgccgttcgtcaacgacatgctgtcgacgcgcggccgtgcgacgctcgtcgagcggccggccgccgcgcacgaaatcggctgcatgtcgaacgcggtggcgggcgcgctcgtcgtcgggctggatcgcggcggcaggattctttcgttctacgaggatccgccttgcctgatcgaggcgggcgatacgctcgtcgtgatccagtcgacgcgcgcgatggagcgcgcgggcatcgaactcgcggac

SEQ ID NO: 14454 - DNA, 969 bp, Burkholderia mallei
atgattcggtcctcctgctttcgtcgcgtttggtcatccgcacgaatgctatgcccagccgccgtcgacgacaacgtcctgcgcggtgatcagccggctgtcgtccgcggcgagaaagagcgccatgcgcgcgagatcgcccggcagcagttcggcgtcgatgcactgccccgccttgatcgccgcgcggcccgcatcgtcgagccacaagcggcgttgcttgtcggtcatcacccagcccggcacgagcgtgttcacgcgaatgccgaacggcccgagctcgcgcgcgagcgcacgcgtgagcccctgcaccgccgccttcgccgtcgcgtagaccggatagccggcgttcttcagcatccagccgatcgagccgagattgacgatcgcgccgccgcccagccgtttcatgtcgtcgatcaccgcctgcgcggcgaagaactgatggcgcagattcaccgcgatgctcgcgtcgaacgattcgggcgtcacgtcggcgaccgcgtgccgcacgtcgttcgccgcgttgttgacgagcaccgcgatcgggccgatgcgcacgcggatcgcgtcgatcgcgccgcgcagcgcgccgatgtcggtgagatcgcacacgacgaacaccggttcgtgcgcggcgtcggcaagccgcgcgacgagcgcgcggccggccttctcgtcgagatcgacgaacgcgacgcgcgcgccctgccgcgcgaagtgctcgacgaacgacgcgccgatgcccgtcgcgccgcccgtgatcagcaccgcgcggccgacgaggctcgggtagcgtgcgtaacgctcgtgttgcgcgtcgagcgcgccattcgattcgcgatgcgaagccatgtcgtttacctgttcgttcccggaaatgggcgccgcgctcaatcgcgcgcgccgcggttcttcaactggtcgagcagcacggcggcgagcaggatcgcgccgcgcaccagatat

SEQ ID NO: 14455 - DNA, 1374 bp, Burkholderia mallei
atggccaagcagaagacggtattcgtctgcaccgagtgcggcgggcagacgccgaagtggcagggtcaatgcccgtcgtgccacgcatggaacaccctcgtcgaatcggtcgagagcgcgccgtccgcgcaccgcttccagtcgctcgcgaagcgcgcgcccgtgcagcggctcgcggatatcgaggcggccgacgtgccgcgcttctcgaccgggatcggcgaattcgaccgggtgctgggcggcgggcttgtcgcgggcggcgtggtgctgatcggcggcgatccgggcatcggcaagtcgacgctgctgctgcagtcgctcgcgcagatcgcgagcgagcggccggcgctctatatcagcggggaggagtcgggcgcgcagatcgcgctgcgcgcgcagcggctcgcgctcctcgaaggcggcgcgagcgcggccgatctgaagctgctcgccgagatccagctcgagaagattcaggcgacgatcgacgccgagcggcccgacgtcgcggtgatcgattcgatccagacgatctattcggaggcgttgacgtcggcgcccggttcggtcgcgcaagtgcgcgaatgcgcggcgcaattgacgcgcatcgcgaagcaatcgggcaccgcgatcatcatggtcggccacgtgacgaaagagggcaacctcgccgggccgcgcgtgctcgagcacatcgtcgacaccgtgctgtacttcgaaggcgacacgcattcgtcgttccggctcgtgcgcgcgttcaagaaccgcttcggcgcggtcaacgagctcggcgtgttcgcgatgaccgagcgcggcctgcgcggcgtcgcgaatccgtccgcgctgttcctgtcgcagcacacggaggtcgtgccgggctcgtgcgtgctcgtcacgcaggagggcacgcggccgctgctcgtcgaggtgcaggcgctcgtcgacaccgcgaacgtgccgaacccgcgccggctcgcggtcggcctcgagcagaaccggctcgcgatgctgctcgcggtgctgcaccggcacgcgggcatcgcgtgtttcgaccaggacgtgttcctgaacgcggtcggcggcgtgaagatcaccgagccggccgccgatctggcggtgctgctcgcgattcactcgtcgatgcgtaacaaaccgttgccaaagggtctgatcgtattcggcgaagtcgggctcgcgggcgagatccggccgtcgccgcgcgggcaggaacgcctgcgcgaggccgcgaagctcggcttcacgaccgcgctgattcctaaggcaaatgcgccgaaacagccgatcgacgggcttcgcgtgcatgcggtcgagcgtatcgaacaggcgatcgaccagattcgcgtgctcgaa

SEQ ID NO: 14456 - DNA, 1416 bp, Burkholderia mallei
gtgcgcggtctgacgtcgcgcgtgcgtcggcggcggcattttcgcgcgccgccggcgaaacttgaaaaatcgcggcggtgtgattgcatcgttgcggatcgcggatcgcggatcgcggatcgcggatcgcggatcgcgcctcgtgcctcgtgcctcgcgcctcgcgcctcgcgcctcgcgcctcgtgcctcgcgcctcgcgcctcgcgcctcgcgcctcgcgcctcgcgcctcgcgcctcgcgcctcgcgcctcgcgcctcgcgcctcgcgcctcgcgcctcgcgcctcgcgcctcgcgcctcgcgcctcgcgcctcgcgcgaatgcgaccgcggcgcactcgcggcgttcgccgatgcgggcgcatgccgtccgtttccatttctcccgaaggtgatgcccatgtccacacccgtcaatcgacaactgcgcctgaaggcgcgccccgacggacgcgtcggtcacgagcacttcacgctcgccgaagcgccgctgcccccgctcgggccgggcgagatgctcgtgcgcgtgctgtatctgtcgatggatcccaccaatcgcgtctggatgagcgacatcccgcaatatctgccgccggtggcgatcggcgacgtgatgcgcgcgctcgggatcggccgcgtcgtcgcgtcgaacgcgccggggttcgccgagggcgatctcgtgcaggggctcgtcggctggcaggactacgcgcacgtgcgcgccgacgaaatcgcgcagtacacgaagctgcccgccgcgctcggcctgccgctgccgcgcctgctcggcgcatgcgggatgagcgggctcaccgcgtactacgggctcaccgagatcgcgccggtgcagccgggcgagacgctcgtcgtgtcggcggccgcgggctcggtgggctccgtcgccgggcagatcggcaagattcacggcgcgcgcgttgtcggcatcgcgggcggcgcggacaagtgccgctacctgaccgacgaactcggcttcgacgcggccgtcgactacaagtccgacgactggaagcgcgcgctgaaggacgcgacgcccgacggcgtgcacgtgagcttcgagaacgtcggcggcgagatcatgcgcgcggtgctgtcgcggatggcgatcggcggacgcgtcgcgctgtgcggcgtgatcgcgaactacaacaacgggcggcccgccgatgacgtcagcgtgttgatcgcgaagcggctgacgatgcgcggcttcctgattctcgattaccggaagagccgcgaggcgatcgcgacgctcgccggctggctgcgcgacggccggctgaaggcggaggaaaccgtcgccgacgggctgaccaacgcgcccgacgtgctgaatcgcctgtttgacggcagccatcgcggcaagctcgtgctgcgggtcgatccgcaagct

SEQ ID NO: 14457 - DNA, 1509 bp, Burkholderia mallei
atggactttagcataaaaggctgtgattggagcaaaggcacggcgaacgggttcctgacggggaaatccgactgcatcgtgctgggcgtgttcgaggcgcaaaccttgtccggcgcggcgctcgacatcgacgaagccacgaaggggctcgtctcgcgcgtgatcaaggcgggcgacatcgacggcaagctcggcaagaccttgtttttgcacgaggtttcgggcatcggcgcatcgcgcgtgctgctcgtcggcctgggcaggcaggatgctttcagccagaaagcctacggcgacgcggcaaaggtcgcatggcgcgcgctgctcggcacgaaagtggttcaggtcacgttcacgctcgcgcagttgcccgtgcccgagcgcgcgtccgactggggcgtgcgcgcggcgattctcgcgctgcgcaatgaaacgtacaagttcacgcagatgaagagcaagccagacgcgggcgcgccggcgctcaagcgcgtcgtgttcagcgtcgatccggccgacgacaaggcggcgaaggtcgccgcgaagcaggcggtcgcgctcgcgaacgggatggacctcacgcgcgacctcggcaatctgcccggcaacgtctgcacgccgacctacctcgcgaacaccgcgaagaagatcgcgaaggactggggcctgaaagtcgacgtgctgggcctgaagcagatccaggcgctcaagatgggctcgttcctgtcggtcgcgaagggctcggtcgagccgccgcagttcatcgtgctgcagtaccggggcgcggccgcgaaggcggcgcccgtcgtgctcgtcggcaagggcatcacgttcgactccggcggcatttcgctgaagccgggcgagggaatggacgagatgaagtacgacatgtgcggcgcgggctcggtgctcggcacgatgcgcgcggtcgccgaaatgggcctgaaggtcaacgtcgtcgcgatcgtgccgacctgcgagaacatgccggccggcaacgcgaacaagccgggcgacatcgtcacgagcatgaagggcctgacgatcgaggtgctcaacaccgacgcggagggccgcctcatcctgtgcgacgcgctcacgtacgcggagcgcttcaagccggccgccgtgatcgacgtcgcgacgctgacgggcgcgtgcatcatcgcgctcggccaccacaacaccggcctcttctcgaaggacgacgcgctcgcgggcgagctgctcgacgcgtcgcgcgaagcgggcgatccggcgtggcgcctgccgctcgacgacgagtatcaggatcagctgaagtcgaacttcgcggatctcgcgaacatcggcgggcgcccggccggcagcgtgacggccgcgtgcttcctgtcgcgcttcgcggaaaactatccgtgggcgcacctcgacatcgcgggcaccgcctggaagagcggcgcggcgaagggggcgacgggccgccccgtgccgctcctcgcgcaattcctgatcgaccgcgccggcgcg

SEQ ID NO: 14458 - DNA, 696 bp, Burkholderia mallei
atggccaagatctcgaagcgccgtcaggcatttgccgctaaggtcgatcgccagaagctgtatccgatcgacgatgcgctcgccctcgtgaaggaatgcgcgagcgcgaagttcgacgaatcgatcgacgtcgcggttcagctcggcatcgatgcgaagaagtcggaccaggtcgttcgcggctcggtcgtgttaccggcgggtacgggcaagtcggttcgcgtcgccgtgttcgcgcaaggcgaaaaggctgagcaggcacgcgccgcaggcgccgaagtggtcggtatggaagacctcgccgagcagatcaaggccggccaaatggacttcgatatcgtgatcgcttcgccggacacgatgcgtatcgtcggtacgctgggtcagatcctcggcccgcgcggcctgatgccgaacccgaaggtcggcacggtcacgccggacgtcgcgaccgcggtgaagaatgcgaaggctggccaggtgcagttccgcgtcgacaaggccggcatcattcacgcgacgatcggccgtgcgtcgttcgagccgaccgcgctgcgcacgaacctctccgcgctgatcgaagcgctgcagaaggcgaagccggcgacgagcaagggcgtgtacctgcgcaagatcgcgctgtcgagcacgatgggcgtcggcgttcgcgtcgaccaaggctcgctggccgcgcag

SEQ ID NO: 14459 - DNA, 1524 bp, Burkholderia mallei
atgaccgaaccgacccaaccgcaggccgctgtcgcagcggacgaaaaccagatcgtcgcggagcgccgcgacaagctgcgcgcgctgcgcgaccaaggcatcgcctatccgaacgacttccagccgacgcaccacgcggccggtctgcagaccgaatacgcggacgccgacaaggaagcgctcgacgcgaaggcgctcgacgtcgcggtcgccggccggatgatgctcaagcgcgtgatgggcaaggcgagcttcgcgacggtgcaggacggttcgggtcaaatccagttcttcgtgacgcccgccgatgtcggcgccgaaacgtacgacgcgttcaagaagtgggacctgggcgacatcgtcgccgcgcgcggcgtgctgtttcgcacgaacaagggcgagctgtcggtgaagtgcacggagctgcggctgctcgcgaaggcgctgcgtccgctgcccgacaagttccacggcctcgccgaccaggaaacgcgctatcgccagcgctacgtcgatctgatcgtcacgcccgagacgcgcgcgacgttccgcgcgcgcacgaaggcgatcgcgtcgatccgcaagttcatgagcgacgccgatttcatggaagtcgagacgccgatgctgcacccgatcccgggcggcgcggccgcgaagccgttcgtcacgcatcacaatgcgctcgacatgcaaatgttcctgcgcatcgcgcccgagctttacctgaagcgcctgatcgtcggcggcttcgagcgcgtgttcgagatcaaccgcaacttccggaacgaaggcgtgtcgccgcgccacaatccggaattcacgatgatggagttctacgccgcgtacaccgattaccgctggctgatggacttcaccgagcggctgatccgccaggcggccgtcgacgcgctcggcaccgcgacgatccggtaccagggccgcgagctcgatctcgccaagccgttccatcgcctgacgatcacgcaggcgatccagaaatacgcgccgaactacacggacggtcagttgtcggacgacgcgttcctgcgcggcgaactcaagcggctgggcgtcgacgtcacgcagccggcgttcctgaacgccggcatcggcgcgctgcagctcgcgctcttcgaggaaaccgccgaagcgcagctgtgggaaccgaccttcatcatcgactacccgatcgaggtgtcgccgctcgcgcgcgaatcggacacggtggcgggcatcaccgagcgcttcgagctgttcgtcaccggccgcgaaatcgcgaacggcttctcggaactgaacgaccccgaagaccaggccgcgcgcttcaggaagcaggtcgagcagaaggacgcgggcgacgaagaggcgatgttcttcgacgccgactacatccgcgcgctcgaatacggaatgccgccgacaggcggctgcgggatcggcatcgaccggctcgtgatgctgctgaccgacagcccgacgattcgcgacgtgctgctgttcccgcacctgcgccgcgaagac

SEQ ID NO: 14460 - DNA, 378 bp, Burkholderia mallei
atgaaagcacatcgtacgctgcggatttcgatgctcgctgccggcgcgctcgtgtcatcgctcgccgccgctcaaccccatggccccggcgggccgggtgacgaacgccacgggccgcctcccggcaagcacgtcgggcgcgatcacggcaagcacggcgacgacggcgcccgccccggcgagcatcgcggcgacgaaaacgccgcgtggcgccgcggagagcgcctgcccgacgaataccgggaccgccagtacgtgatcgacgactggcgcgggtaccatctgtcgccgccgccgcgcggctatcactgggtcggcatcggtggcgactatctgctcgtgcgcatctcgacgggcgtcattctgcagatcggaccg

SEQ ID NO: 14461 - DNA, 588 bp, Burkholderia mallei
atgacaaacgaaggaatcgccatgaatcgatccgaacccctgctgcaggtattcgacctgagcgtcgaagtcgcgaagcgccgcgtgctgcagtcggtatcgctcgccgtgccggcgggcgcgctcgtcgtgctgatgggcgcgaacggcagcggcaagagcacgctcggcatgacgctcgcgggccatcccgcgtatcgcgcgacgcacggccacgtgcgcttcggcgggcaggacctgctcgcgatgagcgtgcaggagcgcgcgcgcgccgtctcgggcggcgagcgcaagcgcaacgagctgctgcagctcgcgctgctgtgcccgcggctcgcgatgctcgacgagatcgactcgggaatggacgtcgacggcgtgcgcgcggcggtcgccctgatcggccggctgcgcgagcaaggcaccgcgttcgtgatcgtctcgcattatctgcagatgatcgaagcgctcgtgcccgatacggtgctgttgctcgatcgcgggcgcatcgccgaatccggcgatctcgcactcgcccgcgacatcgcggccaagggcttcgcgcgctcggacgcactcgcgcaggcc

SEQ ID NO: 14462 - DNA, 945 bp, Burkholderia mallei
atgatcgagcgtgacgatcagcgacagcggaaacagcgcgccgatcccgaggccgagcagcagcgacgcgggcaacgccaggccgagcggcgcggcgatcagcgcgatcaggccggcgaacagcgagacgagcgccgtgaagagcgcggggcggcgatccggcagccgctcgacgagcgccgacacggtgagccccgcgacgacctccgcgagcgtcacgccgccgagcaggccgcccgcggcttcgggcgaccagccgagcgacacgtagtagggcggcagccaggcgagcacgagcgtgtacgcgcccgtgccgaggccgaagaacgcggcgagcagccacgcgcgcgcgccgtgggcgcggcgcgcggcggggcgcgcgtgtgcggggcgggccgtcgcgcgggtcgcgagcggccacagcagcgcggccgcggcggcgggcagcgcccagccggcgagcgcgcaggtccagccgatcgcgtgcgcggcgaatggcgtggcgacgctcgcgaacaccgcgccgcccatgatcgacgtcgaatagaagcccatcacgctgcccgcgcgcgcggcgaattgcgtcttgatgaacgcgggcagcagcgcctgcgcggccgcgatgccgagccccgcgcacagcgcggaggcgagcagcgcggcgggcgcgcccgccgcgacgcgcgccgcgcacgcgagcccgatcagcgcgacgccgagcccgacgcccgcgcgcacgccgacgcggcgcgcgagccatggcgcgacgagcccgagcgcgcccatcagcaggatcggcagggtcgtgagcaggctcgccgcgctgtcggacaggccgctcgcgcgctggatcgtgtcgagaagcgggccgatcgacgcgagcgccgggcgcaggttcaggccgacgagaacgacggcgacgagccgccatgcgggggaaagcag

SEQ ID NO: 14463 - DNA, 846 bp, Burkholderia mallei
ttgaaaggcttccttcgcgcggcgtgtttcgcgatcctcacgttcctgtcgatcggcggcgcgtgccgcgccgagcagccggtgccgccgctcgccgcgcgcgtgacggacgagacgggtacgctcacggccgccgaacgcgcgacgctcgaacagtcgctgaaggatttcgagacgcgcaagggcagccagatcgcggtgctgatcgtgccgacgacgcagcccgagacgatcgagcagtattcgattcgcgtcgtcgagcaatggaagctcggccgcgcgaacgtcgacgacggcgcgctcctcatcatcgcgaagaacgatcgcgcgttgcgcatcgaggtcggctacgggctcgaaggcgtgctcaccgatgcgacgagtcgccgaatcatcgacgagctcatcgtgccgagctttcggcgcggcgatttctacggcggcgtctcggcgggcgtcggcggcatgatgcgcgtgatcgagggcgagccgctgccgccgccgcgcgcgcgcggcggcgaagaaggcgggctcggccgcgtgctgccgctgctgttcgtgatgacgatcgtcgcgggcggcgtgtcgcgcgcgatattcggcaggctcgcgggctcggtcgtcacgggcggcgtggtcggcttcgtcgcgtggctgtggtccggcgcgctcctcgtcgcgatcgcggccgccgcgatcgcgctcttcttcacgctgctcggcggcggaatgggcgcgcgcgtcggcgggccgttcatcggcgggcgcggcggccggggcggcgggaacgacggctttcgcggcggcggcggcggtttcggcggcggcggcgcgtccgggaggtgg

SEQ ID NO: 14464 - DNA, 411 bp, Burkholderia mallei
atggaagcttcaatcatgaccgattcgccgatgcaactcccgcaaaaaccgcccgcgctgcgcgtcgtcccgcaaccgtccgacgcgaacgttcacggcgacgtgttcggcggctggatcatggcgcaggtcgacatcgcgggctcgattccggcgagccgccgcgcgaacggccgggtcgcgacggtcgcggtcaattcgttcctgttcaagcagccggtgttcgtcggcgatctgctcagcttctacgcgagcatcgtgaagacgggcaacacgtcggtgacggtcgacgtcgaagtctacgcgcagcggatgagcctgatgagcgagatcgtcaaggtgacggaggcgacgctcacctacgtcgcgaccgactccgatcgccgcccgcgcgcgctgccgccgctcgaa

SEQ ID NO: 14465 - DNA, 945 bp, Burkholderia mallei
atgctaatggatatcaagctcgatacgccgttgctcggcgcgctgcgctgcttcgaagcggcgggccggctcggcagcttcacgaaggcggccgacgcgctgcacctgacgcaaagcgcgatcagccagcagatccgccagctcgaggcgcgcctcggctatccgctgttcgtgcgccacgcgcgcgggctcgcgttgacgccgaagggcggcgcgctgcacgaagccaccgtggcggcattcgcatcgctcggccgcacgctgcggcaactgagcgcgcccgacgcgccgctgcaggtgagctgcctgccgtcgttcgcgctgcaatggctgatgccgaggctgaccgaatttcatcggctgcatccgcagacgccggtgcggctgagggccgagtttcatgcgatcgatcgcgagacgatgagcgcggacgacatcgatatcgcgatccgctgggacccgttcagctatggcgcgctccacgtcgaaccgctgttcgacgaatcgctcgtcgcggccgccgcgcccgcgtatctcgaccggcatccgccgcgcgcgacggcgaagtgggtgtcgagcgtcgtgccgctgcacgatgcgtcggcgtggccggaggcgccgaggtatgtcgaatggcggacgtggctcgatgcggtcgtgcccggctatgcgagcgcgctgcgggggccggagttcaatctggcgagcctggcgatcgcggcggcggttgcggggcaaggggtggtggtgtgccgggaggcgctcgtcgacgacgaaatcgcgcgtggccggctcgtcaatgtgttcgcgcgccgcgtgcccgcgccggcgcaatacaaggcgatttgcgcgcggccggaagacgcgcgggtgaaagcgtttgtcggctggttgcgggcggaatcggacagttacgcggcgcggcggcaaacgcaggcgcggccg

SEQ ID NO: 14466 - DNA, 1248 bp, Burkholderia mallei
ttgcgggcgcgcggcgcgcgcccgcttttcgccttcctcccccgttttgattcgacgatgaataccgctgccgattcgctcctgaggctcgcgtcgcgcgtcgacgcgatcgagccgttctacgtgatggaaatcgtcaaggaagccgccgtgctcgagcgcgccggccgcgacatcatccatatgagcatcggcgagccggatttcacggcgcccgagcccgtcgtcgacgcggccgccgccgcgctgcgccgaggcgtcacgcaatacacgagcgcgctcggcatcgcgccgctgcgcgaggcgatcgccgcgcactatgcgcgcgcgcacgggctctcgatcgcacccgagcggatcgtcgtgacggcgggcgcatcggccgcgctgctgctcgcgtgcctcgcgctcgtcggccgcgacgacgaagtgctgatgcccgacccgtcgtatccgtgcaaccgccacttcgtcgcgacggccgaaggccgcgcggtgctcgtgccgagcggccccgaaacccgcttccagctgaccgcggacgacgtgaaaacgcgctggggcgagcgcacgcgcggcgtgctgctcgcgtcgccgtcgaacccgacgggcacgtcgctcgagcccgccgagctcggtcggatcatcgacgccgttcgcgcacgcggcggcttttcgatcgtcgacgagatttaccaggggctgagctacgacggcgcgcccgtgtcggcgctgtcgttcggcgacgacgtcgtcaccgtcaacagcttctcgaaatacttcaacatgaccggctggcggctcggctggctcgtcgtgccgccggcgctcgtcggcacgttcgagaagctcgcgcagaacctgttcatctgcccgtccgccctcgcgcagcatgcggcgctcgcgtgcttcgagccggacaccctcgcgatctacgaggcgcgccgcgccgaattccggcgtcgccgcgatttcatcgtgccggcgatcgaatcgctcggcttcaaggtgcccgtgatgcccgacggcgcgttctatgtgtacgcgcaatgcggcggcgtcgcgcatccggccgcaggagacagcgccgcgctcgtgaacgcgatgctgcacgacgcgggcgtcgtgctcgtgccggggatggatttcggagttcatgcgccgcgcgactatatccgcctgtcctatgcaaccgcgtactcgcggctcgaagaggcggtcgagcgtctcggcaagctgttcgggcgc

SEQ ID NO: 14467 - DNA, 372 bp, Burkholderia mallei
atggcaatcgcaaaagaagacatcctggcagcagtcgaagggatgaccgttctggaactgaacgagctggtcaaggcgttcgaagagaagtttggcgtgtcggctgctgctgttgcagtcgcgggcccggcagccggcggcgccgctgctgcagctgaagagaagaccgagttcacggtcgttctggctgaagcgggcagcaacaaggttgcagtcatcaaggccgttcgcgaaatcacgggcctgggcctgaaggaagcgaaggacctcgtcgacggcgcaccgaagcccgtcaaggaaggcgtcgacaaggcttcggcagacgaagccaagaagaagctggaagacgcgggcgcgaaggtcgaactcaag

SEQ ID NO: 14468 - DNA, 783 bp, Burkholderia mallei
atgttcacgagacttcgcgaagacgtcgccacgatccgcgagcgcgatcccgccgcccgcagcgcctgggaagtgctcacgtgctatccgggattgcacgcgctcgtgtttcaccggctcgcgcacgcgtgctggcgttcgggctggcgctggctcggccgtttcgtgtcgcagctcggccgtttcctgaccggcatcgaaatccatccgggcgcgacgcttggccgacgcgtgttcatcgatcacggcatgggcgtcgtgatcggggagacggccgtcatcggcgacgactgcacgatctaccagggcgtgacgctcggcggcacgtcgctcgcgcgcggcgcgaagcgtcacccgacgctcgagcgcggcgtgatcgtcggcgcgggtgcaaaggtgctgggtggcttcacggtgggcgcgggcgcgaagatcggctcgaacgctgtcgtcgtgaagcccgtgccggcgggcggcaccgcggtcggcaacccggcgcgggtcgtggtgcccgccgaggcgaagcgtacgcccgagcgcaccgcgttctgcgcatatgggatcacgccgaacgccgacgatccgatgtcgctcgcgattcacggcctcatcgatcatgcggcaaaggaggcgcagcgcgtcgacgaaatcgtcgtcgcgctcgagcgtctcggcgcgcacctggatgccctgcagggcacggacggcgcgcggctcgacttgcgccgcctgtccgctgcgttcgaggggcgcgcgctcgacggggggacggcggccgagcgc

SEQ ID NO: 14469 - DNA, 879 bp, Burkholderia mallei
atgtcgattctgatcaacaaagacacgaaggtcatcacgcagggcatcaccggcaagaccggccagttccacacgcgcgcctgccgtgaatatgcaaacggccgcgaagcgttcgtcgcgggcgtgaacccgaagaaggccggcgataatttcgaaggcattccgatctacgcgagcgtcaaggaagcgaaggcggaaaccggcgcgaccgtgtcggtcatctacgtgccgccggcgggcgccgccgcggcgatctgggaagcggtcgaagccgatctcgatctcgcgatctgcatcacggaaggcattcccgttcgcgacatgatcgaagtgaaggaccgcatgcgccgcgaaggccgcaagacgctgctgctcgggccgaactgcccgggcacgatcacgccggacgaactgaagatcggcatcatgccgggccacatccaccgcaagggtcgtatcggcgtcgtgtcgcgctcgggcacgctgacgtatgaagccgtcgcgcaactgacggcgctcggcctcggccagtcgtcggcggtcggcatcggcggcgatccgatcaacggtctgaagcacatcgacgtgatgaagatgttcaacgacgatccggacacggatgccgtcgtgatgatcggcgaaatcggcggcccggacgaagcgaacgccgctcagtggatcaaggacaacatgaagaagcccgtcgtcggcttcatcgcgggcgtcacggcgcctccgggcaagcgcatgggccacgccggcgcgctgatctcgggcggtgcggatacggccgaagcgaagctggaaatcatggaagcgtgcggcatcacggtcacgcgcaatccgtcggagatgggccgcctgctgaaggcagcgctg

SEQ ID NO: 14470 - DNA, 507 bp, Burkholderia mallei
atgacgaaatacgacgagcggttcaagcttgaagtggtgcagcggtatctgtctggcgacaaagggtgcaaagcgcttgcgagagagtttggggtgagcagcacacaggtggagcaatgggttgccagctacaagcgccatggtgccgatggattacggcgcaaagggcacgtgaagtacagcgcacagttcaagctggaggcgctggaacgcatgcagcgggagaatctatcccgcacgcacatgcaagcgctgctggacattcgtgatgcaggagccatcgcccgttgggaacgccagtatcatgagggtggtttcgccgccctcctaccacgtccgaagggacgccgccccaagatgtcgacttcgccgctttccgaacctgcgccgccagaatccgaaccggatactcgcacccgagagcaattgctcaaggaagttgagtacctgcgcgcggaggtagcctacctaaaaaaactcgatgccttgattcgggcggagcaacgt

SEQ ID NO: 14471 - DNA, 10002 bp, Burkholderia mallei
ttggctgagcttgacgtattgccggccgccgaacgcacacaggtactgcacggctggaacgaaacaggccgcgcgtatgcgcgggatgcctgcctccatcagttgttcgaagcccaggtatcgcgaacgccggaagcggcggcggtgatctgcggcgacgagacgctgagctatacggacctcgacgcgcgtgcgaatcgcctcgcgcactacctgcgcggacaaggcgtcgggccggacacgcgcgtggggctggcgctcgggcgcggcgtcgagatgatgacgggattgttggcgatcctgaaggcgggcggcgcatatgtgccgctggacctaggctatgcgtcggagcgcttgcgcgcgatcctggacgacagccggccggcgatcgtgctggcggacgcggcggggcgtgcggcgctggatgcgctggccggtgcgccgccgattgcggacctgcacgcggatgcgtcgcgctggagcgcgttgccttcgacgccgccgcgtgtcgaaggcctgacgccgcgccaccttgcctatgtgatctacacgtcgggctcgacgggacagccgaagggggtgatggtcgagcacgcaagcgtggtgaatctgtggcgtgcgctggacgaggcgatctaccgcacgcacccgagcgcacggcgcgtgagcctgaacgcatcgatcgcgttcgattcgctggtcaagcagtgggtgcagttgctgtcggggcggacgctggtggtggtgccggagccggtgcgcttcgacgggaggcgtctgctcgatgcgatcgggcgagaccggatcgacgtcttcgattgcacgccgtcgcaactggcgttgatcgagggggcgcgagggccggaggacgaagcctatccgcaagtgacgctggtggggggcgaggcgatcggcgaagggatgtggtcggagttggcgagcgcatcgagccggacgtactacaacgtgtatggtccgacggaatgcacggtggatgcgacgctcgcgcggatcacggcggagcatgcgccgcacatcggcgggccgctggcgaacgtgcgggcctatgtgttgaacgagcggttgagcccggcgccggtgggcgtgcgcggggagctctacatcggcggggcgggtgttgcgcgcgggtacttgaaccggccggagctgacgcgggagcggttcatcgacgatccgttcgtggcgggtgggcggctgtataagacgggggatctggcgcgttggcgtacggacgggagcctggagtatctggggcgaaacgacttccaggtgaagatacgcggtttccggatcgagttgggggagatcgaggcgcagttggcgaaggtgacgggggtgcgcgaagtggtcgtgcttgcgcgagattcggcagcggcggtgcacgatagcgcgacggaacacgcaactccgaatgcgctttcgccctcgcccgagacctcaaccgcgaccgcgacggcaacagcaacggcaacagcgacagagaaacgcctcgtcgcgtactacacgggtgacgccgatgtcgcggcattgagagcgcaagccgcgcagcacttgccgagctacatggtgccgtcggcgtatgtgcggctggacgcgtggccgctgacaccgaacggcaagctggaccggcgcgcattgcccgagccggcagacgacgcatacgcccgcgccgaatacgaagcgccgcagggcgcaaaagaagaagcactggccgcgatctggcgggacttgctgcaagtcgatcgaatcagccgccacgacaacttcttccagttgggcggtcattcgctgcaggcgatcagcctgggcgacatgatgcgcgagcgcggcttgcacgccgacgtgcgcacgctgttcaacgccgagacgctggccgcgctcgccgcgcaatcgggcacggacagcatcgatgtcgacgtcccgccgaacctgatccccgtcggcgccgcgcgaatcacgcccgacatgctgccgctcgtcgcgctgacccagccgcagatcgacgcgatcgcgcagcaggtagacggcggcgcgacgaacgtgcaggacatctatccgctcgcgccgctgcaggaaggcatgctgttccatcatctgctgcacacgcagggcgacctctatctggaaccgcatctgctcgcgttccgcacgcgcgagcggctcgagcggttcctgtccgcgctgcaatgcgtgatcgaccgccacgacgtgctgcgcaccggcttcttctgggaaggcgtcccccagccggtgcaggtggtgtggcggcgcgcgcggctgccggtcgaatacgtcgagctgccggacggccacggcgatgtcgcgagccagctcgaagcccgctgcgatccgcgccgccatcgcatcgacatcggccgcgcgccgctcgtgcactgccacgtcgcgcacgatgcgcgcaacgaccgctgggtgctcggcgtgctgacgcaccatctggtcagcgaccatacgacgctcgcgctcctcgccgaagaagcgcaggcgttcgagcagggccgcggcgatgcgctgccgcctgcggtgccgtttcgcaacttcgtcgcgcacgcgcgcctcggcacgagcgagcgcgagcacgaagcgttcttccgcgagatgctgggcgacgtcgacgagccgaccgcgccgttcggcctgctcgacgtgcagggcgacggcagcgcgatcgtcgagcaccggcgcgcgctcgcgcccgggttgtcccgctcggtgcgcgcgcacgcgcggcgtctcggcgtgagcgcggcgagcgtgatgcacgtcgcatggagcctcgtgctcgcgcggacggcgaaccggcgcgacgtggtgttcggcacggtgctgttcggccgcatgcaaggcggcgcgcacgcgcatagaacgatgggcctcttcatgaacacgctgcccgtgcggatcgcgctcgacgagtcggatgtcgagacgagcctgatcgcgacgcacgatcgcctcgcgcggctgctgcgccacgagcacgcgcccctcgcgctcgcgcagcgctgcagcgcggtacccgcgcaggcgccgctgttcacgtcgctgctgaactaccgctattcgccgcacgaagagcagggcgacgcaacggacgacgacgttcagttcatcgccgcgcgcgagcgcaacaactacccgctgacgatgatcgtcgacgacacgggcgagggcttcgcgctcacggcgcaggtggacgcctcgatcgacgcggcgcgcgtctgcgcgttcatgcatacggcgctcgagcagctcgtgcgcgcgctcgacgacgcgcgcggcgcggtgctcgccgagctcgacgtcctgcccgccgacgagcatcggtgcgtggtgtcggcctgcaacgatacggatgccgaactgccgggcgtcgacttcgtcgatcgccggttcgaggcgcaggcggcgcgcacgcccgaggcgatcgccgtcgcgtgcggcgcgcacgcgctcagctacgcggcgctgaaccggcgtgcgaatcgcctcgcgcactatctgcgcgcgcacggcgcgggcccggagcgcgtcgtcgcgctcgcgctcgagcgctcggtcgacatgatggtcgggctgctcggcatcctgaaatcgggcagcgcctatctgccgctcgatcccgcgtatccggccgagcggctcgcgtacatcgtcgacgacgcgcgccccgcgctgctgttgactgaagccgcgctgcgggacgactggcgagacgccggcgcacccgtcgtgctgctcgacgcggacgggccggcgatcgacgcgtgtccggatcacaacccggacgccgccgccggccgggatgcgcgcacactgtcgtcgctcgcgtacgtgatctacacatcgggttcgacggggcgcccgaagggcgtgatgatcgagcatcgaaatctcgcgaacttgctcggcgcgatgggcgagcagcccggcatcggcgcgcacgacgtgctgctcgcggtgacctcgctgtcgttcgacatcgccgcgctggagctcttcctgccgctgctgcacggcgcgcgcgcggtgatcgcggcgcgcgacgacgcggccgatccggcgcggctcgcgcatctgatcgaaagcagcggggcgagcctgatgcaggcgacgccttcgacgtggcgcatgctggcgcagcacggctggccgcgatcggcgcggccgctgacgctgctgtgcggcggcgaggcgctgccgcccgcgctcgccgagcggctgctcgcgcatgtccccgcgatttggaacctgtacgggccgacggagaccacggtatggtcgaccgtgcggcgcgtgacgacgcccgtcgtcgacatcggagggccgatcgccaacacgcaggtctacgtgctcgacgagcggctgcgccccgcgccgatcggcgtctcgggcgagctgtacatcggcggcgcgggcgtcgcgcgcggctatctgaaccgccccgagctcacgcgcgagcgcttcgtcgacgatccgttccggcgcggcgggcggctgtaccgcaccggcgatctggcgcggcggcgcgcggacggcaacctcgagtacctcggccgcaacgatttccaggtgaagattcgcggcttccggatcgagctcggcgaaatcgaggcgcagctcgcgaaggcgcacggcgtgcaaggcgtggcgcttgccgcgcgcgacacgcccacggcagacaagcggctcgtcgcgtactacgtcggcgacgcgagcgccgcggcgctgcgcgagcacgcggccgcgcgattgccggcgtacatggtgccggcggcctatgtgcggctcgccgcgtggccgctgacgccgaacggcaagctcgaccgcgcggcgctgcccgcgccggacgacgaagcgtacgcgcgcgccgaatacgaagcgccgcggggcgagcacgagtgcaagctcgcggcgatctggcgggccgtgctgcaggtcgaacggatcggccgtcacgacgatttcttcgagctgggcggccattcgctgctcgcggtgcgcgcgatcacggcgatgcgcgatgcgttcggcagcgacacgagcctgcgcgacctgttcgcgcggcccgtgctgaaagatctcgccgaacacgcgagcacggccgcgcgtgcgcgcgacgcggcgatcccgaaggccgcgcgcggcgagcccgcgccgatgtcgttcgcgcagcagcggctgtggttcctcgcgcggatgggcgggctcggcgatgcgtatcacatgccgatcgccgtgaggctgcgcggcgcgctcgacgtcgacgcgctgcagcgcgcgctgagccgaatcgtgtcgcgccacgatgcgctgcgcacgacgttcgcgctcgaaggcgagcaaccggttcagcgcgtgcacgcggatgatggcgcggggctgcgcttgcgcatcgacgatctgcgcgggtgcgccgacgccggcgcgcggcgcgcgcggatcctggccgggcaggcgagcgagccgttcgatctggcgcgcgggccgctggttcgcggcgcgctcgtgcgcgaggccgacgacgtgcacacgctatgcgtgacgatccatcacatcgtgtcggacggctggtcgatcgacgtgttctgccgcgagctgagcgagttgtatcgcgcattcgccggcgggcagcccgacccgttgccgccgctgccggtgcagtacgccgattacgcggcatggcagcaacgcggcatcggcggtgcggcgctgcacgcgcaggccgaatactggcgcgatgcgctcgcgggcgcgccgacgctgctcgaactgccgacggaccggccgcgtccgccgcagcccgactatgcgggcgcgacggtcgggctcgcgctcgacgcgccgctgacggcgggcttgcgcgcgctcgcgcggcgtcacggcgcgacgctcttcatgaccgtgttcgccgcgtggagcgtgctgctgtcgcgcctgtcgcggcaaaccgacgtggtgatcggcacgccgagcgcgaaccgcggccatgcgcagatcgagggcttgatcggctttttcgtcaacacgatcgcgctgcgcgtggacctcgacggcgcgccgaccgtggccgagctgctcgcgcgcgtgaaggcgcgcacgctcgccgcgcagcagcatcaggacattccgttcgagcatgtggtcgagcgggtgcagccggcgcgcagtctctcgcatagcccggtgtttcaggcgatgttcgcgtggcagcacgcgtcgcgcggcgagatgcggctcgaagggctgcgcgcggagccgctcgacgacgcggcgcgcacgatcgcgaagttcgatctgacgctgtcgctgcgcgagagcggcgatgcgatcgacggcggtctcgaatacgcgagcgcgctgttcgagcgcgcgacgatcgagcgcttcgccggctacctgcggcgtttgctggaagggatggtcgccgatgacacgcagcgcgtcgatgcattgccgatgctgtcgcgcgacgaacggcgcgatctgatcgagcgccggaacgcgaccgcgcggccgtatccggcgaacagcggcgtgcatcggctgttcgaggcgcaggcggcgcgcacgcccgatgcgaccgcgatcgtcgacggggcgacgacgctcgactatcgcgcgctcgatgcgcgcgcgaaccgcatcgcacacgcgctcgcgcacgccggcgtgcgcgcgggcgatcgcgtcgcgctgcatctcgagccgtcgatcgggctcgtcgcggcgcagctcgcggtgctcaagctcggcgccgcctacgtgcccgtcgatgtcggcaatccgcccgcgcgcaaggcgttcgtcgcgcaagacagcggcgcgcggctcgtgctcggcgacgcggcgctcgactggccggcggcggccggcgtgccgcagcgcgatctggcggcgctgcttgccgggccgtggccgtcggacgcgcccgctcgcgcgccgcagtgcggcggcgacacaccggcatacgtgatgtacacgtcgggctcgagcgggcagccgaagggcgtgctcgtcacgcatcgcggcatcgcgcggctggcggtgaacagcggttatgcgacgttcgacgcgtcggaccggttcgcgttcgcatcgaacccggcgttcgacgcgtcgacgttcgaagtgtggacggcgcttctcaacggcgcgagcatcggcatcgtgaagcgcgacgatctgctcgatctcggcgcgctcgccggcaagctgtcgtcgatcggcgtcacctgcctgttcctcacgacggcgctgttcaaccggtgcgtgtcgttcgatccggcgatgttcgcgcggctgcgctgcgtgatctcgggcggcgagcgcgccgatccggcggtctaccggaaggtgatggaagcgggcccgccgcgccatctgctgaacgcgtacggcccgaccgagaccaccacgttcgccgcggtctgggaagccgagccgcgcacgctcgccgcgcaggccgcgccgatcgggcggccgatcggcaatacgtcggtctacgtgctcgacgcgtacggcgcgccggtgcccgtcggcgtgacgggcgagatccacatcggcggcccgggtgtcgcgcaaggctacctgaaccgaccggcgctttcggccgagcgcttcgtgcgcgatccgttcgtcggcggcgacgcgcggatgtaccgcacgggcgacctcggccgatggcggcccgatggcatgctcgactgcatcggccgcgccgacttccaggtgaagattcgcggctttcggatcgagctcggcgaaatcgaagcgtgcctgctcgaacacggcgcgctcgcgcaggcggcggtgctcgcgcgcgacgacggcggcgacggcggcaagacgctcgtcgcgtattacgtgccgcgcgcggggcacgaggatggcgcgcccgcgctgcgcgcgcatctggccgcacgcctgcccgaatacatggtgcccgccgcgtacgtgcggctgccggcgatgccgctcacgcccaacggcaagctcgagcgccgcgcgctgcccgcccccgacgagcgatcgtacgtgcggcgcgactacgcggcgccgcagggcgagatcgagacgacactcgcgcggatctgggcggagctgttcggcatcgagcgcgtcggccggcacgacggcttcttcgaactcggcgggcattcgctgctcgcggtgcggatggtcgcgcgcgtgcacgatgtgctgggcgtcgaggtgccgctgcgcgcgctgttcgccgatccggtgctgcacgtgttcgcgtcggcggtcgcgcgcgcgtcgacgcgccaggcgtcgtcgaatctcgtcgcgttccgcagcgcgggcacggccgcgccgctcttcttcattcattcggggctcggcgagatcggcttcgtcggcgatctgctgcccggcatcgcgccggagattccggtgtacggcttcgcggcggtcggtttcctcgcgggcgagacgccgcacgcgacgatcgaggagatggccgcgcaatatgtcgacgcgatgcggcgcgtgcagccgcatgggccgtatcggctcgccgggtggtgcgcgggcggcaacatcgcgttcgaaatggcccatcagctgatcgcggccgacgagacggtcgagttcctctgcatgatcgattcgccgacatccgcgccgatcgaccgctcggtcaccgcgtgcgtgctcgcgcgcattcccgacgacattccggaggcgttgcgcacgcggcttcatgcgctcggcgatgccttcgacgtgcgcggcatgctgcacgcgtgccaggcggcgggcatgctgccgatcgatctgccgaccgggctgatggagcggcacgtcgcggtgcaatacgcgatcaagcatgcgaagctgaactacgtgccgccgcgtctgcccgtcgacgtgattcacttcgtcgcgcaggacgagccgatgtggcgcaacggctgggcgatggacggctggcacgacgtcgcggaccgggtgatctgcctgcccgcgagcggcgaccacatgacgatggtggcggcgccgcacgcggagcaactggggcggcgcatcacggatgcgctcgccgtgcacggcgggccgcgcgcggatggcgcggagcgcggctacgcgccgcgcatcgcgatccagacggccccgcgcgacgcgcgcgcgccgacgctcttctgcattccgggcgccggcgcgagcgtgacgacgttctcgacgctcgcgcggcatctgccggcgacgttctccgtggacgggctgcagccgcgcggcctgtgcgggacgatggtgccgtatctcgacgtcgagacggccgcgcgcgcgtacctgagaagcatccggaaagccgcgccgcgcgggccgtaccacctcgtcggccattcgttcggcggctgggtggcctacgagatcgcgtgccggctgcaggagcagggcgagcgcgtcgcgacgctgatgctgctcgacaccgagcggcccggcgcgaccgacatcgtgcgcgggcgcaagacgcgcgtggacgcgctcgcgaagctcgtcgagctgtacgagatgcatctgggccgcccgctcggtgtgagccgcgacgatctggccgcgctcgcgcacgatgcgcagatcgagcatctgcgcgcggcgctcgtgcgcgcgaagatcctgccgccgtccgtgcatccgaacgtgctgcttggcgtcgtgcgggtgctcgagatgaacgtgaacacgccgtatcggcccgcgggtctctacgcggggacgatgcacgtcgtgctgattgcgaacgcgaaagcggacgcggacctcgacgcgtggcgcgacgagcaggccgagcagtggcgcggcctcgcggacgacgtgcggatcgtgcgcgcgggcggcaatcacatgacgatgctgcagccgccgcacgcggcgtcgatcgcggcgctgctcgagcgcacggccggcgcgcccgcgcggctcgcgcaggtgcac

SEQ ID NO: 14472 - DNA, 1092 bp, Burkholderia mallei
atgaagcagccaccctatccgaccgacgacgcgcgctgggccgcgctcgtcgcgcgcgacgtcgacgccgacggcgcgttctgctacgcggtcaagacgaccggcgtgttttgccggccttcgtgcgcgtcgcggctgccgaggcgcgagaacgtgtcgtttttcgccgacacgggtgccgcgcgcgcggccggctatcgcccatgcaagcgctgtcggcccgagggattgccgcgcgaactcgacatcgtcaaccgcgcgtgcgcggtgctcgacgcgcatcgtcaggaccgcttcacgctcgcgcaactgagcgatgcggttcacgtgagcccgtttcatcttcagcggctgttcaagcgcgtcgtcggcgtctcgccgcgccaatatcaggccgcgcagcgcggcgccgccttgcgcgacgcgctgcaaagcggtgccgccgtcacgcgcgcggccgtcgacgcgggcttcaactcgccttctcggctctatgaatcggtgccgcgcgagctcggcatgtcgccgtccgcgttccgtcgcaagggggccggcctgaagatcgattacgcgacggccgatacgcgccttggcgtcgtgctcgtcgccgcgacgagcaagggcatctgcaagattgcattcggcgacgccgcggcgccgctcgtcgacgaactccgaacggggttcgcgaatgcgcagattgccgagtcgcccgagcggatcgcgccgttcatcgcgcagatcgatgcgtatctgaacggtactcgccggcgcttcgagctgccgctcgatcttgccgcgaccgaattccagcagcgcgtgtgggatgcgttgcgtcggattccttatggcgagacgcgcagctacacgcagatcgccgaggcgctcggcgcgccgcgcgcggtgcgggcggtcgcgagcgcgtgcgcatcgaacccggttgcgctcgcgattccgtgccatcgcgtcgtgcagaaaggcggctcgctcgccggctaccggtggggcttgccgcgcaaggcggcgctcctcgatgccgaggcgcagcgcgcggcgggcgaatccgtcgaatccgccgtggaccacgcagct

SEQ ID NO: 14473 - DNA, 1872 bp, Burkholderia mallei
atgttttcgaaggcagcagtgtggctcgtgatcgcactggtgctgtttacggtgttcaagcagttcgacaagccccgcgtccaggaaggcgtctcctattcgcagttcatggatgacgcgaagaacggcaaggtcaagaacgtggtcgtgcaggggcgcaacctcaccgtcactcccgcggatggtcagaagtatcagatcgtgtcgccgggcgacatctggatggtcggcgatctgatgaagtacggcgtgcaagtcagcggcaaggccgacgacgagccgaacgcgctcgtctccgcgctctactatctcggccccacgctgctcatcatcgtgttctggttctacatgatgagacagatgcagggcggcggtaagggcggcgcgttctcgttcggcaaatcgcgcgcgcggctgatcgacgagaacaacaacgcggtcaacttctccgacgtcgccggctgcgacgaagcgaaggaggaagtgtccgagctcgtcgatttcctgcgcgatccccagaaattccagaagctcggcggccgcatcccgcgcggcgtgctgctcgtcgggcctcccggcaccggtaagacgctgcttgcccgcgcgatcgcgggtgaggcgaaggtgccgttcttcagcatctcgggctcggacttcgtcgagatgttcgtcggtgtcggcgcggcccgcgtgcgcgacatgttcgagcaggcgaaaaagcatgcgccttgcatcgtgttcatcgacgaaatcgacgcggtcggccgtcatcgcggcgccggcatgggcggcggcaacgacgagcgcgagcagacgctgaaccagatgctcgtcgagatggacggcttcgaggcgaactccggcgtgatcgtgatcgccgcgacgaaccgctccgacgtgctcgacaaggcgctgctgcgtccgggccgtttcgaccgccaggtctacgtcggcctgcctgacatccgcggccgcgagcagatcatgcgcgtgcacctgcgcaaggtgccgatcgcgaacgacgtcgacgcggcggtcatcgcgcgcggcacgccgggcttctcgggcgccgatctcgcgaatctcgtcaacgaggcggcgctcttcgcggcgcgccgcggcaagcgaatcgtcgagatgcaggatttcgaggacgcgaaggacaagatcttcatggggccggagcgcaagtcggcggtgatccgcgaggaagcgaagcgcgcgaccgcctaccacgagtcgggccatgcggtgatcgcgaagctgctgccgaaggccgatccggtccacaaggtcacgatcattccgcgcggccgcgcgctcggcgtcacgtggcagttgcccgagcacgacaacgagacgtattcgaaggattacctgctcgaccgcctcgcgatcctgttcggcggccgggtggccgaagagctgttcctgaatctcgtgagcaccggcgcgtcggacgatttcaacaaggcgacgcagacggcgcgcgcgatggtcgcgcgcttcggcatgaccgatgcgctcgggccgatggtctacgtcgacgacgagaacgacggcggcccgttcgggcgcggcttcacgcgcacgatctcggaggcgacgcagcagaaggtcgacgcggaaatccgccgcgtgctcgacgaacagtacggcctcgcccgccggctgctcgaggagaatcgagacaaggtcgaggcgatgacggccgcgctgatggagtgggaaacgatcgacgccgaccagatcaacgacatcatggaagggcgtccgccgcgttcgccgaagagcgtgccgccggccggcgatccttcgtcgggcggttcgtccggcgccgaagtcaagccgggcaacgccaccgcgccggca

SEQ ID NO: 14474 - DNA, 1467 bp, Burkholderia mallei
atgactacagctcacgaaacccttgcactgaaagatcccgcgctgttgcgcgagcgcgcgttcgtcgcgggcgaatggcaggccgccgacggcggcgcgacgctcgaggtccgcaacccggcgacgggcgcgctgatcggcacggtgcccgcgatgggcgcggccgagacgcgccgcgcgatcgacgcggcgaacgccgcgtggcccgcctggcgcaagaagaccgcgaaggagcgcgcggcgatcctgcgcaagtggcacgatctgatgatcgcgcacgcggacgatctcgcgctgatcctgacgaccgagcagggcaagccgctcgccgaggcaaagggcgagatcggctatgcggcgtcgttcctcgaatggttcgccgaggaaggcaagcgcgtgtacggcgatacgatcccgacgcccgccgccgacaagcggatcgtcgtgacgaaggagccggtgggcgtgtgcgcggcgatcacgccgtggaacttcccggcggcgatgatcacgcgcaaggtcggcccggcgctcgcggccggttgcccgatcgtcgtgaagccggccgaggccacgccgttctcggcgctcgcgatggcggtgctcgccgagcgcgcgggcgtgccggccggcatgttcagcgtcgtcacgggcgagccgaaggcgatcggcggcgaactcacgtcgaacccgatcgtgcgcaagctgtcgttcaccggctcgacgccggtcggacgcctgctgatggcgcaatgcgcggcgacggtcaagaaggtgtcgctcgagctcggcggcaacgcgccgttcatcgtgttcgacgacgcggatctcgatgcggccgtcgagggcgcgatcgcatcgaagtaccgcaacagcgggcagacctgcgtctgcacgaaccgcttctacgtgcacgagaaggtctacgacgcgttcgccgagaagctgaccgcggccgtcgcgaagctgaaggtcgggcccggcaccgaggccggcgtcgtgcagggcccgctcatcaacggcgcggcggtgcgcaaggtcgaagcgcacatcgccgacgcgctcgacaagggcgcgcgcgtgacgacgggcggccagcgccacccgctcggccacggcttcttcgagccgaccgtgctgacgggcgtcacgcccgacatgaaggtcgcgaaggaggaaacgttcggcccgctcgcgccgctgttcaggttctcgaccgaggaagaagcgatccgctacgcgaacgacaccgagttcggcctcgccgcgtacttctacagccgcgacatcggccgcgtgtggcgcgtggccgaggcgctcgaatacgggatggtcggcatcaacgccggaatcatctcgaacgaggtcgcgccgttcggcggcgtcaagcaatcgggcctcggccgcgagggctcgcactacgggatcgacgattacgtcgtgatcaagtacatgtgcgtcgcggtg

SEQ ID NO: 14475 - DNA, 1764 bp, Burkholderia mallei
atggacggaaatccgtttctgaaaatacagagcctcggcagggcgctgatgctgccgatcgcggtgctgccggtggcgggcatcctgctgcgcctcgggcagcaggacgtgctcaacatcaagatgatcgccgacgcgggcggcgcgatcttcgagaacctgccgctgctgttcgcgatcggcgtcgcggtcggcttcgcgaaggacaacaacggcgtggcggcgctcgcgggcgcgatcggctatctgatcgaagtcgcgatcatgaaggacatcgatccgaagctgaacatgggcgtgctgtccgggatcatcgcgggcgtcgtcgcggggctgctgtacaaccgctacaaggacatcaagctgcccgactacctcgcgttcttcggcggcaagcgcttcgtgccgatcatcacggggctcgcgtgcgtcgtgctcgggatcgtgttcggctacgtatggcagccggtgcagcacgcgatcgacgcggtcggccagtggctgctgacggcgggcgcgatcggcacgttcgtctacgggttcctgaaccgcctgttgctcgtcacggggctgcaccacatcatcaattcgctcgtctggttcgtgttcggcacgttcacgccggcgggcggcgccgcggtgacgggcgatctgcatcgcttcttcgcgggcgatccgagcgcgggcggcttcatggcgggcttcttcccgatcatgatgttcggcctgccggccgcgtgcctcgcgatgtttcacgaggcgccgaaggcgcgccgcgcgatcgtcggcggcctgctgttctcgatggcgctcacctcgttcctgacgggcgtgaccgagccgatcgagttcagcttcatgttcctcgcgccggtgctgtacgtgatccacgcggtgctcacgggcctttcgctcgcgatctgccagttgctcggcgtgaagctcggcttcacgttctcggcgggcgcgatcgactatgtgctgaactacgggctgtcgacgaagggctggatcgcgatcccgctcggcctcgcgtacggtctcgcctactacggcctcttccgcttcttcatccgcaagttcaacatggcgacgccgggccgcgagcccgcgggcgcggacgcgcaggcgcagtcgttcgcgtcgggcggtttcgtcgcgccgacggcgggcgcatcggtgccgcgcgcgcagcgctacatcgcggcgctcggcggcgcggcgaacctgtcggtcgtcgatgcgtgcacgactcggctgcgtctttccgtcgtcgatcccgagaaggtgtccgaagcggatctgcgcacgatcggcgcgcgcggcgtgctcaagcgcggcggcagcagcgtgcaggtgatcatcgggccggaggcggacctcatcgccgatgagattcgcgcgacgctcggcagcggcgcggcggcgcccgcggctgcggctgccgcggcgcctgcggcggcggcaacggcaacggcggcgggcgcgcagtcgggcccgctcgatccggagccgacgcgctggctcgcggtgttcggcggcgcgacgaacgtcgcttcgctcgacgcggtcgcggcgacgcgcctgcgcgtcgtcgtacgcgatccgtcggcggtcgatcgccagcgcctcgcgacgcttgacgtcgcctgggtcgcgagcgacacgttccatatcgtctgcggccagtcggcgccgcgctatgcgcagcagctcgccgcgcgcctgccgtcgtccgacggcggcacggcggcccagcccgcc

SEQ ID NO: 14476 - DNA, 372 bp, Burkholderia mallei
atgcgtcattacgaaatcgtcttcatcgtgcaccccgatcagagcgagcaagtgcccgcgatgatcgagcgctacaagtccacgatcacgtcgcacggcggtcagatccaccgcgtcgaagactggggccgccgccaactggcctacatgatcgagaaactcgcgaaggctcactacgtctgcatgaacatcgagtgcgaccagacgacgctcgacgaactcgaacacgcgttcaagttcaacgacgccgtgctgcgccacctcatcgtcaagatgaagaaggccgaaaccggcccgtcgccgatgatgaaggaagttcagcgcgaagaagccaagaaggcggctgctgcccagccgaccgaagcgcaggct

SEQ ID NO: 14477 - DNA, 1335 bp, Burkholderia mallei
atgtcccaccgcgaaggcagtctggaggccccgacccggcacccgctcgattggcgctcggacgcgttctacgatcaggcggcgatcgacgccgagctcgcgcgcgtgttcgacatctgcgcgggctgccggcgctgcgtgtcgctgtgcggcgcgttcccgacgctgttcgatctcgtcgacgagaccgagacgggcgaggcgcatgcggtcgatccgaagtcgttcggcaaggtcgtcgaccaatgctacctgtgcgacctctgctacatgacgaaatgcccgtacgtgccgccgcatccgtggaacgtcgactttccgcacctgatgttgcgcgcgcgggccgcgcgctacaggcgcaacgaagtcaggctgcgcgacaagctgctgtcgaacaccgacatgctcggccatttcgccggcattccgatcgtcacgcaggccgtcaatgcggcgaaccgcacgccggcgatgcgcggcgcgctcgaggcgacgttcggcgtcgaccggcgcgcgtggctgccgccgttcgcatcgcgcaagttccgccgggtcgcgccgcgctcgcccgccccgccgccgcgcgacggcgagcgcacgccggggcgcgtcgcgatctacgcgacctgttacgtgaactacaacgaacccggcatcggccacgatctgctcgcggtgctcgcgcacaacggcattccgtacgaactcgtcgcgagcgaagcgtgctgcgggatgccgctgctcgagcagggcaatctcgaaggcgtcgccgcgaagaaggcggcgaacatccccgtgctcgcccgccatgcgcgggaaggccatgcgctgatcggcgcgattccgagctgcgtgctgatgtacaagagcgagttgccgctgatgttccccgacgatgccgacgtgcgcgcggtggccgacgcgttctgggatccgttcgagtacatgatcgcgcgccatcgcgacgggctgctgaagaccgatttcaagcacgagctcggcgtcgtgtcgtaccacgtgccgtgtcatgcgcgcgtgcagaacatcgggcgcaaggccgcggacgcgctgtcgctcgtgccgggcacgaaggtgaaggtcgtcgagcgctgctcgggccacgcgggcacgttcggcgtgaagcgggagttccacgcgcaggcgctgaagatcggcgcgccggtattcaacgcgatcgcggagcaggcgcccgattacatgtcgtcggattgcgcgctcgcggggcaccatatcgaagagggcatcggcgcgaagggcgtcgagccgccgcccttcgcgcatccgatcacgttgctgcgcagggcctacggcatc

SEQ ID NO: 14478 - DNA, 789 bp, Burkholderia mallei
atgggctttctcgacggtaaacgtattctgctgacgggcctcttgtcgaaccgttcgatcgcttacggcatcgccaaggcgtgcaagcgcgaaggcgccgagctggcgttcacctacgtcggcgatcgcttcaaggatcgcatcaccgagttcgcggccgagttcggcagcgaactcgtgttcccgtgcgatgtcgccgacgatgcgcagatcgatgcgctcttcgcgtcgctgaagacacactgggattcgctcgacggcctcgtccactcgatcggcttcgcgccgcgcgaggcgatcgcgggcgacttcctcgacggcctcacgcgcgagaacttccgcatcgcgcacgacatctccgcatacagcttccccgcgctcgcgaaggcggcgctgccgatgctgtcggacgatgcgtcgctgctcacgctgtcgtatctcggcgcggagcgggcgatcccgaactacaacacgatgggcctcgcgaaggcggcgctcgaggcgagcgtgcgctatctcgcggtgtcgctcggcgcgaagggcgtgcgcgtgaacgcgatctcggcgggcccgatcaagacgctcgcggcaagcggcatcaagagcttcggcaagatcctcgatttcgtcgagagcaactcgccgctcaagcgcaacgtgacgatcgagcaggtcggcaacgcgggcgcgtttctgctgtcggacctcgcgagcggcgtcacggccgaagtcatgcacgtcgactcgggcttcaacgcggtggtgggcgggatggccggcctcgaggaa

SEQ ID NO: 14479 - DNA, 2052 bp, Burkholderia mallei
atgtccgaattcaccgattccgccgcgggccgctcgagcacgccgcccgccgacgcgccgtcgcccgcctcgcgcccgctgcgcgcgatccagccgctgcccgaccagttgatcagccagatcgcggcgggcgaagtggtcgagcggcccgcctccgtcgtcaaggagctcgtcgagaacgcgctcgacgccggcgcgggcacgctgcgcatcctgctcgacgaaggcggcgtcaagcgcatttcgatcaccgacgacggctgcgggattcccgccgacgagctgccgctcgcgctgatgcgccacgcgacgagcaagatccgctcgctcgccgagctcgaggcggtcgcgacgctcgggttccgcggcgaagcgctcgcatcgatcgcgtcggtcgccgagatgttcatcacgagccgcaccgaggatgccgcgcacgcgacgcgcatcgacgcgcagacgggcgtcgtcgggcccgcggccggcacgcgcggcacgacgatcgaagtgcgcgagctgtacttcagcacgcccgcgcgccgcaagttcctgaagagcgagcagaccgagttcggccattgcctcgagatgattcgccgcgcggcgctcgcgcggccggacgtcgcgatctcggtgctgcacaacggccgcgcggtcgagcactggaacgcgagcgagcccgccgcgcgcgtcgcgaagatcctcggcgacggtttcgccaccgcccatctgccgctcgacgagcgcgccggcccgctcgccgtctacggctgcgcggggctgccgaccgcgagccgcggccgcgcggaccagcaatacttcttcgtcaacggccgcttcgtgcgcgacaaactgctcacgcacgcggtgcgcgccgcgtacgaggacgtgctgcacggcgaccgctatccgtcgtacgtgctgttcctcgacctgccgccggaagccgtcgacgtgaacgtccatccgtcaaagatcgaggtgcgcttccgcgattcgcgctcgatccatcagttcgtgttccacgcggtgcagcgcgcgctcgcgcggcacgcgggcgcgtcgcccgagacgacggcgggcggccacgccgcgcatcttgcgcccatcgtgccggcatcggccgactcggcggccgcgccgggcgcctcgtttgtccgctcgggcccgacggcgggcgcgggcgtcggtcagcccgcgtccggcaatacatggctgcgccagtcgcggatgacgcagggcacgctgcccgtcgcgcagccgctcgcgctgtacgacgcgctgttcggccgcaaggacacgggcgcgggcaccccgcacggcgcgacgctcgcgctcgaagcgcatgacgcgcatgacgcgccggacggggcgaatgcgccgggcgcgccgctctacgcgaccatgccgggcgacgacgcgacgcccgcgttctccccggcgggtgcagccggtcttccgatgcacgatgagcagccgctcggcttcgcggtcggccagatccacggcatttacgtgctcgcgcagaacgcgcgcgggctcgtgatcgtcgacatgcacgccgcgcacgagcggatcctgtacgagcagttcaagcgcgcgctcgccgatcgcacgatcgccgtgcagacgctgctgattccggtgtcgatgacggcgacgcccgtcgaggtcggcaccgcggaggaggagcgcgagacgctcgacgcgctcggcttcgatctcgcggtgctgtcaccgacgacgctcgcgatccgcgcggtgcccgccttgctgaaggacgccgacctgcaagcgctcgcgcgcgcggtgctcgcggatctgcatgcgttcggcggctcgcgggtgctgaccgagcgccagcacgagctgctcggcacgctcgcgtgccatcacgcggtgcgcgcgaaccggcgtctcacgctcgacgagatgaacgcgctgctgcggcagatggaggcgaccgagcgcgcggatcagtgcaaccatggccggccgacctggtatcaactgacgctcggcgatctcgacaagcttttcatgcgcggccaa

SEQ ID NO: 14480 - DNA, 1554 bp, Burkholderia mallei
gtgcgccgcgcccgcggcgccaatcacaactacgtacggatggagatgagacagatgcaggaccagtacatcctcgcgctcgaccagggcacgaccagctcccgcgccatgctgttcgatcgacaaggcaacatcgtatcgatcgcgcagaaggaattcgagcaaatttatccgcagccgggctgggtcgagcacgatccccaggagatctggtcgacgcaggcgggcgtcgcggccgaggccgtcacgcgcgtcggcctgaacggcacggcgatcgccgcgatcggcatcacgaaccagcgcgagacgacgatcgtctgggatcgcgagacgggtcatccgatctacaacgcgatcgtctggcaggatcgccgcaccgccgatttctgcgacaagctcaaggcgcagggcctcagcgagaaggtgcgcgcgaagacgggcctgccgatcgactcgtacttctcggccaccaagatccgctggattctcgacaacgtcgagggcgcgcgcgagaaggcgcgccagggcaagctcgcgttcggcacggtcgacagctggctcgtgtggaacttcacgaagcacgagctgcacgtgaccgacgtgacgaacgcgtcgcgcacgatgctcttcaacatccacacgctcgactgggacgacgagttgctcgacgcactcgagattccgcgcagcatgctgccgcaagtgcgcgcgtcctccgagatctacgggccgacgaagaccaccgtgttcgcctcgaagattccgctcgccggcatcgcgggcgatcagcaggccgcgctcttcggccagatgtgcacgagctcgggcatggtgaagaacacctacggcaccggctgcttcctgatgatgaacaccggcgagacgccgatcgaatcgcggaacaacctcgtcacgacgatcgcctggcaagtcgacggcaaggtcagctacgcgctcgaaggcagcatcttcatcgcgggcgcggtcgtgcagtggctgcgcgacgggctcggcatcatcaagagcgcgtcggagatcgaggcgctcgccgccggcgtgccgcacacggacggcgtctatctcgtgcccgcgttcgccggcctcggcgcgccgcactggaacgcgcgcgcccgcggctcgctgttcggcgtcacgcgcggcacgacgtccgcgcacctcgcgcgcgcggcgctcgattcgatcgcgtatcaatcgctcgacgtgctcaaggccatggaggccgattcgggcatccgcatcggcgagctgcgcgtggacggcggcgcgagcgcgaacaacctgctgatgcagttccaggcggatctgctcggcgtcgacgcggtgcgcccgcgcatcaccgagacgaccgcgctcggcgccgcgtatctcgcgggcctcgcgatcggctactggcagaacgtcgacgagctgcacagccaatggcagctcgagcgccgcttcgcgccttcgatgcaggccgagcaggtgggctcttgcctcgccggctggcagcgcgcggtgcgcgcggcgaaggcatgggcggacgacacgcag

SEQ ID NO: 14481 - DNA, 1143 bp, Burkholderia mallei
atgatgcgagatgccgcgaatttcgaaccggccgacagccgcgtgacgcgtcccgcgttctggcaggcgctgccggagcgctggacgagcgatgtcgaggagacgctcgtgtgctgccacgtgcggcaggaaacgcatgacgtgaagagctttttcttccgctcgccgcaggggcgcgcgttctcgttcgagcccgggcagttcgtcacgctcgagctcgacatcgatggcgagacgatcaaccgctgctacacgatctcgtcctcgcccgcgcggccgcacacgatctcgatcacggtcaagcgcgtgccgggcggcaaggtgtcgaactggctgcacgacaacctgcagccgggcgcgccgctgcgcgtgctcggcccggcgggcgaattcacgtgcgcgcggcatccggcgcgcaagtacctgttcctgtccgccggttcgggcatcacgccgctgatgtcgatgagccgcgcgcatcacgatctcgccgaggatcgcgacatcgtgttcgttcatagcgcgcgcacgccggacaacatcatcttcgcgcgcgagctcgatctgatcgcgtcgacgcatgcgaacttccgcaccgcgttcgtctgcgagcggctcggcgcgcgcacgaactggcacggcgtgacgggcttcctgtcgctgccgctgctgaagctggtcgcgccggatttcatggagcgcgagatcttcacgtgcgggcccgcgccgtacatgaaggcggtgcgcgagctgctcgccgaagccggattcgatcgcagccgctatcacgaagagagcttttcgttcgagacgctcgcgcagggcgaggccccggccgatgcgccggcgggcgaagacgcggcggcgcgcggcgcgcaagtgcgccagtacacgatcgcgttcgcgaagagccatcgcgagatcgcatgcggcgcggatcagcacgtgttcgatgccgcgcgccgcgcgggcgtgcgcctgccggcgtcgtgcacgcagggcatgtgcggcacctgcaaggtaaagctcgtgtccggccaggtcgacatgaagcacaacggcggcattcgtcagcgcgaaatcgatcaggggatggtgctgctttgctgcagcaagccgctgtccgatctcgtcgtcgacaaa

SEQ ID NO: 14482 - DNA, 1539 bp, Burkholderia mallei
atggcatgcgtgattggtgtcgacatcggcacccagagcacgaaggcggtgctcgtcggcctcgacggcgcgatcctcgcgcagcatgcggtggcgtaccggccggacacgcccaagccgctgtgggccgagcagtggccgcacgtgtggttcgacgcggtgcgcgaatgcatcgcgcgggtgagcgccgacgcgcgcgcggcgggcatcggcgccgagtcgatcgaggcgctctgcgtgagcagcctgtacggcggctcgggcattccggtcgaccgcgagatgcggccgctgcatccgtgcctcatctggatggaccggcgcgcgaccgacgaggtcgactgggtgcgcgcgcacgtcgacgtcgcgcggcttggcgagatcacgggcaacggcgtcgacagctactacggctacacgaagatgctgtggctgcgcgagaagcgtcccgacgtgtgggcgaacgtgcgctacttcgtgccgccgaacgcgtacgtcgcgtatcggctgacgggcgagctcgcggtcgatcacagcgcggcgggcaacatcggcggcgtctacgatctgggccgccgcgactggtccgacgaggcgctcgacatgctgggcattccggcgacgatgatgccggagcggctcgtcgattcggacgcggtggtgggcgggctgctgcgcgaatgggcgcacgcgctcggcctcgaggtgggcacgcccgtcgtcgcgggcggcgtcgacgcggccgtcgcgacgttcgcggcgggtgcgacgcggcgcggccagcacgtcgcgatgatcggcacgagcatgtgctggggctaccttgccgagacggccgacgcgcggcgcgggctcgtcagcatgccgcacgtgttcgacggccggcgcgacctgtacgtgttcggcggcgcgatcacggcgggcgcgtcggtatcgtggtttcgcgagcagttctgccacgcggaaatcgaggccgcgcgcgcgggcggcggcgacgcgcatcgcctgctcgaggccgccgccgccgaggtcagcgcgggcagcgacggcgtgctgttcctgccgtacctgatgggcgagcgcagcccggtgtgggacgcgaaggcgagcggcgcgttcgtcggcctgtcgctatatcacacgcgcgcgcatctgtaccgcgcggtgctcgaagggctcgcgtatgcgctcaggcacaacatcgaggcgggcgcggccggcgcgcgcgcgctcgatgcgcggctcgtcgtggtcggcggcgccgcgcattcggatctgtggatgcagagcatcgccgacatcaccggctacccggtgtggacgatcgccgaggaggtcgaggcggcgatgggcgcggcgctgctcgccgcgctcggcgcggctcgcgtgtcgcgcgaggccgcgcggcgcggctgggtcacgctcgccgagcgcgcgcgccccgacgcgcgtcacgcggcgttgcacgacgcgcgcttcgcgctgtacgccgggctctatccggcgctccaacccttcatgcacggattgcagacatca

SEQ ID NO: 14483 - DNA, 906 bp, Burkholderia mallei
atgatcgtcagaccgcgcgagcacgggttccggatgctgttcgtctggaacggttcggtgctcaaatcgattctgccgcagcttgcgctgatgagcgccgtgagcatcgtcgcgctgctgacgaacggccgcattctcggcgagaaggtgccgctgaacccgacgccgttcacgctcgcgggcctcgcgctcgcgatcttcgccgcgtttcgcaacaacgcgagctacgaccgctactgggaggcgcgcaagctctggggcggcgtgctgagcgcggcgcgcgcgctgacctcgcaggcgctcggctacgacgcgctcgccgacggcgcatcgttcgcccgcgcgacggcgggtttcgtctatgcgctcaagcaccagttgcgcggcacggacccgactcacgacctgcgccgccgcctgcccgctgactggctcgatccggtgctcgccgcgcagttccgcccggtcgcgatcctgcatgcgttgcgcgggcggctggccggccggcatcgcgacggcgcgctgaccgatgcgcagctgtggatgctcgacgcgcagctcaacgaactcgccgcgaaactggcgggctgcgagcgcatcgcatcgacgccgatcccgtttccctatcacgtgctgctgcaccggactgtctacgcgtattgcgtgatgctgccgttcgggctcgtcgactcgatcggcatcgcgacgccgttcgtatcggtgttcgtgtcgtacacgctgatcgcgctcgacgcgatcgcgggcgagatcgccgagccgttcggcgacgggccgaaccatctcgcgctcgatgcgctgacacggcagatcgagcgctcgctgttcgagctggccggcctgccgctgccggacgaaatgcgcgccggcccgaatcaccggctgtcg

SEQ ID NO: 14484 - DNA, 312 bp, Burkholderia mallei
gatacgtcggacacgatcgcgaagatcaagtatccgatgatcggcgatccgacgctcgcgatctcgcgcaacttcgacgtgctgatcgaagaggaaggcctcgcgctgcgcggcacgttcgtgatcaatccgcagggcgagatcaagctgtgcgagatccacgacaacggcatcggccgcgacgcgggcgagttgctgcgcaaggtccaggccgcgcaatacgccgccgcacatccgggcgaagtctgccccgccaaatggacgccgggcgccgacacgctcacgccgtctctcgacctgatcggcaagatc

SEQ ID NO: 14485 - DNA, 762 bp, Burkholderia mallei
atgggccggatgctgatcgaagcggtgctcgccgcgcccgacgcgacgctcgccggcgcgctcgaccgcacgggctcgtcgcagctcggccaggacgcgggcgcgttcctcggcaagcagaccggcgtcgcgctcaccgacgacatcgaacgcgtgtgcgccgaggccgattacctgatcgacttcacgcgccccgagggcacgctcgcgcatctggatgcggcgctgcgccacgacgtgaagctcgtgatcggcacgacgggcttcagcgagccgcagaaggcgcagctgcgcgcggcgggcgggaagatcgcgctcgtgttctcggcgaacatgagcgtcggcgtgaacgtcacgatgaagttgctcgaattcgcggcgaagcagttcgcgcagggctacgacatcgagatcatcgaggcgcatcaccggcacaaggtcgacgcgccgtccggcaccgcgctgatgatgggcgagacgatcgcggcggcgacgggccgcacgctcgacgattgcgcggtctacggccgccacggcgtgacgggcgagcgcgatccgtcgacgatcggtttctcggcgatccgcggcggcgacatcgtcggcgatcacacggtgctcttcgccggtatcggcgagcgcatcgagatcacgcacaaatcggcgagccgcgtgtcgtatgcgcaaggggcgctgcgcgcggcgcgcttcctcgccggccatcaggccggtttcttcgacatgcaggacgtgctcggcctgcgc

SEQ ID NO: 14486 - DNA, 702 bp, Burkholderia mallei
atgacgatggcggggctggcgatcgatgcgcgcgggctcaccaagtggttcggtgagggcgaggcccgcacgcgcgcgctcgccgacgtatcggtgcaggcgcgcttcggcgagatgctgctgatcgtcgggccgtcgggcagcggcaagacgacgctgctcagcgtgatgtccggcatcctgcggcccgacgcgggcagcgtgatcgtcgacggcgtcgatctgtgggcgcaggacaacgacgcgatcgccgaattccggctcaaccggatcggcttcgtgtttcaggactaccatctgtttgcgagcctgacgacggccgagaacgtcgcgattccgctgatcctcaagcgccgcgactggaaccgcgcgctcgccgacgcgcacgaatatctcgacgtcgtcggcctgaggaaccgcgcgtcgctgccgcccgtgaagctctcgggcggcgagcagcagcgcgtcgcgatcgcgcgcgcgatcgtcagccagccggacatcctgatcctcgacgagcccaccgcgtcgctcgacggcgacaccggccgcacgatcatcgatttcgtcaagcacaaggtgctcaacgacaagcgctgcatcgtgatcgtcacccacgacagccgtatcttcgactacgcggaccgcatcctgcggatggaggacggcaagctcacggcgatcgagcgcgggggcggcctg

SEQ ID NO: 14487 - DNA, 1032 bp, Burkholderia mallei
atgacgcaaagcagccacttcgcgacgggcgccgcgccgatcgaactcgtgtgcccggcgggcagcctgcccgcgctgaaggccgcggtcgacaacggcgcggattgcgtgtatctcggttttcgcgacgcgacgaacgcgcgcaacttcgccggcctgaacttcgacgcgcaggcgatcgcggccggcatccgctatgcgcgcgagcgcggccgcaaggtgctcgtcgcgctcaacacgtatccgcagccggacggctgggccgcgtggcgggaggcggtgggccgcgcggccgacgcgggcgtggacgcgatcatcgtcgccgatccggggctcatgcgcttcgcgcgcgagcgctacccggagctgcggctgcacctgtcggtgcagggctcggcgacgaactacgaggcgatcaacttctatcacgagcacttcggcgtttcgcgcgcggtgctgccgcgcgtgctgtcgctcgcgcaggtcgaacaggtggccgagaacacgccggtcgaaatcgaggtgttcggcttcggcagtctgtgcgtgatggtcgaggggcgctgcgcgctgtcgtcgtatgcaacgggcgactcgccgaacacgcgcggcgtgtgctcgcccgcgaaggcggtgcgctggcagaagacgccggacggcctcgaatcgcggctgaacggcgtgctgatcgaccgctacgaagacggcgagaacgccggctatccgacgctctgcaaggggcgcttcacggtggccgacgagagctactacgcgatcgaggagccgacgagcctgaacacgctcgagctgctgccgaagctgatgcagatcggcatacgcgcgatcaagatcgaaggccgtcagcgcagccccgcgtacgtcgcgcaggtgacgcgcgtgtggcgcgatgcgatcgaccagtgcacggcgaacctcgcgcgctactacgtgaagcccgcgtggatgacggaactgaacaaggtcgcggaagggcagcagcatacgctcggcgcctaccaccggccgtggaaa

SEQ ID NO: 14488 - DNA, 1260 bp, Burkholderia mallei
atgacttactgcgcgatcgacttcggcacgtccaattccgcggtcgcgctgccgcgcggcggcggcacaacggggatgcggctcgctcccgtcgagggcgagcatctgacgctgcccaccgccatcttcttcaacaccgacgagagcacccgcgagtacggccgcgcggcgctcgcatcgtacatcgacggcttcgacggccgcttgatgcgctcgatgaagagcattctcggctccccgctcgcggaaacgacgaccgatctcggcgacggctccgcgatcgcgtacaccgacgtgatcgcgcttttcctcatgcatctgaagcaaaaggccgaggcgtgcgcgggcggcgcgatcggttgcgcggtgcttggccgtccggtgtttttcgtcgacgacgatccgcgcgccgaccgtctcgctcagcagcagctcgaggcggccgcgcacgcggtcgggctcgcggacgtacagttccagtacgagccgatcgcggccgcgttcgattacgaatcgcggcaggatgccgagcggctcgtgctcgtcgcggacatcggcggcggcacgtcggacttctcgctcgtgcgggtcggccccgagcggatgcgccggctcgagcgcaaggacgacgtgctcgcccatcacggcgtgcacgtcgcgggcaccgattacgaccggcgcgtcgagctgtcggcggtgctgtccgcgttcggctaccgcgcgctcgatccggaggggcgcgagttgccgaaccggatctatttcgatctggcgacctggcacctgatcaataccgtctacacgccgaagcgggtcggcgagctcaagctgatgaagcacctgtatgcggatgcgcgccatttcgatcgcctgctgcgcgtcgtcgagcagcggctcggccatgcgctcgccgcgcgcgcggaggaggcgaagatcggcgtgtcggcgggcggcgagacgatgatcgatctgaacgacgtcgaggaggatttgctgatcgcgttcgatgcggaccaactgatcgacgcgagccgcgacgagaccgcgcgaatcgtcgacgcggcccgcgagacggtgcggctcgcggggatcgcgccgcgcgacgtgggcgcgctgtatttcacgggcggctcgacggggctcgcgttcctgtcgggcgcgctcgcggcggcgttcccggatgcgcagccggtgtacggcgatcgcctggccagcgtcgcgacggggctcggcattcacgcgcggcgcgtgtacggcggc

SEQ ID NO: 14489 - DNA, 1881 bp, Burkholderia mallei
atgagctttcaggcagaggtgaagcagctcctccacctgatgattcattcgctttacagcaacaaggaaatcttcctgcgcgaactcgtgtccaacgcgtccgacgccgctgacaagctccgtttcgaggctctggaaaacaacgcgctgtacgagagcgatccgaatctgcgcattcgcctgtcgttcgacaaggccgcgcgtacgatcacgatcgacgacaacggcatcggcatgagccgtgacgaggcgatcgcgaacctcggcacgatcgcgcgctcgggcacgaaggaattcttctcgaagctctccggcgaccagcagaaggacgcggcgctcatcggccagttcggcgtgggcttctattcgggtttcatcgtcgcggacaggatcaccgtcgagacgcgccgcgcgggcctgccggcgtccgagggcgtgcgctgggaaagcgcgggcgaaggggatttccaggtcgacacgatcgagcgcgccgcgcgcggcacgacgatcacgctgcatctgcgcgaaggcgaggacgagctgctgtcgtcgtaccggctgaaatcgatcgtccagaagtattcggaccacgtcgcgctgccgatcctgatgaagaaggaggagtgggatcaggaaaagggcgagatggtcgagaaggacgaggacgagaccatcaaccaggcgagcgcgctgtggacgcgcgcgaagagcgaggtcaccgacgagcagtacaagcagttctaccagcacgtcgcgcacgatcaccaggatccgctcgcgtggacccacaaccgcgtcgagggccgcagcgaatacacgcagttgctgttcgtgccgtcgcacgcgccgttcgatctgtggaaccgcgactatcgcggcggcctcaagctgtacgtgaagcgcgtgttcatcatggacgacgccgagcagttgctgccgcagtacctgcgcttcatcaagggcgtcgtcgattcgtcggatctgccgctgaacgtgtcgcgcgagatcctgcaggaaagccgcgacgtgaaggcgatccgcgagggcgtgaccaagcgcgcgctgtcgatgctcgaggagctcgcgaacgccgaggacgatgcgggcaaggagaagtacaagacgttctggagcgcgttcggccaggtgctgaaggaaggcgtcggcgaggatcacgcgaaccgcgagcgcgtcgcgaagctgctgcgcttcgcgtcgacgcacggcgacaccgacgcgcaggacgtggcgctcgccgactacgtcgcgcggatgaagcccgagcaaacgaagatctactacgtgacggccgatacgtggcaggccgcgaagaacagcccgcatctcgaggtgttccgcaagaagggcgtcgaggtgctgctgctcaccgatcgcgtcgacgaatggatgctgtcgttcctgcacgagttcgacggcaagccgctcgcgagcgtcgcgcgtggcgatctcgatctcggcgcgctgaacgacgacgagaagaaggcgcaggaagagacgggcgaggcgatgaagcccgtcgtcgacaagatgaaggagacgctcggcgagaaggtgaaggacgtgcgcgtcacgttccggctgaccgattcgccgtcgtgcctcgtcgccgacgacaacgacatgagcggctacctgcagcggatgctgaaggcggcgggccagagcgcgccgtcgttccagccgattctcgagatcaatccggagcatccgctcgtcaaggcgctgaaggcagacggcgcggatttcggcgactggtgccacctgctgttcgatcaggcgctgctcgccgaaggcggcgcgctcgaggatccggcgagcttcgtgaagcggaccaacgcgctgctgctgtcgcgcgcggcg

SEQ ID NO: 14490 - DNA, 1029 bp, Burkholderia mallei
atggcttttaacgtaaccctcaagcaaagcggccggcagttccaggtcgaggccgacgaaaccgtgctcgcggcggcgctgcgtcagaacgtccatctgccctacggctgcaagaacggcgcgtgcggctcgtgcaagggcacgatcgtgcaaggccagttcgagcagggaccgcattccgcgtcggcgctgtcgaacgacgagcgcacgcgcggcctcgcgctgctgtgctgctcgaagccgcagagcgatctcgaggtcgacgtgcgcgagatcgcgggcgtcgacggcgttcaggtgaagaagctgccgtgtcgcgtcgcggcgctcgagcgccgcgcggacgacgtgatcgtgctgaagctgcagttgcccgcgaacgagcgcctgcagtatctggccggccagtacatcgagttcatcctgaaggacggcgcgcgccgcagctactcgatggcgaccgcgccgcacgaggaaggtccgatcgagctgcacatccgccacatgccgggcggcaagttcaccgaccacgtgttcggcccgatgaaggagcgcgacatcctgcgcttcgaaggcccgctcggcacgttcttcctgcgcgaggattcggacaagccgatcgtgctgctcgcctccggcacgggcttcgcgccgatcaaggcgatcatcgagcacgcgcaccacgtgaagctcgagcgcccgatgacgctctactggggcgcgcgccgcaagaaagatctgtatctgctcgacgccgccgagcaatgggcgaaggagatcccgaacttcaagttcgtaccggtgctttccgagcccgacgcgagcgacgcgtggacaggccgcacgggcttcgtgcaccgcgcggtgatcgaggatctgcccgacctgtccggccatcaggtgtacgcgtgcggcgcgccggtgatggtcgaatccgcgcagcgcgacttcacgcagcaccaccgcctgcccgccgacgagttctacgcggattcgttcacgagcgccgcggacctcgcgcatacggtc

SEQ ID NO: 14491 - DNA, 2271 bp, Burkholderia mallei
gtgacgggcttcatcgcgatcggtacgttgctgcaggcggcgctcgtgcgcttcggcggcgccgacatgccgctcgcgccgtattttccgttcatcgcggcggccgcctgggcgacgtcgctcgcgggggggatcgccgcgaccgccgcgagcgcggcgctcgcgtggctgctgttcctgaacgatccggccgcgtattcggcgccgctcgcgtggcggctcatgcagctcgcgacgttcgccgtcgtgagttgcgcgatctgcgcgatcgtcgtcgcgctcaagggctcgcgccgcgcgaacgacgcgttgcgccgccgcgaggcgggggcgcgccactactacgagaccctgctgcagtcgctcacgcagggcgtcgtcgtcagcgaccggcacggcatgctcacgtacatgaacccgagcgcggccgcgctgatcggctgcgatgcgacggccgtgcgcggtctgccgtttcgcgacgtgtaccgcgcctacgacgggcgcggcgcgcgcgtgcgcgcgtccgcgctcgagcacgtgctgaggagcggcaggagcgcgagcgtcgaagggcactggcttgctccgcacgacgggcagcgggtgccgatcgccgaagccgcgtcgccgctcgtcgattcggcgggcgacatgacgggcgcggtgctgatcgtgcgcgacatcagcatcgagcgcgagcgatcggcggccagccagatgctgcggcggctcgtcgaggcctcgcccgacgcgatcgtcggggtcggctcgaatcgccgcatcacgagctggaacccggccgcgcgccggatgttcggctacgacgagcacgcggcgcgcgggtgcgacgtcgcgatgctgatcgcgccgcgctggctgcgcaatcatccgctgcccgaatcggtgcccgacatgcgcgagccgatcgagaacgtcgacgtgctgtgcgtgcggcaggacggcgggcggatgcgcgcgacgatgtcggcgtcgcccgtgttcgacgagcgcgacgcgtgcatcgcgctgtcgctgacgctgcgcgacacgggcgagcagcgccggcgcgaacgccgcgtgcaccgctcgctgcgcggcgcgcgcgacgcgcgccggcaggccgacacgtcgaaccggctgaaggacgagctgctcgccaccgtgtcgcacgagctgcgcacgccgctgaacgtgatctacggctggatcgaggtgctgcgcaatccggtggacggcgcgctgcagcagcaggcgatcgatgcgatcgaccgcagcgcgcgctcgctgtcgcggatggtcggcgacattctcgatgcatcgtcgctcgcgacgggcaagctgcggctcgatgcgatgccggtcgatctcgtgcgcatcgtcaacgacgtgacgggcgcgctcggcgcggccgcgcaggccgacgggatcgcgctgtcggtcgaatgcgcgctcgccacgtgcatcgtgtccggcgacggcgagcggctgcggcagatgctgtcgaacctgctgtcgaacgcgttcaagttcacgccgcgcggcggccgcgtgaccgtgtcgctcgagcgccacgacgcgcaggcgaagctgacggtcgccgatacgggccatggcatctcgcccgaattcctgccgcacgtgttcgaggcgttccggcgcgcggaaggcgcgcccgcatcgccgcggcgcgggctcggcctcgggctgtcgatcgtgcggcacatcgcggagctgcacggcggcaaggtcgaggccgcgagcgcgggcaagaaccgcggcacgacgttcgcgatcacgctgcccgccggctggcagccgatgggcgcgctcgcatgggccgcgcaggccgagggcggcgcgcggatgacgctcgacgcgcagcggatcctgctcgtcgacgacgacgcgacctcgcgtgcgagcctggccgccgcgctgaagacgctcggcgcggaggtggtcgtcgcgtcgtcggggcgcgaggcgatcgggaaggtggacgcgatgcggccgaccgtcgtgctgtccgatctcgcgatgcccgacggcgacggctactggctgctcgacacgctgcgccacgtggacgcggatgcggatgcggacacgcgcacgcgcgcggcgaacgacgcgccggtgctcgccgtcaccgcgcatgcggggcgcgacagcgagcggcgcgtgctcgcggcgggcttcgacggctatctatgcaagccggtcgatctgcagacgctcgcgcgtgcgatcctgcgcgcgacgggcagcggc

SEQ ID NO: 14492 - DNA, 465 bp, Burkholderia mallei
gtgtccgccgtccgcagcgatgcgggcgaggcagccgctgtccggggttcgattccgttgcaagcgtccgccgccttccccaaagctgcgcgacttctgaaaacggatgaattctcatccgtttttcgtttgcgtccctggcggcgcaccgcgcacttcgtgatctacggcaagccgacggggcgcgatgcgcgtcttgggctcgtcatcggcaagaagtacgccgcgcgtgcggtgacgcgcaatctggtcaagcggctcgcccgcgaggcgtttcgtacgcgtcgcgccgagttcgccggctgggacattctgctgcgcctgcatacgcgcttcgacaagaaggcgatgccgagcgccgcatccgcgccgctcgcggcgctgtgcgcaggcgagatccgcgagctgctcgaccgggcagcccgggaggtcgcccggcgcaacggggcgaagcccgcgtccgag

SEQ ID NO: 14493 - DNA, 1044 bp, Burkholderia mallei
atgagcacaccgatcgcctccccggccgcgcaggccatcgctcccaccgcgccgccgacgctgccccgtccgagcgccgacgatttcgccgccgtgctcgagcgcggcgcgttcgcggcgctcgagcaattcggcatcgtcgacgtgacgggcgccgacgccgcgacgtttctgcacggccagttgacgaacgacgtcgaacatctcgacgccgcgagcgcgcgcctggccggctactgctcgccgaaggggcgcctgctcgcgtcgttcctcgcatggcgcgccggccacgacgtgcgcctgctcgtatcgaaggacgtgcagcccgcggtgcaaaagcgcctgtcgatgttcgtgctgcgcgcgaaggcgaagctcgccgacgcgagcggcgcgctcgtcgcgatcggcttcgcgggcgacgtgcgcgccgcgctgtcgggcatcttcgacgcactacccgacggcatccacacgaaagtcgacgcgccggccggcgcgctcatgcggctgcccgacgcggcgggccgcgcgcgctacctgtggatcgcgacgcgcgccgagttcgacgcgcgcctgcccgcgctcgaagccgcgctgccgcgcgtgtcggccgccgtctgggattggctcgacgtgcgcgcgggcgagccgcgcatcacgcagccggccgtcgagcaattcgttccgcaaatggtcaacttcgacgtgatcggcggcgtcaacttccgcaagggctgctatccgggccaggaagtcgtcgcgcgcagccagtaccggggcacgatcaagcgccgcaccgcgctcgcgcacgtcgcggccggcaccgacgccgcgcatgcgggcgtcgagctctatcattcggacgatccgggccagccgtgcgggatgatcgtgaacgcggcggcggcgcccgaaggcggcgtcgacgcgctcgtcgagatcaagctcgccgcgctcgggaacggatcggtccacctggcgtccgcgagcggcccgacgctcgcgttcctgccgcttccctacgcgctgcccgtcgaagcc

SEQ ID NO: 14494 - DNA, 897 bp, Burkholderia mallei
atgcgttgggccattctgttcatcttcgtcgcgtgcgcggcgttcacgcatcggcgcggcaaggtgcgtcacgggtttttccggcagttgtccgatcattcgacgttcaccgcgccgctcaattgtttcgcctatgcgttctccaacgtgccgaacacgccgtatatcgacgacgcgcattttccggagctcgcgatcctcaagcgcgagtggcgcacgtttcgcgacgaggcgctcgcgctgcgcgacgcaagccggatcaaggcgtcgggcgagtacaacgacatcggcttcaattcgtttttccgcaagggctggaagcgcttctacctgaagtggtacgaccgcccgcatccgtccgcgctcgcgcattgcccgcgctcgctcgcgatcctgtcgaagctgccgtcggtgaaggcggcgatgttcgcgcaactgccgccgggcggcaagctgggactgcatcgcgatccctacgcgggatcgctgcgctatcacctcgggctctcgacgccgaacgacgacgaatgcgcgatcgtcgtcgacggcgatccgtacgcgtggcgcgacggcgaggcggtgatgttcgacgagacttacctgcactgggccgagaaccgtaccgggcacgaccggatcattctgttctgcgacatcgagcggccgatgaaataccgctgggcgcaggcggtgaacggtgcgatcggcggggtgctgatgcgcgccgcggcgtcgccgaacgaaacgggcgacaggacgggcgggctcaaccggctgtttcgctatctgtacgccgtgcggcgcgtcggcaagcggttgaaggcgtggaaccgcaccgtctactacgcgctcaagtgggcgctgttcggcgggattctcatcgcgattctgtggcgc

SEQ ID NO: 14495 - DNA, 798 bp, Burkholderia mallei
atgggacagaaaattcatccgactggcttccgcctggctgtcagccgcaattgggcttcgcgctggtacgcgaacaacaacaatttcgcggcgatgcttcaggaagacatcggtgttcgtgagtatctgaagaagaagctgaagaacgcttcggtcggccgcgtcgtcatcgagcgcccggcgaagaacgcgcgcatcacgattttcagctcgcgtccgggcgtggtcatcggcaagaagggcgaggatatcgaactgctgaagacggaactgcaacgccgcatgggcgtgccggttcacgtcaacatcgaagagatccgcaagccggaaaccgatgcgcaactgatcgccgattcgatcacgcagcagctcgagcgccggatcatgttccgccgcgcgatgaagcgcgcgatgcagaacgcgatgcgtctgggtgcccagggcatcaagatcatgagcgccggccgtctgaacggcatcgaaatcgcgcgtaccgaatggtatcgcgaaggccgcgtgcccctgcatacgctgcgcgccgacatcgactacgcgacttcggaagcgaagacgacgtacgggatcatcggcgtcaaggtgtgggtgtacaagggcgacacgctcggtcgcaacgatgcgccggtggtcgaggaagtgaccgaagacaagcgtccgcgtcgcaatgcgcgtccgggcgaccgtcgtccgcgccgtgacggcgaaggcggcgctccgggcgctcgccgtggcggtccgcgccgtggcgccggcaagccggaagacggcaagactggagaa

SEQ ID NO: 14496 - DNA, 774 bp, Burkholderia mallei
gtgaacgcgctccccaatcgccagccggccggcacgacgagctcgctcgtcgtgcgcaacctgaagaagcgctacggctcgcgcaccgtcgtcaaggacgtgtcgctcgacgtgaagagcggcgaagtcgtcggcctgctcggcccgaacggcgccggcaagacgacgtcgttctacatgatcgtcggcctcgtgccgctcgacgcgggcgacatctcgctgaacggcagcccgatcagcctgatgccgatccacaagcgcgcgtcgctcggcctgtcgtacctgccgcaggaagcgtcggtgtttcgcaagctgaccgtcgagcagaacgtgcgcgcggtgctcgagctgcagcacgacgaaaacggcaagcggctgtcgaaggacgcgatcggcgcgcgcacggaggcgctgctcgaagagctgcagatcgcgcatctgcgcgagaatccggcgctgtcgctgtcgggcggcgagcgccgccgcgtcgagatcgcgcgcgcgctcgcgagcaatccgagctttatcctgctcgacgagccgttcgcgggcgtcgacccgatcgcggtgctcgagatccagaagatcgtgaagttcctgaagcagcgcaacatcggcgtgctgatcaccgatcacaacgtgcgcgagacgctcggcatctgcgatcacgcgtacatcatcagcgacggctcggtgctcgcgtccggcgcgccgaaggaaatcatcgaaaacgaaagcgtgcggcgcgtctacctcggcgagcacttccgcatg

SEQ ID NO: 14497 - DNA, 732 bp, Burkholderia mallei
atgccgctcatggaaacgaaaaacccctccaagattctcgtcgtcgacgacgacccgcgcctgcgcgatctgctgcgccgctatctcggcgagcagggcttcaacgtgtatgtcgcggagaacgcgacggcaatgaacaagctctgggtgcgcgagcgtttcgacctgctcgtgctcgacctgatgctgccgggcgaggacggcctgtcgatctgccggcgcctgcgcggcagcaacgatcgcacgccgatcatcatgctcaccgcgaagggcgaagacgtcgaccgcatcgtcggtctcgaaatgggtgccgacgactacctgccgaagccgttcaacccgcgcgagctcgtcgcgcgcattcacgcggtgttgcgccgccaggcgcccgccgagctgccgggcgcgccctccgagaccaccgaggtgttcgagttcggcgagttctcgctgaacctcgcgacgcgcacgctcacgaaatccggccaggagattccgctcacgacgggcgagttctcggtgctgaaagtgttcgcgcgccatccgcgccagccgctgtcgcgcgagaagctgatggagctcgcgcgcggccgggaatacgaagtgttcgaccgcagcctcgatgtgcagatctcgcgcctgcgcaagctgatcgaacccgatccgggcagcccgcgcttcatccagacggtgtggggcctcggctacgtgttcatccccgacggcgcggcc

SEQ ID NO: 14498 - DNA, 414 bp, Burkholderia mallei
atgctgcaaccgaaacgcaggaagtatcgcaaagagcagaagggtcgtaacaccggtatcgccacgcgcggcaacgccgtgtcgttcggtgagttcggcctgaaggctgtcggtcgcggccgtctgaccgcgcgtcagatcgaggcggcgcgtcgtgcgatgacgcgtcacatcaagcgcggcggccgcatttggattcgcattttcccggacaagccgatttcgcaaaagccggccgaagtgcggatgggtaacggtaagggtaaccctgagtactacgtcgccgagattcagccgggcaagatgctgtacgaaatggatggcgtatccgaagaactggcgcgtgaagcgttccgtctggccgcagcgaagctgccgctgaagacgacgttcatcgtgcgtcagctcggcgcc

SEQ ID NO: 14499 - DNA, 981 bp, Burkholderia mallei
atgattcgccctgcccgctggtttgcccgaaccgtcaccgccgcactcgcgtcgctttgcgtcgcctccgcgttcgcgcaggacgccgccggcgacaaggtgctgcgcgtcggctatcagaaggcggggctgctcgcggtcgtcaaggcgcagggtacgctcgagacgcgcgtgaagccgctcggctacacggtcaaatggttcgagttcccggccgggccgcaactgctcgaagcgctgaacgcggacagcgtcgacatcggctacacgggcgcaccgcccgcggtgttcgcgcaggcgagcggcgtgcgcttcgtctacgtcggcgcggagccgccgtcgccgcacaacgaggcgatcgtcgtgaaagccgattcgccgctcaggcgcgtcgccgatctgcggggcaggaaagtcgcgctgcagaaaggctcgagcgcgaactatctgctgctcgaagcgttgcgccaagccggcgtgcgctacgacgagatccgcccgatctacctgccgcccgccgacgcgcgcgccgcgttcgagagcggcaccgtcgacgcgtgggtggtctgggatccgtactacgcggccgcgcagcacgcgctgaaggcacgcacgctcgccgactacaccggcttgtccgccacgtacaacttctatgaagcgacgcgcgatttcgcgacccgccatccggacgtcgtcggcgcggtactgcagcagttgcgcgagaccggcctgtgggtcaacgcgcattccgccgaaaccgccgcgctgatcgcgccgaagatcggcctcgatcgggcgctcgtcgagacctgggtgaaacgcgtgccgtacggcacgacgccgctcgacgacaagatcgtcgcgtcgcagcagcgcgtcgccgacgcgtttctcgcggcgaagctgattccgcgaaagctgaccgtcgccgacaacgtctggaccgagcgccgcgccgccgacgcgctcgcggcgaag

SEQ ID NO: 14500 - DNA, 1062 bp, Burkholderia mallei
atgtccgacctcgttcacacggcgctcgccgccctcgccaacacccgcacgctaaccggcatcgatctttcggatgccgatctttccggccgcgacctgtccggctgcacgttcgaacgcgtgagcctgcgcggcgcgaacctgtcggccgcgcagctcgacgcgacgcgctggctgcactgcgacctgacgggcgcgcgcctcgacggcgcgacgctcggcgaatcgagctggcacgcggtcgcgctgcgcgcggcgagcctgcgcgcgacgacgggcgacgcattcgcgatgacggaaaccgacctcgccggcgcgacgctgaccgacgcgctgtgggcgcgcgcgacgttcgagcgcggggatttctccgccgcgcagtgcgggcgcgcgaagctgctgcgctgcgaggcggccgactgccgcttcgagcgcaccgatttcgcgaacgccgagctcgagcgcttcgtcgcgatgcgcgccgagctgtcgagcgcgcgcttcgacgccacgcggctcacccacgcgttcttcgccgaagcgaatctgcgcgggcaacgcttcgagcgctgcgatctgacgatgacccatttcagccgcgcggcgctcgccggctgcgatttcagcggtgcgtcgctcatgcagacgatgttcttcgacgcggacctcgaacgcgcgacgctcgccggcgcgcgcggccgccacgtgcgtttcgcgggcgcgacgctcgacggcgcgaatctcgcgcacgccgcgttcgacgaatccgatttcgcgcgcgcgcggctgcgggcggcgaacgcgcgcgggctgcgcgcgcgaatgtcgctcttcgcgcacgccgattgcgcggaggcgacgctcgcgggcggccacttcgtctactgcgacttctcgcacgccacgctgtcgcacgccgactgcaccggcgccgacttctcgcacgcgaacctgcacggcctggccgatcacgccgcccgctgggacggcgcgcgcaagacaggcgcgcgcgcgaccgatcccgcgctcgcgcacgccgaacgatggaccgcgccccaacga

SEQ ID NO: 14501 - DNA, 1424 bp, Burkholderia mallei
ttgcgcgagatcttcgaggcgaaccgcgcaggccgcgcgagcggcatctattcggtgtgcagcgcgcatcgcctcgtgctcgaggcggcattcgaggcggcgcgcgccgacgaatcgccgctgctcgtcgaggcgacctgcaatcaggtgaatcaccacggcggctataccgggatgacgcccgcggatttccggcgcgacgtcgacgcgctcgcgcgcgccgcgggctttccggcgcgcgcgctgattctcggcggcgatcatctcggcccgaatccgtggcggcatctcgccgcgcgcgatgcgatgcgcgaggcgcgggcgatggtcgccgcgtatgtcgccgcgggcttcacgaagatccacctcgacgcgagcatggcgtgcgcggacgacgccgcgccgctgtccgacgcgaccatcgccgagcgcgccgcgcagctgtgcgcggccgccgaggaggcggccgaggccgcgggcgcgtcgcccgtctacgtgatcggcaccgaggtgccgacgccgggcggcgaggtgagcgcgcaggcaagcggctcggcggccgacacggcaagcggcgcggcgcaggcagcggcccggaaagcggcggtcggcgcggcgaacggcatggcgcacgagcatggcggcgccgcgaacccgccggcggacgatgcgcgcggcgcggcagccggccatcgcggcgcgttcccgcagatcgaagtcacgcgcgcggacagcgtgagcgcgacgctcgccgcgcaccgcgacgcgttcgcgcggcacggtttgcagcacgcatggtcgcgcgtgatcgcgctcgtcgcgcagccgggcgtcgatttcgacgatcgccgcgtgctcgastacgatccggcgcgcgcggccgcgctcggcgcgagcatcctgcgcgtgccgtcgctcgtgttcgaggcgcattcgaccgattatcagacggaaagcgcgctcgccgcgctcgtgcgcgatcacttcgcgatcctgaaggtcgggccggcgctgacgttcgcgctgcgcgaggcgctgttcgcgctgacctacatcgaggacgcgcttttcgacgacgcgtccgagcgctcgcaactgcgcgacgtgatcgacgcggcgatgcgcgagcgccccgagtactgggcgccgtattaccgcggcgacgcgctcgcgcagcgcatcgcgcgccagttcagctacagtgaccgcattcgctattactggttgcagcccgcggtcgcggcggcgctcgaacgcctgttcgtcaacctcgcgcgccgcccgagacgctcgtcgcgcagtggctgcccgacgtgtacgcggcctgccggcgcggcgagctcgcgcgcgagccgctcgcttgggtgcgtcaccggatccgggaggtgatctcgcgctacgcgcgcgcgtgcgccatgcagcac

SEQ ID NO: 14502 - DNA, 306 bp, Burkholderia mallei
atgaacaagattcgcaagggtgacgaagtcatcgtcatcaccggcaaggacaagggcaagcgcggtgtcgtgctggccgtgggcgccgagcatgtgaccgtcgagggtatcaacctcgtcaagaagcatgtgaagccgaacccgatgaagggtacgacgggcggcgtggaagcgaagacgatgccgctgcatatttcgaacgtcgcactggtcgacgcgaacggcaaggcttcgcgtgttggcatcaaggtcgaggatggcaagaaggttcgcttcctgaagacgaccggtgccgtgctgagcgcc

SEQ ID NO: 14503 - DNA, 1428 bp, Burkholderia mallei
atgtcgaaggaatttgacgtcgtcgtgatcggcgcgggcccgggcggctatatcgccgcgatccgcgccgctcaactgggcaaaacggttgcctgcatcgaaaaatggaagaacccggccggcgcgctgaagctgggcggcacgtgcctgaacgtcggctgcatcccgtcgaaggcgctgctcgcgtcgtcggaggagttcgagaacgcgcagcaccatctggccgaccacggcatcagcgtcgacggcgtgaagatggacgtcgcgaagatgctcgcgcgcaaggacgggatcgtcgagaagatgacgggcgggatcgagttcctgttcaagaagaacaagatcacgtggctcaagggccacggcaagttcaccggcaagagcgacgccggcgtgcagatcgaagtgagcggcgaaggcgagacgcaagtcgtcaccgcgaagaacgtgatcatcgcgacgggctcgaaggcgcgccacctgtcgaacgtgccggtcgacaacaagatcgtcgcggacaacgaaggcgcgctggcgttcgactcggtgccgaagaagctcgcggtgatcggcgcgggcgtgatcggcctcgagctcggctcggtgtggcggcgcctcggcgccgaagtgacggtgctcgaagcgctgccggcgttcctcggcgcggccgacgaagcgctcgcgaaggaagcggcgaagctgttcaagaagcagggcctcgacatccatctcggcgtgaagatcgacggggtgaagacgggcgcgaacggcgtgtcgatcgcttacaccgacaaggacggcaacgcgaagacgctcgacgccgaccgtctgatcgtgtcggtcggccgcgtgccgaacaccgacaacctcggcctcgaggcgatcggcctgaaggcgaacgagcgcggcttcatcgacgtcgacgaccactgccgcaccgcggtgccgaacgtgtacgcgatcggcgacgtggtgcgcggcccgatgctcgcgcacaaggcggaggacgaaggcgtgctggtcgcggaagtgatcgacggccagaagccgcatatcgactacaactgcattccgtgggtgatctacacgtacccggaaatcgcgtgggtcggcaagacggagcagcagctgaaggccgagggccgcgagatcaagtcgggcaagttcccgttctcgatcaacggccgcgcgctcggcatgaacgcgccggacggcttcgtgaagatgatcgcggatgcgaagaccgacgagctgctcggcgtgcacgtgatcggcgcgaacgcgtcggacctgatcgccgaagccgtcgtcgcgatggagttcaaggcggcgtcggaagatatcgcccgcatctgccatccgcacccgtcgatgtccgaagtgatgcgcgaagcggcgctcgccgtcgacaagcgctcgctgaacagc

SEQ ID NO: 14504 - DNA, 1647 bp, Burkholderia mallei
cgccagatcctcgtcacgtccgcgctgccctatgcgaacgggcagattcacatcggccatctggtcgagtacatccagaccgacatctgggtgcggacgatgcgaatgcacggtcacgagatctactacatcggcgcggacgacacgcacggcacgcccgtcatgctgcgcgccgagcaggaaggcgtgagcccgaagcagttgatcgagcgcgtgtggcgcgagcacaagcgcgatttcgacagcttcggcgtgtcgttcgacaacttctacacgaccgattcggacgagaaccgcgtgctcagcgagacgatctatctcgcgctgaaggaggcgggcttcatcgccgagcgcgagatcgagcaggcgtacgaccccgtcaggcaaatgttcctgccggaccgcttcatcaagggcgaatgcccgaagtgccacgcgaaggaccagtacggcgacagctgcgaggtgtgcggcacgacgtaccagccgacggacctcatccatccgtactcggtcgtctcgggcgccgcgcccgtgcgcaagacgtcgacgcactacttcttccgcctgtccgatccgcgctgcgaggcgttcctgcgcgaatgggtgagcggcctcgcgcagcccgaggcgaccaacaagatgcgcgaatggctcggcgaggcgggcgaggcgaagctcgccgactgggacatctcgcgcgacgcgccgtacttcggcttcgagattcccggcgcgcccggcaagtatttctacgtatggctcgacgcgcccgtcggctactacgcgagcttcaagaacctgtgccagcggcgcggcctcgatttcgacgcgtggatccgcaaggattcgacgaccgagcagtaccacttcatcggcaaggacatcctgtacttccatacgctgttctggcccgcgatgctcgagttctcgggccaccgcacgccgaccaacgtgttcgcgcacggcttcctgacggtcgacggcgcgaagatgtcgaaatcgcgcggcacgttcatcaccgcgcagagctacatcgacacgggcctgaaccccgaatggctgcgctactacttcgccgcgaagctgaacgcgacgatggaagacatcgacctgaacctcgaggatttccaggcgcgcgtcaatagcgacctcgtcggcaagtacgtgaacatcgcgagccgcgcggcgggcttcctgctcaagcgcttcgacggccgcgtgcaggcgagcgcgatgaaccatccgcttctcgcgacgctgcgcggcgcgatcccgcagatcgccgcgcactacgaggcgcgcgagtacggccgcgcgctgcgccagacgatggagctcgcggatgcggtgaacggctacgtcgactccgcgaagccgtgggagctcgcgaaggatccggcgaacgcggtcgcgctgcatgaaacctgcagcgtgagcctcgaggcgttccgcctgctgtcgctcgcgctcaagccggtgctgccgcgcgtcgcgcaaggcgtcgaggcgttcctcggcatcgcgccgctcacgtgggccgatgcgggcacgccgctgtcgcccgagcagccggtccgcgcataccagcatctgatgacccgcgtcgatccgaagcagatcgacgcactgctcgcggcgaaccgc

SEQ ID NO: 14505 - DNA, 723 bp, Burkholderia mallei
atgacggtgtacttcatcggcgcgggtccgggcgaccccgagctgatcacggtgaagggccagcgcctcgtgcgccgttgcccggtgatcctgtacgcgggctcgctcgtgccggccgcggtgctcgacggccatcgcgccgagctcgtcgtgaacacggcggagctcgatctcgacgaaatcgtcgcgctgctcgcgcgcgcgcacggcaaggggcaggacgtcgcgcgcgtgcattccggcgatccgccgctctacggcgcgatcggcgagcagatccgccggctcgccgcgctcgggattccttacgagatcgtgcccggcgtgaccgcgacggccgcgtgcgcagcggcgctcggcgtcgagctgacgctgccgggcgtcgcgcagaccgtgatcctcacgcactacgcgggcaagacgacgatgcccgccggcgaatcgctcgcgagcctcgccgcgcaccgcgcgacgctcgcgatccatctcggcgtgcggcatctcgcgcggatcgtcgccgacgtgctgccgcactacggcgcggattgcccgatcgccgtgatctatcgcgcgagctggcccgacgaggcgcgcgtgacgggcaccctcgccgacatcgtcgacaaggtttcaggcaggtcgatcgagcgcaccgcgctgatcctgatcgggcgggtgctcagtgccgaaggcttcgacgagtcgacgctctatgcgaaggcg

SEQ ID NO: 14506 - DNA, 1685 bp, Burkholderia mallei
tcgacgatttcgacgaacgaagcggaggcgggtggcgcggctgcgccttgcatgggatcggagcggccgctccgatcgacaggagactgaaacagatgagtcaagcgatcgaagtcaaggtgccggatatcggcgattacaaggacgtgcccgtcatcgaagtgctcgtgaagccgggcgatgcggtcgagcccgagcagtcgctcgtcacgctcgaatcggacaaggcgacgatggatgtgccgagcccgtcggcgggcacggtcaaggaagtgaaggtgaaggtcggcgacgcggtgtcgcaaggctcgctgatcgtgctgctcgacggcgcgcaggcggcggcccagcccgcgcaggcgaacggcgccgcgacgagcgccgcgcagccggcggcggcgcccgctgccgcgcctgcgccggcggcggccgcgggcggcggcacggtcgacgtgaaggtgccggacatcggcgactacaaggacgtgcccgtcatcgagatcgccgtgaagatcggcgacacggtcgagaaggagcagtcgctcgtcacgctcgaatcggacaaggcgacgatggacgtgccgagcccggccgcgggcgtcgtcaaggacatcaaggtaaaggtcggcgatgcggtgtcggaaggttcgctgatcgtcgtgctcgaagcgtcgggcggcgccgccgcgagcgcgccgcaggccgcacccgcggctgcgccggcccccgcgcaggcaccggcacccgccgcgagcggcgagtaccgcgcgagccacgcgtcgccgtcggtgcgcaagttcgcgcgcgagctcggcgtcgacgtgtcgcgcgtcacgggcacggggccgaagagccgcatcacgaaggacgacgtcaccgcgttcgtgaagggcgtgatgacggggcagcgcgcggcgcccggcgctgcggccgcgcccgcgggcggcggcgagctgaacctgctgccgtggccgaaggtcgacttctcgaagttcggcccgttcgaggcgaagccgctgtcgcgcatcaagaagatctcgggcgcgaacctgcatcgcaactgggtgatgatcccgcacgtcacgaacaacgacgaggcggacatcaccgagctcgaagcgctgcgcgtgcaactgaacaaggagcacgagaaggcgggcgtgaagttcacgatgctcgcgttcgtgatcaaggcggtcgtcgccgcgctgaagaagttcccgaccttcaacgcgagcctcgacggcgacaacctcgtgttcaagcagtactaccacatcggtttcgccgccgacacgccgaacggcctcgtcgtgccggtgatccgcgacgcggacaagaaggggctcgtcgacatcgcgaaggaaatggccgagctgtcgaaggccgcgcgcgaaggcaagctcaagccggaccagatgcagggcggctgcttctcgatctcgtcgctcggcgggatcggcggcacgcacttcacgccgatcatcaatgcgccggaagtggcgatcctcgggctgtcgcgcggccagatgaagccggtgtgggacggcaagcagtttgtgccgcgcctcacgctgccgctgtcgctgtcgtatgaccatcgcgtgatcgatggcgcggaagccgcgcggttcaatgcgtatctcggcgcgttgcttgccgatttccgtcgcatcattctttga

SEQ ID NO: 14507 - DNA, 270 bp, Burkholderia mallei
atgagcgaatcgtcgcatcaatccgacccgcatcgccgcgcgcggcttcgctggcgcgcgcggcgcggtctgctggagaacgatctgattttcgagcgtttcttcgccagacacgagcacgacctcagcgacgcagacgtgagcgcactgtcgcgcctgctggatctaagcgacaacgacctgatggacttgctgctcgcgtgcaaggaaccagagggcgaccttgccggcccggacatgtccaggctgctggagatgctgcgcagcgtt

SEQ ID NO: 14508 - DNA, 1980 bp, Burkholderia mallei
atgggcgcttccgattttttctccgccgtcttccccatgtcgctttattccattaccggcgcgcaactcgcgttcggccacgtcgcgctgctcgatcacgcggacttctcgctcgaagccggcgagcgcgtcgggctcatcggccgtaacggcgccggcaagtcgtcgctgctgaagatcgtcgcggatctggcgaaacccgacgacggcctcgtcacgcggcagcagcacctcgtgacggtctatgtgccgcaggagccggaattcgccgccgggcagacggtgttcgacgcggtggcctccgggctgaccgatacgcgcgcgctgctcgccgaatacgacgagatcgcgcaccggctcgccgatacgcccgaaggcgccgagcacgacgcgctgcttgcgcggatgaacgcgctgcaatcgtcgctcgacgcgacggacgcgtggaactggcgcacgcgggtggcgacgacgctcgcgcagatcgggctcgacggcgatacgaagatcgacgcgctgtcgggcgggatgcagaagcgcgccgcgctcgcgcgcgcgctcgtcgtgcagccggacgtgctgctcctcgacgagccgaccaaccatctcgatttcgacggcattcgctggctcgaggaactgctcgtcgcgcagcgcgcgggcctgttcttcatcacgcacgatcgcgcgtttctcgatcgcgtcgcgacgcgcatcgtcgagctcgaccgcggccgcctgctgtcgtatccgggcaacttctccgcgtatcagacgcgcaaggcgcagcagctcgaggtcgagcgcgtcgagaacgaaaagttcgacaagctgctcgcgcaggaggaggtgtggatccgcaagggcgtcgaggcgcggcgcacgcgcagcgtcggccgcgttgcgcggctcgagcagatgcgccgcgagcgcgcggagcgccgcaacgcgcaaggcaacgtgaggctcgacgtcgcgcagggcgagaaatcgggcaagatcgtcgcggagctgaccgacgtgacgaagcgctacggcgagcgcacggtcgtcgagcgcttctcggccacggtgatgcgcggcgacaagatcggcttcgtcggcccgaacggcgcgggcaagaccacgctgctcaagctgatcctcggcgaactgaagcccgacgcgggcacggtgcgcacgggcacgaacctgcaggtcgcgtatttcgaccagatgcgcgcgcaactcgatcaggagaagagcctcgcggacacgatcagccccggcagcgagtgggtcgagatcggcggcgtgcgcaagcacgtgatgagctatctgggcgacttcctgttcgcgcccgagcgcgcgcgctcgcccgtcaagtcgctgtcgggcggcgagcgcaaccggctgctgctcgcgcgcctgttcgcgcgcccggccaacgtgctcgtgctcgacgagccgaccaacgacctcgacatcccgacgctcgaactgctcgaagagctgctgaccgattacgacggcacggtgctgctcgtcagccacgatcgtgcgtttctcgacaacgtcgtcacgtcggtgatcgcctcggagggcaacggcctgtggcgcgaatacgtcggcggcttcaccgattggcagatccagcgcgagcgcgcgcagcggatcgcgcacgaggaggcggccaagcgcgcggcgaaggagcccgcgagcgcgaaggatgacgcgcccaagggcgcggcgggccgcaatgcgcagcgcacggtcaagctgtcgttcaacgagcagcgcgagctcgacgcgctgcctgcgaggatcgcggcgctcgaggccgagcagaaggcgattgccgcgcagctcgaggacggctcgatcttctcgaaggatccgcaggagggcacgcgcctgaccgagcgcttcgcggcgctcgacgacgagctgctcgcggcgctggagcgctgggaggcgctcgaggcgaaacgtaagccttca

SEQ ID NO: 14509 - DNA, 1080 bp, Burkholderia mallei
gagcggcaccgcgtcgccgcggcgctcgcggcgagcgaggagcgcttccagctcgcggtcagcggcgcgagcgcggggctgtgggactggaatccgaagacgggcgcgatgtacctgtcgccgcacttcaagaagatcatgggctacgaggaccatgagctgcccgacgagatcaccgggcatcgggaatcgattcatccggacgacctgaagcgcgtgctcgacgcgctgaaggcgcacctcgagcatcgcgacacgtacgacgtcgaataccgggtgcgcacgcgctcgggcgattaccgctggatccagtcgcgcggccaggcgctgtggaacagcgcgggcgagccgtaccggatggtcggctggatcatggacgtcaccgatcgcaagcgcgacgaggacgcgctgcgggtgtcgcgcgaggagctgcgccgcctgtccgcgcacatccagagcattcgggaagaagagaaaacgcgcatcgcgcgggaattgcacgacgatctcggccagcaactgacggcgctgaagatggccgtcacgctcgtcgacaacgaactgaaggacgcgggctgggcctcgcgcacgagccgtttgccgaacgtctatgcgttgatcggccagttgctggactcggtgcggcggattgcggcggacctgcgccccgtgatgctcgacgatctcgggctgatggcggcgatcgaatggctgacgcacgagttcgtcgagcgataccggattccggtgacgagccgcatcgaagccgacgacatcgcgttcacccgcggcagcgcgaccgaagtgttccgcatcgtgcaggaggcgctgaccaatgtcgcgcggcattcggaggcgaccgaagtcacgctcgacatcattcgcgacgagccgaactgcatcgtgcggatcgccgataacggttgcggcaccgcgcgcgatacgcgtccgaaccggcactcgctcggcctgctcggcatgcgcgagcgcgcggcgcgcctcggcggcgagatccggatcgacaccgcgcccggccggggcttcgcgttgacggcgacgctgccgcttgccgtgatcgag

SEQ ID NO: 14510 - DNA, 813 bp, Burkholderia mallei
atgcttccaaccgtattcatcgtctccgacggcaccgggatcaccgccgaaaccttcgcgcattcgatcctgtctcagttcgatcagaaattccggctcgtgcgcgtgccgttcatcgattcgatcgagaaggcgtacgacaccgtccggaaaatcaacgacgccgcgcagcacgacggccgcaggccgatcgtgttcacgacgctcgtcgacggcgaatcgaacgagatcgtcaagcgctcgaacgcgctcgtgctcgacatgttccagcgcttcgtcgagccgctcgagcaggaactgcagttgaagtcgagccacgcgatgggccgcgtgcaccagaacgcggacaccgaggaatacaagacgcggatcgaggcgatcaacttctcgctcgcgcacgacgacggccagtcgaaccgcaacctcgccgacgccgacgtgatcctgatcggcgtgtcgcgcagcggcaagacgccgacgagcctgtatctcgcgatgcagtacggggtgaaggcggcgaactatccgctgattccggaagacttcgagcgcggcaagctgccgacgccgcttcatccgcaccgcgacaagctgttcggcctgtcgatcgatccgatgcgcctgtccgagatccgcaacgagcgccgccccggcagcaagtatgcggcgccggagaactgccgctacgagatcaacgaggccgaagcgatgatgcggcgcgaaggcgtcaagtggctgtcgtcgacgcacaagtcgatcgaggaaatcgcgacgacgatcctgcaggaaatcaagctcgagcggcaatcgtat

SEQ ID NO: 14511 - DNA, 591 bp, Burkholderia mallei
atgccgttcaatttcccgattttcctgacgtgggtgcgaatcgtgctgattccgctcgtcgtcggtgtgttttatctgccggacacgatgctgagcgccgaccatcgcaatctggcggcggccgtgattttcattctcgccgcgctgaccgactggttcgacggttatctcgcgcggaagtggaaccagacgtcggcgttcggcgcgtttctcgacccggtcgccgacaagctgatggtgacggccgcgctgctgatgctcgtgcagctcgcgcgcatcgacgcggcgatcgcgctcgtgatcgtcggccgcgaaatcgcgatctcggcgctgcgcgaatggatggcgcagatcggcgcatcgaagagcgtcgcggtgaattcgctgggcaagttcaagaccgcgtgccagatggtcgcgattccgatgctgctcttctacggccggctgccgttcggcggcggcgtcgcgatcgacacgcgcggatggggcgaatggctgatctatctcgcggccgtgttgaccatctggtcgatgctttactacatgaagctcgcgtggccgcagattcgcgagcgcggcggcgcggcc

SEQ ID NO: 14512 - DNA, 969 bp, Burkholderia mallei
atgaactaccgaaggctgggacgttccggattgcaggtcagcgagctgtcgatcggttcatgggtcacctacggcaaccaggtggatcgacgcgccgcgcgggaatcgctggctgccgcgcgcgacgccggcgtcaatttcttcgacaacgccgaagtgtatgcgggcggcaaatccgaggagatcatggggcatgcgctcaagtcgctcggctggccgcgcatcagctatgtggtatcgacgaaattcttctgggggctcgcggaagcgccgaatcagtaccacaccctcaaccgcaaatacctgctgaacgcgatcgacgcatcgctgcagcgtcttcagctcgactacgtcgacctcgtattctgccatcgtcccgatcccaatacgccgatcgaggaaaccgtatgggcaatgagcgacatcatcgcgcgcggcaaggcgctctattggggcacatccgaatggagcgccgacgagatccgcgccgcgtacgaaatcgcggatcggcatcacctgcgcaagccgacgatggagcagccgcagtacaacctgttccatcgcaagcgcgtcgagcaggaatacagacgcctctatgaagacttcggcatggggctcacgacctggagcccgctcgcgtcgggactgctgacgggaaagtaccggcacggggttcccgccggaagccgagccgaaattcacggctatgattggctgcgcgcgcaattgacggacccggcgaagaaccgtgtcgtggaagcgctcggtgagatcgcgaacgatctcgggtgcaccgtcggccagctcgcgcttgcatgggtactgaaaaacccccgcgtcagcaccgtgatcacgggcgcatcgcgcgtcgaacaaatcatcgagaacatgcgctcgctcgacgtggcgacccagatcacgccggacatgaagcagcagatcgagcagatcgtcggcgacgcgtatcaa

SEQ ID NO: 14513 - DNA, 2361 bp, Burkholderia mallei
atgaatcagcaagccgaacctttcctgagcgtcgccgccgatgccgagcgcgacgcgttccggcaggtccacgtctcgcggccgcatgaatccgcgcatctgcacgtgagcgggcgcgccacctacatcgacgacatcccgctcgtcgcgggcacgctgcacgcggcgctcggcctgtccgcgaagccgcacgcgcggatcgcgtcgatgcggctcgacgcggtgcgcgcggcggcgggcgtcgtcgcggtgctgaccgcggccgacattccgggcacgaacgattgcgggccgatcgtccacgacgatccggtgcttgccgacggcgtcgttcaatacgtcgggcagccgatgttcgtcgtcgtcgcgacgtcgcacgacgccgcgcgccgcgccgcgcgtctcgcgcagatcgaatacgaagaacggccggcgatcctgaccgcgcaggcggcgcgcgcggccgattcgtacgtattgccgccgatgcggctcgcgcgcggcgacgcggccgcgcggatcgcgcacgccgcgcatcgcgacgcgggcgagctcacgctgggcggccaggagcagttctatctcgaagggcaaatcgcctacgcggtgccgaaggaagacggcgcgatgcacgtctacagctcgacgcagcacccgagcgagatgcagcatctcgtcgcgcacgcgctggggctcgcgtcgcacgacgtgctcgtcgaatgccggcgcatggggggcggcttcggcggcaaggaatcgcaatcgggcctgttcgcgtgctgcgccgcgctcgccgcatggaagctgcaacgcccggtgaagctgcgccccgatcgcgacgacgacatgatgatcaccggcaagcggcacgatttccattaccgctacgacgtgggctacgacgacgcgggcgtgatcgagggcgtctcggtcgacatgacgtcgcgctgcggcttctccgccgatctgtcggggcccgtgatgacgcgcgccgtgtgccacttcgacaacgcgtactggctgcccgacgtatcgatcgtcggccgctgcgggaagacgaacacgcagtcgaacaccgcgtttcgcggcttcggcggcccccagggcgcgttcgcgatcgagtacatcgtcgacagcgtcgcgcgcgcgctcggccgcgatccgctcgacgtgcgccgcgcgaacctgtacggcaagaccgagcgcaacgtgacgccgtacggccagacgatcgaggacaacgtgctgcccgagctgatcgccgagctcgaggcgacgagcgcgtatcgcgcgcgccgcgccgcgacgcgcgcgttcaacgcggcgagcccggtgctgaagaagggcatcgcgctcacgccggtgaagttcggcattgcgttcaacgtcacgcatttcaaccaggcgggcgcgctcgttcacatctataccgacggctcgatcctcgtgaaccacggcggcacggagatgggccaggggctcaacacgaaggtcgcgcaggtcgtcgcgcacgagctcggcgtggacttcgcgcgcattcgcgtgacggcgaccgacacgagcaaggtcgcgaacacatcggcgacggccgcgtcgacgggttccgacctgaacggcaaggccgcgcaggacgccgcgcggcagttgcgcgagcggctcgccgcgttcgcggccgagcatgtcggcggcggcgcggcgcgcgcggccgacgtgcgcttcgcgcacgacgaggtgcgcgtgggcgaggtggccgtgccgttcgaggaactcgtcgcgcacgcgtatcgcgcgcgcgtgcagctgtggtcggacggcttttacgcgacgccgaagctgcactgggatcaggcggcgctgcgcgggcggccgttcttctattacgcgtacggcgcggcggtctccgaggtcgtcgtcgacacgctggcgggcgagatgcgtgtgctgcgagcggatgcgctgcacgacgtcggtgcgtcgctgaatccggcgctcgacatcgggcaggtcgagggcgcgttcatccagggaatggggtggctcacgaccgaggagctgtggtggaacgacggcggcaggctgatgacgcacgcgccgtcgacgtacaagatcccgaccgtcaacgattgtccgccggatttccgcgtgagactgttcgacaaccgcaacgcggaggacagcattcaccggtcgaaggcggtcggcgagccgccgctgttgctgccgttctcggtgttcttcgcgatccgcgacgcgatcgcggcggtgggcgattacgcggtcaatccgccgctcgccgcacccgcgacgggcgagtcgatcctgcgcgcggtgcgggcggtgcgcgcggcgcgggccggggcg

SEQ ID NO: 14514 - DNA, 1068 bp, Burkholderia mallei
atgagcaagatccgctcggcggtgccgccgccgccgctgcccgaagtcgtcgaggggcagcgttacgcgacgccgcagcgcggcgtcacgctggccgacacgatgttcgtcgattgccacttcgagcgcgtcgaatggaccggctgccggctcgcgaacctgcgcttcgtgaactgcacgttcgacgcgaaccgcttcgatcgctgcgagctcgagaagctctcgtacgattcgagccggattcgcgcgggcgcgtggacgcagagcgcgctgcagcgcgtgtcgttcaacgaatgcgagctcgacggcggcacgtggacgggcagcctggtgaaagacgtcgtatgcacgcagtcgaagggcggcgcgtggacgttcgacgcggtgcgcggcgcgcacgtgtcgctcgtcgcgggcgattacgcgggcgtcacgctgcgcggcggccgctggagcgatacgtcgtggatcggcagccggctcgccgacctgcggctcgaatcggtcgagctcgagaacctgatcgccgggcaaagcggcttcgagcgcgtggtgctcgtcgagtgccgcggcgtgaacgtgcgctggatcgattcgcggatcgagcggatgaccgtgcacggctgcgagctgaagcaggcggcgtggtcgcacagcacatgggcgacgggcgagattcacgcgagccggctgccgatcgcgagcttcgatcatgcgagcgtcaacgggctgacggtgacgaacagcgaattgccgcaggcgatcttcgatagcgcgagcgtcgcggacagcgcgctgcaaggcgtgcgcgcgccgcgcatcgcattgcgcgacgcatggctcacgcgcgtgaacctgtcgggcgcgcagatgcagcagctcgatgcgcgcggcgtgcatctggagcgcgtcgacctgcgcggcgccgattgccgcggcggcaacctgatcggccaactgagccacacgtgggcggcggccgatacgcgggacgcgattttcgaagaagccacgagcgccgacgaccggctctggtggcagcgagttcaacccggagcaagaggagtt

SEQ ID NO: 14515 - DNA, 519 bp, Burkholderia mallei
atgcggccctggctcgcgtcgctcgtcgtcgagacgtacgattcgctgtcggccggcttgcagaccgaatacggcaccgaggcgcaactgcagaacgtgttcctgcgcaagaagggcggcaaggtggtcgggctcgagacgctcgccgagcagatgcgcgcgttcacggggctcacgctcgcgcagcagcgggagatgctcgcgcaggacatggtgcagacgcccgcgcagaacgcggccgacgtgcgcgcgctgcatcgcctctggcgcatcggcgacgcggacgcgatcgccgcctgggcgaacgcgaagacggagcggctcgcacgcgcgcggtcgatcgccgattcgatcgacaacaagatcgtccatgagcgcaaccgccgcttcgtcgcgcggatgacggcgatcgccgcgccgaaccggccgctgttcgtcgcgatcggctcgttgcacctgggcggcccgaagggcgtgctcgaactgcttcggcagcagggctatcgcgtcgacgccggg

SEQ ID NO: 14516 - DNA, 1395 bp, Burkholderia mallei
gtggacaataagcgcaattcgtctttttcgatcgactccatgctcgaagacagtgcccgtctgaccgctctcgtttgcggaagcgaaccgctcaaccggatctggtcgccgcatgcgacgttgcagcggatgctcgacgtcgaagcggcgctcgcgcgcgcgctcgccgcgaatggcgtgattccggcgaacgcggtgcggccgatcgaggcggcctgcgcggcgagcgagctcgacgcgcaggcgctgatgcgcgacgcggcgctcggcggcaatctcgcgattccgctcgtcaggcaattgaccgcacgcgtgaaggtgcgcgacgccgaagcggcgaagtacgtgcactggggtgcgacgagccaggacatcatcgataccgccgccgtgctgcaactgcgcgacacgctcgactggctcgatccgctgctgcgcgatacgtgcacggcgctcgcgacgctcgcggccgcgcaccgcacgacaccgatgatcggtcgcacgtggctgcagcaggcgctgccgatcacgctcggattgaagttcgcgcaatggctcgacgcgctgctgcgccaccgcgagcgtatcgtcgcgttgcgcgagcgcgcgctcgcattgcagttcggcggcgcggcgggcacgctcgcgagcttgcgcgacgcggcgcccgcggttgcgcgctcgctcgccgacgaccttcggctcgcgctgccggccgtgccgtggcacacgcagcgcgaccggatcgccgagacggcggcttgcttcgggatgctgatcggcacgctcggcaagatcgcgcgcgacatttcgctgtcgatgcaaacggagatcggcgagctcgcggagcccgccgcggcgggcaagggcggctcgtcgacgatgccgcacaagcgcaatccggtcggctgcgcggccgtgctgaccgcggccgtgcgcgcgcccgggctcgtgtcgaccgtgctcgccggcatggtccaggaacacgagcgcgcgctcggcggctggcaggccgagtgggacgcgctgcccgaactcgcgcggctcgcgggcggcgcgctcgcgcaggtcgcgcagatcgtcgagggattgaacgtcgacgtcgcgcgccttgccgacaatctcgacgcgacgcgcggcctcgtgctcggcgaggcggtgatgctcgcgctcggcgacaggatcggccggctcgacgcgcatcatctcgtcgagcgcgcctcgaagcaagccgtgcgcagcggccgcccgctgtacgacgtgctggccgcggaccccgacgtcgccgcgcacctcacgccgcaggcgttgcggcagttgctcgatcccgctcattacgtcggcgaggcgcacgcctatgtcgacgccgtgctcgcgctccacgcgagccgccat

SEQ ID NO: 14517 - DNA, 1356 bp, Burkholderia mallei
atgggacgtcgttatttcggcacggacggcattcgcggcaaggtcggcgacgcgccgatcacgcccgatttcgtgttgcggctcggctacgcggcgggcaaggtgctcgcgagcgcgcccgggcgcgcggcgtcgggcgcgcgcccgacggtgctgatcggcaaggacacgcgggtatcgggctatatgctcgaggccgcgctcgaagccggtttttccgccgcgggcgtcgacgtgatgctcgcggggccgatgccgacgccgggcgtcgcgtatctgacgcgcgcgttgcggctgtcggcgggcgtcgtgatcagcgcgtcgcacaatccgtatcacgacaacggcatcaagttcttctcggccgacggcaacaagctgccggacgagatcgaggccgagatcgaggcgtggctcgacaagccgctcgactgcgcggcatcggacgggctcggcaaggcgcggcgcctcgacgacgcggccggccgctacatcgagttctgcaagagcacgttcccggccgcgttcgatctgcgcgggatgaagctcgtcgtcgactgcgcgcacggcgccgcgtatcaggtcgcgccgcacgtgtttcacgagctcggtgcggacgtgatcccgatcggcgtcgcgccgaacggcttcaacatcaacgatggtgtcggcgcgacggcgcctgatgcgctgatgcgcgccgtgcgcgcgaatcatgccgatctcggcatcgcgctcgacggcgacgcggaccgcctgctcgtcgtcgaccataccggccggctatataacggcgacgaactgctgtacgtgctcgtcaaggatcgcattgcaactaacggccaagtcgagggggcggtgggcacgctgatgacgaatttcgccgtcgaagtcgcgctgaaagaagcgggcgtgcaattcgtgcgggcggcggtcggcgaccgttacgtgctcgagcagttgcgcgagcgtggctggcagctcggcgcggaaggttcgggccacatcctgtcgctcgaccggcattcgacgggcgacgggatcgtctcggcgctgctcgtgctcgcggcgctcaagcgcagcggcaagacgctcgcgcagatgctcgaaggcgtcacgctgtttccgcagaagctgatcaacgtccggatgaagccgggcgccgactggaagggcagcgaagcgattcgccgcgcgatcgattcggccgaacaggcgctgtcgggcagcggccgcgtgctgattcgcgcgtcggggacggaacccgtgttgcgcgtgatggtcgaggcgcggcaggcgacggacgcgaaccgtcatgcggaggcgatcgccgacgcggtcaagcaggccaccgct

SEQ ID NO: 14518 - DNA, 132 bp, Burkholderia mallei
atgaaacgtacctaccaaccttccgtgacgcgccgcaagcgcacccatggcttccgcgtgcgcatgaagacggcgggcggccgcaaggtcatcaacgcccgccgcgcgaagggccgcaagcgtctcgccatc

SEQ ID NO: 14519 - DNA, 1071 bp, Burkholderia mallei
atgtgcatcgacgcatgcgcttgggctgaccgacgcgtgagcgcgccgccccccttcgatgccctatactttggtcaagttggtctgaccacgctggccaagatagtgagatgccggccggctgtcaatgtcgcgacgatcagggaaaacgccgatcggccacccgccgatcacgccgaaacccgcgccggcattggcccggaaggccgtccgcggcgcgccgggtataattgcgcgcggccgcggcacgccccggcacgccccggcgcgcgtcggcgcgcgtcggccgaagcgcgtacgagccggccgcgcgagccggcgcccgcgccacctaaccgtccagaaggcccgtgcatgacgtttcagcctgtcgagtcctatacccgcgtgcgcctgtccgacgtggtgtccgatcagatcaagtcgctcatctcggcgggcaagctgctgcccggccagaagctgccgaccgagcgcgagctcgccgcgcagctgaacgtgtcgcgcccgtcgctgcgcgaggcgctcgtgcggctcgaggcggacggcttcatcggctcggtcggacgcggcggcttcgtcgtctcggacatcacggcgcccgtcgtgtccagcccgctcgccgatctgctgctgcagaaccccgaggcgagccacgacgtgctcgagctgcgccatggcctcgagacgatctcgaccgcgtacgcggccgagcgcgcgacgcccggcgatctcgcgaagatcaaggaggcattcgacacgctcgccggccactcgctgaagcacgagccgggccggctcgccgaggtcgacgcgaacttccacctcgcgatcgccgacgcgacgcacaacgtcgcgctgatccacgtgatgcacggcatccacgggctgctgcaggaatcgatgcacaagtcgcaccggctcgtgaaccacgcggacgcgatggagcgcgcgctgctcgagcagcacaccgagatctacgaggcgatcgccgcgaaggacccggaacgcgcgcgcgcggcggcggagcggcacctgcgctacgtgcgcgcgctgtacgagcaggcggcc

SEQ ID NO: 14520 - DNA, 2739 bp, Burkholderia mallei
gtggccggccggcgcggacggtataatcgacgttttccccgcgccgcccccggccgccggggaagcgcgacttttgatccactcgagcgcgcgtgcgctcggcaccttgcgtcgcgcgccgctcaaaagcccagcccgaaccacaccatgcacgaaagatacgtacccgccgacgtcgaagctgccgcccagagcgactggcgcgcagccgatgcctaccgctcgaaggaagacgcgaaccgcaagaagttctactgcgtgtcgatgctgccttacccgtccggcaagctgcacatgggtcacgtgcgcaactacacgatcaacgacgtgatgtaccgctatctgcggatgaacggctacaacacgctgatgccgatgggttgggacgcattcgggatgccggccgagaacgccgcgatggccaacggcgtgccgcccgcgcagtggacgtacgagaacatcgcttacatgaagaagcagatgcaggcgatgggcctcgcgatcgactggtcgcgcgaggtcacgacctgcaagcccgactactacaagtggaaccagtggctgttcctgaagatgctcgagaagggcgtcgcgtacaagaagacgggcaccgtgaactgggacccggtcgaccagaccgtgctcgcgaacgagcaggtgatcgacgggcgcggctggcgctcgggcgcgttcgtcgaaaagcgcgagatcccgatgtactacatgcggatcacgcagtacgcggacgagctgctgaacgatctcgacggcctcggttggcccgagcgcgtgaaggtgatgcagcacaactggatcggcaagagcttcggcgtgaacttcggctttccgtacgagctcgacggcgagaagaagctgctgcgcgtgttcacgacgcgcgccgacacgatcatgggcgtcacgttctgcgcgatcgcggccgagcatccgctcgccgcgcggctcgcgcgggacaagcccgcgctgcaggcgttcatcgacgaatgcaagcgcggcggcgtcgccgaggccgacatcgcgacgatggagaagaagggcgtcgccacgggcttttcggtgtcgcatccgctcacgggcgagcccgtcgaggtgtggatcggcaactacgtgctgatgagctacggcgagggcgcggtgatgggcgtgcccgcgcacgacgagcgcgacttcgcgttcgcgaagaagtatggcctgccgatccggcaggtgattgccgtggagggcgagacgtactcgaccgacgcgtggcaggaatggtacggcgacaagacgcgcgccgtgtgcgtgaacagcggcaagtacgacggcctcgcgtacgacgcggccgtcgacgcgatcgcggccgagctgaaggcgggcggcctcggcgacaagcagatcacctaccggctgcgcgactggggcatctcgcgccagcgctactggggcacgccgatcccgatcatccactgcccgtcgtgcggcgacgtgccggtgccggagcaggacctgcccgtcgtgctgccggaagatctcgtgccggacggcacgggcaacccgctcgcgaagtccgacgcgttcctgaactgcacgtgcccgaagtgcggcgcggtcgcgaagcgcgaaacggacacgatggacacgttcgtcgattccgcgtggtacttctcgcgctacgcggcgcccgacgcgcagacgatggtcgatgcgcgcaccgactactggatgccgatggatcagtacatcggcggcatcgagcacgcgatcctgcacctgctgtactcgcgcttctgggcgaaggtgatgcgcgatctcggtctcgtcgcgttcggcgaaccggcgaagaacctgctcacgcaggggatggtgctcaacgagacgttctaccgcgaggacgcggcgggcaagaagacctggtacaacccggccgacgtgaccgtgtcgttcgacgacaagggccgccccgtcggcgcggtgctgaaatcggacgggcagccggtcgagctcggcggcatcgagaagatgtcgaagtcgaagaacaacggcgtcgatccgcaaatgctgatcgaccattacggcgccgacaccgcgcgccttttcacgatgttcgcggcgccgcccgagcagcagctcgagtggtccggcgcgggcgtcgacggcgcgagccgctttctgcgccgcgtgtgggcgttcggcttcgcgaaccgcgaagcgctggccgtgcgcgcgccgttcgacgccgcgcaactcgccgaggcgggcaagacgctgcgccgcgagatccacggcgtgctcaagcaggcggatttcgattaccagcgcttgcagtacaacacggtcgtgtcggccgcgatgaagatgctcaacgcgatcgaaggcgcgaagggcgcgacgcccgccgtgctgcgcgagacttacggcgtgctgctgcgcgtgctgtatccggtcgtgccgcacgtcacgttcgagctgtggaaggtgctcggctacgcggacgaattcggcccgctgctcgacgcgccgtggccgaaggtcgacgaggccgcgctcgagcaggccgagatcgagctcgtgctgcaggtcaacggcaaggtgcgcggcgcgctgaaggtcgcgaaggacgcgagccgcgaggcgatcgaggcggcggccgtcgccgacgggatgttcgcgaaattcgccgaaggcaggccggcgaagaagatcattgtcgtgccgggccgtctcgtgaacgtcgtcgtt

SEQ ID NO: 14521 - DNA, 1221 bp, Burkholderia mallei
atggaaaaattcgatatcgcggtgatcggcgcgggcgcggccggcatgatgacggctgcggtggcggggcagctcgggcggcgcgtcgtgctgctcgatcactcgccacggctcgcggagaagatccgcatctcgggcggcgggcgctgcaatttcacgaatctgtacgcggggccggacaactatctgtccgcgaatccgcatttctgccgctcggcgctcgcgcgctacacgccgcgcgattttctcgggctcctgaagaaccatcgcgtcacgtggcacgagaagcacaagggccagctcttttgcgaccattcgagcgacgcgatcatcgacgtgctgaaaagcgagtgcgacgcgggcggcgtcgcatggcggcggccggtgacggtcgacgcggtgcggcacgcgcaggcggacggcttcgcgctcgatacgagcgcgggcgcgatcggcgcgcaggcgctcgtcgtcgcgacgggcggattgtcgatcccgaagatcggcgcgaccgatttcgcttaccggatcgcgaaacagttcggccacaagctcgtcgatacgcggccggcgctcgtgccgctgaccttttcggccgatgcgtgggcgccgttcgccgcgctgtcgggcgtgtcgctcgaggcgcgggtgtcgaccggcgcgaagcggggcggcggtgagttcgtcgaggacatcctgctcacccatcgcggactgtccgggccgggcatcctgcagatttcgagctactggcgctcgggcgagccgattcacgtcgatctcgcgccgcaaatcgacgcggcgaacgaactgattcgcgcgaaggccggctcgcgccgccagatcggcacgctgctcgccgaatgggtgcccgcgcggctcgcgcacgcgtggctcgaggcggagcgggtgcacgcggacgcacggcttgccgacctgccggacaagacgctgcgccgcatcggcgagacgctgtcgcgctggacgctcacgccgagcggcaccgagggctaccggaaggccgaggtgacgaaaggcggggtcgacacgcgcgagctgtcgtcggcgacgatgatgagcgagcgcgtgccgggcctgttcttcgtcggcgaggcgctcgacgtgacgggttggctcggcggctacaatttccagtgggcatgggcgtcgggcgtcgcggccgggcgcgcggccgccgacggcacgcggcgcttgacgggt

SEQ ID NO: 14522 - DNA, 702 bp, Burkholderia mallei
atgaaattacctcagcgtctcgcagcggaagtgttcggcacgttctggctcgtcctcggcggctgtggcagcgccgtcctggcggccgcctttccgggcctgggcatcggctttgccggcgtcgcattggcgttcggcctgaccgttctgacgatggcgttcgccatcggccatgtctccggatgccacctgaacccggccgtgagcgtcggcctgacggtggcgggacgtttcccggcccgcgatctcgtgccgtacgtcatcgcgcaggtcatcggcgccacgctcggcgcgttcgtgctctatctgatcgcgaccggcaagccgggcttcgacgtcgccggcagcggcttcgcgacgaacggctatgacgcgcgctcgcccggccattactcgctcgccgccgcattcatctgcgaagtcgtgctgacgggcttcttcctgttcgtgatcctcggctcgaccgacaagcgcgcgccggccggcttcgcgccgatcgcgatcggcctgtgcctcacgctgatccacctgatctcgatcccggtgacgaacacgtcggtgaacccggcgcgctcgacgggcccggcgctgttcgtcgggggcgaggcgatcggccagctgtggctgttctgggtggcgcccatcatcggcgcggcgatcgcgggggtcgtctacccgctcgtcgcgggacgcgacgaaagc

SEQ ID NO: 14523 - DNA, 1473 bp, Burkholderia mallei
atgaccgaaaccttgttgctggccgcgatcgtcgcgctcgcggtggcgctcgtcgtcgcgctcgtcatgctgttgcgcggcggcccgcgcggcggtggcctcgagcggctcgccgagcagatcgacgacgcgaacgacgcgcacgcgcatgcggccgagcgcctcgagcgcgaactgcgcgcggagatcgtcgacggcgcgcgccattcgcgcaccgagctcgcgggcaacttcgcgcaattgcagcagacgcttgccgcacagctcacgagcgtcgcgacggtgcagaacaatcagatcgacggcttcgcgcagcagctcgcgaagctcgtcgcgggcaacacgcagcagttcgacgcgatgcgcgacacgctgcagcggcaggcgcagctcgcgcgcgaagagcaaggcacggcgctccggcatttcggcgatacgctcaaccagcagctcacgcaactgacgcaggcgaacgatcgccggatcggcgaggtgcgcgcgacgctcgagacgcgcctgaaggaaatcgaggcgaacaatgcggcgaagctagaagagatgcgccgcaccgtcgacgagaagctgcacgcgacgctcgagcagcgcctcggcgaatcgttcaagctcgtgtcggaccggctcgagcaggtgcaccgcgggctcggcgagatgcagacgctcgcggcgggcgtcggcgacctgaagaaggtgctgacgaacgtgaagacgcgcggcacctggggtgaggtgcagctcgaggcgctgctcgagcagatgctgacgccggatcaatacgcgaagaacgtcgcgacggtgccgaagagcggcgagcgcgtcgagttcgcgatccggctgccggggcggcacgacgaaggcgcggcgggcggcggggaaccagtgtggttgccgatcgacgcgaaattcccgcgtgaagactacgaacgcctgatcgacgcgcaggaacgcgcggacgcggcggctgtcgaggaggccgcgcgcgcgctcgaggcgcggattcgcgcggaggcgcgcacgatcgccgaaaagtacgtcgcgccgccgcacacgaccgatttcgcgctgctgttcttgccgaccgaagggctctacgcggagatcctgcgccgccccggcctgaccgatctgctgcagcgcgactatcgcgtgacggtggccggcccgacgacgctgacggcgctgctgaacagtctgcagatggggttccgcacgctcgcgatcgagaagcgctcgagcgaggtctggcaggtgctcggcgcggtgaagaccgaattcggcaagttcggcgacgtgctcgcgcgcacgaaatcgcagctcgagacggtcacgcgctcgatcgaggcggccgaacagcgcacgcgcgtgatgaaccgcaagctcaagcaggtcgaggcgctgccgggcgaggccgcgaacggcctgctcggcgtggacggggccgaggccgacgagagc

SEQ ID NO: 14524 - DNA, 891 bp, Burkholderia mallei
atgacacgctatcgcgggcgcttcgcgccgtcgcccaccggccccctgcacttcggctcgctcgtcggcgcgctcgcgagctggctcgacgcgcgcgcgtggggcggcgcgtggctcgtgcgaatcgaggatatcgacggcccgcgcacggtgcccggcgcggccgaagacatgctcgcgacgctgcgcggcttcggcttcatcgccgacgagccgcccgtctggcaaagcgcgcgcgtcgcgcactacgaagcggcgctcgcgcggctcaccgccgcggggctcgtctatccgtgcggctgctcgcgcaaggagatcgccgattcgctgcgcgccgcgcacgagcggcacacgacgctcgcgtatcccggcacgtgccgcacgggcctgcacggcaagcccgcgcgcgcatggcgcttgcgcgtgccggacggcgccgcggccgtcgtcgcgttcgacgaccgctggcagcgcgcgcaaacgcagaatctcgcgaccgaagtcggcgatttcgtgctgaagcgcgcggacggacaatgggcgtatcaactcgccgtcgtcgtcgacgacggcgatgcgaacatcacgcacgtcgtgcgcggcgccgatctgctcgactcgaccgctcgccagatctacctgcagcgctgcctcgggctgccgacgccgcgctatctgcacgtgcctgtcgtcctcgacgcgaacggcgagaagctcagcaagcaaacgggcgcggcggcgctcgatcccgccgcgccgctgccggcgctcgccgccgccgcgcggcacctggggctcgcgctcgacggcgcggcgtgcgcgtcgctcgacgcgttccaggcggccgcgatcgccgcgtgggacgcgcgcttcgggccgaacgcgcgcggc

SEQ ID NO: 14525 - DNA, 2208 bp, Burkholderia mallei
atggagtgggcaaccagcacgcgcgtgcgtgcgatcgcggccggcgtggcgttctacgcggcggcggcgggtcatgcgcaggcacaggcggcgcagccgggggcggacgcgcggcagccgggcggcgaggcgaaggcagacaccgcggcgggcggcacgttgcccgcgatctcggtgtcgggagcagcggagcgcgacgcgagcgtcggcctcgtcgcgcggcgcagcatgacgggcacgaaaacggatacgccgatcatcgagattccacagacgatcaacgtcgtcaccgcgcagcagatcgaggcgacgggcgcgaccgacatcaatcaggcgttccgctacattccgggcttctcgagctacgggtcggacaaccgttcggactggtacgcggcgctgcgcggcttcacgccgaccgtgttcgtcgacgggctgcaggtgccgaacacgatcaacctgtcgagctggcgcgtcgatccgtacatgatcgacagcatcgccgtgctgcgcggcccgacgtcggtgctgtacgggcagggcgatcccggcgcgatcgtcgacgtgcagagcaagctcgcgaacggcgagcgcatccgcgagctcggcgtgcaggtcggcaactacgcgcgcaagcaactgatgttcgacatcggcgacacgatcggcaaggacggcacgctgtcgtaccggatcgtcggcgtcggccgcgacggcaacgcgcagacggggccgctcgccgaccagcgcgtgtcgttcgcgccgtcgctcaaatggcagccgaacgcggacacgtcgctcaccctcgccgcgacgtacctgcaggactggggggacacgtcgagcaacttcctgccgtcgcgcggcaccgtgctgccgaatccgaacggcacgatctcggacgacctgtacacggccgatgcgaacttcgaccattaccgcaagaagcagtggtcgctcggctatcagttcgagcacaagctgaacccggtgtggacgctgcggcagaacgtgcgctggatgcacctgtcgctcgacgacgcgtccgtctacggcggcggcctcgacgacgcagacccgacgatggcgacgatgacgcgctacgcgggcctgttccagttcaactacagccgcttcgacgtcgacaaccaggcgcaggcgaaattcacgacgggcccgctttcgcacacgctgctgttcggcttcgactacaaccgccagacgacgaccgatagcgaatggctcgcgaaggggccgagcctgaacctgtaccggcccgtctacacgccgattccgtccgacatcttcagcgggccgaacgcgtcgcgcaccgacacgaagacgacgctgaacgcattcggcctgtacgtgcaggaccagatcaagtggcggcgctgggtgctcacgctcggcggccggcaggactggacgcgcacgtcgcaggacgacatcgcgaacgcggcgagcttcaggcagaacgaccacgcgttcagcgggcgcgtgggcctcacgtatctcggcgactacgggctcgcgccgtacctcagctattcgacgtcgttcaatccgcagatcggcctgaagctcgcgggcggcgggctcgcgacgccgaccaagggccgccagatcgaggcgggcctgcgctggcagccgcccggcaagaacctgatgctgaacgcggccgtctaccagatcaaccagacgaacgtcgcgatgagcaatccgaacgacccgacgagcagcacgttcgtgcaggtgggcgaggtgcgctcgcgcggcgtcgagctgagcgcggtgggcaacctgtcgcgcgagctgtcggtgatcgccgcgtacgtctatcaggacgtgaagaacgtgcgggcgaacgacaacacgctgaacaagtggcccgtcgacgtgccgcggccgcgccagatcgcgtcgctgtgggccgactggacgtggcgcaccgggccgctcacgggcttcggcgtcggcgcgggcgtgcgctacatgagcgcggcggcgggcgcggtcgacaattcgctcacggtgccgagctacacgctgttcgacgcggcgctgcactacgagctgcgcaactggcgtttcgcgctcaacgcgacgaacctgttcaaccgccgctacgtggccggctgccagtcggatgcggtgtgcatgtacggcaaccagcgcaccgtgatcgcgaccgcgaaatacaactgg

SEQ ID NO: 14526 - DNA, 2835 bp, Burkholderia mallei
atgagcaacaagaaagccgactcgaaaccgcaggccaagtatccggtcaacctgctcgacacgccgttcccgatgcgcggcgacctcccgaagcgcgagccgcaatgggtggaggactgggaggcgcgcggcgtctacgagaagatccgcgcggcgagccagggccggccgaagttcatcctgcacgacggcccgccgtacgcgaacggcgacatccacctcggccacgcggtcaacaagatcctgaaggacatggtcgtgaagtcgcgcaacatggcgggcttcgacgcgccgtacgtgcccggctgggactgccacggcatgccgatcgagatccagatcgaaaagcggttcggcaagtcgctgcccgccgccgaagtgatggcgaaggcgcgcgcgtacgcgaccgagcagatcgagaagcagaaggtgggcttcaagcgcctgggcgtgctcggcgagtggggcaacccgtacaagacgatgaacttccagaacgaggcggaggaaatccgcgcgctcggcaagatcatcgagaagggctacgtgtatcgcggcctgaagcccgtgaactggtgcttcgattgcggctcggcgctcgccgaggcggaagtcgaatacaaggaccgcaccgatccgacgatcgacgtgctgttcgcgttcgccgagcccgagaagaccgcgcacgcgttcggcctcgccgagctgccgcgcgccgaaggcgggatcgtgatctggaccacgacgccgtggaccatccccgcgaaccaggcgctcaacctgcatccggagatcgtctacgcgctcgtcgacacggagcgcggcctgctcgtcatggccgaggagcgcgtcgaggcgtgcatgaaggacttcggcctcacgggccgcgtgatcgcgaggacgcccggcgagaagctcgcgaacctgcgctttcaccacccgctcgccgccgcgcatccgggctacaagcgcacgtcgcccgtctatctcggcgactacgtgacgaccgacaccggcacgggcgtcgtccactcgtcgcccgcgtacggcgtcgaggatttcacgtcgtgcaaggcgcacggaatgaccgattcggacatcatcaacccggtgatgggcgacggccgctacatcgaatcgctgccgctgttcggcgggctcacgatctgggacgcgaacccgaagatcgtcgacgccctgaaggccgcgggctcgctgctgcgcaacgagcgctacgcgcacagctacatgcattgctggcgccacaagacgccgatcatctaccgcgcgacgtcgcaatggttcgccggcatggacacgcagccggccggcggcggcaagacgctgcgcgagaccgcgctcgacgcggtcgacgcgaccgcgttctacccgtcgtggggcaagcagcgcctgcatgcgatgatcgcgaaccgtcccgactggacgctgtcgcgccagcgccaatggggcgtgccgatggcgttcttcgtccacaaggaaacgggcgagctgcatccgcgcacgctcgagctgctcgaggaagtcgccaagcgcgtcgagcggcaaggcatcgaggcgtggcagacgctcgacgcgcgcgagctgatcggcgacgacgcgaacctgtacgagaagaaccgcgacacgctcgacgtgtggttcgactcgggcacgacgcactggcacgtgctgcgcggctcgcacaaggatcagttgcagttcccggccgacctgtacctcgagggctcggaccagcatcgcggctggttccactcgtcgctgctgaccgcgtcgatgctcgacggccgcgcgccttacaagggtctgctcacgcacggcttcacggtggacggcgaaggccgcaagatgagcaagtcgctcggcaacgggatcgatccgcatgaagtcgcgaaccgcctcggcgcggaaatcatccgcctctggatcgcgtcgaccgattattcgggcgagctcgcgatctcggaagaaattctcaagcgcgtgacggaaggctatcgccggatccgcaacacgctgcgcttcctgctcgcgaacctgtcggacttcgattacgcgaaggatgcgctgcccgccgggcaatggctcgagatcgaccgctacgcggtcgcgttcgccgcgcagttgcaggcggagttgctcgcgcattacgagaagtacgagttccacccggtcgtcgcgaagctgcagacgttctgctcggaggacctgggcggcttctatctcgacgtgctgaaggaccgcctgtacacgagcgcgcccgcgtcgccggcacgccgctccgcgcagacggcgctctaccacgtgacgcagggcctgctgcgcgtgctcgcgccgttcctgtcgtttacggccgaggaagcctggcgcgtgttccagccgcaaagcgacacgatcttcaccgagacctactacgcgtatccggaaatcgcgggcgccgaggcgctcatcgcgaaatggacgctgctgcgcgacgtgcgcggcgacgtgacgaaggcgctcgaggaagcgcgcaccgcgaaccggatcggctcgtcgttgcaggcgcaagtcgaagtgcgcgcgtcgggcgcgcgctacgacgcgctcgcgagcctcggcgacgatctgaagttcgtgctgatcacgtcggcggcgacggtcgtgaaggtcgacgcgcagggcgacgaaagcgtcgacgtcgcggcctcgacatacccgaagtgtgagcgctgctggcactaccgcgaggacgtcggcgcgcacgccgatcatccgacgctttgcggccgctgcttctccaacctgttcgaaaacggcgaaacccggagcgctgcg

SEQ ID NO: 14527 - DNA, 1284 bp, Burkholderia mallei
gtgaagaaaccgttctataaagtcctctacgtgcaggtgatcttcgccatcgtcgtcggcgtgatcctgggtcactactatccgtcgctcgccgtcgacatgaagccgctcggcgacggcttcatcaagctgatcaagatggtgatcggcccgatcatcttctgcaccgtcgtgaccggcatcgccggcatgcaggacatgaagaaggtggggcgcgtcggcggcaaggcgctcctgtatttcgagatcgtgtcgacgtgcgcgctcgtgctcggcctcgcggcgacgcacatcctgcgccccggcgtcggcttcaacatcgatccggcgacgctgaacggcaaggaagtcgcgtcgtacgcggcgaaggcgcacggccagtcgagcgtcgacttcctgatgcacatcatcccgaacacgatgatcgacgcgttcgcgcagggggagatcctgcagatcctgctgatcgcgctgctgttcggctcggtgctcgcgcacctcggcgagcgcggccgcgtcgtcaccgatttcatcgacggcatcacgcgcgtgctgttcggcatcgtgcacatcgtcacgaagctcgcgccgatcggcgcgttcggcgcgatggcgttcacgatcggcaagtacggcgtcggctcgctcgtgccgctgctcaagctgatcggcacgttctacctgacctcggtcgtgttcgtgctcgtcgtgctcggcgcgatcgcgcgcttcaccggcttctcgatcatccgcttcgtcggctacatcaaggaagagctcctgatcgtgctcggcacgagctcgtcggaggcggcgctgccgcaactgatggagaagctcgagaaggcgggctgctcgcgctcggtcgtcggcctcgtcgtgccgaccggctacttgttcaacctcgacggcacgaacatctacatgacgatggccgtgctgttcatcgcgcaggccaccaacatcgagctcacgtggatgcagcagctcacgctgctcgcggtcgcgatgctgacgtcgaagggcgcgagcggcgtcacgggcgcgggcttcatcacgctcgccgcgacgctcgccgtcgtgccgaccattccgctgtccggcatggtgctgattctcggcatcgaccgcttcatgagcgaatgccgcgcgctgaccaacatcgtcggcaacggcgttgcgacggtcgtcgtgtccgcgtgggagaaggagctcgaccgcgcgaagctgcgcgcggcgctgtcgggcaacggcgaggcagccgcgggcgaagccgcgcgggtc

SEQ ID NO: 14528 - DNA, 7802 bp, Burkholderia mallei
ccggcttcgcccgcacaggaagatctgtggctcgccgcgcaggttcaggaggagggcgccgcatatcacctgtcgatcgcgctgcgcttagacgcgcccgtcgacgacgcgtcgatgaggcgggcgctcgtcgaggtgatcgctcggcatccgtcgttgcgcacgacgtttcggcgcgatgcgcagggtctgcggcagtgcgtgcgcgcggcggcgcaggccgaggtcgactggtccgaggcggtgctgccggcgccggacgaggccggcgagcgcgaatccggcctgcgcgacgcattgacgcgattcgcgcagccgcgcttcgacctgcacgcagggccgctgctgcgtgcgcgcctgcaccgcggggcgccggactgcgacgtggtgcagatcgtcgttcatcatattgtcttcgatgcgtggtcgcggatggtcgtgtcgcgcgagatcgtcgacgcgtaccatgcgctgcgcgcgggccgcgcgatcgcatggagtgccgcggcggcttcgcccggcgcgttcgcgcgcgggcagcgcgacgcgctgacgccgcagcgggtcgcccggttgcgcgaatactggcgcgcgcaactggccggcgtgccgccggtgctcgatttgccgaccgatttcgcgcgcccggccgtgcgcgacggcatcggcgcgacggcgctgcgcatgctgcccgccgcgctcgccgagcggctcgcggccgtcggcgcccggcacggcgcgtcgctgttcatgacgctgatggccgcatggcagatcctgctgtggcgctgcagccggcagcacgaattcgcgatcggcacgccgatggcggcgcgcgacgccggcgcgttcgagtcgaccgtcggctatctcgtcaatacggtcgtgctgcgcgcgagcgtgcgcgccgacgagccgttcggcggcctgctcgcgcgcgtcgcgcagacggtgctcgatgcgcacgagcacaaggcgctgtcgttgcgcgaggtgatcgagctcgcgggcgcggatcgcaacccgagccacaccccgctgttccaggcgatgttcgagtttcacaacgagcggccgggcgtcgaggcggcgcaggcggcgccggtgcgcgccgtgccgcacgacgtcggcgcggccaagtacgacttgagcctcgagatcgcctatcgtcacgacggcctcgcgtgcacgatcgaatatgcgacggcattgttcgcgcgcagctcgatcgacggcctgctcgcgcagtacgaggcgctgctcgagcagatcgcggcgatgcccgatgcgcccgtcgggtcgctttcgtgcctgcccgacggcgaacgggagcgggtcacgcgaacctggaatgcgaccgcgttcgagcgcaccggctcgccgctgatccacgcgcgcttcgacgctcgcgtgcgggcatgccccgccgcgatcgcgctgcgcacggacgccgcgacgatgacgttcgcggcgctcggcgagcgcgtcgacgcactcgccggccggctgctcgaacgaacgggcggcgagcccgaacgcatcgcgatctgcctcgagcgctcgttcgacatggtgagcgcgatcctcgcgacgctcaaggccggctgcgcttatgtgccgatcgacccgcaactgccggccgaccgcgtggcgttcatgctgagcgacagcgcggcggcgctgctgctgacgatcgagccgattcgccgcgagcggctcgcgtcgttcgacatcgacacgctgtgcctcgacgcgcccgcgccgccgcgcgccgcgccgccgcgcgcggcgcccgccgtcgatccgcacgcggcggcctacgtgctctatacgtccggctcgaccggcaagccgaagggcgtcgccgtcacgcacgcgaacgtgacgaacctgctcgacgtgatggaggcgagctacccggtgggcgcgcacgatcgctatctgctgaagacgaactacgcgttcgacgtgtcggtgccggagctgttcggctggttcgtcggcgacggctcgctcgcgatcctcgcgccgcaggccgagggctcgcccgatctgatcgtcgaggcattgcttcggcacggcgtcacgcacctgaatttcacgccgtcgctgctgcgccagttcgtgacggaggcggcggccgatgcgcgcttcgcgcgcgggcaccggctgcggcacgtgttcgtcgtcggcgaggagttgacgagcgcgctcgcgaacgatgcgtggcatgcattgcgtcccgccacgatctacaacatgtacggcccgaccgagacgaccgtgttcgccaccggttacgcgcacaccgcgccgatcccgaacggcagggtgccgatcgggcgcgcgctcggcaacatgcgcgtctacgtgctcgacgaacggatgcggccgatgccgatcgggatgccgggcgacttgtatatcgccggcgacggcgtcgcgcgcggctacctgaatcgcgacgagctgaccgccgagcggttcctgccggacccgttcacgccgggcgggcgcatctacatgacaggcgacctcgcgcgctggacgcgcgacgggatgctcgaattcctcggccgcaccgatcagcagatcaagattcgcggctatcgcgtcgagctcgacgagatcgcgagcgcgctgaacgcgcacccgctcgtcggcgaggcggccgtgatcctcaagcgcgagccggacggcgacgcgcggctcgtcgcgtacgtcgtgcccgccgagagcgccgcggcggcgccgtcgcgggacgagcgcgcgcgcctgcgcgatgccctcgtcggcgcgctcgagcagcgtctgccggactatatggtgccggccgactacgcgttcgcgcatgcgctgccgaagggcatcaccggcaagctcgatcgcaaggcgctcgaagcgctccccgtcgagcggccggcgcgcgacgccgcgctcggcgcggtggcgccgcgcaacgacacgcagcgcgcgctgtgcgcgatctggcaggccgtgctgcgcgtgccggcgctcggggtgaccgacaacttcttcgccgtcggcggcgattcgatcctgtcgatccaggcggcggcgcgcgcgcgcagggcatcgtgttttcggcgcgcgacatcttccgccatcagacggtcgagcttctcgcggcgcacgtgcgatggcagcaggcgccggacgaagcgcggcgggcgagcgcgggcgacatgccgctgctgccgattcaccactggtttttcgaggtcgattcgacgcacgtcgatcactatcaccagtcgcggctcctcgatgtgccggcgggcgtcgacgcggcgttcgtccgcgcgtggctcgcggcgctcgtcgcgcgccacgacgccttgcggctgcgtttgcgcgatacgccggcggggtggcgcgcgcacttcgccgaagcgccgcatgccgacgcgtcggcgcggctgatggtgtgcgatgtcgcgtgggccggcgcgcccgatgcggcgctcgacgccttcttcgccgacgcgcggcgcggcgtgcgtctcgccgacgggccgctcttcgtcgcggcgctggtcgcggccggcgcgacggggcggggccgcctgctgctgatcgggcatcacgcggtggtcgacggcgtatcgtggcgcgtcatcgtcgcggacctgcggcggacgttcgcgcaatggccggcgctgcgcccggacgcgcccgggccggcgagcgatgcgtatcaggcgtgggcgcgcgcgctcgtcgcggcggccgacagcccggcgctgcacgcggagcgcgcgcactggctgcgcgtgctccgcgcgccggccccggcgctgcggctcgatcgcgccgccggcggcgacgccacgcgccgcgcgacgcgcatcggggcggtgagcctgaacgcggccgatacccgcgcgctgttggccgacacgcaccgcgcgtaccggacgcagaccatcgagctgctgctcgccgggctgctgctcgcgttccgccgctggcagggccatgacgcgctgcgcatcgcgctcgagggccacgggcgcgaggccgacgcgctcgcgcactacggcgccgagcgcgggttacccgacgtgggcgagacggtgggctggttcacgagctattacccgcaatggctgacgctcgcgggcgccgcttccgcgcccgcgccggcggcggactccgtggccgcggcgatcatggcggtcaagacgcagtatcgcgcgacgccgcatcacggcatcggctacggcatcctgcgttacgtcgcgggcgaccccgaactggccgcggaagccgccgcgcacgcaccggagatcgtcttcaactatctcgggcagttcgacgtcgcaaacgacgaggccgccggcatcgcggtgctcgacctgtcctcgcgcgacgacatcgcggcggcgcggccgcgcgagcacgcgctcggcatcgacggcggggtcaaggacggctgcctcgcgttcgagatcgactactcgggcgccgcgttcgacgatgagtcgatcgcggcgttcggcgcgcatttcatgcatgcgctgcgggagatcgccgcgcattgcaaggcgtgcgccgcgtggcgcccgacgcccgaggattttccgctcgccgcggtgacgcaggccgagctcgacgcgtggcacgcgcgccatccgtcgctcgaaacgctgtatccggcgaccgcgatccagcggggcatggtgttccacagcctgctgccgaagcaggcgagcgcctatacgaaccaggtgcacgcgcgcgtcggcggcggcacgttcgacgccgcgcgcctgcgacacgcgtggcagacggtcctcgagcgccacgcggcgctgcgcaccgcgttcgtcggcttcgagcgcgagcagccgttgcagatcgtgctcgcgcacgccgcgtgcccgtggcgcgacatcgatcaccggcacctcgcgcccgaggcgcgcgatgcggcgttcgcggcgctgctcgcggcggacaaggccgcgccgttcgatttcggccgcgcgccgctgatgcgctttcatctggtgcgcgacgacgatgcgcactaccgcttcatctggacctatcaccacgcggtactcgacggatggagcgtgcagctcgtctggtccgatctgctgcgcgtctacgaggcactggcggccggccggcccgcggcgttgccggccgccgtgcagttcgacgcggtgctcgcgtggcggcagcggcacgcgagcgatgcggacaagcgctattggcgtgagcagatcggcgcgcgcacgcaacgcaccgtgctcgacatcgagcaggccgggctcgcggcggcttcgcccgccgcgcccgccgtcgtcgagcgctcgctcgacgaggcggcgagcgagcgcctcgcgacggccgcgcgcgcgtgccgggtcacgctcgcgtcggtgctgcaggcggcctgggcgctgctgctcgcgcgccatagcggcgagacggcgcccgtgttcggcgtgacgagctcggggcgcgcgatcgacgtgcccggcgtcgagacgatcgtcggcccgctgatcgcgacggtgcccgcgcgcgtcgacgtcgacgcggcgctgccgcttggggactggctgcgcgcggtgcacgagcggcacgtcgagcgggaggcgcacgcgcagctcgagctcgtcgacatcctgcgcgagagcggcgtgcgcggcgggcagccgctcttcgacagcctgctcgtcgtcgagaactatccgctcgccgaacccagcgcggcgcgcattctcggtctgcgcgattacggctacgcggaggacacgcactacgggctcaccgtatcggcgacgccggggccgcgtttgcgcgtcgaaatcaattttgatcgttcgcggtaccacatcgaggatatcgaagccatggcagacaacctgaaagcagtgctgacccgcgtgccggacgacctcgcgcgccccgccggcgacgtgctcggcggcgccgacgccgcgcgcgcgcaagcgggcgcggaaggcgagccgcggctcagccgcgtgtcgcggcagggcgagttgcggctcggccgtcatctggtgccgcatctggtcgaggatcacgcggcggccacgcccgagcgccgcgcgctcgtctataacgagcgcgcgtacagctacggcgagttgaaccgggccgcgaaccggatcgcgaatcggctgatgcaggcgtttcccgatctcggcacggacgcgctcgtgggcgtgcgcgtgtcgcgcagcgaccggctggtgctgacggtcctcgcgatctggaagatcggcgcggcctacattccgatcgatcccgtgctgcccgggcagcgcatgcgcgagatgctcgagctggcgggcgcgaaggcgctcgtcgtcgatgcggcggtggcggccgccgagccggccgtcgccggcgtgccgcgcatcgcgttcgacgatctcgtgcaggacgatccgcgcctcgaggacaatcccgacgtgcatctgtcgggcaacgatctgagctacgtgctgttcacgtcgggatcgaccggcaagccgaagggcgcgatgatcgagcacatcggcatgctgaacaacatcgcgaacaaggcgctcgatctcgagatggacgaagacagccgggtcgcgcagaacgcgtcgatgagcttcgacgtgtcggtctggcagatgttcatcgcgctcacgaagggcggcacgacgttcgtctacgacgagcgtgccgtcaacgacatcgccgggctgatccgccgcatggccgccgacggcgtgacgattctcgaggtggtgccgacctatctgatcgccgtcgtcgaatacctggaggaacatcccgagtgcgtgcgccccgcgtcgctcaggttcctgatcgtcaacggcgagaccgtcgacgcgacgctgatccggcgctggttcgcgctgttccccgcgacgaagctcatcaacgcgtacggcccgaccgaggcgtccgacgacatcacgcatcacatcatgtcgcccggcgacgagatcgtgaatccggtgccggtcggccgcgcgctcgccaatttcgatctctacgtcgtcgacgacgaactgcgcccggtgccgatcggcacgcgcggcgagatcgtggccaccggcgtcggcatcgggcgcggctacatcggcatggcgggcgcgaccgcgcaggcgttcgtgaagagcccgttccccgaccgctacaaggggcgcctgtaccgcacgggcgacctcggcgagatgcgcgaggacggcgtgctgatgttccatggccgcaaggatcggcaggtgaagattcgcgggatgcgcatcgagctcgacgaggtggaggcgagcctgcgcgcgatcgcggcggtccgccaggcggtggtgctcgcgattcggcccgagaaccgcgaggcgttcctctgcgcgtgcgtggtgccgctcgacggcgcgcgcgaggagatcgtcgacgcgctgaaggcgaagctgccgccgtacatggtgccgtccgtgttccgcttcgagcgggaactgccgcaattgccgagcggcaaggtggaccgcaaccggctgcgcgagcagtgcctgaacgaaacgccgcgcgcgagcgagcacgcgctcgcgccgcgctcgccgctcgagcggcgcctggcggaggtctttggcgaggtgctcggccacgacgcgttcggcgtgctcgacgatttcttcgcgctcggcggcgactcgttcaaggcgatccgcatcgcggccaagtacggtccgccgctcgaggtgaccgatatctacgatcatccgacgatcgaggcgcttgccgca

SEQ ID NO: 14529 - DNA, 1515 bp, Burkholderia mallei
atgcgctggttgagccgcgcgctcgttgcggtgtcggcgtcgggcgcgctcgccgcgcatgcgtcgacgctcacgcgcgacaacggcgctcccgtcggcgacaaccagaattcgcagaccgcgggcgcgaacgggccggtcctgttgcaggacggccacctgatccagaagctgcagcgtttcgatcgtgagcgcattcccgagcgcgtcgtgcatgcgcggggcacgggcgcgcacggcgtgttcgtcgcgacccgcgacatctcggatctcacgcgggcgaaggtgttcgagcccggcacgcagacgcccgttttcgtgcgcttttccagcgtgatccacggcggcacgtcgcccgaaacgctgcgggacccgcgcggtttcgccacgaagttctacacggcggagggcaactgggatctcgtcggcaataatctgccggttttcttcatccgcgacgcgatgaagttcccggacatggtgcattcgctgaagccggcgccggacacgaacattcaggaccccgaccgattcttcgatttcttctcgcaccagccggaggcgacgcacatgatcacgcgcgtctattcggacgccggcacgccggcgagttaccgcgagatggacggcaacagcgtgcacgcgtacaagttcgtcaacgcccatggcggcgtgacctacgtgaagttccactggaagagcctccaggggcaaaagaacctgactgccgcgcaggccgaagcgatccagggcaaggatttcaaccacatgacgcgcgacctgatcgcggcgatcgatgccggccggtatccgaagtgggatctctatgtccagacgctgaagcccgatcagctcgaccagttcgcgttcgatccgctcgacgcgacgaaagtctggcccggcgtgcccgaggtgaagatcggcacgatgacgctcaacaggaatcccggcaacgtgttccaggaaaccgagcaggcggcgtttgcgccgtcgaatctcgtgccgggcatcgagccgtccgaggaccggctgctgcaagggcgcctgttcgcgtatgcggatacgcagcttcatcgcgtcggcgtgaacggggcgcaactgccggtgaaccggccgcgcgcgcccgtcgccaactacaaccgggacggcgcgatgaacggcggcgcggcgcgcggcacggtcaattacgagcccggcgcgcaagccgcgttggccgccgatccggcgttcgcggcgagccgcgcgccgctggcgggctcgacccagcaggcgcgcatcgcgaagacgcgcaatttcgatcaggcgggcgcgttctaccgttcactgagcgcgagcgagcgtgcgaacctggtcgccaatctggccggcgatctgaagcaggtgcgaaacgacggcgtcaaatacacgatgctgtcgtatttccagaaggccgatgcggaatatgggcgcaaggtgacggcggcgctcggcgcggaccagggccgtgtcgatgcgctgaccgccaagctcgccgat

SEQ ID NO: 14530 - DNA, 2725 bp, Burkholderia mallei
aaccgtcccgatcctgaccaactcctcgacaagatccagcgggaggaggaaaagcagcagcgcggcaggctgaagatcttcttcggcgcgtcggcgggcgtcggcaagacctatgcgatgctgctcgccgcgcgcgcgcaagcaggagggcgtcgacgtcgtcgtcggcatcgtcgagacgcacgggcgcagcgagacggcggcgctgctcgacgggctcgacgtgctgccgctcatgcagatcgagtatcgcggccgcacgatcggcgagttcgatctcgacgcggcgctcgcgcgcaggccccggctcgtcctcgtcgacgagctcgcgcactcgaacgtgccgggcgcgcgccacctgaagcgctggcaggatgtgtacgagctgctcgacgcgggcatcgacgtctacacgagcgtcaacgtccagcatctcgagagcctgaacgacgtggtcggcgcgatcacgggcattcgcgtgtgggagaccgtgcccgaccgcgtgttcgacgcggccgacgaagtcacgctcgtcgatctgcccgctgaggaactgctgagccggttgcgcgaaggcaaggtctacatggcgcagcaggccgagcgggcggtgcgcaacttcttccgcaagggcaacctgatcgcgctgcgcgagctcgcgctgcgccgcacggccgaccgcgtcgacgcgcagatgcgcgagtaccgcgcggaccgctcgatccagcgcatctggcaggcgcgcgagcgcctgctcgtgtgcgtggggccgggcgccgaggcgccgacgctcgtgcgcgcggccgcgcgcctcgccgcgagcctgaaggccgactggctcgcggtgtacgtcgagacgccgcggctcgcgcggctgcctgacgcgctccgacagcgcacgctcaatgcactgaagctcgcggccgagctcggcgccgagacggcgacgctcacgggcgcggacgcggtcgccgcgctgatcggctacgcgcaggtgcgcaacgcgtcgaagatcgtcgcgggcggctcgtcgaagacgggcttcctgcgccgcttctcgcgcccgttcggcgagcagctcgcggagcgcgcgggcgacctcgacctgatgctgatccgcgcgtcggcgagcgaggatgcgcgcgcgccgctcgacgcgcgcgcgcgcgcgtggcgcgacgcgttctcgagcgtcgtcgacggccgttcgccgccgcgccactacggctacgcggccgcgatctgcgcgctgatcacgggcgccgcgaacctgctgcagggccatctcgacctcacgaatctcgtgatgctgtacctgctcggcgtcgtgttctcggcggtgcgcctcgggcgtgggccgggcgtcgtgcagtcgttcctgtcggtcgccgcgttcgactacttcttcgtgccgccgcggatgtcgttttccgtgacggacacgcagtatctgctgaccttcttcgggatgttgctcacgtcgctcgtgatcagccatctgacgtcgagcctcacgcgcggcgcggcgatcgcgcagcgccgcgagcggcgcacgagcgcgatgtacgcgatggcgcgcgagctcgcggcggcgctcacggccgagcagatcgtcgagatcggcagccggcacgtgtccgaggtgttccgcgcgcgcgtcgcgatgctgctgccggacagcggcgacaaggtccggcagaagatcgagaaccccgacgaggcggtgacgatcaccggcgcggcgctcgatatcgacgtcggccaatgggtgtacgaccagcagaagccggccggacacggcaccgacacgctgcccgcggccgccgcgctctatctgccgctgaaggcgccgatgcgcacgcgcggcgtgctcgccgtggtcacgaaggatccgggcgagctcgaggtgcccgagcagcggcggatgctcgacgcgttcgccgcgcagatcgcgctcgcggtcgagcgcgtccactatgtcgagatcgcgcgcgacgcgctcgtcaacatggaatcggagcggctgcgcaactcgctgctgtcggcgatctcgcacgatctgcgcacgccgctcacggcgatcgtcgggctgtcgtcgatgctcgcgaacgcgcgcggcgcgacgcgcgagggctcgcccgcgcgcgaggacgagctcgtcgacgcgattcacgacgaggcgctcaggatgacggggatcgtcacgaacctgctcgacatggcgcggttgcaggcgggcagcctgcaactgaaacgccagtggtcgctgctcgaggagacggtcggcgcggcgctcgccgcgtgcaagcgcgtgctcgcgcgccatccggcgcgcgtgcggctgccggccgacttgccgctcctgcagacggacgcggtgctgatggagcggcttttcgcgaacctgttcgagaacgcggcgaagtacacgccgctcgacacgccgatcgagatcggcgcggagcgcatcgtcgacgacggccggccgttcgtgcgcgtgttcgtcgacgaccacggccccgggctgccggccgggatggaggcgcggatcttcgagaagttcacgcgcggcgagaaggaatcggcgacgcccggcatcggcctcgggctcgcgatctgccgcgcgatcgtcgacgcgcacggcggtaaaatcggtgcgctcaaccggctcgggccggatggccgggtcgagggcgcgcgtttctggttcacgctgcccgtcgac

SEQ ID NO: 14531 - DNA, 834 bp, Burkholderia mallei
atgcaatacgagattgtctcggccggcgaagacgtcgacgacgagcgcgcgcgcgggcgccgcgccgccgcgccggccgccccatcgtccgccgtcccgtcatccgcggccctatcatccgcagccttgtcatccgccgcgcagccgacgggcgcgccgccggctacggccgccgcgcgtcgcggccgcgatctgccgcgcgagcgcctgctcgcgcgcggccccgccgcgctgtccgacgcggaactcgtcgcgctcctgctcggctcgggcctgcccggccacgacgtgttcgcgctcgcgcacacgctgctcgcgcgcttcggctcgttgcgcgcgctgctcgatgcggcgcccgacgatttcaagggcctgcgcggcatcggccccgcgcgcaccgcgatcctcgtcgcggtcgtcgagctcgcgcggcgcgcgctcgccgagaaggcccgcgagcggccgctcgtcgattcgccgggcgcggtcgacgactatctgcggctgctgatcggcacgcggccgcgcgaagtgttcgtctgcctctttctcgacgctcggcaccggctcgtgcagacggaagaaaccgcgcacggctcgctcacgcggatggccgtctatccgcgcgagatcgtgcggcgcgcgctcgcgctgaacgcggcggcgctcatcgtcgcgcacaatcatccgtcgggcgcggtgcgaccgagcgccgcggaccggcgcctcacgcgcgtgctgcgcgacgcgctcgcgctcgtcgacatcaagctgatcgatcatttcgtggtcggcgcgagcgatacgttttcgttcgcgcaagcgggctggatc

SEQ ID NO: 14532 - DNA, 987 bp, Burkholderia mallei
atgaactccgagactcttccggccgagctgcccgcgacgctgacgatcgcgtcgcgcgagagccgcctcgccatgtggcaagccgagcatgtgcgtgatgcgctgcgcaaattatatccagcttgtgacgtgaaaatcctcgggatgacgacgcgcggcgatcaaattctcgatcgcacgctatcgaaggtcggcggcaagggtctgttcgtcaaggagctcgagagcgcgcttgccgacggccgcgcggatctcgccgtgcattcgctgaaggacgtgccgatggcgctgcccgaaggcttcgcgctcgcggcggtgatgagccgcgaggatccgcgcgacgcgttcgtgtcgaacgattacgcgtcgctcgacgcgctgccggcgggcgccgtcgtcggcacgtcgagcctgcgccgcgaggcgatgctgcgcgcgcgccatccgcggctcgacgtgcggccgctgcgcggcaatctcgacacgcggctcgcgaagctcgaccgcggcgattacgcggcgatcatcctcgccgccgcgggcctcaagcgtctcggcctcgccgcgcggatccgcgcgctgctcgacgtcgacgacagcctgcccgccgcggggcagggcgcgctcggcatcgagatcgccgcgcgccgcgccgatgtcgccgcgtggctcgcgccgctgcacgatcatgcgagcgcgctcgcggtcgaggccgaacgcgcggtgtcgcgcgcgctcggcggcagttgcgaggtgccgctcgccgcgcacgcggtgtggcgcggcggcgagctgcatctgacgggcagcgtgtcgacgacggacggcgcgcgcgtgctcgccgcgcatgcgcacgcacgcgcggcgacggccgccgatgcgctcgcgctcggccgcagggtgtccgacgcgctcgagcggcaaggcgcgcgcgcgatcgtcgacgcgctcgtcgcggcgagcgcgcaagcgcaaaagggcggcgcg

SEQ ID NO: 14533 - DNA, 2437 bp, Burkholderia mallei
gccgcgtgccgcgcgcgcgtcgccgagcgcggcgcgggcgcgacgcccggcgactatccgctcgcgcgcgcgggcggcctcacgcaggcggcgctcgaccggctgccgttcgatgcgcgcgcgatcgacgacatctatccgctgtcgccgatgcagcagggcatactgttccattcgctgttcgcgccggagcgcgcgacgtacgtgaaccagctcgtcgcgacgctcgtcgatcccgacgtcgagcggctgcgcgccgcgttcgacgcggccgtgccgcgccacgacatcctgcgcaccggcttcgccgcccacgaggcggcgccgatgcagatcgtccaccgccacgcgcgcatgccggtcgagatcgtcgactggcgcggcgcgcatgcgtcgcccgcggcgctcgacacggcgctcgacgcctggctcgccgccgaccgcgcgcgcggcttcgatctcgcggcgccgccgctgatgcgcgtgacgctgatccgcacggacgacgccgactggcggctcgtctggacccgccaccatctgctgctcgacggctggagcaccgcgcgcctgttcgcggacgtgctgagcgactacatcgagccgccgcgcgcgaatccgttcgccgcgccggcgcgcacgcgctaccgcgatttcatcgcgtggctcgcgcggcgcgatgcgcaggcggaccgcgcgttctggctcggccgcctcgcacggctcgacgagccgacgcacgtcgccgagcgcgcgcgcggcgcgagcgccscagcgcacgaggcggccggccgcgcgaactggcgcgcgacgctgcccgcggcggacaccgcgcgcatcggcgaagcggcgcgccgcatgaaagtgaccgtcaacacgatcgtgcagggcgcgtgggcgctcgcgctgcagcgcatcacgcaccgccgcgcggtcgcgttcggcgcgacggtcgcgggacgcccgcacgcgctgcccgacgtcgacaccgtgctcggcctgttcatcaacacgctgcccgtgatcaccgcgccgttgccgcagctcgccgcgcgcgactggctcgcgagcctgcagcgcgacaacgcggcggcgctcgagcacgcgcacacgccgctctacgagatccagcagtgggcgggcctgggcggcgcgctgttcgacacgctcgtcgtgttcgagaactacccggtcgacgaagcgtggcaggggcgcgatgcgcgcgcgctgcaaaagcgcgacctgcgcaacatcgaggccaccgatttcgcggtgacgctcgtgatcgaggcgggcgacacgctcgcgatcgactacggctacgatcccgcgcgcatcggcccggcgcgcgtcgaggcgctgcaccgcgcgttcgccgcatgcatcgcggggctcgtcgaccatccggacgcgccgctcggcacgatctcgtgcgcgagcgccgacgatctcgcgctgatcgcgcgcgccaacgcgaccgagctcgactggcccgccgcgcagcgcgcgccgctgttcgcgcaattcgaagcggccgcgcgcgcgcggcccgacgcgatcgcgctcgaatgcctcgcctcctccgacggcggcgacggcgcgcgcgcgcagatgcgctacggcgagctcgacgcgaaggcggaccgcgtcgcggcggcgctcgccgcatccggcgtgcggcccgattcggtcgtcgcgctgtgcgtcgagcgctcgttcgacatggtcgtcgcgctcgtcggcacgatgaaggcgcgcgccgcgtacctgcccgtcgatcccgactatccggccgagcggatcgcgtatctgctcggcgacgcgaagccgcccgtggtgatcacgcaggcgcatctgcgcgcgcgcgtcgacgcggcgctcgcgggcgcggatgccgccgtcgtcaccgtcgacgaactgctcgcgcgcgcggccggcgcggaacccgaagccgagcgcgtcgcggcggcggccgacgtcgcgcccgggcagctcgcgtacctgatctacacgtccggctcgaccggccagccgaagggcgcgggcaacacgcacggcgcgctcgcgaaccggatcgcctggatgcagcgcgcgtaccggctcgcgcccgacgacgtcgtgctgcacaagacgccgttcggcttcgacgtgtcggtgtgggagttcgtctggccgctcgccgtcggcgcgaagctcgcgatcgcggcgccgggcgatcaccgcgatccggcgcgcctcgtcgccgcgatcgacgcacatcgcgtgacgacgctgcacttcgtgccgtcgatgcttgccgcgttcgtcgcgtatctcgacgatttcggcgcggccgcgcgctgcgcgagcgtgcgcacgatcgtcgcgagcggcgaggcgctcgcgcccgagctcgtcgcgcgcgtcgccgcgctgctgccgcacgcgcagttgcaca

SEQ ID NO: 14534 - DNA, 813 bp, Burkholderia mallei
atgacctaccttcaggaatccagccgaccggccgtgacggtacccaaactgcaggcgatgcgggaagccggcgagaagatcgcgatgctcaccagctacgacgcaagcttcgccgccctcctcgatcgcgcgaacgtcgacgtgcaactgatcggcgattcgctcggcaacgtgctgcagggccaggcgacgacgctgcccgtcacgctcgacgacatcgcgtatcacaccgcatgcgtcgcgcgcgcgcagccgcgcgggctcgtcgtcgcggacctgccgttcggcacctacggcacgcccgccgacgcattcgcgagcgcggtgaagctgatgcgcgcgggcgcgcagatggtcaagctcgaaggcggcgaatggctcgccgaaacggtgcgcttcctcgtcgagcgggccgtgcccgtgtgcgcgcacgtcggcctcacgccgcagtcggtgcacgcgttcggcggcttcaaggtgcaaggcaagacggaagcgggcgccgcgcaattgctgcgcgatgcgcgcgcggtcgaggaagccggcgcgcagctcatcgtgctcgaggcggtgcccacgctcgtcgcggccgaagtcacgcgcgagctgtcgatcccgacgatcggcatcggcgcgggcgccgaatgctcgggccaggtactcgtgctgcacgacatgctcggcgtgttccccggcaagcggccgcgcttcgtcaaggatttcatgcaggggcagccgagcatcttcgcggcggtcgaggcctacgtgcgcgcggtgaaggacggcagcttccccgggcccgagcattcgttc

SEQ ID NO: 14535 - DNA, 1686 bp, Burkholderia mallei
atgaaccacccgaaacatatcgatccgcgcctcgatccgacccgcgtgatccgcgcgccgcgcggcggcgagaagacctgcaagaactggctcgccgaggcggcgtaccggatgatccagaacaatctggaccccgaagtggccgagcatccgcacgcgctcgtcgtctacggcggcatcggccgcgcggcgcgcaactgggattgcttcgatcagatcctcgcgtcgctgaaggatctgaacgacgacgagacgctgctcgtgcagtcgggcaagccggtgggcgtgttccgcacgcacgagaacgcgccgcgcgtgctgatcgcgaactcgaacctcgtgccgcactgggcgacgtgggaccacttcaacgagctcgaccgcaagggcctgatgatgtacggccagatgacggcgggcagctggatctacatcggcagccaggggatcgtgcagggcacgtacgagaccttcttcgcggtcgcgaaccagcacttcaacggcgatccgtcgggccgctggatcctgacaggcggcctgggcgggatgggcggcgcgcagccgcttgccgcgacgatggcgggcttctcgatgatcgcggtcgagtgcgacgaatcgcggatcgatttccgcctgaagacgcgctatgtcgacaggaaggcgacgactctcgacgaagcgctcggcatgatcgaagaggcgaagcgcacgggcaagcccgtatcggtgggcctgctcggcaacgcggccgacgtgttcaccgagctcgtcgagcgcggcatcacgccggactgcgtgaccgaccagacgagcgcgcacgatccgatcaacggctacctgccgcagggctggagcgtcgcgcggtggcgcgacgcgcagaaggtcgatccgcgaagcatcgtgcaggtcgccaagcaatcgatggccgtgcaggtgcgcgcgatgctcacgctgcaggcgcgcggcgcggcgacgctcgactacggcaacaacatccgccagatggcgctggagatgggcgtcgagaatgcgttcgactttccgggcttcgtgcccgcctatatccggccgctcttctgcgagggcaagggcccgttccgttgggtcgcgctgtcgggcgatccggaggacatctacaagaccgaccggaaggtgaaggagctgatccccgacgatgcgcacctgcacaactggctcgacatggcgcgcgagcgcatcgcgttccaggggttgcccgcgcggatctgctgggtcggcgtgaacgatcgctatcgtctcggccaggcgttcaacgagatggtgaagacgggcgagctgaaggcgccgatcgtgatcgggcgcgaccacctcgacaccggctcggtcgcgagcccgaatcgcgagaccgaagcgatgaaggacggctcggacgcggtcagcgattggccgctgctcaacgcgctgctgaacacggcgggcggcgcgtcgtgggtgtcgctgcatcacggcggcggcgtcggtatgggcttctcgcagcatgcgggcgtcgtgatcgtcgccgacggcaccgatgccgcgcacgcgcgcctcggccgcgtgctgttcaacgatccggccacgggcgtgatgcgtcacgcggacgccggctatgagctcgcgcagcgcaccgcgaacgaagcgggcctgaagctgccgatgctcgggcgc

SEQ ID NO: 14536 - DNA, 537 bp, Burkholderia mallei
atggccgaacttgcaaccatcgcccgcccttacgcagaagcgctgttccgcgtggccgaggggggtgacatctccgcctggtccacgctcgtgcaagagctggctcaggttgcgcaactgcccgaagtgctgtccgtcgcgtcgagcccgaaagtgagccgcacgcaggtggccgagctgctgctcgccgcgctgaagtcgccgctcgcgagcggtgcgcaggcgaagaacttcgtgcagatgctggtcgacaatcatcgtatcgcgctgttgccggaaatcgccgtgcagttcgaagcgctgaagaacgcgcgcgaaggcgcggcagacgtgcagatcgtcagcgcgttcccgctcgaaggcgcgcagctcgcggagcttgtcacgagcctcgagcgtaagttcaagcgcaagctgaagccggccgtcgaagtcgattcgtcgctgatcggcggcgtgcgcgtgacggtgggcgacgaagtgctcgatacctcggtccgcgcgcggctcgccggcatgcaggcggcgctgaccgct

SEQ ID NO: 14537 - DNA, 363 bp, Burkholderia mallei
atggataagactcaatctcgcctgcgccgcgctcgtcagacgcgtatcaagatcgctgagttgcaggtcgcgcgtctggccgtgcatcgcacgaacacgcacatctacgctcaagtgttctcgccgtgcggcaccaaggtgctcgccagcgcgtcgacgctcgaagccgaagttcgtgcgcagctcgccgacaagtcgggcaagggcggcaacgtcgccgccgcgacgctgatcggcaagcgtatcgccgagaaggccaaggccgccggcatcgaatccgtcgccttcgaccgctcgggcttccgctaccacggccgcgtgaaggcgctggccgaggcagctcgcgaagctgggctcaagttc

SEQ ID NO: 14538 - DNA, 468 bp, Burkholderia mallei
gtgcgtctggtcggggtcgatggtgagcccatcggcatcgtgaaactcgccgaggctttccgtaaatcggaagagctggatgttgacctggtggagattgcgccgcaggcggctccgccggtttgccgtctgatggattacggcaagttcaagtaccaggaagccaagaagcagcacgaggcgaagctcaagcaaaaggtcatccaggtcaaggaagtgaaattccgcccgggaaccgatgacggcgattacaacgtcaagcttcgcaatctggtgcgcttcctcgaggaaggcgacaagacgaagatcacgttgcgtttccgcggccgtgaaatggctcaccaggaaatcggcatgcgcatgctcgagcgcctgcgcggcgatctcgacgaggtcggccaggtcgagcagatgccgaagatggaagggcgccagatgatcatggtgctctcgccgaagaaaaagaag

SEQ ID NO: 14539 - DNA, 525 bp, Burkholderia mallei
atgacggttgcttatctcgggttgggggccaatctcggcgacgcgcgccaggccttgaaggacgcagtggtctgcctcgcccagcagcacgccatcacggtgctcggcaagtcgagcctgtatcgcaccgcgcccgtcgacgcgagtggcggcgattactacaactgcgtcgtgaagatcgacacggtgctcgccgcgcgcgcgctcctcgcgctgtgccagaagatcgagcaccacttcggccgcgagcggccgtaccgaaacgcgccgcgcacgctcgacatcgacatcctgctctacggtgaactgacgatagacgaacccgacctcgtcgttccgcatccgcgcctgaccgagcgcgcgttcgcgctcgtgccgctcgtcgagatcgagccggcgctcgcgattcccgcacgcggccgcgccgacggattcctcgccgacgtcgcgcaccagcgcatcgagaaggtccagacctgccagtgcctcgcgatgcgggccgccgccgaaaagaaccgttgccga

SEQ ID NO: 14540 - DNA, 609 bp, Burkholderia mallei
atgcagatcctgctcgctaccgtcgccgcctatctgatcggatcggtgtcattcgccgtcgtcgtcagcgccgcgatggggctcgccgacccccgctcgtacggctcgaagaatcccggcgcgaccaacgtgctgcgcagcggcaacaagaaggcggcgatcctcacgctcgtcggcgatgcgttcaagggctggctcgcggtctggctcgtcaagcgcttcggcatcggcggcgagatcggcgtcgcgctcgcggcgatcgcggtgttcctcggtcacctgcatccggtgtttttccgcttccagggcggcaagggcgtcgcgaccgcggcgggcgtgctgctcgccgtgcatccggtgctcggcctcgcgaccgcgctcacgtggctcatcgtcgcgttcttctttcgctactcgtcgctcgcggcgctggtcgcggccgtgttcgcgccgattttcgacgtgttcctgttcggtacgcacgacaatccggtcgcctgggcggtgctcgcgatgagcgtgctgctgatctggcggcatcgctcgaacatctcgaagctgctcgccggcgaggaaagccggatcgggcagaagaaaaaaacgggcgtg

SEQ ID NO: 14541 - DNA, 711 bp, Burkholderia mallei
atgcccaatgcctataaacgcgtcctcctcaaactttccggcgaagctctgatgggcgacgatgccttcggcatcaatcgcgcgacgatcgagcggatggttgccgacatcgcggaagtcgtgcgtctcggcacgcagcttgcggtcgtgatcggcgggggcaacatctttcgcggcgtcgcgggcggcgcggccggcatggaccgcgcgacggccgactacatggggatgctcgcgacgatgatgaacgcgctcgcgctgcaggacgcgatgcgccacgcgggcatcgaggcgcgcgtgcagtcggcgctgcgcatggaccaggtggtcgagccgtacatccgcccgcgcgcgatccgccagctcgaggagggcaaggtggtgatcttcgcggcgggcacgggcaacccgttcttcacgacggacacggcggccgcgctgcgcggctcggaagtcggcgccgaggtggtgctgaaggcgacgaaggtcgacggcgtctactcggccgatccgaagaaggacccgtcggcgacgcgctattcgtcgatcagcttcgacgaggcgatcggccgcaacctgcaggtgatggacgcgacggcgttcgcgctctgccgcgaccagaagctgccgatccgcgtgttttcgatcaacaagccgggtgcgctcaaacgtatcgttcaaggagaggacgagggcacgctcgtccacgtg

SEQ ID NO: 14542 - DNA, 1605 bp, Burkholderia mallei
atgccgatcatcgaatccaagctgaacccgcgttccgacgaattccgcgcgaacgccgcggcgctcgaggcgctcgttgccgacttgcgcgagaaaatcgaccggctcgcgctcggcggcggtcaggccgcgcgcgacaagcatctgtcgcgcggcaagctgctgccgcgcgatcggatcgcgcaactgctcgatccgggcacgccgttcctcgagctgtcgcagctcgccgcgtacgggatgtacaacgacgatgcgccgggcgcgggcctcatcaccggcatcggccggatcgccggccgcgagtgcgtgatcgtctgcaacgacgcgacggtcaagggcggcacctactatccggtcacggtgaagaagcacgtgcgcgcgcaggagatcgcggccgagaaccggctgccgtgcgtgtacctcgtcgattcgggcggcgcgaacctgccgaatcaggacgatgtgttccccgatcgagaccacttcggccggatcttcttcaaccaggcgaacctgtcggccgcgggcatcgcgcagatcgcggtcgtgatgggctcgtgcaccgcgggcggcgcgtacgtgcccgcgatgagcgacgagtcgatcatcgttcgtaaccaggggacgatctttctcggcggcccgccgctcgtgaaggccgccaccggcgaggaagtgagcgccgaggatctcggcggcggcgacgtgcacacgcgcttgtccggcgttgccgatcatctcgcgcaaaacgatgcgcacgcgctcgcgctcgcgcgcgcgatcgtcggcaacctgggcgcgcgcggcggcgcggcgcccgcgatgcgcgagccgctgccgccgcgctacgacgcgcggagcgtgtacggggtgattcccgccgacacgcgcaagccgttcgacgtgcgcgaggtgatcgcgcgcatcgtcgacgattcggcgttcgacgaattcaaggcgcgctacggcacgacgctcgtcacgggcttcgcgcacatctgggggcagccggtcggcatcgtcgcgaacaacggcattctgttctccgaatcggcgacgaagggcgcgcacttcatcgagctgtgctgccagcgcaagatcgcgctcgtgttcctgcagaacatcacgggcttcatggtcgggcgcaagtacgagaacgagggcatcgcgcgccacggcgcgaagatggtgacggccgtgtcgaccgcgaaggtgccgaagttcacggtgatcatcggcggctcgttcggcgcgggcaactacgggatgtgcggccgcgcgttcggcccgcgctttctgtggatgtggccgaacgcgcggatctcggtgatgggcggcgagcaggcggcgtcggtgctcgcgaccgtgcgccgcgacgagatcgaggcgaagggcggcgaatggtcggcgcaggatgaagaggcgttcaagcagccgatccgcgaccagtacgagcgccagggccatccgtattacgcgagcgcgcgcctctgggacgacggcgtgatcgaccccgctcagacgcgcgacgtgctgggcctcgcgcttgccgccgcgcgaaacgcgccgatcgaggacacgcggttcggcgtgttccggatg

SEQ ID NO: 14543 - DNA, 1380 bp, Burkholderia mallei
atgcatcgtttcatcatcgtcggcggcggtgcgggcggactcgaactggcgacccgcctcggggatcgctatggcgcgcgcggcgatcgtcccgcgcgcgcgctcgtgacgctcgtcgaccgttacccgacccatatctggaagcccctgctgcacgaagtggcggcgggcagcatggatccgttcacgcaggagctcgaatacgcggcgcaggcgcgctggcacggcttcgaatttcaccagggcgaactgatcgcgctcgatcgcgcgtcgcggcgcgtgacgctcgcgcccgttgccgataacgacggcgccgagttgctgccgctgcgcgagctcgaatacgacacgctcgtcatcgcgatcggcagcacgacgcattatttcggcgtgcagggcgcgcagcagcactcgatcgcactcgacacggtcgccgaggcggagcggttccgcaagcgcctgatcgccgcgtgcatgcgcgccgagcatcagcccgcggagccggccgtgcggaccgccgagggcgggcccgagcaggccgtggagccgacggacgcggcgcaggtgtcggcctcgccgcgcattcaggttgcgatcgtcggcggcggcgcgacgggcgtggaactgtccgccgagttgcgcaataccgcgcaggtgctgtccgcgtacgggttgcacaagctcgatccgcggcacgacgtcggcatcgtgctgatcgaatcggggccgcgcattctgccggcgctgcaggagcgcgtgtcgacggcgaccgccgagctgctcgagaagctcggcgtgcgcctgctgctcggcgagcgcgtgacggaggtcgcgccgggcgtcgtgcgcaccgcgagtggcaagagcgtgcgggcggatctgaccgtgtgggcggcgggcatcaaggcgccttcggtgctcgcgaagctcgacggcctcgaagtgaacaagctcggccaactggccgtgcgccgcacgctgcagaccgaaaccgatccggatgtattcgcgttcggcgattgcgccggctgcgagtggccgggccacgagcgtaacgtgccgccgcgcgcgcaagccgcgcatcagcaggcgagcttcatgctgcgcgcgctcgcaaaccggctcgaaggccggccgctgcccgaattcacctatcgcgatttcggctcgctggtgtcgctcgggcacttcagtgcggtcggcaatctgatgggcgggctgatcggcggcaacatgctgatcgaagggctgttcgcgcgcttcatgtatatgtcgctgtatcggctgcacatcgcggcgctgcacggctatccgcggatggtgctcgatacggtcgcgcactggttgaggcgctcgacgctgccgcgtgtgaagctgcat

SEQ ID NO: 14544 - DNA, 618 bp, Burkholderia mallei
atgacgacgacgaagcgtaatcaccccgacgaactcgtgatcggcctcgtgtcgatcagcgatcgcgcaagcggcggcgtctacgaggacaagggcattccggcgctcgccgaatggctcgccgcggcgctcgtgtcgccgtggcgcgccgagacgcggctcgtccaggacgacgcgccgacgatctcggcgacgctcgtcgagctcgtcgacacgctcggctgcgatctcgtgctgacgacgggcggcacgggccccgcgcgccgcgacgtgacgccggaggcgacgctcgcggtggcgaccaaggaaatgccgggcttcggcgagcagatgcggcagatcagcctgaacttcgtgccgaccgcgatcctgtcgcggcaggtcgcggtgattcgcgaaaccgcggatcacgcggcgctgatcgtgaatctgcccggccagccgaaatcgatcaaggaaacgctcgaagggctgcgcggcgccgacggcaaggtcgaggtgccgggcatttttgctgcggtgccatattgcatcgacctgatcggcggcccgtacgcgcagacgaacccggccgtgtgcgcggcgttccggccgaagagcgcagtgcgcgcgcccaaa

SEQ ID NO: 14545 - DNA, 981 bp, Burkholderia mallei
atgacttcccgtatcgccccgactccgttcgccgcccggttcgacttgcgcctgccgctcgtgcaggcgccgatggtcggcgcgacgacgcccgcgctcgtcgcggccgcctctaacgccggtgcgctcggcagcctcggcggcgcgtcgttcgcgccggagaagcttgccgccgaaatcgccgcggtgcgtgccgcgacgcgccgcgcgttcgccgtgaacctgttcgtgctgcccgacgcgcagccggacgacgcggccgtgcgtcgcgcgctcgacgcgatcgatccgctgcgcgcgcggttcgggttgccgcccggcgcgccgctgccgcgctacgcgccggatttccgcgcgcaactcgatgcgctcgtcgacgcgcgcgtgccggtcgcgagcttcacgttcggcgtgctcgacaagaaagatgtcgtccggctgcaggcggcgggcacgtatgtgatcggcacggcaacgcatgttgccgagggcctcgcgtggcaggcggcgggcgccgacgcgatctgcgcgcaaggcgcggaagcgggcggccatcgcggcacgttcatcggctcggccgaagacgcgctcgtcggcacgatcgcgctcgtgccgcagctcgtcgacgcgacgaatctgccggtactcgcggcgggcggcatcatggacgggcgtggaatcgccgccgcgctcgcgctcggcgcgcaagccgcgcagctcggcaccgcgtttctcacgtgcgcggaaagcgcgattcccgcgtgctggaaagcgcgtctgctcgcgagcgacgatacgtcgacgtccgtcacgcgcgcgatcacgggccgccacgcgcgcggcatccgcaatgcgctgatggcgcagctggccggacggcccgattcggtcgcgccgtatccggtgcaaaacgcgctgacgcaggagctgcggcaaaccgccgcgcgagcgggcgacgccgagtatttgtcgttgtggtcc

SEQ ID NO: 14546 - DNA, 324 bp, Burkholderia mallei
atgatgaaaggccaactcgccgggctgatgaagcaggcccagcagatgcaggaaaacatgaagaagatgcaggagcaactggccctcatcgaagtggagggccagtcgggcgcggggctcgtcaaggtgacgatgacctgccgcaacgaggtgcgccgcgtggcgatcgatccgagcctgctcgccgacgacaaggacatgctcgaagacctcgtcgccgccgcgttcaacgacgcggtgcgcaaggccgaggcgacgtcgcaggagaagatgagcgggatgacctcgggcctgccgctgccgcccggcttcaagctgccgttc

SEQ ID NO: 14547 - DNA, 1035 bp, Burkholderia mallei
atgatggaaaattttagcgcaaccgggcggcgcccgcgagcgccgcttgcgcgcctcgccgcccccgcgcccgttttgccggccggccgccggcgggcggttcttttcgtcatcgagctatggtgtaatgccggcatgaaaatcggccaccaattccataccgtcgcgctcgtcgggcgcagcaacacgcccggcatcgccgagccgctcgcgtcgctcgccgcgtgcatcgcgaagcgcggcttcgaagtcgtgttcgaggcggataccgcgcaggcgatcggcagcgccggctacccggcgctcacgcccgccgagatcggcgcgcgcgccggcgtcgcggtcgtgctgggcggcgacggcacgatgctcggcatgggccgccagctcgcgccgtacaagacgccgctcatcggcatcaaccacggccggctcggcttcatcaccgatatcccggcgtccgacatgcgcgaagtcgtgccgatgatgctcgcgggcagctacgagcgcgaggagcgcacgctgctcgaggcgcggatcgtgcgcaacggcgagccgatctatcacgcgctcgcattcaacgacgtcgtcgtgaaccgcagcggcttctccgggatggctgagctgcgcgtgtcggtcgacggccgcttcatgtacaaccagcgctcggacggcctgatcgtcgcgacgccgacgggctcgaccgcgtacgcgctatcctcgcaggggccgatcctgcatccgcaactgcaaggcatcgtgctcgtgccgatcgcgccgcacgcgctgtcgaaccggccgatcgtgctgccggacgattcgaagatcgcgatccaaatcatcggcgggcgcgacgtgaacgtgaacttcgacatgcagtcgttcaccgcgctcgagctgaacgacacgatcgaggtgcgccgctcgaagcacacggtgccgttcctgcacccggtcggctacagctattacgcgacgctgcgcaagaagctgcactggaacgaacatccgtcgagcgaagaagacgacgacgca

SEQ ID NO: 14548 - DNA, 3525 bp, Burkholderia mallei
atgcgccgcgccgagctcgtccgccatccggcgttcgccaaccagccgctcgttatgtcagacaacgcctccccttcgcagtcccccgtcgcgctcgtcaaggcgggccagcgcttcgccttcgacggcgcgcacggctccgccgacgcgctcgtcatcgcccgctatctcgccgcgcaccgcgcgcaggtgccgcttctcgccgtgatctgcgcgaacgcggtcgacgcgcaacggctcgcgcaggagctcgcctacttcgcgcccgacgcgcgcgtgcgcgtgctgcccgactgggagacgctgccgtacgacacgttctcgccgcaccaggatctcgtgtccgagcggctcgcgacgctgcacgacctcggcgaaggccgctgcgacatcctgctcgtgcccgcgacgacggcgctctaccggatgccgcccgcgtcgttcctcgccgcgtacacgttctcgttcacgcagggcgagcggctcgacgaagcgaagctgaaggcgcagctgacgctcgccggctacgagcacgtgagccaggtcgtgcggcccggcgaatactgcgtgcgcggctcgctgatcgacctgttcccgatgggctcgccgctgccgtaccggatcgatctgttcgacgatcaggtcgactcgatccgcgcgttcgatccggacacgcagcgcagcctctacccggtgcgcgacgtgcgcctgctgcccggccgcgaattcccgttcgacgaggccgcgcgcaccgcgttccgaagccgctggcgcgagacgttcgagggcgacccgagccgcgcgccgatctacaaggacatcggcaacggcgtgccgtcggccggcatcgagtattacctgccgctcttcttcgacgagacggcgacgctcttccactatctgcccgagcgcgcgcagctcgtgttcacgggcgatctcgacgcggcgatcaagcgcttcaccgccgacacgaagcagcgccacgcgttcctgtcgcacgatcgcgagcggccgatcctcgagccgcagcgcctgttcctctccgacgacgatttctacctgctcgccaagccgttcgcgcggatcgtgctgcccgcgcagccgtcgggcggctgggccgcgccgctgccgaatctcgcgctcgagcgccacgcggacgcgccgctcgccgcgttcgccgcgtatctcgaaacgacgaagaaccgcgtgcttttcaccgtcgaatcggcgggccgccgcgagacgatcgcgcaactgttcgccgagcaccatctgcggccggcgggcagcgacagcttcgccgcgtggctcgcgagcgacgagcgcttcgcgctcggcgtcgcgcccctcgcgaacggcttcgcggtgccgggcgagggttacgcgatcgtcaccgagaccgagctgtacggcgcgctcggccgccgcgcgggacgccgccgccaggaacaggcgagcaacgtcgacgcgatggtgcgcgatctgtccgagctgaaggtgggcgacccggtcgtccatgcgcagcacgggatcggccgctacatggggctcgtgtcgatggatctcggcgaaggcgacaccgagttcctgcatctcgaatacgcgggcgacagcaagctgtacgtgcccgtcgcgcaactgcacgtgatctcgcgctacagcggcgcggacccggacagcgcgccgctgcacgcgctcggctccggccagtgggagcgcgcgaagcgccgcgccgcgcagcagatccgcgatacggccgccgagctgctgaacctgtacgcgcgccgcgcggcgcgcgagggccacgcgttcgggctcgacccgcgcgactacgtgaagttcgccgacagcttcggcttcgaggaaacgccggaccaggccgcggcgatcgcggccgtgatcggcgacatgacaagcggcaagccgatggaccgcctcgtgtgcggcgacgtcggcttcggcaagaccgaggtcgcgctgcgcgcggcattcatcgcggtgatgggcggcaagcaggtcgcgctgctctcgccgaccacgctgctcgccgagcagcacacgcagaccttcgccgaccgcttcgcggactggccggtgcgcatcgccgagctgtcgcgcttcaagaccgcgaaggaagtgaatgcggcgatcgcgcagatcaacgaaggcagcgtcgacatcgtgatcggcacgcacaagctgctgtcgtcggacgtgcagttcaagcgcctcggcctcgtgatcatcgacgaggagcaccgcttcggcgtgcgccagaaggaagcgctgaaggcgctgcgcgcggaagtggacgtgctcacgctgaccgcgacgccgatcccgcgcacgctcggcatggcgctcgaagggctgcgcgatttctcggtgatcgcgaccgcgccgcagaagcggctcgcgatcaagaccttcgtgcgccgcgaggaagaaagcgtgatccgcgaggcgatgctgcgcgagctcaagcgcggcggccaggtgtacttcctgcacaacgaggtcgagacgatcgagaaccgcaaggcgatgctcgaggaactggtgcccgaggcgcgcatcgtgatcgcgcacggccagatgcacgagcgcgagctcgaacgcgtgatgcgcgatttcgtcgcgcaacgcgcgaacgtgctgctgtgcacgacgatcatcgagaccggcatcgacgtgccgagcgcgaacacgatcatcatgcaccgcgcagacaagttcggcctcgcgcagttgcaccagttgcgcgggcgcgtcggacgctcgcaccatcaggcatacgcgtacctgctcgtgcacgatccgcaagcgctgacgaagcaggcgcagcgccggcttgaggcgatccagcagatggaggagctcggctcgggcttctatctcgcgatgcacgacctcgagatccgcggcaccggcgaagtgctcggcgacaagcagtcgggcgagatccacgagatcggcttccagctctacaccgagatgctgaacgatgcggtgaaggcgctgaagaacggcaaggagccggacctgaccgcgccgctcgccgcgacgaccgagatcaacctgcacgcgcccgcgatcctgcccgccgactattgcggcgacgtgcaggagcggctgtcgctgtacaagcggctcgcgaactgcgagcacggcgatgcgatcgacggcatccaggaggagctgatcgaccgcttcggcaaactgccgccgcaggcgcacgcgctcgtcgaaacgcaccggctgcggctcgccgcgaagccgcttggcatcgtgaagatcgacgcgagcgaagcggcgatcgggctgcagttcgtgccgaatccgccgatcgatccgatgcggatcatcgacatggtgcagaagcaccggcacatcaagctcgcgggccaggacaagctgcgcatcgagacgcgcacgccggacctcgcggtgcgcgtgtcgacggtgaaggaaacgctgcgcgcgctcggccagccgcagcagccgcgcgcgcaggcggcggcgcgg

SEQ ID NO: 14549 - DNA, 1290 bp, Burkholderia mallei
atgagctggtccgatcgcctcgtttcccgtttcaacggcgtccgcgacgcgggcggcgccgccgcgccgcgcaccgccgcgcgggcggcctcgggcgcgcgcgcgacggccggcggcctcgcgagcgtcgtgaacggcgcgcgcccgacccgctcgcgcatgctcgacttcgattactcgctgctgtgggtatcgatcgcgctgctcgggctcggcgtcgtgatggtgtactcggcgtcgatcgcgatgccggattcgccgaaatacgcgtcatatcacgactacgcattcctgctgcgccactgcgtgtcgctcgtcgtcgcgttcgtcgcggcggtgattgcgttccgcgtgccggtgtcgacgtgggacaagtacgcgccgcatcttttcctgatcgcgctcgtcgggctcgtgatcgtgctgattccgcacgtcggcaagggcgtgaacggcgcgcgccgctggattccgctcggcatcacgaacatgcagccgtcggaaatcatgaagctcgcggtgacgatctacgcggcgaactacacggtgcgcaagcaggagtacatgcagagcttcgcgaaaggctttctgccgatggcatgcgcggttggcctggtcggcgcgctgctgctgctcgaaccggacatgggcgcgttcatggtgatcgccgcgatcgcgatgggcgtgctgttcctcggcggcgtgaacggcaagctgttcggcggcctcgtcgcgacggcggtcggcacgttcacgatgctcgtgtggctgtcgccgtggcggcgcgagcggattttcgcgtatctcgatccctgggacgagcgctacgcgcaaggcaaggcgtaccagctcacgcattcgctgatcgcgttcgggcgcggcgaatggttcggcgtcggcctgggcggcagcgtcgaaaagctcaactatctgcccgaagcgcataccgacttcattctcgcggtgatcggcgaggagctcggctttgtcggcgtgctcgtcgtgatcctgctgttctattggatcgtgcgccgcgcgttcgagatcggccgccaggcgctcgcgctcgaccgcacgttcgcggggctgatggcaaagggcgtgggcatctggttcggcgcgcaggcgttcatcaacatgggcgtgaacctcggcctgctgcccaccaagggcctcacgctgccgctcgtgagctacggcggctcgggcattctgctgaattgcgtcgcgctcgcggtgctgctgcgcgtcgattatgagaatcgcgtgctgatgcggggaggaaaggta

SEQ ID NO: 14550 - DNA, 1473 bp, Burkholderia mallei
atgaaacgttacgaaacgctcgcccgcgcgatggccgacgacatccggtccggcaacatcacgaccggcacgcgcatgccgtcgctgcgccagatgatcgcccagcatcgcgtcagccaatcgaccgtgtttcgtgcttactatctgctcgagcagtggggcttgattcgcgcgcgcgaacgctcgggctactacgtcgcgcacggcgcgcaggcgagcgtccgcgcgaacggcatgaacggcatgaatggtgcgcacgcgacgcaagacggccgtctcacgcgcgatgccgcgcccgccgaatcgcgcaaggtcgatatcagcgatctcgtgttctccgtgctcgaggccgcgacgcatccgcgcatcgtgccgctcggctccgcgttcgcctcgccgcatctgtttccgctgccgcgcctcgcgaagtcgctcgcgcaggccgcgcggctcgtgagcccgtggagcgccgtcgtcgatctgccgcccggcagcgagcagttgcgccgccagatcgcgttgcgctacctcggcatcggcgtgtcgcagccgatcgacgagatcgtcgtgaccaacggcgcgctcgaggcgctcaacctgtgcctgacggccgtcacgcgccccggcgacgtggtcgccgtcgaagcgcccggcttctatgcggcgctgcaggcaatcgagcggctcgatctgcgcgcggtcgagattcccgtcgatccgcgcacgggcctcgacctcgacgcgctcgccgccgcgctcgaacgccacgacgtgcgcgcgtgctggttcatgacgaacttccagaatccgacgggcgtcacgctgtcggccgacaagaagaaggcgctcgtcgacatgctcgccgcgcgcgaggtgccgctcatcgaggacgacgtctacggcgagctccatcacgggccggactacccgctgcccgcgcgcgcgttcgacaagcacgggctcgtcatgcactgcagctcgttctcgaagacgctcgcgcccggctaccggatcggctgggcggcggccgggcgcttcgccgagaaggtgcagcggctcaagctgatgacgacgctgtccgcgagcattcccgcgcaggtcggcatcgccgactatctcgagcacggcggctacgatcggcacctgcgcaagctgcgcggcgcgctgcgcgggcagatggagcggatgaacgacgcgttgatgcgccatctgccgcccgacgtgcactggacgctgccggacggcggctacttcgtgtggctggaatttcccgacgcgatcgacgcgatggggctgcatcgcgaagcgatccggcgcggcgtgagcgtcgcgcccgggccgctcttctccgccgcgcatgcgttcgagcgctgcgtgcggatcaacttcggccacccgtggagcgccgccgtcgacgacgcgatccgcaccgtcggcgagctggtcgcgcagccgtcggtgcgcaagcggcgc

SEQ ID NO: 14551 - DNA, 897 bp, Burkholderia mallei
atgcctatcgagaaacaggtcgtagcgctgccgagtggcttgaaggtccacgtcgagcgtcatgtgttcgatccggccttcgagacggtcatcctcgtgaacggcgcgctggcgacgaccgcgtcgttcggccagacgattcgctatctgggcgaacgcgtgaacgcggtgtgcttcgacttgccgtatgcgggccagtcgcgccagcacaatccgggcgagtacattctgacgaaggacgacgaggtggagattctgctgcacctggccgagcggttcgagccgagcttgctgctgtcggtgtcgtggggcggggtggcgtcgctgttcgcgctggcgcgggggtgcgcgagcgtgcggcgggcggtgatcgcgtcgttctcgccgttcctgaacgacgcgatgacggactacgtgacgcgcgcgcgcgaccacatcgcggcgggcgagaacctgaaggccgcgcagttgctgaacgacacggtggggcgctacctgccgcggatcatgaagctgtacaactaccggtatctgacgaagctgccgcgcaacgagcaggatcaggtggcgttccacgtcgaccagatcctggcgatgcagccggagcagtatctgccggagttccgccagatcggctgcgcggtgaagttcatcaacggcgagctggacgagtacacggcggcgtcggacgtgcggcggctggcggcctacgtgcggcgtgcggagttcgcgacgatccggcaggcggggcacttcctggacctcgaagggcgccagcagcaggagcaggtgcgcgcggcggtcctgggtttcttcgccgacgagcgcgcgagcgcggcacgcgacgccgcacaggacgagacgctcgcgccgctggggcaactgccggcgctgtcg

SEQ ID NO: 14552 - DNA, 789 bp, Burkholderia mallei
atgtcctaccagacgattcgcatcgaaatcgatcaggcggcacagatcgcgacgatcacgctcgatcgccccgacaagctcaacagcttcacgcgcgacatgcatcgcgaactgcagtcggcgctcgacgacgtgcaggccgcgaacgcacgcgccctggttctcaccggcgcaggacgcggcttctgcgcaggccaggatctcgccgatctcgacttcacgccgggggcgatgaccgatctcggcgaggtgatcgaagcgcatttcaatccgctcgttcgccgcctgcaagcgctgccgctgcccgtcatcgccgccgtgaacggcaccgcggcgggcgccggcgccaacctcgcgttcgcctgcgatctcgtcatcgcggcgaaatcgagcagcttcattcagtcgttcgtgaaaatcggcctcgttccggattccggcggcacgtggttcctgccgcagcgcgtcggcttcgcccgtgcgctcgggctcgcactgaccggcgacaaactgagtgccgaacaagccgagcgttggggactcgtgtggcgggtcgtcgacgatgccgaactcgcgggcgccgccgcacaactcgcccgagaacttgcgcaacagccgacgcgggcgatcgcggcgatcaagcaggcgatgcgtgcgagcctcacccatacgctcgaccagcagctcgatctcgaacgcgatcttcagcgcgagctcgggcaatcgtacgactacgcggaaggggtgcgcgcgttcatcgaaaagcgcgcccctcgcttcgaaggacgc

SEQ ID NO: 14553 - DNA, 879 bp, Burkholderia mallei
atgccggccgatcacagctttatcctgaaactgtcgtgcccggaccggcgcggcatcgttcacgcggtctcgggctttctgctcgagcgcggcagcaacatcctcgattcggcgcagttcggcgacagccgcaccggcgaattcttcatgcgcgtgcatttcgagcaggcgggcgcgtgcggcgcggcggccgcgctcgacgccctgcgcgccgagttcgcgccgctcgccgaggcgttcgcgatgcgctgggagctgcacgacgcggcggtgaagccgcgcgtcgtgatcctcgtgtcgaagatcggccattgcctgaacgacttgctgttccgctaccacacgggccagttgccgatcgagatctcggcgatcgtgtcgaaccacaaggatttctatcagctcgccgcgagttacgacattccgttccatcatctcccgctcgccgcgggcgcgtcggccgacgcgaaagccgcgcaggaagcgcgcgtgctcgaggtgatcgacgggcacgcggccgatctcgtcgtgctcgcgcgctacatgcagatcctgtcgcccgccctgtgcgagcggctcgcggggcgcgcgatcaacatccatcactcgttcttgccgagcttcaagggcgcgaagccgtactaccaggcgttcgaccgcggcgtgaagctgatcggcgcgaccgcgcactacgtgacgaccgacctcgacgaaggcccgatcatcgagcaggaagtcgagcgcgtcgatcacagcatgacgccggacgagctgacggccgtcggccgcgacgtcgaatgcgtgacgctcgcgcgcgcggtcaagtggcacgtcgagcatcggatcgtgctgaacggcacgaagacggtggtgttccgc

SEQ ID NO: 14554 - DNA, 897 bp, Burkholderia mallei; identical to SEQ ID NO: 14551

SEQ ID NO: 14555 - DNA, 2442 bp, Burkholderia mallei
atgcggaaaatgaagctggtgatggtcggcaacggcatggccggagtgcgcacgctcgaagaattgttcaagctcgcgcccgatttgtacgacgtgacggtattcggcgccgaaccgcatccgaactacaaccggatcctgctgtcgcccgtgctcgccggcgagcagacgctcgagcagatcgtcctcaacgattacgcatggtacgcatcgcacggcgtcacgctccacgtcggcaagaagatcgtgaagatcgatcgcgtgaagcgcgtcgtgatcgccgacgacggcaccgaggccgcatacgaccggctgctgctcgcgaccggctcgaacccgttcatgctgcccgttccgggcgcgcagctcgacggcgtgctcggctatcgcgacatcgcggacacgcaggcgatgatcgacgccgccgcgcggcacacgcacgcggtcgtgatcggcggcggcctgctcggcctcgaggcggcgaacggcctgaagctgcgcggcatggacgtgacggtcgtgcacctcgcgccgacgctgctcgagcgccagctcgacgcgaaggcgggcgacctgttgcgtgcgtcgctggaggcgcgcgggctgacgtttctgatgccgaagcaaacgcaggcgctcgtcggcgacgagcacggccgcgtgcgcgcggtgcacttcaaggacggcggcgaatgcaaggccgacctcgtcgtgatggcggtcggcattcgcccgaacacggcgctcgccgaaagcgcgggcctctattgcaatcgcgggctcgtcgtcaacgacacgatgcagacctacgatccgcgcatctacgcagtcggcgaatgcgtgagccaccgcggtatcgcgtacggcctcgtcgcgccgctgttcgaacaggcgaaagtcgcggcgaaccatctcgcgcagttcggcatcggccgctacacgggctcggtgacgtcgacgaagctcaaggtcacgggcatcgacctgttctccgcgggcgacttcctcggcggcgacgataccgaagacatcacgctgtccgatccgatcgcgggcgtctacaagaagctcgtgatcaaggacgacaggatcgtcggcgcgtgcctgtacggcgacacggccgacggcgcgtggtatttcaagctgctgcgcgaaggccgcaacatcgcggacatccgcgagacgctgatgttcggcgagacgagcctcggcgacaccggccacagcggcgcgacgcgcgcgatgacgatggccgacgacgccgaggtgtgcggctgcaacggcgtgtgcaagggcacgatcgtatcggcgatcaaggaaaaaggcctcttcacgctcgacgacgtgcgcaagcacacgaaggcgtcggcgtcgtgcggctcgtgcaccggcctcgtcgagcagatcctgatgtcgacgctcggcggcgactattcggcgtcgccgaaggcgaagcccgtatgcggctgcaccgatcatacgcatgccgaagtgcgcgcggcgattcgcgagcacaagctgctgtcggtgccggaggcgatgcgctttctcgaatggcgcacgccgaacggctgctcgagctgccgcccggcgctcaactactactgcatcagcacgtggccgcacgacgcgaaggacgatccgcagtcgcgcttcatcaacgagcgcgcgcacgcgaacatccagaaggacggcacgtattcggtcgtgccgcggatgtggggcggcgtgacgagcgccgacgagttgcgccgcatcgccgacgtcgtcgacaagtacgcgatcccgaccgtcaaggtgacgggcggccagcgcatcgatctgctcggcgtgaagaaggaggacctgcccggcgtgtggcgcgacctcggcatgccgagcggccacgcgtacgcgaaggcgctgcgcacggtgaagacctgcgtcggctccgaatggtgccgcttcggcacgcaggattcgacgctgatgggccagcagctcgaacgcgcgctgtggcggatgtacgcgccgcacaaggtgaagctcgcggtgtccggctgcccgcgcaactgcgcggaatcggggatcaaggacgtcggcgtgatcggcgtcgattcgggctgggagatctacgtcggcggcaacggcggcatcaagaccgaagtcgcgcaattcttctgcaaggtgaagacgcacgaggaggtgctcgaatatgcgggcgcgttcctgcagctgtatcgcgaggaaggctggtatctcgagcgcaccgtgcactatctcgagcgcgtcggcctcgaccacgtgaaggcgcgcgtgctcgacgacgccgaaaaccgccgcgcgctgtgggacaggctgcagttcgcgctgaaggacgagccggacccgtggcacgacacgcaggacgcgaaggtcgatctgcgccagttcatcccgatcgccgtcgcgcccgccgatgcg

SEQ ID NO: 14556 - DNA, 588 bp, Burkholderia mallei
ttgaggatcgacggatggatcgccgcgcgcgccgtcgtcaatccggagggccggctcacggtgaacggccgcgcggcaaacatcgcggtcaacggcggcgtggtgacgatcgccgggacgagcgcgaacctgtcgatcgaccggcagggccgggccgccgtgacagggacgacggcggacgtgcgcgtcgcgagcggctttgcatcgctcggcggcacgagcggcaacgtcgcggtgggggcgctcggcgtcgccgcgatcacgggccgcacggccgacgtggcggtcgaagacggccgcgcgtcgctcgacggcgcgagcggcaacgtcgcggtcggcaacggcggcgtcgtgagcggcagcggcacggtgcgcacgctcacggcggccgcgaacggcacggtcgcgcccggccattcggtcggtacgctgacggtgtcgggcgacgtgcgcttcgcgccgggttcgatctacgcggtcgaggtgcgtccgggcggcgcgggcgaccggtacgagtcgggcagccgcgccctcacgtacggcgggcctctggccctcccgcctaagaaaaccccacctgacccccgc

SEQ ID NO: 14557 - DNA, 861 bp, Burkholderia mallei
ttgtcgtggttcggggcgatcggtgcgctcgcctcgctgtccggctgcgggctcgacgtgctcgatcccaaaggcgcggtgggcgccgcggagaaatcgctgatcgcgacctcgacgtgggcgatgctgatcgtcgtcgtgccggtgatccttctcacgctgctgttcgcatggcgctaccgcgcgtcgaaccgcaacgcgacctacgcgccgaaatgggcgcattccaccgcgatcgagatcgtgatctggacggtgccgtcgctgatcatcctgttcctcggcatcctcacgtggaagaccacgcacgcgctcgatccgtaccggccgctcgaatcggcggtgaagccgatcgacgtcgaagtcgtcgcgctcgactggaagtggctcttcgtctatccggatctcggcattgcttcggtaaaccaactggcggtgcccgtcggcacgccgatcaatttccggatcacgtccgattcggtgatgaactcgttcttcatcccgcagctcggcacgcaggtctatgcgatggccggcatgcagacgcgcctgcacctgatcgccgacgagccgggcgacttcgccggcatctccgcgaactacagcggccgcggcttctcggacatgaagttccgcacgctcgcgacctcgcgcgacgcgttcgacgcgtgggtcgcgaaggtgcgcgcgtcggccgaccggctcgacatgaccgcgtacggccagctcgcgcagccgagcgagaagcagccggtgcgctactactcgacggtcgatcctcggctcttcaataacatcatcgcgaagtacaacgatggccgcgtcctcgatctgacggacgccgcctgtcggacgaagagg

SEQ ID NO: 14558 - DNA, 1176 bp, Burkholderia mallei
atgcgtatggaggcctgccccaccccgttgcgggcgcacctgcccgccgatccggtaaaattacgcgtttcagcacagacccaagccgcgcgccgcgcgagctgccggcgcgccgctcactgcccgcgccgtccgcccacggcgaagcgcccggcgccacgaaggcctctcatgcttacgtttcagcaaatcatcctgacgctccagtcctattgggaccggcagggttgcgccctgctccagccgatcgacatggaagtcggcgccggcacgtcgcacgtgcacacgttcctgcgcgcgatcggccccgagccgtggcgcgccgcgtacgtgcagccttcgcgccgcccgaaggacggccgctacggcgagaacccgaaccgcctgcagcactactaccagtaccaggtggtgctcaagcccgcgccggagaacatcctcgatctgtacctcggctcgctggaggcgctcggcttcgacctgaaacagaacgacgtgcgcttcgtcgaggacgactgggagaacccgacgctcggcgcatggggcctcggctgggaagtgtggctcaacggcatggaagtcacgcagttcacgtacttccagcaagtgggcgggctcgactgcaagccggtgctcggcgagatcacgtacggcctcgagcgcctcgcgatgtacctgcagaaggtcgagaacgtctacgacctggtctggaccgagtgggaagagccgggcccgaacggcccggagctgcggcgcctgacctacggcgacgtctaccatcagaacgaggtcgagcaatcgacgtacaacttcgagcaagcgaacgtcgagctgctcttcacgttcttcaacagctacgaggccgaggcgaagcggatgatcgaggcgcagctcgcgctgcccgcgtacgagctcgtgctgaaagccggccatacgttcaacctgctcgacgcgcgcggcgcgatctccgtgaccgagcgcgccgcctacatcggccgcatccgcgcgctgtcgcggctcgtcgcgcaggcgtactacgattcgcgcgagaagctcggcttcccgatgatcggcaatccggtgccgggcgtgccgggcctcaccaccgacgcgcaggaggccgcgcagcccgcatgggcgccgccgctgaaagccgaacgcaagatcgatcaggac

SEQ ID NO: 14559 - DNA, 444 bp, Burkholderia mallei
atgagcatcatcgacaatagaaaagcgttcttcgattaccacatcgaagaacgctatgaagcggggctcgtgctcgaggggtgggaggtcaaggcgctgcgcgccgggcgcggccagatcaaggaaggctacgtcgtcgtgaagcacgcggagatcttcctgatcggcacgcacatcagcccgctgcccgaagcctcgacgcacatcaagcccgatcccgtccgcacccgcaagctgctgctgcatcgcgacgagatcaagaagctgatcggcaaggtcgagcagcgcggttatacgctcgtgccgctgaacttccattacaagggcggccgcgtgaaatgcgagatcggccttgcgaaaggcaagaaactgcacgataagcgcgagaccgaaaagaagcgcgattgggagcgcgagaaggcgcgaatcatgcgctcggccacc

SEQ ID NO: 14560 - DNA, 1074 bp, Burkholderia mallei
atgagcgtgcgcctcgacgatgcgcgcgacgtgcgcgacgaagaccggctcgacgcggcgaagctcgacgcgtacctgaagccgcgcattgcggggttgagcggcgagccgcgcatccggcagtttcacggcggcgcgtcgaacctgacctatctgatcggctatggcgatcgcgagctggtgctcaggcgcccgccggcgggcgcgaaggcgggcgccgcgcacgacatgctgcgcgaagcggcggtgatggcggcgctcgggcccgactaccgttacgtgccggcgatcctcgcgcgctgcgacgatcccgcggtgctcggcagcgagttctacgtgatggagcgcatcgccggcgtgatcctgcggcgcgagctgcccgccgagctgaagctcgatcgcgcggacgtgcgcaagctgtgcgagcgcttcgtcgaccggctgatcgagctgcacgcgatcgacgcgtcgcgcccggagatcgcggcgctcggcaagggcgaaggctacgtcgcgcggcagttgagcggctgggcgcagcgctggcgcaacgcgctcaccgacggcacgaacccgtgcgacgacgtgctcgcgtggctcgagcgccatcgcccggcgggcgagcggcgcatctgcgtgatccataacgattttcgcttcgacaacgtcgtgctcgatccggccgatccgctgtcgatcgtcggcgtgctcgactgggagatggcgacgctcggcgatccgctgatggacctcggcggctcgctcgcctactgggcgcaggccgacgacgatcccgcgttcgtcgcgatgcgccgccagctgacgcacgcggacgggatgatgacgcgccgcgagctcgtcgaatactacggcgcgcgcacggggctcgacgtcggcggcttcgtgttctacgaagtgttcggcctgttccggctgatggtgatcgcgcaacagatctaccggcgcttcgtgctcggccacacgacgaacgagcagttcgcgggcctcggcgcggtcgtgcgctatctcggcgagcgttgccggcgcgtgatcgacgcggccgggggcgcgcga

SEQ ID NO: 14561 - DNA, 690 bp, Burkholderia mallei
atgaagaacgttccgcataccgtcaccgacgccgccatcgccacgatccgtgagcggatcgagcgcggcttctatcccgtcggcagcctgttgcccgcgcaacgtcaattgtccgaagaactggaaatcagccgcgcgtcgctgcgcgaggcgctgtcgacgctcgaggcgctcggcatgctgcgcatccggcccggcaagggcgtgtacgtcgaaagcgcgcaggcgagcgccgcgcatgcgtggcgcttcgccgagcagtcttcgctgcccgacacctaccagatgcgctatgcgctcgaaggcttcgccgcgcgaatggccgcgctcgccgtcagcgaggaggatctcgcgtggttcgaggagaatgtcgccgcgctgcaggaggcgctcgcgaacgacgagctcgatagcgcatcgcagctcgatttcgatttccacatgcgcatcgtcagcctcgccggcaacgcggcgatcgaatcgatcctgcgcggcagcgcggacatcatgaaggaaagccagcggatgccgttctatcggcgcgagctcgtgctttcgacgtatcgcgagcatcgcgcgattctcgatgcgctgatcgcgaaggatcccgccgcggcgggcgcggcgatcgaagcgcacatctcgaacgccgcgcagcgcgcgggcgtgttctttccgacgccgaagcgc

SEQ ID NO: 14562 - DNA, 488 bp, Burkholderia mallei
ctcgcgcgttcgccgtcgcgaggcgcctgcgcgccgtcctggccgcgctgggaccgtttcaagcgtgacttcgtatcggccgacggccgcgtgatcgacgtcggctcggccgacgagcggaccgtatccgaggggcaggcgtacggccttttcttcgcgctcgtcgcgaacgaccgcgcggcgttcgacgcgctgctgcgctggaccgaggacaatctcgcgcagggcgatctgagcgcgcgtctgcccgcgtggctgtggggccgcgcggccgacggcgcgtggcgcgtgctccatgcgaacgccgcgtccgacgccgatctgtggcttgcgtacgcgcctgctccaagcggggcgcttgtggcgccagcgcagcttcacggcgcgcggcgcgtttctctccaagcgcctgctccaccaagagaccgcgacccttgccggggctccgtcttctgctgcttcccgggccccatgggttttcggcccgc

SEQ ID NO: 14563 - DNA, 1035 bp, Burkholderia mallei
ttgcggcatccggccgcgctttcccccacgctgtcacccgctatcgtgaaagtcttccgcggcctgcccaacgccgagagccgcgccccgtgcgcgttgacgatcggcaacttcgacggtgtccatcgcggccaccaggccctgctcgcgcgcgtgcgcgcggcggcggacgcgcgcgggctgcccgtgtgcgtgatgacgttcgagccgcatccgcgcgaattcttcaatccggcgagcgcgccgccgcgcatcgcgatgctgcgcgacaagctcgaggcgctgcgcgagcacggcgtcgaccgcgtggtcgtcgagcacttcaaccatacgttcgcgagccagtcgcccgaggcgttcgtcgaacgcacgctcgtccatgggctgcacacccgctggatcatggtcggcgacgacttctgctacggcgcgaggcgcgcgggcgatttcgcgtcgctgaaggcggcgggcgagcgcttcggcttcgaggtcgagcagatggaaacgctcgccgacgccgatggcgcgcgcatttcgagctccggcgtgcgcgccgcgctcgcggcgggagatctcgacgccgccgcgcgcgcgctcggccacggctatgcgatcagcggccacgtcgcgcacgggctgaagctcggccgcgacctcggcttcccgacgctgaacctgccgatcgcgcacaagcgcccggccctgtcgggcatcttcgtcgtgcgcgtgcacggcctcgcgcccgagccgctgccgggcgtcgcgagcctcggcgtgcggccgaccgtcgacgattccggccgcgtgctgctcgaagtgcacctgctcgactggcacggcgatgcatacggcaagctcgttcgcgtcgaattcctgaagaagctgcgcgacgaggcgaaattcgtcgatctcgaaacgctctcgcgcgcgatcgcgcaggacgtcgtcgacacgcgcgcgtacttcgccgagcacggtcgcgcgccgggcagccgcgcgaccggcttcgcgacgtcggccaccgaccgaattagc

SEQ ID NO: 14564 - DNA, 1671 bp, Burkholderia mallei
atgacccccgcaagcctcatcgagcaatacggcccgcgcgaatcgatggaatacgacgtcgtgatcgtcggcggcggccccgcaggcctgtcggcggccatccggctcaagcagctcgccgccgagaaaggtgcggaaatcggcgtgtgcgtgctcgaaaagggctcggagatcggcgcgcacatcctgtcgggcgccgtgatggacccgcgcgcgatcaccgaactgttccccgactggaaggaaaagggggcgccgctcaacgtcgacgtcaccgaggaccgcttcctgttcctgaccgagaaaagctcgttccaggtacccaactgggcactgccggacaatttcaagaaccacggcaattacgtgatcagcctcggcaacgtcacgcgctggctcggccagcaggcggaagccctgggcgtcgagatcttcccgggcttcccggccgccgagatcctctataacgacgacggctcggtcaagggcgtcgcgacgggcaacatgggcgtcggcaaggacggcgagccgaccgagaacttccagctcggcatggagctgcacgcgaagtacacgctcttttgcgaaggcgcgcgcggccacctcggccgccagttgatggacaagttcaagctgaacgcgaacagcgacccgcaggcgtacgggatcggcatcaaggagctgtgggagatcgatccggtcaagcacaagccgggcctcgtgatccacacggccggctggccgctgtcgtcggacacgtacggcggctcgttcctgtatcacatggacaacaatcaggtcgtcgtcggcttcgtcgtcggcctcgcgtactcgaacccgtacctgtcgccgttcgaggagttccagcgctacaagacgcatccggcgatccggccgttcctcgaaggcggcaagcgcgtgtcgtacggcgcgcgcgcgatcaccgcgggcggcctgctgtcgctgccgaagacggtgttcccgggcggcgcgctcgtcggcgacgacgcgggcttcctgaacgcgtcgcggatcaagggcagccatgcggcgatcaagaccggcatgctcgccgccgaagccgcgttcgacgcggtgcaggcgggccgccaggccgacgaactgaccgcttacccggacgcgttcaagacgtcctggctgcacaccgagctctatcgcgcgcgcaacttcaagcagtggatgggcaaggggctgtatctcggcacgctgatggtcggcgtcgagcagaagctgatgaacggcaacgtgccgtggacgctgcatcaccagcacggcgaccacgagatgctgaagcccgcgtcgcagtgccagccgatcgactatccgaagccggacggcaagctgacgttcgaccggctgtcgtcggtattcatctcgaacacgaaccatgaggagaaccagcccgcgcacctgacgctgaaggacgcgagcgtgccggtcaacgtcaatctgcgcacgtatgcggggccggaagcgcgcttctgcccggccgccgtctatgaattcgtgaagaacgacgacggcagcgaccgcctcgtgatcaacgcgcagaactgcgtgcactgcaagacctgcgacatcaaggatccgacgcagaacatcgtgtgggtcacgccggaaggcggcggcgggccgaactacccgaacatg

SEQ ID NO: 14565 - DNA, 1374 bp, Burkholderia mallei
gtgaacgggcgggacggccgcgagtgcgcacgcggcacccggcgcgcccgttttccgacaatcgttttttcgccgctcgacgcggcttgcattgcgagtctcacgatggatatcgaccagtacatgacggacgtcggccgccgcgcgcggcgcgcctcgcgcgagatcgcacgcgcgtccaccgcggcgaagaacgccgcgctcgaagcggtcgcgcgggcaatcgggcgcgacgccgacgcgctgaaggccgccaacgcgcgcgacgtcgcgcgcgcgaaggacaaggggcacgacgcggcgttcgtcgatcgcctgacgctgtcggacaaggcgctgaakacgatgatcgaagggctgcgccaggtcgcgacgctggcggacccgatcggcgagatgagcaatctcaaataccgcccgagcggaatccaggtcggccagatgcgcgtgccgctcggcgtgatcgggatcatctacgaatcgcggccgaacgtgacgatcgacgcggccgcgctgtgcctgaagtccggcaacgcgacgatcctgcgcggcggctcggaggcgctcgaatcgaacaccgcgctcgcgaagctgatcggcgaagggctggcggcggcggggctgccgcaggacgcggtgcaggtcgtcggcacggccgatcgggcggcggtcggcaagttgatcacgatgaccgaatacgtcgacgtgatcgtgccgcgcggcggcaagagcctgatcgagcggctgatcaacgaggcgcgcgtgccgatgatcaagcacctcgacggcatctgccacgtgtatgtcgacgatcgcgcgagcgtggcgaaggcgctcgccgtctgcgacaacgcgaagacgcatcgctacggcacctgcaacacgatggagacgctgctcgtcgcgcgcgggatcgcgcccgcggtgctgacgccgctcggccggctgtatcgcgagaagggcgtcgagctgcgcgtcgacgccgacgcgcgcgcggtgctcgaggcggcgggcgtcggtccgctcgtcgacgcgaccgacgaagactggcgcaccgaatatctcgcgccggtgctcgcgatcaagatcgtcgacggcatcgacgccgcgatcgagcacatcaacgagtacggctcgcatcacaccgatgcgatcgtcaccgaggatcacgaccgcgcgatgcgcttcctgcgcgaagtcgattcggcgagtgtgatggtgaacgcgtcgacgcgcttcgcggatggcttcgagttcgggctcggcgcggagatcggcatctcgaacgacaagctgcacgcgcgcggcccggtcgggctcgaaggtctcacgtcgctgaagtacgtggtgctcgggcacggcgaagggcgtgag

SEQ ID NO: 14566 - DNA, 2181 bp, Burkholderia mallei
gtgtgggacgtcgatttttttttcgccgcgcggcgcgcggcggctgcggctcggccgaggatcgatcctatgtcagtgagcgaattgcggtgggcggggagccaggccggcgggcccgccgcgcacggaaaaaccgcctatctgccgtatatcgacgggctgcgcgcgtgggcggtgctgtccgatatgctgtatcacctcgatgcgcgctggctgcccggcgggtttgccggcgtcgatattttcttcgtgatttccggtttcgtcgtgagcgtgtcggtcgcgaaccgcgggccgatgtcgctcgggccatttcttttgtttttttatgcgcggcgcatgcggcggatcctgcccgcgctcgtcgcggcgctgctcgcgaccgcgctggtctcgacgctgttcattccggcgtcctacctgagcgaccgaaaccggacgaccgggctgctcgcgttcttcggcttgagcaacgtgatcctcggcgcgccgggcggggactatttttcaccgaaggccgaattcaatccgtatacgcacacgtggtcgctcggcgtcgaagagcagttctatctgctgtttccgctgctgttccatgcatggcgggcgggcggcaagcgccgatacgcgtcggccgcgctgttcgcggcggggctgtgcgcgtcgctcgcgtggagcgtctgggcgcgccccgcgatgcacgcgcaggcgttctatctgatcttcgggcgcttctgggaactcgcggcgggcgtgctgctgtatcagtgcgtcgcgcgcgcgggccgcccggcgggccggccggcggcggctttcgggatcgaagcgggcgtgtgggcgtcggcggttgccgtgctggccggcttcgtcgcgtcgaagccggcgctttatccgttcccgggcgcgctcgtacccgttgccggcgcgctcgggctgctcggcctgctgcacgggcgcgcgcgggcgagcccggtgcgcgcggcgctcgagcagccggcgctgcgcttcgtcggccgcatttcttattcgctctacctgtggcattggccggtcttcgtcgtattccgctggacgctcgggctcgactcggcaggcggcaaggcgagcgcgttgctcgtcgcgtgcgcgctggcgacggcatcgtaccgcttcatcgagacgccgttgcggcgcggcggcgcggcggcgcgccgcgcgcctcgcgtcgccgcgctcgccgggggggcgggcgtgctggcggcgggcgcggcgctctcgtcgatgctggccgccgcgcagccgcagctctcgctcagcacggtcgcgcggcaccggctcgactggtatccgtacggcgtcgagacgaacgccgcgtatccgggatgcgtcgcggacgtcggggcgcgcgacgttcgcggcggcaagctatggatctacgcgcgcaagggctgcggccgcccgccggaaagccggcagcgcgtgttcgtgatcggcgattcgcacgcgatggcatacgcgggcatgttcaagcagttcgtcgtgcgcacgggcatcgcggtctattcgtacaacaacgcgggctgcccgttcgtcagccttcagccgtggcgcgagcgcggcgagccggggtgccgccggtatggtgacgcggcgctggacgacatgctgtcgaagctcgcgccgggggacatcgtgtttctgccgtcgctgcggttgccgcgcttcgtcacgcaatgggcgttcgtcggcgacgacgacgcgcgccggctgtcatccggccgcgaggcggcgcaagtgcgcgagcgggcgattgccgatgcggtcgccgtgctgcgcgagatcgggcggcgcggcgcgcggatcgtgctggaagcgccgccgcccgtgttccggacggtgccgtaccgctgctcggactggttcaaccggcgcaacgcgatttgcgcgcgcggcccgctcgtcggccgcggcgagatcgacgcgctgcgggcgcccgtgctcacggcgtatgcgcggatcgccgcgcaggtgccggacgttcatacgtgggacccgctgccgctgctgtgcgatgaaaaggcgtgttccgcgtatgacggcgcgcggccgctgtttttcgacggcgaccacctcagcggctacggcaacctgcgcgtgctgccggggttcgaggcgttcgtgcgcgaactgatcgaggccgcc

SEQ ID NO: 14567 - DNA, 1545 bp, Burkholderia mallei
gtgatcaaaaaactcatccgcaagctgctcgggcaggacgcccgtacgacgcaagacgcgccgcaggacccggccgagccgcgctcggccgcgcccgccgccccggcgggccgcgcgaaacccccgcgcggcgccgcgaagaaaccccgcaacggcgcgccgaccatcgtgcacgccgacgtgcacgggatcgaccccgcgctcatctcgaaaaacgcgatccgcgtgaccgacacgctgcagcaagccggctttcgcgcattcatcgtcggcggcgcggtgcgcgacctgctgctcggcatcgcgccgaaggatttcgacgtcgcgaccgacgcgacgccaaccgaagtccagcgcctgttccgccgcgcgcggctgatcggccggcgcttccagatcgtccacgtgcagttcggccaggagctgatcgaggtgtcgacgtttcgcgcgctcgtcgacgcgccgcaggagccgcccgccgacgccgcgcccgcgaagcgcctgaagcgcgacgagctcgaccgccgcacgcatgcggtggacgcaagcgggcgcgtgctgcgcgacaacgtgtggggcgagcagcacgaggacgcggcgcgccgcgatttcacgatcaacgcgatgtactacgatcccgcatcgcagaccgtgctcgattaccacgacgggatggccgacatgcgcgcgcgcctgctgcgcatgatcggcgatccggcgacgcgctaccgcgaagatccggtgcggatgctgcgcgtggtgcgcttcgcggcgaagctcggcttcgacatcgaggagaagacacgcgagccgatcaaggagctcgccgatctgatcaacaacgtgccggccgcgcgcctgttcgacgagatgctcaagctcctgctgtcgggccacgcgctcgcgtgcctgaagcagttgcgcaagcaggggctgcaccacgggttgctgccgcttctcgacgtcgtgctcgagcagccgcagggcgagaagttcgtcacgctcgcgctgaacaacaccgacgcgcgcgtgcgcgcgggcaagccggtgtcgcccggcttcctgttcgcgacgctgctgtggcacgacatgcgccagcgcttcgagcagtattcggccgacggcgagttcccggtgcccgcgctgcatcgcgcgatggacgacgtgatcgacatgcagaccgagaagctcgcgatccacaagcgctattcggccgacatgcgcgagatctgggggttgcagttgcgcctcgagaaacgcagcggccgcagcgcgctgcggctgctggaacaccaaagattcagagcggggtatgatttcctcctgttacgctgcgaatccggcgagctcgatccggccgtcggacagtggtggacggatttcatcgacggcgacgccgcgacgcgcgaggcgctcctcacgcagggcggcagtcgggacaagtcgccccgcaagcggcgccgccgcggcggacgcagccgccggacggccgacagcgccgagggcgcggaaggcgccgcgcgcggcgagtccgacgcgaacgac

SEQ ID NO: 14568 - DNA, 1171 bp, Burkholderia mallei
ctcgacacgggcgaggacgtcgcgctcgtgctgccgcgcggcaccgtgttgcgcgacggcgacgtgctcgtcgccgacgacggcgcgctcgtgcgcgtggccgccgcgcacgaagccgtgctgctcgtgcgcgcgcccgacgcgctcacgctcacgcgcgccgcgtatcacctcggcaaccgccatacgccggttgaagtcggcgccggctgcctgaagctcgaatacgatcccgcgctcgccgacatgctcacgcggctcggcgcgacggtcgagcgcgcgagcgcgccgttccagcccgaagccggcgcgtacggcggcggacatcgtcacgggcacgatgcgacgttcgccgaggattacgcgctcgcgcagcaggtgttcgacgagcatcacggccactcgcactcgcactcgcactcgcacgatcacgatcacgatcacgatcacgatcatcagcatggcccgtcttgctcgcacggtcatcaccatggacaccgctgagctcgtcgcgctgctgcacctcgcgtcgccggcgttgccgatcggcgcgttcagctattcgcagggtctcgaagccgcgctcgacgcgccgctgattcgcgacgccgacggcgcgcgcgactggatcgcgagcggcctcgccgacgtgctcgcgcaaggcgagctgccgttcctcgcgcatcagctcgcgcgctggcacgcgcacgacgccgccgcgctcgccgacgcgaacgacgaattcgtcgcgagccgcgaatcgttcgagctgcgccgcgaaaccgaacagatgggctggtcgctcgcgcagctgtgcgcgtcgctcgaatggggcgatgccgcgcgccgagcaacgctcgcgtcgatcccgtcggtcgcgctgccgagcgcgttcgcgttcgcggccgccgcgcacggcgcgacgcccgacgcggcgctcgccgcctatgcgttcggctgggtcgagaaccagacggccgccgcgatcaaggcggtgccgctcggccagctcgccggccagaagatcatcgtcgcgctgcgcgagccgatccgcgacgcggtgcgccgcgcgctcgcgacgccgccggaggcgatcaacacgttcgcgcctcagctcggcatcctgtccgcgcggcacgaatcgcagtattcgcgtctgttccgttcataa

SEQ ID NO: 14569 - DNA, 600 bp, Burkholderia mallei
atgaacgccgcaaccaccgccgacgtccggcagcacattctcgacaccgccaagcccatcatgctctgcaagggcttcacgggcgtcggcctgaacgagatcctggcggcggccggcgtcccgaaggggtcgttctaccattatttcgggtcgaaagaggcgttcggcgaatcgattctcgaatcgtatttcgacgattacgtcgcgcatctcgacgaactgctcgtgcgcggccccggcgccgcgatcgatcggctgatgcgctactggacccagtggcagcagatgcagatgggcaacgaccccgaaggcaagtgcctcgtcgtcaagctcggcgccgaggtgtgcgatctgtcggaggcgatgcgcgcggcgctcgagcgcggcacgtcgcagatcgtcgcgcggctcgccgcgtgcatcgcggcggcgctcgacgacggctcgctgaaggtcgatctcgagccgcagcagacggccgcgatgctgtacgagctgtgggtcggcgcgacgctcatcgagaagatccggcgcgacggcgagccgctcgccgtcgcgatggcgagcacgcgccgggtcctcggtctgacgggcgcgcgt

SEQ ID NO: 14570 - DNA, 930 bp, Burkholderia mallei
atgaccgccaagccgatcgccgatccgatcgtcgactacctgtcgaacctgcggcacgtgaggaagctgtcggatcacacgctgcgcgcgtacgcgcacgagctcgacgaactgaagaggctcgcgaacggccgcccgctcgacagcctcacggccgtcgacatgcgcagcgccgtcgcgcgcgcgcatgcgggcggcctgtccgcgcgctcgatctcgcaccggctgtccgcgtggcgcgcgttctaccgctggttttcgcaacacgtcgagatgaacgcgaatccggtcgcggccgtgcgcgcaccgaagcgcgcgaagacgctgccgaaggcgctgtccgtcgacgacaccgccgcgctgatggacgcgcccacggccggcaccgccgagagcctgcgcgatcacgcgatcctcgagctgttctattcgtccgggctgcggctcgcggagctgatcggcctcgacatcgaatacgtgaaggacggcgcctaccgctccgcgggctggctcgatctcgccgaagcggaggtcaccgtgcgcggcaagggcgacaaggagcgcaaggtgcccgtcggccgcaaggcgctcgacgcgctgcacgcctggctcgcggtgcgcggcgaattcgtgaagcacgatccgcggccgctcttcctctcggtgcgcggcaaccggatgtcgcccggcgtcgtgcgcgagcgcgtgaagcgcgcggcgctcgcggcgggcattccggcgaacgttcatccgcacgtgctgcgccactcgttcgcgacgcacgtgctgcaatcgagcggcgacctgcgcgcggtgcaggagctgctcgggcacgcgagcatctcggcgacgcaggtctatacgtcgctcgacttccagcatctcgcgaagatttacgacagcgcgcatccgcgcgcgaaaaagcgcgac

SEQ ID NO: 14571 - DNA, 1593 bp, Burkholderia mallei
atgataagtagcgaagtcgtcgatctgtcgcgtctgcagttcggcatcacagcgctctaccatttcctgttcgttccgctcacgctcggcatgtcctggctgctcgtcatcatggaagccgtctacgtgatgacgggcaagcaggtctacaaggacatgacccagttctggggcaagctcttcgggatcaacttcgcgatgggcgtgacgacgggcatcacgctcgaattccagttcggcacgaactggtcgtactactcgcactacgtcggcgacatcttcggcgtgccgctcgccgtcgaagggctgatggcgttcttcctcgaatcgacgttcgtcggcctgttcttcttcggctggaaccggctgtcgaaggtccagcatctggtcgtcacgttcctcgtcgcgctcggctcgaacctgtccgcgctgtggatcctcgtcgcgaacggctggatgaacaatccggtcggcgccgagttcaactaccagacgatgcgcatggagctcgcgaacctgttcgacgtgctcttcaacccggtcgcgcaggtgaagttcgtgcacacggtatcggcgggctacgtgacggccgcgatgttcgtgctcggcgtgtccgcgtggtatctgctgaagaagcgcgacgtcgatttcgcgctgcgctcgttcgcgatcgccgcgggcttcggcctcgcgtcgacgctctgcgtgatcgtgctcggcgacgaatcgggctacacgacgggcgaagtgcagaagatgaagctcgccgcgatcgaatccgaatgggaaacgcagcccgcgcccgcgtcgttcacgctgatcgggctgccgaaccaggaggcggagcgcaccgattacgcgatcaagatcccgtacgcgctcggcctcatcgcgacgcgctcggtcagcgagccggtgatcggcctgcgcgaactcgccaagcgcagcgaggagcacatccagagcggcatgatcgcgtacggcgcgctgcagaagctgaaggcgggcgacacgagcgccgagacgaaggcgacgttcgatcagcacaagcagtatctcggctacggcctgatgctcaagcagttcacgcagaacgtgaccgacgcgacgccggaccagatcaaggccgcggcgaagcagacgattccgcccgtcgcgcccgtgttcttctcgttccggatcatggtgttcctcggcttcctgttcctcgcgaccttcatcgccgcgttctggttctgcgcgcgccgccagttgctgcaggacaaccgccgctggttcctgcgctatgcggtgtgggcgattccgctgccgtggctcgccgccgagttcggctgggtcgtcgccgaagtgggccgccagccgtggacgatcgcgggcatcctgccgacgcacctgtccgcgtcgagcctcacggcaaccgatctgtacctgagcctcgcgggcttcatcgtgttctacacggcgctcttcatcatcgagatcacgctgatgttcaagtacgcgcgtctcggcccgtcgtcgctgcacaccggccgctatcaccacgaacaggcagggcggccgctcgagaaggccgtcgcgggcacggccgcg

SEQ ID NO: 14572 - DNA, 366 bp, Burkholderia mallei
atgcgcgaggcgcaggggggcgagcacgtatgcggcgcggatcgcgtcgacgaagctcgccgccgcgcgagtcgcgagcgcggcggcgagcttcccgagcttcccgagcttcccgagcttcccgagcttcccgagcttcccgagcttcccgagcttcccgagcttcccgagcttcccgagcttcccgagcttcccgagcttcccgagcttcccgagcttcccgagcttcccgaacttcccgaacttcccgaacttcccgcgccgcctccgattcgcacgcgctgcgcagacgctcgcattcgactgcggcggtttcctccgttcaacctttcggttgataccgcttggcgccgcgcgcgggcacca

SEQ ID NO: 14573 - DNA, 2100 bp, Burkholderia mallei
gtggctcgtaagactcctatcgagcgctaccgcaacatcggtattagcgctcacatcgacgccggcaagacgacgacgaccgagcgcattctgttttacaccggcgtgaaccacaagatcggtgaagttcacgacggcgcagcgacgatggactggatggagcaggaacaggagcgtggcatcacgatcacgtccgctgctaccacggcgttctggaagggtatgggcaacaactacccggaacaccgcatcaacatcatcgataccccgggccacgtcgacttcacgatcgaagtggagcgttcgatgcgcgtgctcgacggcgcgtgcatggtgtactgcgcagtgggcggcgtgcagccgcagtcggaaacggtgtggcgtcaggcgaacaagtacaaggtaccgcgtctcgcgttcgtcaacaagatggaccgtaccggcgcgaacttcttcaaggtctacgatcagctcaagctgcgcctgaaggcgaacccggtgcccgtcgtggtgccgatcggcgcggaagagaacttcaagggcgtggtcgacctgctgaagatgaaggcgatcatttgggacgaagcgtcgcaaggcacgaagttcgactacgtcgacattccggccgagctcgccgacacctgccaggaatggcgtgaaaagatggtcgaagcggctgcggaagccagcgaagacctgatgaacaagtacctggaagaaggcgatctgccggaagccgacatcgtcaaggcgctgcgcgaccgtacgatcgcgtgcgaaatccagccgatgctgtgcggcaccgcgttcaagaacaagggcgtgcagcgcatgctcgacgccgtgatcgatttcctgccgtcgccggtcgacattccgccggtcaagggcgagctcgaaagcggcgaagcggccgagcgccaggcttccgacgaagagaagttctcgtcgctcgcgttcaagatcatgaccgacccgttcgtcggccagttgatcttcttccgcgtgtattcgggcgtcgtgaattcgggtgacacgctgctgaactcgaccaagggcaagaaagagcgcctcggccgtattctgcagatgcacgcgaaccagcgtgaggaaatcaaggaagttcgcgcgggcgacatcgccgcggcggtcggcctgaaggaagcgaccacgggcgacacgctgtgcgatccggcgcatccgatcgtgctcgagcgcatggtgttcccggagccggtgatctcgcaggccgtcgagccgaagacgaaggccgaccaggagaagatgggcctcgcgctgaaccgtctcgcgcaggaagatccgtcgttccgcgtgcagaccgacgaagaatcgggccagacgatcatttcgggcatgggcgagctccacctcgaaattctggtcgaccggatgaagcgtgaattcggcgtggaagcgaccgtcggcaagccgcaggtcgcgtaccgcgaaacgatccgctcgacggcgaaggacgtcgatggcaagttcgtcaagcagtcgggcggtcgcggccagtacggtcacgcggtcatcacgctcgagccgaacgagcagggcaagggctacgagttcttcgacgagatcaagggcggtgtgattccgcgcgaatacatcccggccgtcgacaagggcatccaggacacgctgaagtcgggcgtgctggcgggcttcccggtcgtcgacgtgaaggtgcacctgacgttcggttcgtaccacgacgtcgactcgaacgaaaacgcgttccgcatggccggttcgatggcgttcaaggaggcgatgcgccgtgcgaacccggtggtgctggagccgatgatggcggtcgaagtcgaaacgccggaagactacatgggcaacgtgatgggcgacctgtcgggccgtcgcggcatcgtccagggcatggaagacatggtcggcggcggcaagatcgttcgcgccgaagtgccgctgtcggaaatgttcggctactcgacgtcgctgcgctcgctgacgcaaggccgtgcaacgtacacgatggagttcaagcactacgctgaagctccgaagaacgttgccgatgcgatcatcagcgcgaagtcgaag

SEQ ID NO: 14574 - DNA, 2919 bp, Burkholderia mallei
gtagcccaatttgccgcggaactgaaaatgcctgctggtgtgctgctcgaacaactgcaggcagcgggcgtccagaaagcgagcgaggacgatgcgctgtcggagacggacaaggcgcgtctgctcgatcatttgcgcaagtcgcacggtgcgaccgatggcgacaagcgcaagatcacgctgactcgccggcacacgtcggagatcaagcaggccgacgcaacgggtaaggctcgcaccattcaggtcgaggtgcgcaagaagcgcacgttcgtcaagcgcgacgacgtgagcgagacgggcgccgatcaggctcaggcgcagaccgacgagcaggcggaagccgaactgaagcgccgcgaggaagaagcgcgccgcgaggccgagctgctcgagaagcaggcgcaggaactgcgcgagcgtcaggagcgtctcgagcgcgaggaagccgagcgccgtgcgcgcgaagaggcggccgaggccgagcgtcgccgtgcggaagaggaagccgcggcgaagcgcgcggcggcggcgcaggcggaagccgcgcagcaggccgcggctgcgcgcgagcaagcgcagcgcgcgcagagcgagccggccgagcagagcgctcaggacgaagcgcgtgcggccgccgagcgcgccgcgcagcgcgaagcggcgaagaaggccgaggacgccgcacgcgaagcggccgacaaggcgcgcgccgagcaggaagagattcgcaagcgtcgcgaggccgccgaggccgaagcgcgcgcgatccgcgaaatgatgaacacgccgcgccgtgcgcaggtcaaggcggtcgagccgccgaagccggccgagccgcccgcggcgaaggcggccgaggcgaagggcacgctgcacaagccggcgaaacccgccggcgaggcggccgcggcgcgccccacggcgaagaagccggcaagcggcgcgccggcgcccgccgccgcgcccgcgggcgaccgcaccaagaagccgggcaccggcaagagcggctggcaggacgacgcggcgaaacgccgcggaatcaagacgcgcggcgattcgagcggcggcgtcgaccgcggctggcgcggcggcccgaaggggcgcggcaagcatcaggacagcgcatcgtcgttccaggcgccgaccgagccgatcgtgcgtgaagtgcacgtgccggagaccatctccgtcgcggatctcgcgcacaagatgtcgatcaaggcatcggaagtcatcaaggtgatgatgaagatgggccagatggtcacgatcaaccaggtgctggaccaggaaacggcgatgatcgtcgtcgaggaactgggccaccgcgcgctcgccgcgaagctcgacgatccggaggcgctcctcgtcgaaggcgagatcggcagcgatgcggagcaactgccgcgtccgcccgtcgtcaccgtcatgggccacgtcgaccacggcaagacctcgctgctcgactacatccgtcgcgcgaaggtcgcggccggcgaagcgggcggcatcacgcagcacatcggcgcgtatcacgtcgaaacgccgcgcggcgtcgtcacgttcctcgacacgccgggccacgaggcgttcaccgccatgcgtgcgcgcggcgcgaaggcgaccgatatcgtcattctggtggtcgcggccgacgacggcgtgatgccgcagacgaaggaagcgatctcgcacgcgaaggcgggcggggtgccgatcgtcgtcgcgatcaacaagatcgacaagccggaggcgaaccccgatcgcgtgaagcaggaactggtcgcggaaggcgtcgtgccggaagagtacggcggcgactcgccgttcgtgccggtatcggcgaagacgggcgcgggtatcgacgatctgctcgagaacgtgctgctgcaggcggaagtgctggagctgaaggcgccggtcgaatcgccggcgaagggcatcgtgatcgaggcgaagctcgacaagggcaagggcccggtcgcgacggtgctcgtgcagtccggcacgctgagccgcggcgacgtcgtgctcgccggcacggcctacggccgcgtgcgcgcgatgctcgacgagaacggcaagccgacgaaggaagccggcccgtcgattccggtcgagattcagggcctgtccgaagtgcccggcgcgggcgacgaagtcatcgtgttgccggacgagcgcaaggcgcgcgaaatcgcgctgttccgtcagggcaagttccgcgacgtcaagctcgcgaagcagcaggcggcgaagctcgaaagcatgctcgagcagatgggcgaaggcgaggtgcagaacctgccgctcatcatcaaggcggacgtgcagggctcgcaggaagcgctcgtgcaatcgctgctcaagctgtcgaccgacgaagtgcgcgtgcagatcgtgcacagcgcggtgggcggcatcagcgaaagcgacgtcaacctcgcgaccgcgtcgaaggcggtcatcatcggcttcaacacgcgggcggacgcgcaggcgcgcaagctcgccgaggcgaacggcatcgacatccgctactacaacatcatctacgacgcggtggatgaggtgaaggcggcgatgtcgggtatgctcgcgccggagaagcgcgaagtcgtgacgggcatggtcgaggtgcgccaggtgttcaaggtgccgaaggtcggcacggttgccggctgtatggtcacggacggcgtcgtgaagcgttcgtcgtcggtgcgcgtgctgcgcaacaacgtcgtgatcttcacgggcgagctcgattcgctcaagcgcttcaaggacgatgtcaaggaagtgaagcagggcttcgaatgcggtatgtcgctcaagaacttcaacgatatcgtcgaaggcgaccagttcgaagtgttcgaggtcacggaagtcgcgcgtacgctgtaacgcagg

SEQ ID NO: 14575 - DNA, 639 bp, Burkholderia mallei
atgagccccatcgagacgaaactgcgcgaggagatctgcgagatcggcgcgagcctgtacgcgcgcggccacgcggtcggcagcgcgggcaacatcagcgcgaagctcgacgacggctggctgatcacgccgaccgacgcatgcctcggccgcctcgatccggccggcatcgcgaaggtcgatccggcgggcaacgcggtgtcgggcggcaagccgtcgaagacgctcgcgctgcatcgcgggatctacgcgcgcaacgccgaagcgcgcggcatcgtccacacgcattcgacgcacctcgtcgcgctcacgctcgcgggcgtctggagcgaggccgacgtgctgccgccgatcacgccgtactacgtgatgaaggtcggccatattccgctcatccgctatcgccggccgggcgacccggcggtggccgccgaagtcgcggcgctcgccgatcgcgtgcgcggcgtgctgctcgagcggctcggcccggtggtctggggcccgtcggtcgcgcatgcgtcgtacgcgctcgaggagctcgaggaaaccgcgcgcctgtggctgatcacgcacccgaaacccgagccgctcggcgagcccgcgctggccgaattgcgcgacgcgttcggcgcgcgctgg

SEQ ID NO: 14576 - DNA, 399 bp, Burkholderia mallei
atggctaaggcttccaataccgcggcgcaacgcgttcgcaagaaggtcaagaagaacgtcgctgaaggcgtggttcacgttcacgcgtcgttcaacaacacgatcatcacgatcaccgatcgccaaggcaacgcgctggcgtgggcgacgtcgggcggccagggcttcaagggctcgcgcaaatcgacgccgttcgccgcacaggtggctgccgagtcggccggccgcgtcgcgatggaatacggcgtgaagaatctggaagtgcggatcaaggggcccggcccgggccgcgagtcggcagtgcgcgcgctgcacggcctcggcatcaagatcacggcgatttccgacgtgacgccgatcccgcacaacggctgccgtccgccgaagcgtcgccgcatc

SEQ ID NO: 14577 - DNA, 765 bp, Burkholderia mallei
atgagcggcgccgccacgaccgcggcggtgccgcgcttcttcgtcgacgcggcgttgcgcgccgacgccacgctggcgctgccggccgacgtcgcgcgtcacgcgcacgtgctgcggctgcagccgggcgacgcgctcgcgctgttcgacggcacgggcggccagtatcgcgcgcgactcgtcgagatcgacaagcgcggcgcgctcgcccggatcgatgcgttcgagcccgcggaagcggagccgccgtaccgcgtgacgctcgcacagggcatcgccggcggcgacaagatggattgggtgatcgaaaaggcggtcgagctcggcgtggcggcggttgtgccgctgtcgaccgcgcgcggcgtcgtcaggctgtcgggcgagcgcgcggacaagcgcgtgtcgcactggcgcggcgtcgtgcgcgcgtcgtgcgagcagtgcggccgcaatcgcttgccggaaatcgcgccggtgcgcggcttcgatgcatggctcgacgcgctgccggccacgccggccgacggcgcactgcgcttgctgctgtcgccgcgcgcgagcgtgccgttcgcatcgctgcccgccgcgccgcccgccggcgacgtgacgctgctgatcggcccggaaggcgggctcgcgcccgacgaggaacaagccgcgcgagcgcgaggcttcgccgcgctgtcgctcggcccgcgcgtgctgcgcaccgaaacggcgggcgcggcggtgctcgccgcgctcgcggcgcgctggggcggatgg

SEQ ID NO: 14578 - DNA, 1518 bp, Burkholderia mallei
atgggcgggcgcgggtcccccttacccgattcaacagattcagaagagaacctcatgggcaagatcaccggttttctggagtacgagcgccgtcacgaggcgtacgaggcgccgctcacgcgcgtgaagcactacaaggagttcgtcgcggcgctgaccgacgcggacgcgaagatccagggcgcacgctgcatggattgcggcattccgttttgcaacaacggctgccccgtcaacaacatcattccggacttcaacgatctcgtgtatcgccaggaatggcgtcaggcgatcgacgtgctgcactcgacgaacaacttcccggagttcacgggccgcatctgcccggcgccgtgcgaagcggcgtgcacgctcggcatccatgacgatccggtcggcatcaagtcgatcgagcacgcgatcatcgacaaggcatgggcgcagggctgggtcgcgccgcagcccgctgcgcacaagacgggcaagaaggtcgcggtggtcggctcgggccccgcgggccttgccgccgcgcagcagctcgcgcgcgcgggccacgacgtgacggtgttcgagaagagcgaccggatcggcggcctgctgcgttacgggattcccgatttcaagctcgagaagtggctgatcgaccgccggatgcgccagatggaagcggaaggcgtgacgttccgcacgagcgtgttcgtcggccgcgatccgctgcccgagacgatcggcaacatggcgaaggagacgatttcgcccgagacgctgaaggacgagttcgacgcggtcgtgatcgcgggcggctcggagacgccgcgcgatctgccggtgccggggcgcgagctcgccggcatccatttcgcgatggagttcctgccgcagcagaaccgcgtgaacgcgggcgacaagctggccgatcaactgctcgcgaagggcaagcacgtcgtcgtgatcggcggcggcgacacgggttcggattgcgtcggcacgtcgaaccgccacggcgcgaagcacgtcacgcagttcgagctgctgccgcagccgcccgaggcggagaacaagccgctcgtgtggccgtactggccgatcaagctgcgcacgtcgtcgtcgcacgaggaaggctgcgagcgcgactgggcggtggcgacgaaacgtttcgaaggcaggaacagcaaggtcgagaagctgatcgcggcgcgcgtcgcgtgggtcgacggcaagatgcaggaagtgccggattccgagttcgagatcaaggccgacctcgtgctgctcgcgatgggtttcacgcagccggccgcgcccgtgctcgaggcgttcggcgtcgcgaaggacgcgcgcggcaacgcgcgcgcgggcaccgacggcgatcgcgcgtactacacgtcggtcgacaaggtgttcgccgcaggcgacatgcgccgcggccagtcgctcgtcgtctgggcgatccgcgaaggccgccagtgcgcgcgctcggtcgacgcgtacctgatgggcagctctgagttgccgcgc

SEQ ID NO: 14579 - DNA, 1239 bp, Burkholderia mallei
atgggctatcaacagggtttgagcggtttggcgggcgcgtcgagcgacctcgacgtgatcggcaacaacatcgcgaacgcgaacacggtgggcttcaagggcagcaccgcgcagttttccgacatgtatgcgaattcggtcgcatcggccgtcaacaatccgatcggcatcggcacgatgctcgcatcggtgcagcagcagttcagccagggcacgatcacctcgagcacgtcgtcgctgaacgtcgcgatcaacggcaacggcttcttccagatgtcgaacaacggcgtgaccacgtactcgcgcgacggcacgttccagcgcgacaagaacggctacatcgtcaattcgcagggcctgaacctgatgggctacgcggcgaacgcgaacggcgtgatcaacaccgcggcgaccgtgccgctgcaggcgccgacgaccaacatcgcgcccaccgcgacgaccaagatcaccggccagttcaacctgaactcgcaggacgcggtgcccgcgacgacgccgttcaactacaccgatccgacgagctacaactacacgacgtcggtgcaggtgttcgacacgctcggcggctcgcagaacgtgaacctgtacttcgtgaagagcgcgacgagcggccagtgggaagcgtatgcgggcccggccggcaagacgccgaccgatctcggctcggtcaagttcagcaccgcgggcacgatcacgggcacgtcgacgcccgccggcgtgccgacgacgaacgtcggccagttctcgttctcgatcccgacgacgacgggcgcggcgaacccgcagaacctgacgctcgacctcacgggcacgacgcagtacggcggcaagaacggcatcaacaatctcgcgcaggacggcttcgcgagcggcgtgctgacgacgttctcgatcggcgcggacggcaaggtcaccggcaactactcgaacggccagacctccacgctcggccagatcgtgctcgcgaacttcaacaacccgaacggcctcgtgaacgtcggcaacaaccagtacgtcgagtccgccgcgtcgggcgtgccgcagatctccgcgcccggcagcacgaaccacggcacgctgcagggcagcgcgctcgagaactcgaacgtcgacctgacgagccagctcgtgaagctgatcaccgcgcagcgcaactaccaggcgaacgcgcagacgatcaagacgcagcagaccgtcgaccagacgctcatcaacctg

SEQ ID NO: 14580 - DNA, 1584 bp, Burkholderia mallei
atgaatccccttctgtccgccgcggcgagcgaagagctcggtcgcacccggcatctgggcgtcgcgctgctcgtcgccctcctcgccgccggcgtcgcgtacgtgttcgttcacctgttcgcggatctcgcgcccgtcggcccacgctcggcgtttccgtatctgctgctcggcgtcgcgctcgcgatcgcgctcggcttcgagttcgtcaacggcttccacgacaccgcgaacgccgtggcgaccgtgatctacacgcattcgctgacgccgaacgtcgcggtcatctggtcgggcctctggaattttctcggcgtgatggcgtcgacgggcgcggtcgcgttcggcatcctgcaactgctgcccgtcgagctgatcctgcaagtcggccacggcgcgggcttcgcgatggtgttcgcgctgctgatcgcggcgatcgcgtggaatctcgcgacctggtacttcggcctgccttcgtcgagctcgcacacgctgatcggctcgatcatcggcgtcgggctcgcgaatcagctgatgcacgggccgtccggcacgagcggcgtcgattgggcgcaggcggcgggcgtcggccaatcgctgctgctctcgccgctcgtcggcttcctgtgcgcggccctgctgctcgccgcgctgaaggcgctcgtgcgcgtgcccgcgctctaccgcgagccgcagacgaacgagccgccgccgttctgggtccgctgcctgctgatcctgacctgcaccggcgtgtcgttcgcgcacggctcgaacgacgggcagaaaggcatggggctcatcatgctgatcctgatcggcaccgtgccgaccgcatacgcgctcaacaaggcggtcacgcccggcgagacgcaaacgttcatcgccgtcgcacaccgcgcgtccgaaacgctcgcccgctacgcgggcgccgcgcagccgtcgccgaacccgcgcgccgatgtcgaggcttacgtgcagtcgcgccgcctgagcgacgcgacgctgcccgcggttcgccggttgtcggacgcgctcgcggccgaagtcggcgcgacgggctcgatcgcgaaagtgcccgaggggcaggcggacaacgtgcgcaacacgatgtatctggtgtccgaagccctgcgcctgatggagaaaaccggccggccggcgttctcgccggcggatcgcctcgcgctcgacgactaccgcaggcagctcgaccacgcgaccaaattcattccgacctgggtgaaggtcgcggtggcgatcgcgctcggcctcggcacgatggtcggctggcggcgcatcgtcgtgaccgtcggcgagaagatcggcaagcagcatctgacctatgggcaaggcgcgtcggcggaagtcgtcgcgatgctcacgatcggcgcggccgatgcgtacgggctgccggtgtcgacgacgcacgtgctgtcttccggcgtcgcgggcacgatggccgcgaacggctccgggctgcaatggagcacggtgcgcagcctcgtgctcgcgtgggtgttgacgctgcccgcgtcgatcgtgctcgcgggcgcgctctattgggctttccacgcgctgacc

SEQ ID NO: 14581 - DNA, 3945 bp, Burkholderia mallei
ttgccggatgcggcgcgctgcgaccagcggccgcacccggttcgcattgcccgagggcgcgccgcgccctctagttctttcgaactagttcttctcccgcccgtttcccgctccatcggcgaatgggcgcgcgagcgcgcgcgccgtaatctcggactgtcccctgacacaagcattcgcagcaccccagggcgaccgcggatgcccttggagaaacacacgatgagtcactttctggatcggctgaagttcatgtcgcgcgtgaaatccacgttctccgacggccacggcgccgtcgtcgacgaggaccgacgctgggaaaacggctaccgcagccgctggcagcacgacaagatcgtccgttcgacgcacggcgtgaactgcaccggctcctgttcgtggaaggtctatgtcaagaacggcctcatcacgtgggaaacccagcagaccgactacccgcgcacgcgcgccgacctgccgaaccacgagccgcgcggctgcccgcgcggcgcgtcgtacagctggtacgtctactccgcgcagcgcgtgaagtacccgatgatccgcggccgcctgatgcaaatgtggcgcgaggcacgcaagacgatggacccgatcgccgcgtgggaatcgatcagccagaatccggagaaggcgcgccgctacaagagcgtgcgcggcctgggcggcttcgtgcgcgcggactggaacaccgcgaccgagatcatcgccgccgcgaacgcttacacgatcaagcgctacgggccggaccgcgtcgtcggcttctcgccgatccccgcgatgtcgatggtgtcgtacgcggccggcgcgcgctatctgagcctcatcggcggcgcgtgcctgtcgttctacgactggtactgcgacctgccgcccgcgagcccgcaggtgtggggcgagcagaccgacgtgcccgaatcggccgactggtacaactcgagctacctgctcgtctggggctcgaacgtgccgcaaacgcgcacgcccgatgcgcacttctacaccgaggtgcgctacaagggcacgaagacggtcgcgatctcgtccgactacggcgagatggtgaaattcggcgacatctggctcgcgccgaagcaaggcaccgacgccgcgctcgcgctggcgatgggtcacgtcgtgctgaaggagtttcacgcgtcgaaccagtccacgtatttccgcgactacgtgaagcagtacaccgacatgccgatgctcgtgctgctgcgcgagcgcgacggcgcgctcgtgcccgaccatttcctgcgcgcgtcgcatctggccgcttcgctgagcgaagcgaaccatccggaatggaagacgctcgcgatcgacgccgcgacgggcgacatcgtcgcgccgaacggctcgatcggctttcgctggggcgaggccgcgcacaacggcggcgagaaagtcggccgctggaacctcgaaatgaaggacggcggcagcggccgcgcgatcgatccgcggctctcgctcgtcgatgcgcacgacgaaatcgtcgacgtcggctttccatacttcggcggcgagcacgaagcggtgctcgcgcgccgcgtgcccgcgaagcgcgtcgcgctcgccgacggcacgagcgcgctcgtcgcgaccgtctacgatctgcagatggcgaactacggcgtcgatcagggcctcggcggcccgaacgtcgcggcgagctacgacgacgacatcccctacacgcccgcgtggcaggaaaagcacacgggcgtcgcgcgccatctcgtgatccaggtcgcgcgcgagttcgccgacaacgcggaccgcacgcgcggcaagagcatggtgatcgtcggcgcggcgctcaaccactggtatcacaacgacatgatctaccgcggcatcatcaacctgttgatgatgtgcggctgcatcggccagagcggcggcggctgggcgcactacgtcggccaggagaagctgcgcccgcaattcggctgggcgcccctcgcgttcgcgctcgactggtcgcgcccgccgcgtcagatgaacggcacgtcgttcttctacaaccacacgagccagtggcgccacgagaagctcgcggtgggcgagatcctcgggccgaccgccgatgcgtcgaagtacgcaggcatgacactgctcgacctgaacgcgaaatccgagcgcatgggctggctgccgtccgcgccgcagctcggcaggaatccgctcgacgtcgtcgatgaagccgagcgcgcgggcaaggagcccgtcgcgtacgcggtcgagatgctcaagagcgacaagctcgcgttcgcgtgcgacgaccccgacaatcccgcgaacttcccgcgcaacatgttcgtgtggcgctcgaacattctcggcagctcgggcaagggccacgagtatttcctcaagtacctgctcggcacgcagaacgccctcttcagcgacgaggcggacgcgctcaagccgtccgaagtgcaggtgcgcgacgcggccgaaggcaagctcgatctgctcgccgtgctcgacttccggatgagcacgacgtgcctgtacggcgacatcgtgctgcccacggccacctggtacgagaaggacgacctcaacacgtcggacatgcacccgttcatccacccgctgtccgaagccgtgcagccgctgtgggaaagcaagaccgactgggagatctacaagacgatcgcgaagaagttcagcgagctcgccggcccgtatctcggcacgcggcgcgacctcgtgtgcacgccgctgctgcacgacacgccgggcgagctcggccagccgttcgagccgaaggactggcgccgcggcgaatgcgatctgattcccggcaagaccgcgccgtcgatgacggtggtcgagcgcaactacgccgacatctacaagaagttcacgtcgatcggcccgctgctcgacaagctcggcaacggcggcaaggggatcaactggaacaccgagcacgaggtgaaggagatcggcgcgctgtccgacacggtcgccgagcccggcgtgagccgcggccgcccgcgcctggacaccgcgatcgacgcggccgagatgatcctcacgttcgcgccggagacgaacggccacgtcgcggtgaaggcgtgggacgcgctctcgaagatcacgggccgcgaccacacgcacctggcggtgggccgcgagcacgacaagatccgctttcgcgacgtgcaggcgcagccgcgcaagatcatctccgcgccgacatggtcgggcctcgaatcggaggaagtgagctacaacgccggctacacgaacgtccacgagctgattccctggcgcacgctgacgggccgccagcagttctaccaggaccaccgctggatgctcgacttcggcgaaggctcgtgcgcgtaccgcccggcgatcgacacgaagaccgtcgcgccgctgcacaagcggatgccgaacggccagccggagctcgtgctgaactggatcacgccgcaccagaaatggggcattcactcgacctactcggacaacctgcggatgctcacgctctcgcgcggcggcccgcacgtgtggatctcggaggccgaggcgcagcaggcgggcatccgcgacaacgactgggtcgaggtgttcaacgtgaacggcacgctgaccgcgcgcgcggtggtgtcgcagcgcgtgccggccggcatgtgcctgatgtaccacgcgcaggagaagatcgtgaacgtgccgggcgcgcagacgagcggcaagcgcggcgggattcacaactcggtcacgcgcaccgtgacgaagcccacgcacatgatcggcggctacgcgcagcaggcgtacggcttcaactactacggcaccgtcggcagcaaccgcgacgaatacgtgatcgtgcgcaagatgaaccgggtggactggctcgaagagccgcttaacgaaggagcagaacaa

SEQ ID NO: 14582 - DNA, 336 bp, Burkholderia mallei
gtgcgatactgcctggccttggacctgaaggacgacccggatgcgatcgcgcgctacgaagcgcatcacgagcggatctggccggaggtcgccgcgtatcttcgcgcgcacggcgtcgtggcgatggagatctaccggctcggcacgcggatgacgatggtgatggataccgacgacgcttgcttcgacgcggcgcgtttcgatgccgacgcgcgtgccgacgcgaagatcgtcgaatgggaggcgctgatgggcgcgttccagcagccgacgccgtggacgcccgccggcgtcaaatggacgccgatgacgcggattttcgatctgtcgaaacag

SEQ ID NO: 14583 - DNA, 1083 bp, Burkholderia mallei
atggcattgacgcttgaggcgctcgccgcgcggttcggcggcgagatcgtcggcgacggccgctgcgaggtgggcgctctcgcgccgctcgatcaggcgggcccgcggcagctcgcgttcctcgccaatccgaagtatctggcgcaggtcgagacgacgggcgccggcgcggtgctgatcgcgccgggcgatctcgagaagctcggcgcggccgcgcacggccgcaatttcatcgtcacgccgaatccctacgcctatttcgcgcgggtcgcgcagatgttcatcgatctcgccgcgccgccgcgcgcggccggcgtgcatccgagcgcgacgatcgatccggccgcgcaggtcgccgcgagcgcggtgatcggcccgcacgtgacggtcgaggcgggcgccgtgatcggcgagcgcgcgcagctcgacgcgaacgtgttcgtcgmccgcggcacgcggatcggcgacgattcgcacctgtacccgaacgtcgcgatctatcacggctgcacgctcgggccgcgcgcgatcgtgcactcgggcgccgtgatcggctccgacggcttcggcttcgcgccggatttcgtcggcgaaggcgacgcgcgcaccggcgcgtgggtcaagattccgcaggtcggcggcgtgaaggtcggccccgacgtcgagatcggcgcgaacacgacgatcgaccgcggcgcgatggcggacaccgtcatcgacgaatgcgtgaagatcgacaatctcgtgcagatcggccacaactgccggatcggcgcctacacggtgatcgccggctgcgcgggcatcgcgggcagcacgacgatcggcaagcactgcatgatcggcggcgcggtcggcatcgccgggcacgtgacgctcggcgattacgtgatcgttaccgcgaagtcgggcgtgtcgaaatcgctgccgaaggcgggcatctatacgagcgcgtttccggccgtcgagcacggcgactggaaccggagcgcggcgctcgtgcgcaacctggacaagctgcgcgatcggatcaaggcgctcgaaaccgcgctggtcgcgcgggaaggcgacgccggcggcgca

SEQ ID NO: 14584 - DNA, 594 bp, Burkholderia mallei
gtgagcgaaagcatagcacgcgccccggcgccgaatccgaagcgcacgctgcgcgaaacgcttgctcggcgccgcctcgacgcgcagcgcgcgccgcgcgcgcacgacgcgctcgcgcagcgcgtgctcgcgattctcgcgcaatgcgcgccgcgcacggtcggcttctactggccgctgccgggcgaattcgacgcgcgcgatgcgatcgcgtcgtggctcgccggcgacgcgagccggcaggccgcgctgcccgtgatcggcaagccccgcacgccgctcgaattccatgcgtggacgcccgatgcgccgatgcgcgagggccgccaccggattgccgagcccgcggcgggcgcgcggctcgtgccggagctgctgctgattccgtgcgtcggcttcgatcacggctgcttccggctcggctacggcggcggctattacgaccgcacgctcgccgcatggccgggcgcgacgccgcccgtgacggtgggcgtcgcatacgacgcgtgcggcgtgcgcgagctgccgcgcgaagcgcacgatctgccgctcgactggatcgtcaccgagacgcggctctatcggtcggacgat

SEQ ID NO: 14585 - DNA, 1395 bp, Burkholderia mallei
atggaatcactgcgcatctacaacacgcttgcgcgtgacaagcaagacttcgtgccgcggcagcccggcgaagtgcggatgtacgtctgcgggatcaccgtctacgactattgccacatcggccatgcgcggatggtggtcgtgttcgacatcgtccagcgctggttgcgcgcgcgcggctatcgcgtgacatacgtgcgcaacatcaccgacatcgacgacaagatcatccgccgcgcggtcgagaacggcgagacgatccagtcgctcacgcgccgcttcaccgacgcgatgaacgcggatttcgacgcgctcggcgtcgagcggccggacctcgagccgcgcgcgaccgagttcatcccgcagatgctcgggatgatcgagaagctcgaggcgaacggttacgcgtatcaggcgaaggacggcgacgtcaactattcggtgcgcaagttcgcgaactacggcaggctctccggcaagtcactcgaggatttgcgcgcgggcgagcgcgtcgccgcgaacgatgcgaaggaggatccgctcgacttcgtgctgtggaagcgcgcgaagccgcaggagccggcgggcgcgtcgtgggaatcgaagtacggcgcgggccgcccgggctggcacatcgaatgttcggcgatgggctgcacgctgctcggcgcacacttcgacattcacggcggcggccaggacctgcagttcccgcatcacgagaacgagatcgcgcaaagcgagggtgcgaccggacaaactttcgtcaattattggatgcacaacggtttcgtgcaggtcgatagtgagaagatgtcgaagtcgctcggcaacttcttcacgatccgcgaagtgctcgagaagttcgacgccgaggtcgtgcgcttcttcatcgttcgcacgcattaccgttcgccgctcaactacagcgacgttcatctcgacgacgcgcgcgcatcgctcacgcgcctttacacggcattgaaggacgcgacgccggatgcgcagccgctcgactggagcgaggcgcacgcgcagcgtttcgccgccgcgatgaacgacgatttcaacacggcggtcgccgtcgccgtgctgttcgagctcgcgaccgaggtgaaccgcacacgcgagccggcgctcgcgcgccagctcaggctgcttgcgggcctgctcggcctgctcggccgcgagccgcgcgaattcctgcagcacgcggcgggcgccgcgcgcacgggcgcgctcgagccgcatgagatcgaagcgaggatcgccgcgcgcgtcgcggcgaaacaggcgaagaactatgccgaagcggaccggatccgcgcggaattgctcgaagccggaatcgcacttgaagacaaaccgggcggatcgacggagtggcgccgcgta

SEQ ID NO: 14586 - DNA, 1665 bp, Burkholderia mallei
atggcccaatacgttttcacgatgaaccgggtcggcaagatcgtgccgcccaagcgccagatcctgaaggacatctcgctgtcgttcttccccggtgcgaagatcggcgtgctcggtctgaacggctcgggcaagtcgacgctgatcaagatcatggcgggcatcgacaaggacatcgaaggcgaagccacgccgatgccgaacctgaacatcggctacctgccgcaggagccgcagctcgatccgggcaagacggtgcgcgaagccgtcgaggagggcctcggcgacctgttccaggcgaacaagaagctcgaagagatctacgcggcgtacgcggagccggatgccgacttcgacgcgctcgcggccgagcaggcgaagtacgaggcgatcctcgcctcgagcgacggcggcagccccgagcagcagctcgaagtggccgccgacgcgctgcgcctgcccccgtgggacgcgaagatcgagcacctgtcgggcggcgagaagcgccgcgtcgcgctctgcaagctgctgctcgaaaagcccgacatgctgctgctcgacgaaccgaccaaccacctggacgccgaatcggtcgactggctcgagcaattcctcgtgcgcttcccgggcaccgtcgtcgcggtcacgcacgatcgctacttcctcgacaacgcggccgaatggattctcgagctcgaccgcggccacggcattccgtggaaaggcaactacagcagctggctcgaccagaaggaagaacgcctgaagcaggaagaagcgtccgaatcggcgcgccagaaggcgatcaagaaggaactggagtgggtgcgccagaacccgaagggccgtcaggcgaagtcgaaggcgcgtatcgcgcgcttcgaggaactgaacagccaggaataccagaagcgcaacgagacgcaggaaatcttcattccggtcggcgaccgcctcggcaatgaagtgatcgagttcaagaacgtcagcaaatcgttcggcgaccgcctgctgatcgacaacctgaacttcaagatcccggccggcgcgatcgtcggcatcatcggcccgaacggcgccggcaagtcgacgctgttcaagatgctgaccggcaaggaacagccggactcgggcgaagtcgtgctggggccgacggtgaagctcgcgtacgtcgaccagagccgcgatgcgctcgacggctcgaagacggtgttcgaggaaatctcgggcggcgccgacgtgctgacggtcggccggtacgagacgccgtcgcgcgcgtacatcggccgcttcaacttcaagggcggcgaccagcagaagatcgtcggcaacctgtccggcggcgaacgcggccgcctgcacctcgcgaagacgctgatctccggcggcaacgtgctgctgctcgacgagccgtcgaacgacctcgacgtcgaaacgctgcgcgcgctggaggacgcgctgctcgagttcgcgggctcggtgatggtgatctcgcacgaccgctggttcctcgaccggatcgcgacgcacatcctcgcgttcgaaggcgattcgcaagtcacgttcttcgacggcaactaccaggagtacgaggccgacaagcgcgcgcgcctcggcgaggaggcggcgaagccgaagcgtctgcgctacaagccgatcagccgg

SEQ ID NO: 14587 - DNA, 807 bp, Burkholderia mallei
atgttcgtcgattcacactgtcacatcaatttcgaagggctcgccgagcgtttgccgcaggtgctggagaacatgcgcgagcacggcgtcacgcatgcgctctgcgtctcggtcgatctggagacgctgcccgccgtgctcgctatcgcgcgcgatcacgacaacgttttcgcgtcggtcggcgtgcatccggatcacgaggacgcgagggagccgacggtggccgagctcgtcgagctcgccgcgcatccgaaggtcgtcgcgatcggcgagacgggcctcgactactaccggctcgagggccgctcgatcgccgacatgcaatggcagcgcgagcgctttcgcacgcacatccgcgccgcgcatgcgacaggcaagccgctcatcgtccatacgcgcgcgtcgtcggaggacacgctgcggatcatggccgaggagcgcgcgagcgtgccgggcggcgtgatgcactgcttcaccgagccgtggcccgtcgccgaggcggcgctggcgcagaacttccatatctcgctgtcgggcatcgtcacgttcaagagcgcggccgacgtgcaggaggtcgcgcggcgcgtgccgctcgagcggctgctgatcgagaccgattcgccgtacctcgcgcccgtgccgtatcgcggcaagcggaatgaacctgcgtacgtgagttatgtcggacgctttatcgcggcgcaacgcgagatgaccgacgaggcgctcggcgccgcgacgtcgcggaactttttccggctgttcaagatcgcccgcacgggcgaggccagcccagtcaaccagggg

SEQ ID NO: 14588 - DNA, 423 bp, Burkholderia mallei
gtgggaacgtcgatgacgaaaccggcacgcgagctgcgcaagacagatttcgaacagctttccgaattccgctatcagatgcggcgcttcgagcgcttctccgagcgggccgcgcaaagcgagggcatcacgccgctgcaatacctgctgctgctgcacatcaagggctatccggagcgcgactgggcaacggtgggcgagctcgccgagcggctgcaggcgcagcatcacggcgtcgtcgcgctggtgacgcgctgcgaagcgctcggcctcgtgcggcgcaggccgagcgacgccgaccgccggcaagtcaaggtgcatctgcaggcggccggcgagcgcgtgctcgcccggctcgccgagctgcaccgcgccgagctgaaatcgctgcgcggcgcattccaggtgccgcagatcgattac

SEQ ID NO: 14589 - DNA, 906 bp, Burkholderia mallei
atggcccgccgcgcgctcgatggcgtgctgctgctcgacaagccggtcggcctgtcgagcaacgacgcgctgatgcgcgcgaagcgcctgtatcaggcgaagaaggcgggccacacgggcacgctcgatccgctcgcgtcgggactgctgccgctttgcttcggcgaagcgacgaagttctcgcaggacctgctcgaagccgacaagacctatgaagcgacgatgcggctcggcgtgcgcacgacgacgggcgacgccgaaggcgacgtgctcgacacgcgcgacgtgagctgcgacgaagcggcggtccgcgcggcgctcgcgcgcttcgtcggcgagatcgtgcaagtgccgccgatgtactcggcgctcaagcgcgacggcaagccgctttacgaatacgcgcgcgccggccagacggtcgagcgcgaagggcgcaccgtgacgatccgcgcgctcgcgctcgtgtcgtgcgcgttgcccgacgtcacgtttcgcgtgacgtgcagcaagggcacgtacgtgcgcacgctcgccgaggatatcggcgaagcgctcggttgcggcgcgcatctgacgatgttgcggcgcaccggggtcggcccgctgacgctcgagcacgcggtgacgctcgatgcgctcgacgccgcgacgcaggacgagcgcgacgcgcggctcgcgcccgtcgatgcattgctgtcgacgtttccgtgcgtgaagctcgatgcggcgctcgcgacgcgctttctgcacggccagcggctgaagctctccgagcttgcggcgcggcccgacgcggccgaaggtgggcgcgtgcgcgtctacgatgccgatgaccggctgctcggcgtcgcgcgcgcgtcggaaggcgtgctcgcgccggagcggctcgtcgtgacgggcgcg

SEQ ID NO: 14590 - DNA, 1407 bp, Burkholderia mallei
atgtcctctgaattgccggcaatcagcgtccaagacgtcagcaagcgctttcgcgtatttgccaagccggcagaccgtctgaaggccgcagttcggcatcgcatcggcggtctcgcgaagttggtgcccgctcgtttgctcggaacggaaggtgcaagcgagtttcatgcgctgcagcatgtgtcgtttcacgtacaaaagggcgagacgatcggaatcatcggccgcaacggctcgggaaagtcgacgttgttgcagatcatctgcgggacgctcacgccgtcgggtggccgggttgcgatcaacgggcgcgtcgccgcgctgctcgaactcggagcgggcttcaatccggagttcactggccgcgaaaacgtatacatgaacgcggcgttgctgggcctctcgaaagcccagatcgaggagcggctcgacgccatcttcgcttttgccgatattggcggcttcgtggatcaaccggtgaagacctattcgagcggcatgtacgtgcggcttgcttttgccgtcattgcgcacgtcgacgccgacgtgctcgtgatcgacgaagcgttggccgtcggggacgcattcttcacgcaaaagtgcatgcgttttctgcgcgcgttcatggagcggggcaccgttttatttgtcagccacgatacgaacgcggtggtcaatctctgtacccgcgtcgtatggcttgacaaggggcgcgttcgcgaaatcggtccggcaaaggacgtttgcgactcgtatcttgaggctttctacgaggagcagcattgcgcatcggggcgaagcgttcgcgcgcttgagcgcagcagtgtcgtgcgcgcaatagccgaaggcgatatgcgcgaccagcgcgcattgctcatcaacgcgtcgaagctgcgcaacgacgtggagttgttccagttcactgccgacgcgaagaatttcggtcttggcggcgcatcgattgagcatgtcggcatcgaggatggcacgggggcgccgctgaattgggtagtgggaggcgagatcgtttgcatccgcatcgccgtcaaagccctgcagaacctggagcgtgccatcgtcggattcattgtccgggatcggctcgggcaaaatctgtttggcgacaacacgtatctcacgaccctcaacgagccgttcgctgtcgcggcgggcgaaagtttttcggtccgattcgggttcagaatgccggtcttgccggtaggcgattattcggtgacggttgcagtcgccgacggttcacaaagcgaccacgtgatccaccaatggctgcacgatgcggtgttgttgaagtcgcattcgacgagtgtcagtacaggattaataggtattccaatgcatgagatcgtgcttgagcgggatacgctgaacgaagttggggcggcgcaa

SEQ ID NO: 14591 - DNA, 243 bp, Burkholderia mallei
atggcagttcgacaagccagccggcaatccggcgggacgaaggcgcgcatcctcgatgcggccgaggatcttttcatcgagcatggcttcgaagcgatgtcgatgcggcaaatcacatcgcgtgcagcggtgaatcttgccgcggtcaactatcatttcggcagcaaggaagcgctcatccatgcgatgctgtcgcggcggctcgatcagctgaacgaggagcgcctgcgcatcctcgatcgg

SEQ ID NO: 14592 - DNA, 909 bp, Burkholderia mallei
atggacgctgctgccccgacttcgccccgctcggccgacgcttcccgcgccgcccctcagcccacgcgcgtgcgtaccgccgacaggctcgagctcgcgtgctaccgttggccgtctaccgcgccttcgtgcgccgcgccgcgcgcgaccgtcgcgctcgtgcacgggctcgccgagcacgcgggacgctatcaggcgttcgccgagcggctgaacgcggcgggcatcgaagtcgtcgcgatcgatctgcgcggccacgggcgctcgcccggcgaacgcgcatgggccgagcgcttcgaccggtatctggacgacgcggacgcgctcgtcgcgagcgccgcgcgcgagaacacgccgctcttcctgatggggcacagcatgggcggcgcaatcgccgcgctctatgcgatcgagcgcgcggccgcgcgccacgcgaacctggcgggcctgatcctgtcgagccccgcgctcgcgccggggcgcgacgtgccgcaatggatgctcgcgatgagccgcttcatcagccgcgtgtggcctcgctttccggcgctcaagatcgacgccgcattgctgtcgcgcgatccggccgtggtcgccgcgaatcgcgccgatccgctcgtccatcacggctcggtgccggcgcgcacgggcgccgagattctcgacgcgatgcgacgaatcgcggccggccgcgcggcgctgcgcatccccgtcctcgtctatcacggcaccgccgacaagctgaccgagcccgacggcagccgcgacttcggcgcgcacgtcggctcgcccgatcgcacgctcacgctatacgaaggcaactatcacgagacgatgaacgatctggaacgcgagcgggtgatcggcgcgctgatcgactggatcgccgcgcgcgtgccggctcgcggt

SEQ ID NO: 14593 - DNA, 1158 bp, Burkholderia mallei
ttgtctattccgctgctccagcaagtccgcgttggcgcgtacatcatgcgccagcacctgtccggcaacaaacgctatccgctcgcgctgatgctcgagcccctcttccgctgcaacctcgcgtgcaacggctgcggcaagatcgactatccggatccgattctgaaccagcgcctgtccgtcgaggaatgcctgcaggccgtcgacgagtgcggcgcgcccgtggtgtcgatcgcgggcggcgagccgctgctgcacaaggaaatgccggaaatcgtcaagggcatcatgaagcgcaagaagttcgtctacctgtgcacgaacgcgctgctgatggaaaagaagatggacgattacgcgccgagcccgtacttcgtctggtcggtccatctcgacggcgaccgggagatgcacgatcactcggtgtcgcaggaaggcgtgtacgacaaggccgtcgcggcgatccgcgaagcgaagcgccgcggcttccgcgtgaacatcaactgcacgctgttcaacgatgcgctccccgaacgcgtcgcgaagttcttcgatacgctggggccgatcggcgtcgacggcatcaccgtgtcgccgggctacgcgtacgagcgcgcgccggatcagcagcacttcctgaaccgcgacaagacgaagaacctgttccgcgaagtcttcaagcgcggcgaaggcggcaagcgctggtcgttcagccagtcgtcgctgttcctcgatttcctcgccggcaaccagacgtacaagtgcacgccgtggggcaacccggcgcgcacggtgttcggctggcagaagccgtgctacctggtcggcgaaggttacgtgaagaccttcaaggagctgatggaatcgaccgactgggacaactacggcgtcggcaactacgaaaagtgtgcggactgcatggtccactgcggcttcgaggccaccgccgtgatggatacgatcgcgcatccgctgaaggcgctgaaggtgtcgatgagcggcatccggaccgaaggcgcgttcgcgccggatattccgatcgacaaccagcgtccggccgagtatgtgttctcgcgccacgtggaaatcaagctcgaggagatccagcgcgcgggcaagggcaagctgcagaaggcgccgaagcccgccgcgacggcc

SEQ ID NO: 14594 - DNA, 363 bp, Burkholderia mallei
atggctcgtatcgcaggggttaacatcccgaatcaccagcatactgaaatcggcctgacggcgattttcggtatcggccgcacgcgcgcgcgcagcatctgcgtggcgtcgggtgtggcgttttcgaagaaggtcaaggacctgaccgacgcagacctcgaaaagctgcgtgaagaagtgggcaagtttgtcgtcgaaggcgatctgcgccgtgaagtgacgatgaacatcaagcgcctgatggatctcggctgctaccgcggcgtccgccatcgcaagggtctgcccctgcgcggccagcgtacgcgtacgaacgcccgcacccgcaagggtccgcgtcgcgcagcgcaagcgctgaagaaa

SEQ ID NO: 14595 - DNA, 1308 bp, Burkholderia mallei
atgtccgacctgttygcagtcgaaccgcgccggccgctcgccgaggcgctgcgcccgaagacgctcgccgacgtgatcgggcagacgcatcttctcggcgaaggcaagccgctcaggctcgcgttcgaatcgggcaagccgcattcgatgatcctctgggggccgcccggcgtcggcaagacgacgctcgcgcgcctgaccgcgctcgcgttcgattgcgagttcatcgcgctctcggcggtgctgggcggcgtgaaggacatccgcgaggcgatggagcaggcgcgcgacacgctgaaccgcaccggccgccacacgatcctgttcgtcgacgaaatccatcgcttcaacaaggcgcagcaggacgcgctgctgccgttcgtcgaatcggggctcgtcacgttcatcggcgcgacgaccgagaacccgagcttcgaggtgaattcggcgctgctgtcgcgcgcgcaggtgtacgtgctgaagtcgctcgcggaagacgagctgcgccagttgctcaagcgcgcgcaggacgtggcgctcggcgggctcgcgttcgacgacaaggcggtcgacacgctcgtcggctacgcggacggcgacgcgcggcgcttcctgaacctgctcgagcaggcgcagacggcggcttcgtccgcgggcgtgacgacgatcgacgcggcgttcgtcgagagcgcgatgacgatgaacgcgcgccgcttcgacaagggcggcgacaacttctatgaccagatctccgcgctgcacaagtcggtgcgcggctcgagcccggacggcgcgctgtactggctgtgccggatgctcgacggcggcgcggacccgaaatacctcgcgcggcgcgtcgtgcgcatggcgtgggaagacatcggcctggccgatccgcgcgcgatgcagatcgcgaacgatgcggcgcagacctacgaacggctcggctcgccggagggcgagctcgcgctcgcgcaggcggtgctctatctcgcgtgcgcggcgaagagcaacgccggctacaacgcgtacaacgaggcgatggcgttcgtgcggcaggacaagtcgcgcgaggtgccggtgcatttgcgcaacgcgccgacgaagctgatgaaggagctcggctacggccacgcgtaccgttacgcgcacgacgagccgaacgcctatgcggcgggcgagacgtacttgccggacggcatgcgcgagccgcgctggtacaggccggtgccgcgcgggctcgagacgaagatcgccgacaagcttgcgtggctgcgcgagctcgaccgcgacgcgggcaagaacgac

SEQ ID NO: 14596 - DNA, 2574 bp, Burkholderia mallei
atgagcgcatccgtcgccgagccgcctcccgcgctgtcgcgcaaagccgaattcaaggccgcgaaggccgagctgctcgcgcgcttcaagagcgcgaaccacgtcacgccgctgatgcacgcgctgtcgcgcgcgaccgacgacgcgctgcgcagcctgtggcaggaatgcgggctgcccgcgacgctcgcgctcgtcgcggtcggcggcttcgggcgcggcgagctgtcgccgcactcggacgtcgacatcctcgtgctgctgcccgatgcgcacgcgagcgagctcgacgagcgcatcgagcgcttcatcggcatggcgtgggatctcgggctcgagatcggcagcagcgtgcgcacggtcgaccagtgcatcgaggaagcatcgcacgacgtgaccgtgcagacgtcgctgctcgaggcgcgtcgcatcgtcggcagcacggcgctcttcgagcgcttcatgttgcgctaccgcgaggcgctcgacgcgcgcgcgttcttccaggcgaaggtgctcgaaatgcgccagcgccacgcgaagttccagaacacgccgtacagcctcgagccgaacgtgaaggaaagccccggcggcctgcgcgatctgcagacgatcctctggatcgcgcgcgcggcgggcttcggcagcagctggcgcgagctcgacacgcgcgggctcatcaccgatcgcgaagcgcgcgagctgcgccgcaacgaaggcttcctgaaaacgctgcgcgcgcggctgcacgtgatcgccgggcggcgccaggacatcctcgtgttcgatctgcagacgcaggcggccgagagcttcggctaccagccgacgtccgcgaagcgcgcgagcgagcagctgatgcggcgttactactgggccgcgaaggcggtcacgcagctcgcgacgatcctgatccagaacatcgaggcgcagctcttcccggcaacgagcggcgtcacgcgcgtgctgtcgcccgggcgcttcgtcgagaagcagggcatgctcgagatcgccgcggacgacgtgttcgagcgccacccggacgcgatcctcgaagcgttcctgctgtacgaggcgacgcgcggcgtgaagggcctgtccgcacgcacgctgcgcgcgctctacaactcgcgcgacgtaatgaacaacgcgtggcggcgcgatccgcgcaaccgccatacgttcatgcagatcctgcagcagccggaaggcatcacgcacgcgttccggctgatgaaccagacgagcgtgctcggccgctatctgctgaacttccggcgaatcgtcggccagatgcagcacgacctgtaccatgtgtacacggtcgatcagcatatcctgatggtgctgcgcaacatccgccgcttcgcggtggccgagcacgcgcacgaatatccgttctgcagccagctgatcgtgaatttcgagcggccctgggtgctgtacgtcgccgccctcttccacgacatcgcgaaaggccgcggcggcgatcactcggcgctcgggatggccgacgcgcggcgattctgccgagagcacgggatcgagggcgacgacgcggcgctcgtcgtctggctcgtccagcatcacctgacgatgagccaggtcgcgcagaagcaggatacgagcgacccggtggtgatcaagcgcttcgcggagctcgtgggcagcgagcggcggctgaccgcgctctatctgctgaccgtcgccgatattcgcggcacgagcccgaaggtgtggaacacgtggaaaggcaagctgctcgaggatctgtatcgcgcgacgctcgccgtgctgggcggcgcgcagcccgacgcgcattcggagctgaagacgcgccaggaagaggcgctcgcgctgctgcgcctggaaaccgtgccgcccgacgcgcaccgcgcgctgtgggaccagctcgacgtcggttacttcctgcgccacgatgcggccgacatcgcgtggcagacccgcgtgctgtaccgccacgtcgcggccgataccgcgatcgtccgcgcgcggccgtcgcccgtcggcgacgcgctgcaagtgctcgtctacgtgaaggaccgctcggacctgttcgccggcatctgcgcgtacttcgaccgcaacgggctgtcggtgctcgacgcacgcgtgaacacgacgcgccacggctatgcgctcgacaatttcatcgtcacgcagaccgagcacgacgtgcaatatcgcgacatcgcgaacctcgtcgagcagcagctcgccgcacgcctcgccgaatcggcgccgctgcccgagccgtcgaaggggcggctctcgcggctgtcgcgcacgttcccgatcacgccgcgcgtcgacctgcgggccgacgagcgcggccagtactacattctgtccgtgtcggcgaacgaccggccgggccttctttattcgatcgcgcgcgtgctggccgagcaccgggtcggcgtccacgcggcgcggatcaatacgctcggcgaacgcgtcgaggacgtcttcatgctcgacggcaccggcttgtccgacaaccgtctgcagatccaagtcgaaaccgagctgctgcgcgcgatcgcagtg

SEQ ID NO: 14597 - DNA, 1401 bp, Burkholderia mallei
atgtctctcttccgcaagaaaaacgtcgaccgcatgatcgccggcgcgcaagcggccggcctcaagaaggcgctcggcgcggtcgacctcacctttctcggcatcggcgcgatcatcggcaccggcatcttcgtgctgagcggcacgggcgccgtgcaggccgggccggcgctgatgctgtcgttcgtgatcgcggcgatcgcgtgcggcctcgccgcgctgtcgtacgccgaattcgcgtcgacgatccccgtcgccggctcgatctacacgtattcgtacgcgactctcggcgagctcgtcgcatggatcatcggctgggacctgatgctcgagtacgggctcgccgcgtccgcggtgtcggtcggctggtccggctacctgcaatcgctgctgcagggcttcggcgtgtcgctgccgacggcgctcaccgccgcgccgggcgcgctgccgggcgtcgtcacgtatttcaacctgcccgcgttcgtcgtgatgctcgtcatcacgacactgctgtcgatcggcatccgcgaatcgacgcgcgtgaacaacatcatggtgttcatcaaggtcgccgtcgtgctgctcgtgatcgcggtcggcgtcttccacgtgacgcccgtgaactggaagccgttcatgccgcacggctggaacggcgtgttcggcgcggcggccgtgatgttcttcgcgttcatcggcttcgacgcggtgtcgtcggccgccgaggaggtgaagaacccgaagcgcgatctgccggtgggcatcatcgcctcgctcggcgtgtgcgcgttcctgtatgtcgcggtcgcggcgatcgcgacgggcatcgtgccgtgggcccagtacgcgaacgtctcgcatccgatctcgtacgcgctgcaggtggcgggcgagaagtgggtggcgggcttcatcgatctcggcgccgtcatcggcatgttgaccgtgatcctcgtgatgagctacggccagacccggatcatcttcgcgatgtcgcgcgacggcctgctgcccgccgcgctctcgcgcgtgcacccgcgcttcgcgacgccgttcctgacgacctggctcgtcggcctgttcttcggcctgatcgccgcgctgattccgctgaacgtgctcgccgagctgatcaacatcggcacgctcgccgcgttctcgatggtgtcgatcgcggtgctcgtgctgcgccgcacgcacccggatctgccgcgcgcgttccgctgcccgggcgtgccgctcgtgccgatcctcgcggtggccgcgtgcctgttcctgatgctgaacctgcagccggtcacgtggatcgcgttcctgacgtggctcgtgatcggcctgttcgtgtacttcgcgtactcgcgcagccgctcgaagctcgcgcacggcgcgcagcagcac

SEQ ID NO: 14598 - DNA, 1353 bp, Bordetella pertussis
gtgtctttcaagcctgtcgttgccctggtcggccgtcccaatgtgggcaagtcgaccctcttcaaccgcctgacgcgctctcgcgcggcgctggtggccgatttctccggcctgacccgcgaccgccactacggcgagggcagggtgggcgacacgcccttcctggtgatcgacacgggcggcttcgaaccggtcgccaaggacggcatcctggccgagatggcgcgccagacgcgccaggccatcgccgaagccgacgtggtggtgttcctggtcgatgcgcgggcgggcgtcaatgcgcacgaccacgagatcgcgcgcctgctgcgcaagtccggccagcagcgcgtgctgctggcggtcaacaaggccgaaggcatgggcgtgggcaatgccaccggcgatttccacgagctgggcctgggcgagccgcatccgatttctgccgcgcacggcgacggcatcgtcgacctgatcgagatcgccttgagcggcctggtcgcgccgccggccgacaccggcgagcagctcgagcaggatgtcgtcgaccaccgcatcaagctggccatcgtcggccggcccaacgtgggcaagtccaccctgatcaatacgctgctgggcgaagagcgcgtgatcgccttcgacatgcccggcaccacgcgcgacgcgatcgagatcgacttcgagcgcgacggcaggaagtacaccctgatcgacaccgccggcctgcgcaagcgcggcaaggtgttcgaggcgatcgagaagttctcggtcatcaagacgctgcaggccatcgaggccagcaacgtggtgctgctgatgatcgacgcgcaggccgaagtgtccgaacaggacgcccacatcgccggcttcgtgctggagaccggccgcgccgtggtggtggccatcaacaagtgggacggcctggacagcgaccagcgcgagcgcatcgaacgggaattccagcgcaagctgcgcttcctcggctttgcgcgcatgcacaccatttcggcgctcaaggggcagggcgtcaagcccttgctgaagtccgtcaacgccgcgcacgcggcggctttcgccaaactgtccacgccgcggctgacgcgcgaattgcaggccgccgtcgagcagcagccgccgccgcgcaagggtattttccggcccaagatgcgctacgcgcaccagggcggacagaacccgcccctgatcgtgatccatggcaacgcgctggacgcggtgcccgattcgtaccgccgctatctggagacgcgctttcgcaatgccttcgacctggccggtacgccgctgcgcatcgagttcaagtcgtcgcgcaacccctacgtccaggaaaac

SEQ ID NO: 14599 - DNA, 1155 bp, Bordetella pertussis
atgcgtaattcccgccccggccgcgcatggcgcggcgccgtcgtgctgacgggcctgctggccctgagcggctgctcgatgttctccagcgacgacgatcgctacaaaccggccgagctcacgcaatatgcgcccggcatgtcggtgcgcaccgcctggacggcctcggtcggcagcggctcgggcctgggcttcgcgcccacggtgctgggcgagtcgatctacgccgccacgcctgacgggtcggtcggcaagttcgacctgctcagcggccgggccatctggaagtcctcggccgacgccaagctgtcggcgggcgccggcagcgacggccagaccaccgcggtggccacgcccgacggcgaggtcatcgccttcgacgatacgggcaagatcaaatggcgcgcccgcgccaccagcgacgtcgccatcccgccggtggtcggctatggggtggtcgtggtgcgcagcggcgattaccgcatccaggccttcaacgccgagaacggcgagcgcatgtggagcatgcagcggccgggtccggcgctggcgctgcgcagcgccgcgcagatggtgctggccgaaggcctggtcatcagcggcctgccgggcggcaagctgctggccatcaacagcgccaccggcaacgtccaatgggaaggcacggtggccacgccgcgcggcgccagtgacctggagcgcctgaccgacgtggtgggcgcgccgcgcatcgccggccgcctgatgtgcgcggtcgcctaccagggccgtatcgtgtgcttcgacgtgtcggcgggcggacgccccatctgggccaaggatttctccagcgccagcggcatggtcatcgacgaccgcttcgcctacgcgcccgaccagggcagcgtggtcagcgccttcgcgctggacagcggcaacaacgtctggaaacaggccgagttgaagaatcgcctgctgaccgcgccggccttgctcggcgaggccgtggcggtgggcgatttcgaaggctatgtccatttcctgtcgcgtagcgacggccgcctgctggcgcggctgtcggtgggcgggggcgccatcgtctcgccgccgcagaccacctcccagggcgtgctggtgcaaaccggcaatggcagcctggtgatggttcgcgccaac

SEQ ID NO: 14600 - DNA, 1320 bp, Bordetella pertussis
atggggctcctcgaggggatttgtcgttatcggggcgcgattctcaagcgcgaagtttaccgtgcgcgcgcggcccggcgccgcgcggggcgcgaccgcgccaagggcgctaaaattgcagctttccagcctggacgcgcccgattcatgtctgcccagatttccccgctcaacgccggcgctgcgccggaatctttcggcatcgcctcggtgcccgagatcattgccgaattgcgggcaggccgcatcgtcatcctggtcgacgaagaagaccgcgagaacgagggcgacctggtcatggccgccgagttcgtcacgcccgaggccatcaatttcatggtcacccacggccgcggcctggtgtgcctgaccctgaccgaagaacgctgccggcagctcgacctgccgttgatggccagccgcaacggcactcgatacggcaccaatttcacgcaatccatcgaggccgccgaaggcgtggagaccggcatttcggccgccgaccgcgcccgcaccatccaggtcgcggtggcgcgcgacgcccagccgtccgatctggtgcagcccggccacatcttcccggtgcgcgcggtgcccggcggcgtgctggtgcgcgccggccacaccgaggccggctgtgacctgaccgccatgggcgggctgaccccggcggccgtgatctgcgaaatcctcaagcccgacggcaccatggcgcgcctgcccgacctggtcgaattcgcgcgcgagcacaagctgaagatcggcaccatcgccgacctgatccagtaccgcagcgagcacgaatccatcatcgcgcgcatgggcgagcggatgatgcagactccctggggcgatttccgctgcatcgcctaccgcgacgacgccacgcgttcgccacatctggcgctggtacacggtaatatcgatcccgagcgcgagacattggtgcgggtgcacgagcccgcctcgctgttcgacgtgctggatacgggcgccagcccgcacagctggagcgtgggccaggcgctgcatgccatcgccgcctcgccggccggcgtgctggtgctgatgaactgccagtcgtccaccgaacacctgtttggccagatcgccaactgggccggccccgccgagcgcgcggccgcccaggaaggcgaccgattcgggctgcgcacctacggcatcggtgcgcagatcctgcgtgatttgaacgtgggccgcatgaaactgctggcccgtccccgcaagatgcccagcatggcgggcttcgccctcaccattacgggttacgattgcgtccctccgaacctacgcaacgac

SEQ ID NO: 14601 - DNA, 519 bp, Bordetella pertussis
atgaatccctacattcttacccccgacctgaacggcgaagggctgcacatcggcatcgtgcgtgcccgtttcaacgaagaaatcggccaggcccaactgcaggcctgcctcgaagagctgggcaagctgggcgtggacgagcgcgacgtgatggtggtcagcgtgccgggcgcgctggagctgggcgtggccctggcgcgcatggccgaaagctatgaattcgacgcgctgatcgccctgggcgcggtcatccgcggcgaaacctatcactttgaagtggtcagcaacgagagcgccgcggccatcagccgtatcgcgctcgaaaccggcatccccgtggccaatggtgtgctgaccgtcgataccgacgagcaggcgcaggcccgtgccgccggcaagggcgccgattgcgcccaggtggccgtggaaatggccaacctggcggcggcgctcgagccggaagaagacgacgaagacgacgaggacgaagattttgacgacgaagaagacgacggccgc

SEQ ID NO: 14602 - DNA, 1302 bp, Bordetella pertussis
gtggtgggcatgacgaagatgacgcaagttttccagaaagtctccgccatccggggcatgaacgacgtgctgcccgggcccagcgcccgctgggaaaaattcgaagagatcgtgcgtggctggctgcgtagctacggttatcgcaatgtgcgcacgccggtgctcgagcacaccaggctgtttgcccggggcatcggcgaagtcacggacatcgtcgaaaaagagatgtacaccttcacggacgcgctcaacggcgactcgctgacgatgcgtcccgagatgaccgccggcatcgtgcgcgccagcatcgaacacaacatgctgtacgaccggccgcaccgggtctacgcgatcggccccgtgttccgccacgagcgtccgcagcgggggcgctaccgccagttccatcagatcgatgtcgaggcgctgggctttgccggccccgatgtcgatgccgaaatgatcgtcatgctggcccggctctggaagctgctgggcctgcaggacgtgcgcctggagctgaactcgctgggccagccggccgagcgcgccgcccaccgcgccgcactgatcgagcatctggagcgccaccaggacgtcctcgacgaggacggccggcgccgcatgtacagcaaccccttgcgggtgctggacaccaagaaccctgccatgcaggaaatggctgatagcgctccgcgcttgttcgatttcctcggagaggcatcgcgcagccatttcgacggcctgtgccagcgcctggccgacgcgggtatcgaataccgcctcaatccgcgcctggtgcgcgggctggattactacaacctgaccgtgttcgagtgggtgaccgatcgcctgggcgcgcaaggcacggtctgcgggggcgggcgctatgacggcctggtcgagctgctgggcggcaagccgacgccggcggtgggcttcgccatcggcatggagcgcctgctcgacctctgggagcaaagcgtcgagatcgaacagccggccgagtgcgaggtctacatcgtgcaccagggcgaggaaggccagcggctggcggcccgggtgggcgaacagctgcgcgacgccggcctggatgtcatcgtgcacgcgggcgcggccggcttcaaggcgcaattcaagcgcgccgacgccagcggcgcgcgtattgcggttattcttggcggcgacgaagtggccagccgcaccgccagcatcaagcacttgcgcgggccggtcggcgccgacgcggcgcagcagcaggtgccgctggcgcagttggccgatgttttgaaatccaagggt

SEQ ID NO: 14603 - DNA, 462 bp, Bordetella pertussis
gtgcaagcccgcgccaacgcgcgcagcgcgcggcgccgcgcgcgcgagttcgcgctgcagggcgtgtacgcgtggctgttgcgcggcggcgagggcacccaggacgccggcgaaatcgacgcccacctgcgcgatgccgaggatttctccgaggccgacgcgcagtggttcaagacgctgctgcacggcgtgctgcgcgaggcgccggtgctgcgtgagcggttcctgccgtacatcgaccggccgctggccgagctgtcgccggtcgagcacggcattctgctgataggcagcttcgagctgatgcaccatgtcgaagtgccgtacaaggttgccatcaacgaggcggtcgaactggccaagtcgttcggcggcaccgacggcttcaagttcgtcaacggcgtgctcgacaagctggcggccgacgtgcgcacggccgaagtccaggcggcgccgcggcgc

SEQ ID NO: 14604 - DNA, 1269 bp, Bordetella pertussis
atgccctgccaggacgcgtcgccgccggacgtcggcgcggcgccgcgccgcgccacgcgcgccgtgcgggtgcagtggggcgggcgcacggtcaccgtgggcggcaatgccagcgtggtcgtgcagtccatgaccaataccgacaccgccgatgcggtggccaccgccatccaggtcaaggaactggcccaggccggctccgagatcgtgcgcattaccgtcaacactcccgaggccgcgcgcgaagtcgccaccatccgcgaacagctcgatcgcatgggcgtcgaggtgccgctggtgggcgatttccactacaacggccacaagctgctgacgcagtttcccgagtgcgcgcaggcgctgtccaagtaccgcatcaacccgggcaacatgggcggcggcaagcaacgcgacgacaatttcgcccagatgatcgaagtggcgtgccgccacgacaagcccgtgcgcatcggcgtgaactggggcagcctcgatcacgagctgatggcgcgcaagatggacgagaacagccggcgcgcgcagccctgggaagcccaggccgtcatacgcgacgccctggtggtgtcggccatcagcaatgcgcgccgcgccgaggagctcggcctgcgctccgacgccatcgtgctgtcgtgcaaggtcagccatgtgcaggacctgatcgccgtctaccgcgacctgtccgcgcgctgcgactatccgctgcacctgggcctgaccgaagccggcatgagcagcaagggcatcgtcgcttccacggcggcgctggcggtgctgctgcaagagggcatcggcgataccatccgcatctcgctcacgcccgaaccgggcggagaccggacccgcgaagtcatcgtggcgcaggaaatcctgcagaccatgggcttgcgcgcgtttacgcccatggtcgtggcgtgtccgggctgtgggcgtaccagcagcaccttcttccaggaactggccgacagcatccagtcgttcctgcgccggcagatgcccctgtggcgcacgcgctaccccggcgtcgagagcatgaatgtcgcggtgatgggctgtgtggtcaacggaccgggcgagagccggcacgccgacatcggcatcagcctgcccggcacgggcgaggtgcccgccgcgccggttttcatcgacggcgagcgcacggtcacgctcaagggcgaccatatcgccgaagaattccaggccatcgtcgaagactacgtcgcgcgccgctacggcgccggcatcactcat

SEQ ID NO: 14605 - DNA, 1014 bp, Bordetella pertussis
ttgctggcaggagtcgccttggcgtccgagttcgacctgatcgcgcggtatttcaccaggccggctcccgatggcgtgctcggcgtgggcgatgactgcgcgctgtttcccgtaccgcccggccagcaagtggccaccagcaccgacctgctgatcgaagggcggcacttctttcccgacgtcgatccgcaggcgctcggccacaaggcgctggccgtcaatctttccgacctggccgccatgggcgcgcgccccgtcggctgcctgctggggctggcgctgcccggcgtggacgaagcgtggctggcggcgtttgcgcgcggcttccaggcccttgccgatacgcacgcctgcccgctgatcggcggcgacactacccgcgccccgcaagggctgctggccatcagcgttaccgtgttcggcgccgtggcgcccggccacgcgctgcgccgcgccgccgcgcagccgggcgacgatgtctgggtttccggggagctgggcgcggccgatatcgcctaccgcttgctcgatcgccaattgcccgccgaccccttgcgcctggccgccacccgcgcggcgctggagtggccgcggccgcgtgtcgagctgggcatggcgctggccggccttgcgcgcgccggcatcgacatttcggacggcctgctgcaggacctgggccacattcttgccgccagcggcgtggcggccgaattgcgttacgacgcgctgcccgtcgcggccgcgctggccggcctgccggccgagaccgtgcgccgcgccgcgctgggcggcggcgatgtctacgaactttgcttcaccgccgacccggcgcatcgccaggccatccgacaggcggcgcacggcgcgggcgcgcccgtcagccgcattggccgcatcctggcgggacaaggactgcgcgtgctggacgccgatggcgcgccgctgggcgaactgccgggcggcttcgatcatttctccgacgcaacggaccagccggcccccgaccgccgacca

SEQ ID NO: 14606 - DNA, 2880 bp, Bordetella pertussis
atgactgacgccgcacccaatcaacccgtgaacgaatcccaggaactgtccaagagctttgaacccgccgaaatcgaaacccgctggtacgacgagtgggccaagcgcggctacttcgacgccggccggcacgtagaaacggggaccgacccccagccctacgtcatccagttcccgccccccaacgtcacgggcaccctgcacatgggccatgccttcaaccagaccatcatggatggcctggtgcgctaccaccgcatgctgggcgacgacaccgtattcgtgcccggcaccgaccacgccggcatcgccacccagatcgtggtcgagcgccagctcgatgcccagaaggtttcgcgccatgacctcggccgcgagaagttcgtggaaaaggtctgggagtggaaagaacagtccggcagcacgattaccggccaggtgcgccgcctcggcgcctcggccgactggccgcgtgagtatttcacgatggacgcgcgcatgtcgcgcggcgtggccgagacgttcgtgcgcctgtatcagcaagggctgatctaccgcggcaagcgcctggtcaactgggatcccaagctgctgacggccgtgtcggaccttgaagtacagtccgaggaggtggatggccacatgtggcacatcctctaccccttcgtcgacggcccgcagaccatcaccgaccaggacggcaacaccgtcacgctgcgcggcatgaccatcgccaccacgcgcccggaaaccatgctggccgacggcgcgctgtgcgtgcaccccgacgatccgcgctacaagcacctgctcggcaagctggtcgagctgcccctgtgcgaccgcaacattcccatcatcgcggacgacttcgtcgaccccgatttcggaaccggctgtgtcaagatcaccggcgcgcacgacttcaacgactacgcgtgcgcgctgcgccacgacattccgctgatcgtcatcttcacgctcgacgcccacatcaacgagaacggccccaagcagttccagggactggagcgctacgaagcgcgccaggccgtggtggccgagctgcaggcgcagcagtacctggtgaaggtcgagccgcacaagatgatgcagcccaagggcgatcgcacgggcgtcgtgctcgagcccatgctgaccgaccagtggttcgtcgccatgagcaagcccgccccggccggcacgctcaaccccggcaagagcatcaccgaagtggcgctggaggcggtggccgacggccgcatcgccttctaccccgagaactggaccacgatctacaaccagtggctcaacaacatccaggactggtgcatctcgcgccagctctggtggggccaccagatcccggcctggtacagcgaagacggccaggtgttcgtggctcgctccgaggaagaggcgcaggagcaggcgcgcgccgccggcgtgagcggcccgctgacgcgcgacccggacatcctcgacacgtggttctcgtcggccctggtgcccttcaccaccttcggctggcccgaggacacgcccgacctgcgccgctacctgccctccagcgtactggtcaccggcttcgacatcatcttcttctgggtcgcgcgcatggtcatgctgaccatgcacatgaccggcagcgtgccgttcaagcatgtgtacgtgcacggactgatccgcgacgccgacggccagaagatgagcaagtccaagggcaatacgctcgacccggtcgatctcatcgacggcatcgatctgaaaggcctggtgcgcaagcgcaccttcggcctcatgcaccccaagcaggccggcgccatcgagaaggccacgcgccgccagtacccggacggcattcccgcgttcggcaccgacgcgctgcgcttcaccatggcggcctatgccaccctgggacgcaacatcaacttcgacctgaagcgctgcgaaggctaccgcaacttctgcaacaagctgtggaacgccacccgcttcgtgctgatgaacaccgaaggacacgcgctggacggcgacggcggcgaactctcgtttgccgaccgctggatcgtcagccagctgcaggcgctggaagccgaggtcgagcgcggcttcgccgactaccggttcgacaacgtggccaacgcgctgtaccgctacgtgtgggacgaatactgcgactggtacctggagctggccaaggtgcagatccagcagggcacgccggcccagcagctgggcacccgccgtacgctgatccgcgtactggaggcggtgctacgcctggcccatccggtcatcccgttcatcacggaagaactgtggcagaaggttgcgctggtcgccggcaagcggaccgccggcgccgtggccagcgtcagcgtgcagccctacccgcgcgccaatccgcaggccgtcgacgccgaggcggaagccgcggtggccgaactgaagtcccaggtcgaggccgtgcgcgcgctgcgcggcgaaatgaacctgtcgccggcccagcgtgtcccgctggtcgccgaaggccccaccgacgtcctgtcgcgcaataccccttacctggcggcgctggccaagctgagcgaggtcgaggtggtggccgccctgcccgacgccggcgcgccggtgcaggtagtgggcgacgcgcgcctgatgctgcatgtcgaaatcgacgtggcggccgaatgcgcgcgcctggacaaggagatcgcgcgcctggagggcgaaatcgccaaggcgaacggcaagctgggcaacgccagcttcgtcgagcgcgcgccggcggccgtggtcgaacaggagaaggcgcgcctggcgcagttcagcgaaacgctggagaaggtacgcggccagcgcgtcaagctgggcgtc

SEQ ID NO: 14607 - DNA, 1611 bp, Bordetella pertussis
atgcccatgcctatcatcgaatcccgcatcgatacgcggtcgcaggactacgccgacaatgcgcgcgccatgcaggcgcagctcgacgacctgaaccagaagctggcccggacggcgcaaggcggcagcgaaaccgcgcgcgccaagcacgtgggacgcggcaaattgctgccgcgcgaacgcgtcgaacaactggtcgacccgggcagcccgttcctggagctctcgcccatggccgcgcacggcatgtatggcgacgaagcgccaggcgccggcatgatcacgggcgtcggccgcatcgccggcaccgaatgcgtcatcgtgtgcaacgacgccaccgtcaagggcggcacgtactacccgatgacggtcaagaagcatttgcgcgcccaggagatcgccgcgcagaaccggctgccgtgcgtctacctggtcgattcgggcggcgccaacctgccgcgccaggacgaagtgttccccgaccgcgatcacttcggccgcatcttctacaaccaggcggtcatgtcgtcgcagggcatcgcgcagatcgcggtggtgatgggatcgtgcaccgccggcggcgcgtacgtgcccgccatgtgcgacgaatccatcatcgtgcgcgaccagggcaccattttcctgggcgggccgcccctggtgaaagcggccacgggcgaggaggtcagcgccgaagacctcggcggcggcgacgtgcacacgcgcctgtccggcgtggccgaccacctcgctgccaacgacatgcacgcgctgcagctggcgcgcaacgccgtggcccgcctgaaccgcgccaagccggctgcgctggctctggcgccggtgcgcgaaccgcgctacgacgccagcgaactcaacggcatcattccggccgacacgcgcaagccctacgacgtgcgcgaagtcatcgcgcgcatcgtcgacggctcggaattcgacgaattcaaggcgcgctacggcaccaccctggtcaccggctttgcccatatccatggcatgccggtgggcatcgtcgccaacaacggcattctgttctcggaatcggcgcaaaagggcgcgcacttcatcgagctgtgcgcgcagcgcaagatccccctggtcttcctgcagaacatcaccggcttcatggtgggccgcaagtacgaaaacgaaggcatcgcgcgccacggcgccaagatggtgaccgccgtggccaccgccgccgttcccaagttcacgatactcatcggcggctcgttcggggccggcaactacggcatgtgcgggcgcgcctattcaccgcgcatgctgttcatgtggcccaacgcgcgcatctccgtgatgggcggcgaacaggccgccagcgtgctggccaccgtcaagcgcgacggcatcgaggcgcgcggcgcgcaatggagcggcgccgaggaagacgccttcaagcagccaatccgcgagcagtacgagcgcgagggccatccctactatgccaccgcgcggctttgggacgacggcatcatcgcgccggccgatacccgccgcgtgctgggcctggcgctgtcggcggccctgaatgcgccgatcgaagacacgcgcttcggcgttttccgcatg

SEQ ID NO: 14608 - DNA, 1917 bp, Bordetella pertussis
atggattttccccgcgaatttgatgtgatcgtcgttggtggcggtcacgccggtacggaggcagccctggctgcagcccgcgccggcgcacagacattgctgcttacccacaatatcgagaccctgggccaaatgtcctgcaatccctccatcggggggataggcaagggtcatttggtcaaggaagtcgatgcgttgggcggcgcgatggctatcgccaccgacgaggcaggtatccaattccgtattctcaacagctccaaggggccagcggtacgtgccacgcgtgcccaagccgaccgggtgctgtaccgaaacgccatacgtgcacagctcgagaaccagcccaacctctggctgttccagcaggcggtggacgatctgatggtgcagggcgaccaggtggtgggcgccgttacgcagatcgggttgcgctttcgtgcccgtaccgtggtgctgacggctgggaccttcctcaacggtttgattcacgtggggctgcagaactattccggagggcgggcaggggatcctcccgccaattccctgggccagcggctcaaggagctgcaacttccgcaaggccgcctgaaaactggcacgccgccgcgcatcgacggacgcagcatcaactacagtgtgttggaagagcagcccggcgatcttgatcccgtgccggtgttctcgttcctgggcaaggcctccatgcacccgcgccagctgccttgctggatcacgcataccaatgcccgcacgcacgaaatcatccgtggcggtctggaccgttcgcccatgtacagtggggtcatcgaaggagtggggcctcgttactgcccatccatcgaggacaagatccatcgttttgcggacaaggcatcgcaccaggtattcctggaaccggaaggcctgaatacccatgagatctatccgaacggtgtttccaccagcctgcctttcgatgtgcagtacgagttgatccattccctgcccggactggagaacgcgcacatcctgcgcccgggctatgccatcgagtacgattacttcgacccgcgtgccctgaagtccacgctggagaccaaggcgatttccgggctgttcttcgccggccagatcaacggcacgaccggctatgaagaggcggcggcccaaggcctgctggccggcgccaatgccgccttgcaggcccaggggaaagaaccttgggtgccgcgtcgcgatgaagcctatctcggcgtcctggtcgatgacctggttacgcgcggcgtgaccgagccttatcggatgttcacgtcccgtgccgaatatcggctcagcctgcgcgaagacaacgccgatctgcgcctgaccgaaatcggccgccggctcgggctggtggacgacgtgcgctgggatgctttcagccgcaaacgcgatgccgtggcccaggaagtcgaacggctcaaatccacgtgggtgaacccgcgcgtcctgccggcgcatgccgccgaagccctgctgggcaaggcaattgagcgtgagtactcactatcagacctgttgaaacgtcccaatgtttcctacgaggcgttgatgcaggcccgtaccgacgagggcgagttgctggctggtcctggcgtgctcgaggatcaagtgctggccgagcaggtcgaaacccaggtcaagtacgccggctatatcgcgcgccagcaagacgaagtgcagaaacacctctcgcacgagcagcagcccatccctgcggatatcgattacgacgccgtcaccagcctgtcgttcgaggtacgccagaagctgaagacgcatcggcccgagaccatagggcaggccgcgcgcgtctccggggtgacgccggctgccatttccctgttgctgatccatctcaagcgcctgcattacggctcgcgcaagcaagcggca

SEQ ID NO: 14609 - DNA, 396 bp, Bordetella pertussis
atggcccatacccctcatccctcccccttcaagagcacaggcggattgcgccgcattctcaacgcgctgcgctactcgctgcaagggctgaaggcagccatcaaatacgaggcggcgttccgccaggagctggtcctggccatcctgctggtgcccgcggcattcttcctgggccgcaccaccgacgaagtcttcatcctgatcgcctcggtcatcctggtgctggtggccgagctgctcaattccgccatagaggcgctggccgacgccctgtcggtggagacccatcccctgctgggccgggccaaggacctcggcagcgccgcggtcatgctgatgctgctgttcaccctggcggtctgggtggcggtgctcatcagccgcttcgtcctggac

SEQ ID NO: 14610 - DNA, 822 bp, Bordetella pertussis
atggatgcgacgcagtcaaggaaacatatgaaaaacataccgcccagcaagtccgcccgcgtgttctgcatcgccaaccagaagggcggcgtcggcaagaccaccaccgccatcaaccttgcggctggcctggctacgcacaagcagcgggtgctgctggtcgatctcgatccgcagggcaacgccaccatgggcagcggcatcgacaagagtacgctcgaatccaacctgtaccaggtgctcatcggcgaggccggtatcgaacagacgcgcgtgcgttcggagtccggcggctacgacgtattgccggccaaccgcgaactgtccggcgccgagatcgacctggtgcagatggacgagcgcgagcgccagctcaaggccgccatcgacaagatcgccggcgaatacgatttcgtgctgatcgattgcccgcccacgctgtcgctgcttacccttaacgggctggctgccgcgcacggcgtcatcattccgatgcagtgcgagtactttgcgctcgaaggcctgtccgacctggtaaacaccatcaagcgcgtgcatcgcaatatcaacaacgaactccgtgtcatcggtttgttgcgcgtgatgttcgacccgcgcatgaccttgcagcagcaggtgtcggcccagctcgaatcccacttcggcgacaaggtcttcaccacggtggtgccacgcaatgtgcggttggccgaggcgcccagctatggcatgccgggcgtggtgtatgaccgcgcgtcgcgcggcgcgcaggcctatattgcatttggcgcggaaatgatagaacgcgtcaaagagctggat

SEQ ID NO: 14611 - DNA, 2994 bp, Bordetella pertussis
ttgcagatcccgcgttccgcgtggcgcctgcatgcgctggccgcagctctggcgctggccggcatggcccggctggcgcccgcggcggcgcaggcgccgcagccgcccgtggccggcgcgccgcatgcgcaggacgccgggcaggaaggagagttcgaccaccgggacaacacgctcattgcagtctttgacgacggcgtcggcatcaatctcgacgacgatcccgacgagctcggcgagacggcgccccccacgctcaaggacatccacatctcggtggagcacaagaacccgatgagcaagccggccatcggggtgcgtgtcagcggcgccggccgcgcgctgacgctggccggctcgaccatcgatgccaccgagggcggcattcccgcagtggtacggcgcggcggcacgctggagctggatggcgtcaccgtggcgggcggggaagggatggagccgatgacggtctctgacgccggcagccgcctgagcgtgcgcggcggcgtgctgggcggcgaagcgccgggcgtcggcctggtccgggccgcgcaaggcggccaggcgagcatcatcgacgcgacgctgcagagcatcctcgggcccgcgctcattgccgacggcggctccatttccgtcgccggcggttcgatcgacatggacatgggcccgggattcccgccgccgcctccaccgcttcccggggcgccgctggccgcgcatccgccgctcgatcgcgttgccgcggtgcacgccggccaggacggcaaggtgacactgcgggaggtggcgctgcgggctcacgggccgcaggcgacgggcgtctatgcgtatatgcctggcagcgaaatcaccctgcagggaggcacagtcagcgtgcagggcgatgacggggccggcgtggtcgccggcgcgggcctgctcgacgccttgccgcccggcggcacggtgcggctggacggaaccacggtgtcgaccgatggcgccaacaccgatgccgtgctggttcgcggcgacgcggcgcgcgccgaggtcgtcaacaccgtgctgcgcaccgccaagagcctggccgccggcgtatcggcccagcatggaggccgcgtcacgctgcggcagacccgcatcgagaccgcgggcgcgggggccgagggcatctccgtgctgggcttcgagccgcagtccggctccggcccggccagcgtcgacatgcagggcggcagcatcaccacgaccggcaaccgcgccgccggcatcgcgctcacccacggcagcgcccgcctggaaggcgtggcggtgcgcgccgagggcagcggctcgagcgccgcgcagctggccaacggcacgctggtcgtcagcgcagggtcgctggcctcggcccagtccggcgcgatcagcgtgaccgacacgccgctgaagctgatgccgggcgccctggccagcagcacggtctcggtccggttgaccgacggcgccacggcgcaaggcggcaatggcgtgttcctccagcagcattccaccattccggtggcggttgccctcgagagcggcgccctggctcgcggcgatatcgtcgccgacggcaacaagcccctcgatgccgggatctccctcagcgtggccagcggcgccgcctggcacggcgccacccaggtgctccagtcggccacgctgggcaagggcggaacctgggtcgtgaacgccgactcccgggtgcaggacatgtcgatgcgcggcgggcgggtcgaattccaggcgcccgcgcccgaggcctcttacaagaccctgaccctgcaaaccctggacggcaacggcgtgttcgtgctgaacaccaacgtcgccgccgggcagaacgaccagttgcgggtcaccggccgcgccgatggccagcaccgcgtgctggtgcgcaatgccggaggcgaggccgacagccggggcgcccgcctgggcctggtgcatacccaggggcagggcaacgccaccttccggctggccaacgtcggcaaggcggttgacctgggcacgtggcgctacagcctggcggaggatccgaagacgcatgtctggagcttgcagcgcgcgggccaggccctgtcgggggcggccaatgccgccgtgaacgcggcggatctttccagcatcgccctggccgagtccaacgcgctggacaagcgcctgggcgagctgcgcctgcgcgccgacgccggcgggccatgggcgcgtacgttcagcgagcgccagcagatcagcaaccgccacgcccgcgcctacgaccagacggtcagcgggctggagatcggcctggaccgtggctggagcgcgtcgggcgggcgctggtacgccggcggcctgctcggctacacctatgccgaccgcacctatcccggcgacggtggcggcaaggtcaagggcctgcacgtcggcggctacgccgcctatgtcggcgatggcggctactatctcgacaccgtgctgcggctgggccgctacgatcagcaatacaacattgccggcaccgatggcggccgcgtcaccgccgactaccgcacaagcggcgccgcatggtcgctcgaaggcgggcgccggttcgagctgcccaacgactggttcgccgaaccgcaggccgaggtcatgctgtggcgcacgtcaggcaagcgctatcgcgccagcaatggcctgcgcgtcaaggtggacgccaacaccgccacgctgggccgcctgggcttgcgcttcggccgccgcatcgccctggccggcggcaacatcgtgcagccctacgccaggctcggctggacgcaggagttcaaaagcacgggcgatgtgcgcaccaatggcattggccatgccggcgcaggccgccacggccgcgtggaactgggcgcgggcgtcgacgccgcgttgggcaaggggcacaacctctatgcttcgtacgagtacgcggcgggcgaccggatcaacattccgtggtcgttccacgccggctaccgctacagcttc

SEQ ID NO: 14612 - DNA, 1641 bp, Bordetella pertussis
atggctgccaagcaagttctgtttgccgacgaagcccgcgtgcgcatcgtgcgcggcgtgaacgtcctcgccaacgccgtcaagaccaccctgggccccaagggtcgcaacgtcgtgctggagcgctcgttcggcgccccgacggtgaccaaggacggcgtgtccgtcgccaaggaaatcgaactgaaggacaagttcgagaacatcggcgcccagctggtcaaggacgttgcctccaagacctccgacaacgccggtgacggcaccaccaccgccaccgtgctggcccaggccgtcgttcaggaaggcctgaagtacgtcgccgccggcttcaacccgatcgacctcaaacgcggcatcgacaaggccgtggccgccgccgtggaagagctgaagaaactgtccaagccggtcaccaccagcaaggaaatcgcccaggttggctcgatctcggccaacagcgatgcctcgatcggccagatcatcgctgacgcgatggacaaggtcggcaaggaaggcgtgatcaccgtcgaagacggcaagtcgctggaaaacgaactggatgtcgtcgaaggcatgcaattcgaccgcggctacctgtcgccctacttcatcaacagcccggaaaagcaagtcgccgcgctggacgatccgtatgtcctgatctacgacaagaaggtcagcaacatccgtgacctgctgcccgtgctggagcaagtcgccaagtcgagccgtccgctgctgatcatcgccgaagacgtcgaaggcgaagcgctggccaccctggtcgtgaacaacatccgcggcatcctgaagaccaccgccgtcaaggccccgggcttcggcgaccgtcgcaaggccatgctggaagacatcgccatcctgacgggcggcacggtgatctccgaagaaaccggcatgtcgctggaaaaggccacgctgcaggatctgggccaggccaagcgcatcgaagtggccaaggaaaacaccacgatcatcgacggcgccggcgacggcaagtcgatcgaagcgcgcgtcaagcagatccgcgcccagatcgaggaagccacctcggactacgaccgcgagaagctgcaagagcgcgtggccaagctggccggcggcgttgccgtgattcgcgtcggtgctgccaccgaagtcgaaatgaaggaaaagaaggctcgcgtcgaagacgccctgcacgccacgcgtgccgcggtggaagaaggcgtggttcctggcggtggcgttgcgctgctgcgcgccaagcaggccatcactggcctgaagggcgacacggctgaccagaacgccggcatcaagctgatcctgcgcgctgtcgaagagcccctgcgcaccatcgtcaccaacgccggcgacgaagccagcgtggtggtcaacaccgtgctcaacggcaagggcaactacggctacaacgccgcgaccggcgagtacggcgacctggtcgagcaaggcgtgctggacccgaccaaggtcacccgcaccgcgctgcagaacgccgcttcggtggccagcctgctgctgacggccgaagccgccgtggtcgagctgatggaaaacaagcccgctgctgctccggcaatgcccggcggcatgggcggcatgggcggcatggacttc

SEQ ID NO: 14613 - DNA, 1188 bp, Bordetella pertussis
atggcaaaaggcaagtttgaacgtaccaagccgcacgtgaacgtgggtacgattggtcacgttgaccacggcaaaacgacgttgacggcggcgatcacgacggtgctgtcgaacaagttcggcggcgaggctcgcggctacgaccagattgacgcggcgccggaagagaaggcgcgtgggatcacgatcaacacctcgcacgttgagtacgagacggagacgcgtcactacgcgcacgttgattgcccgggtcacgctgactacgtgaagaacatgatcacgggtgctgcgcagatggacggcgcgatcctggtggtgtcggccgcagacggcccgatgccgcagacgcgcgagcacattttgctgtcgcgccaggttggcgtgccgtacatcatcgtgttcctgaacaaggcggacatggttgatgacgcggagctgctcgagctggtggagatggaagtccgcgaactgctgagcaagtacgatttcccgggcgatgacacgccgatcgtgaagggttcggccaagctggcgctggaaggcgacaagggcgaactgggcgagcaggcgattctgtcgctggcgcaagcgctggacacgtacattccgacgccggagcgcgcggtcgacggtgcgttcctgatgccggtggaagacgtgttctcgatctcgggccgtggcacggtggtgactggccgtatcgagcgcggcgtggtgaaggttggcgaggaaatcgaaatcgtgggcatcaagccgacggtgaagacgacctgcacgggcgtggagatgttccgcaagctgctggaccagggccaggcgggcgacaacgtgggtatcttgctgcgcggcaccaagcgtgaagacgtcgagcgtggccaggtgctggccaagccgggttcgatcaacccgcacacggacttcacggccgaggtgtacattctgtccaaggaagagggtggccgtcacacgccgttcttcaacggctatcgtccgcagttctacttccgcacgacggacgtgaccggcacgatcgacctgccggcggacaaggaaatggtgctgccgggcgacaacgtgtcgatgaccgtcaagctgctggccccgatcgccatggaagaaggtctgcgtttcgccatccgtgaaggcggtcgtaccgtcggcgccggcgtcgtcgccaagatcatcaag

SEQ ID NO: 14614 - DNA, 531 bp, Bordetella pertussis
atgagtaaacgttggtatgtcgtccatgtgtattccggcatggagaaaagcgtacaaaaggctctgaacgagcgcatcgagcgcgcggagctgcagacgtcttttggccgcattcttgttccctccgaagaagtcgtcgaggtcaagggcggacagaagtcgatcaccgaacgccgcattttccccggttatgtcctggtcgaaatggatctgaccgacgaaacgtggcatttggtcaagaacaccaatcgtgtcactggtttcctgggtggttcgggcaaccgtccgacgccgatttccgaacgggaagtcgagaaaatcctcaaccagatggaagagggtgtcgaaaagccccggcccaagattctgttcgaagtgggcgagatggtgcgcgtcaaggaaggtccgtttgctgacttcaacggcaacgtcgaagaagtcaactacgaaaagagcaaggtgcgtgtgtcggtcaccatttttggtcgcgcgacgcccgtcgaactcgatttcagccaggtcgaaaagacc

SEQ ID NO: 14615 - DNA, 429 bp, Bordetella pertussis
atggcgaagaagatcgtcggctttatcaagctgcaagtgccggctggtaaggcaaacccctcccccccgattggcccggcgctgggtcagcgcggcctgaacatcatggaattctgcaaggcgttcaacgccaagacccaaggcatggagctcggtctgccgattccggtggtgatcaccgccttcgcggacaagagcttcaccttcatcatgaagaccccgcccgcgacggtcctcatcaagaaggcgtccggcgtgcaaaagggttcggccaagccgcataccgacaaggtcggcacgctgacgcgcgcccaggctgaagaaatcgccaagaccaagcagcccgacctgaccgcggccgatctggacgccgccgtccgtacgatcgctggcagcgcccgcagcatgggcatcacggttgaggggggt

SEQ ID NO: 14616 - DNA, 696 bp, Bordetella pertussis
atggctaaattgtccaagcgcgccgccgccattgcgcagaaaatcgaccgtaccaagctgtacccggtcggcgaagccctgaatctggtcaaggaaaccgccaccgccaagttcgatgaatccatcgatgtggccgtccagctgggcatcgaccccaagaagtcggaccaactggtccgtggttcggtcgtgctgcccgccggtaccggcaagacggttcgcgttgccgtgttcgcccaaggcgaaaaggctgatgccgcccgtgccgccggcgccgacatcgtcggcctggacgacctggccgagcagatcaaggctggccagatggacttcgacgtggtcatcgcctcgcccgacacgatgcgtgtcgtgggtgccctgggccaggtgctgggtccccgtggcctgatgccgaaccccaaggtcggtaccgtgacgcccgacgtggccaccgccgtgaagaacgccaaggccggtcagatccaataccgtaccgacaaggctggcatcattcacgccaccatcggccgcgcctcgttcggcgtggaacaactgcaaaacaacctggccgccctggtcgatgccctgcaaaaggctcgtcccgccgctgccaagggtatttacctgcgcaagctggccgtttcgtccacgatgggcggcggtgctcgcgtggaaattgcttcgctgtcggccaac

SEQ ID NO: 14617 - DNA, 4134 bp, Bordetella pertussis
atgcaacctcgagtcggagtgctcatgccttactcgtacaccgaaaaaaagcgcatccgcaaaagctttgccaaacgtgaggacgttcaaaacgttcccttcctgttggcgacacagcttcaatcctacctaactttcctgcaagccgacaccgcgacctcggatcgcgtcaatgaaggtctgcaggcggcgttctcgtcgatttttccgattgtcagccataacggaatggcgcgcttggagttcgtcagctatgcgctgggcgagccggtgtttgatgtcaaggaatgtcagcagcgcggcctgacctatgcgtcgccgctgcgcgccaaggtgcgcctggtgctgctggaccgcgaagtcagcaagccgaccatcaaggaagtcaaggagcaggaagtctacatgggcgaaattccgctcatgaccggcaccggctcgttcgtcatcaacggcaccgagcgcgtcatcgtctcgcagctgcatcgttcgccgggcgtgttcttcgagcacgaccgcggcaagacgcacagctcgggcaagctgctgttctcggcccgcgtgattccctaccgcggctcgtggctggacttcgaattcgatcccaaggacgtgctgttcttccgcgtggaccgtcgccgcaagatgccggtgacgatcctgctgaaggccatcggcatgacgcccgaatcgatcctcgcgcacttcttcgatttcgacaacttcgaactcaagagcgaaggcggcatgatggaattcgtcgccgaacgctggaagggcgagatggcgcgctttgacatcgccgaccgcgacggcaaggtgatcgtcgagaaggacaagcgtatcaacgccaagcacctgcgcgacctggctgccggcggcatccagcgcgtgtcggtgcccgaggatttcctgtacggccgcgtgctggccaagaacatcgtcgatcccgacaccggcgaagtcgtggcgcatgccaacgacgagatcaccgaaagcgtgctcaacgcgatgcgcgccgccaacgtgcgcgacatccagacgctgtacaccaacgacctggatcgcggtccctacatttcgcagacgctgcgcgccgacgaaaccgccgaccagatggccgcgcgcgtggcgatctaccgcatgatgcgtcctggcgaaccgcccaccgaagaagcggtggaagcgctgttccagcgtctgttctacagcgaagagacgtacgacctgtcgcgcgtgggccgcatgaaggtcaacagccgcctgggtcgcggcgacgacagcaccggtccgatgacgctgaccaacgaggacatcctcgaaaccatcaaggtgctggtcgagctgcgcaacggccgtggccagatcgatgacatcgatcacctgggcaaccgccgcgtgcgttgtgtcggcgaactggccgagaaccagttccgcgctggcctggtgcgtgtcgagcgcgccgtcaaggagcgtctgggccaggccgagaccgaaaacctgatgccgcacgacctgatcaactccaagccgatctcggccgccatcaaggagttcttcggttcgagccagctgtcgcagttcatggaccagaccaacccactgtcggaaatcacgcacaagcgtcgcgtttccgcactgggcccgggcggcctgacgcgcgaacgcgccggctttgaagtgcgcgacgtgcacccgacccactacggccgcgtctgcccgatcgaaacgccggaaggcccgaacatcggcctgatcaactcgatggcgctttacgcgcgcctgaacgagtacggcttcctggaaaccccgtatcgcaagatcatcgacggcaaggtcagcgaccagatcgactacctgtcggccatcgaggaaagccactacgtgatcgcgcaggccaacgccgcgctcgatgacgaaggccgtttcgtcgacgacctggtggcttgccgcgaagcgggcgaaaccatgctgaccgcgccgggcaacgtgcactacatggacgtggcgccgtcgcagatcgtgtcggtcgcggcgtcgctgatcccgttcctcgagcacgacgacgccaaccgtgcactgatgggcgccaacatgcagcgccaggccgtgccttgcctgcgtccggaaaagccgctggtcggcaccggcgtcgagcgcaccgttgcggtcgactcgggcacgaccgtgcaggcgctgcgtggcggcgtggttgaccacgtcgacgccgaccgcgtcgtgatccgcgtcaacgacgaagagaacgtcgctggcgaagtgggcgtggacatctacaacctgatcaagtacacgcgttccaaccagaacacgaacatcaaccagcgtcccatcgtggcccgcggcgacaaggtcgccaagggtgacgtgctggccgacggcgcgtccaccgacctcggtgaactcgcgctgggccagaacatgctgatcgcgttcatgccctggaacggctacaacttcgaagactcgatcctgatctccgaacgcgtcgtggccgacgatcgctacacctcgatccacatcgaagagctgaccgtggtcgctcgcgatacgaagctgggacccgaggaaatcacgcgcgacatcagcaacctggctgaaacgcagctcaaccgcctggatgactccggcatcgtctacattggcgcggaagtcagcgccgacgacgtgctggtgggcaaggtcacgccgaagggcgaaacccagctcacgccggaagaaaagctgctgcgcgccatcttcggcgaaaaggcttccgacgttaaggacacctcgctgcgcgtgccctcgggcatgaccggcacggtgatcgacgtgcaggtgttcacgcgcgaaggcatcgtgcgcgacaagcgcgcccagtccatcatcgacgatgaactgcgccgttatcgccaggacctcaacgaccagctgcgcatcgtcgagaacgaccagttcgaccgtatcgagaagatgctggtcggcaagaccgtcaatggcggcccgcgcaagctggccaagggcgccaccttgaccaaggcctacctggccgacctggatcgctggcagtggttcgacatccgcctggccgacgaacagcacgctgtcgtgctggagcaggccaaggaatcgctcgagcagaagcgccaccagttcgacctggccttcgaagagaagcgcaagaagctgacgcagggcgacgaactgccgccgggcgtgctgaagatgatcaaggtctacctggccgtcaagcgccgcctgcagccgggcgacaagatggccggccgccacggcaacaagggcgtggtttcgcgcattacgccggtcgaggacatgccccacatggccgacggcactcccgccgacatcgttctgaacccgctgggcgtgccctcgcggatgaacgtcggccaggtgctggaagtccatctgggctgggccgccaagggcgtgggctaccgcatcgccgacatgctgcgcgacgagcgcacggcgcaggccaagagcgtccgcggctacctggagaaggtgtacaacaccacgggcagcagcgcgcatatcgacagcctgaccgacgaggaagtgctggaactggccaacaacctgaagaagggtgtgccgtttgccacgccggtgttcgacggtgcgaccgaagaagaaatcggcaagatgctggaactggcctatcccgacgacgtcgccgcgcgcatgcgcctgacggcgtcgcgttcgcaggcatggctgtatgacggccgtaccggcgagcagttcgagcgtccggtcacgatcggctacatgcactacctgaaactgcaccacttggtggacgacaagatgcacgcgcgttccaccggcccgtactcgctggttacccagcagccgttgggcggcaaggcgcagttcggcggtcagcgtttcggggaaatggaagtgtgggcgctggaagcctacggcgcctcctacaccctgcaggaaatgctgacggtgaagtccgacgacatcaccggccgcacgaaggtttacgaaaacatcgtcaagggcgaccacgtcatcgatgccggcatgccggaatcgttcaacgtgctggtcaaggaaattcgctcgctggccctggacatggatttggagcgtaac

SEQ ID NO: 14618 - DNA, 841 bp, Bordetella pertussis
tacatcggccgcttcgcccccagccccagcgggccgctgcatgccggctcgctggtcgcggcgctggccagctggctggacgcccgcgcccatcatggcctgtggcgcctgcgcatcgaggacgtcgacacgccgcgcaccgtgcccggcgcggccggcgtcatcatggatcagctgcgggccctgcacttgcattgggacggcgagatcatgtggcagtcgcggcgcggcgcggcttaccagcaggcattcgacgccctggccgcgcgcggcctgatctacggctgcggctgcacccggcgcgagatcgccgactcggcgctgcgcggcacggctggcgtcgatggcgaacgcccgtatcccggcacgtgcctggcgggtgcgcgtgccgcccggcgtcgagaccttcgtcgatcgctggctggggccacagcaacaggacgtggcggccgcggtcggcgatttcgccctgcgccgcgccgacggcctgtgggcctaccaattggcggtggtggtggacgacgccgaccagggcgtcaccgacgtggtgcgcggcgccgacctgctgggctcgaccgcacgccagcgcgtgctgggacggttgctgggcctggccccgccgcgcgtcatgcatgtgcctctgatcgtcgacccggccacgggcctgaaactatcgaagcagaatggcgcgccggcgctcgattgcagccagccgctgcgcatgctgcagcaagcctggagcggcctgggcttcgcgcccctggcggcagccacgcccgaggcattcctgcaggcggccaccgcacaatgggcgcaacgtttcggcatgcgccacgccacc

SEQ ID NO: 14619 - DNA, 2625 bp, Bordetella pertussis
atgaacaaaacgttgattattgccgagaaaccctcggtggccctggatatatcacgcgccttgggaggctttgcgcgcgagggcgactattttgaaagcgatcgttacgtgctggcttccagtatcggacatttgctcagtctggtggcgcccaacgacccggtcaagggcaaatggagcttcacgcacctgccggtgatcccgcccgccttcgaactgggaccgaccgacaagaaatcggccgagcgcctcaagctgctggtacggctggccaagcgcaaggatgtcgacgccatcatcaacgcctgcgacgccgggcgcgaaggcgaactgatcttccgctacatcgtccagttcgccggcgtgaaaaagccgatccagcgcctgtggctgcaatcgatgacgcagcaggcgatccgcgacgccttcgccaacctgcgcgacgacgaacagctcaagccgctggaggccgccgcgcgctcgcgcgccgaggccgactggctggtggggatcaacggcacgcgcgccatgaccgccttcaacagcaaggacggcggctttttcaagacgccggtcggccgggtgcagacgcccacgctggccatcgtcaatgaacgcgaaaaccgcatccgttcgttcgtctcgcgcgactactgggaagtgcacgccaccttcgtggcggccgccggcctgtacgaaggccgctggatcgaccccgcattcaggaaagacgagcgcgatccggaaaagcgcgagtcgcgcctgtggtcgctggccgccgcgcaaagcgtggtggcggcctgccgcgcccagagcggcagcgtcaccgaggaatccaagccctcgacgcagatgtcgccggcgctgtacgacctcacctcgctgcagcgcgaggccaacggccgcttcggcttctcggccaagaccaccctggcgctggcgcagacgctgtacgagcggcacaaggcgctgacctacccgcgtaccgattcgcgctatctgcccgaggactacatcaacaccgtgcgccagaccatgcaggtcctggcgcagggcgattccaacgccgtcggcgccctgtcgcgccatgccgatacggtactcgcgcaaaactgggtcaagcccaaccggcgcatcttcgacaacaagaaggtgtccgatcacttcgccatcatccccacgctgcaggtgccgcgcgacctgagcgaagccgaaggcaagctgtacgacctggtgctcaagcgcttcctggcggtgttcttcccggccgccgagtaccgcgtcaccacgcgcctgaccgaagtgcagggccaccgcttcaagaccgagggcaaagtgctggtcacccccggctggctggccgtctacggcaaggaggcccagggcgaggacgccaacctggtgccggtggccgacggcgagaccgtgcgcgccgaggacgtcgaagcggtcggcctggcgaccaagccgccggcgcgctacaacgaagccacgctgctgtcggcgatggaaggcgccggcaagctggtcgacgacgaagagctgcgcgaggccatgtccgagcgcggcctgggtacgccggccacccgcgcggccatcatcgaaggcctgctcaacgaggcgtacctgcgccgcgacgggcgcgacctggtccccacggccaaggcgcgccagctgatggcgctgctttcggggctggacgtctccgaactcacctcgcccgaactcaccggcgagtgggagcacaagctcaagcagatcgagcagggcgcgctggaccgcgccgccttcatgcgcgagattgcccagatgacccaggtcatcgtcaagcgcgccaaggagtacgaacgcgacaccgtgccgggcgattacgccacgctgcaaacgccttgtcccaagtgcggcggcgtggtcaaggaaaactatcgccgcttcgcctgcacccagtgcgatttctcgatcggcaagcatccgggcggacgcaccttcgaactgcccgaggtcgaagaattgctggccaagcgcgagatcggcccgctgcaggggtgcatcagcaagatgggccgcccgttcgccgccatcctgcgcatcagcggcgagtacaagctggagttcgacttcggccagaacgacgaggaagacaacgaagccgtcgacttctccggccacacgcccgtgggcgcctgcccgaaatgcagcgcgcgcgtcttcgagcacggcatgagctacgtgtgcgagaaattggtcggcctgcagaaaagctgcgacttccgctcgggcaaggtgatcctgcaacaggagatctcgcgcgagcagatggaaaagctgttgaccgccggccgcaccgacttgctcgacggtttcgtctccagccggaccaaccgcaagttcaaggccttcctggtgcgccaacccgacggcaaggtaggcttcgaattcgagccgcgcggcgacaagcccggccgccccggcgcggcggccaagaaggcggcaggcaagaccgccaccaagacggcggccaaggcgcctgccaagaccgcggccaagaaggccgtcaagaaagccgcccccaagaaggcggccaccaagaccgccgccaagaaggccgccaagaaatcggctgcc

SEQ ID NO: 14620 - DNA, 3453 bp, Bordetella pertussis
atgcctgatctcactccgcccgccgtgcccatccccgccaccgccaccaccctgtccgccctcaagccgggagcgcgctttacgcagccccgcccgcccggatccggcgacggatggctgctggcggacctggcgcgccaggccggcaagccgctggtggtgctgacggccgacccgctggaggcccagcggctggccgatgaaatcccgcaattcgcgcccgaactgcgcgtgcgccagttgcccgactgggaaaccctgccctacgacgcgttctcgccccaccaggacctgatctcgcaacgcctgcgcacgctgcacgcgctcatgaaccagggcgtggacatcctgaccgtgccggtcaccaccgccctgtaccgcctggcgccgcccgccttcctggccgcgtatacgttttcgttcaagcagaaggaccggctcgacgaagcggccctgcgcgcgcagctgacgctggccaactacagccacgttacccaggtcaccgcgccgggcgaattctgcctgcgcggcggcctgatcgacctgtttcccatgggttcggtggtgccctaccggctggacctgttcgacgacgagatcgaatcgatccgcagcttcgacgtcgacacgcagcgcagcctgtatccggtgggcgaagtgcagttgctgcccggccgcgagtttcccatggacgaagaggcgcgcaaccgcttccgggcgcggtttcgcgaagtgttcgaaggcgacccctcccgcgccctgccgtacaaggacatcggcaacggcatcgcgttcgccggcatcgagtattacctgcccctgttcttcgagcagaccgccaccctgttcgattacctggcggccgacacgatcaccgtcacggtgggcgacatcgacgacgccatgcagcgcttcgcccatgacacccgcagccgctacgactttctcaaggtcgaccgcgaacggccggtgctgccgccggacaccctgttcctcgaccacgaggcgctgttcgcgcgcctgaaagacttcccgcgcctggccttgatggcggagcggccgcatccggacttcgccgccgcgcccgatgtcgccgtggcgcgccgcgccgacgaccccgtggcgcgcctgcgcgcgctgctggcgcagaccggcgaccgcgtgctgctgtgcgccgattcggccggccggcgcgagacgctggcgcaaatgctgggcgaacacggcctggcgcccgaggcgcaggccgattcgatccaggccttcctggacgacggcgcgcgcttcggcctggccgtggcgccgctgtcggccggcttctgcgttcccggcggcgccctgctgttcctgaccgagaacgacctctaccccggccatgccggcgtcacccggcgcggcaagcgcacccaggaacgcaccagcaatgtcgaagccatggtgcgcgacctggccgaactgcgcgccggcgacccggtggtgcacgcccagcacggcatcggccgctaccacgggctggtcaacatggacatgggcgaaggcgagatggagttcctgcatctcgaatacgccagcggcagcacgctgtacgtgcccgtgtcgcagctgcacgtcatcgcccgctacagcggcgccgacccggacgccgcccccctgcaccagctcggttcgggccaatgggacaaggcgcgccgcaaggcggccaggcaggtgcgcgacaccgcggccgaactgctggccctgtatgcgcagcgcgccgcccgcgaaggctatgccttcaagctgcccatgagcgactacgaagccttcgccgaaggtttcggcttcgaggagacgcccgaccaggcggccgccatccaggccgtcatcatggacatgacctcgggccgccccatggaccggctggtatgcggcgacgtgggcttcggcaagaccgaggtcgcgctgcgcgccgccttcctggccgtggccaacggcaagcaggtcgcgctgctgtgccccaccaccctgctggccgagcagcatgcccagacgttttccgaccgcttcgccgactggccggtgcgcgtcgtggagctgtcgcgctttcgctccgccaaggaggtggccgccgccgtcgaaggcatcaacgacggccgcgtggacatcgtcatcggcacgcacaagatcctgtccaaggacgtgcgcttcaagcggctgggcctggtcatcatcgacgaggaacaccgctttggcgtgcgccagaaggaaaccctcaaggcgctgcgcgccgaggtcgacgtgctgaccctgacggccaccccgatcccgcgcacgctgggcatgtcgctggaaggcatccgcgacttctccgtgatcgcgacggcgccgcagaagcggctggccatcaagaccttcgtgcggcgcgaggacggcagcaccatacgcgaagcgctgctgcgcgagctcaagcgcggcggccaggtgtatttcctgcacaacgaggtcgagaccatccacaaccggcgggcgcgcctcgaagaactggtgcccgaggcccgcatcgcggtcgcccacggccagatgcccgaacgcgagctggaacaggtcatgaagggcttctaccagcagcgccacaacgtgctgctgtgcaccaccatcatcgaaaccggcatcgacatccccaccgcaaacaccatcgtcatccaccgcgccgaccgcttcggcctggcgcagctgcaccagctgcgcggccgcgtcggacgctcgcaccaccaggcctacgcctatctgctgacgccgggcgaggatgccatcacgaacaacgccaagaagcgcctggaggccatccaggccatggaagagctcggttcgggcttctacctggccatgcacgacctggaaatccgcggcaccggcgaaatcctgggtgactcgcaatcgggcaacatccaagaggtgggcttctcgatgtacaacgagatgctcaacgaagcggtgcgggcgctgaaggcgggcgaggagcccgacctggacgcgcccttcaacctggcctgcgaagtcaacctgcacgcgccggcgctgctgccgtcggactactgtcccgacgtgcatggccgcctggccatctacaagcgcctgtcgcatgccgacggcgaagacgacctgatccgcatccaggaagaactcatcgaccgtttcggtaaactgcccgaagccgcgcagacgttgctggccacgcaccgcctgcgcctggccgcgcaaccgctgggcatcgtcaagatcgatgccagcgaaacgcaggccctgctgcagttcggtgccaagaccacggtcgaccccttgcgcatcatcgagctggtgcagcgccagcgccatatcaagctgtccggccaggacaaactgcgggtggagatcaaggcgcctcagatcgccgcccgcgccgacgccgtgcgcgccgtcctgcgcgcactgaaa

SEQ ID NO: 14621 - DNA, 1154 bp, Bordetella pertussis
atcgtgccggccgccggcatcggcgcgcgcgccagcctgcccggcgaggcggccgttccgaaacaatatcgcccgctggccgggcagcccatgctgcgccacgcggtgcgcgccctgctggccgatccgcgcatcgtccaggtgcgcgtggcggtcagcgccggcgacggctgggtcgagcaggcgctggctggcctgccgcgtaccgtatggcgcccatgcggcggcccgaaccgcgccgacacggtggccgccgccctggccgacagcggggcggccgccgacgactggatactggtgcacgacgccgcccggccgggcttgccggccgcggcgctggcgcgcctgatcgacgcctgcctggacgatgcggttgggggcctgctggccctgccggtcgccgataccgtcaaggcgggccggcagcgcgtatcgcgcaccgtcgatcgcgacggcctgtggctggcccagacgccgcagatgtttcgcgccggcttgctgcgcgacgcgctggcgcgcgcgcgggccgcgggcctggccgttaccgacgaggcgtcggcggtggaggcggccggccatgccccgcgcctggtggcgggcgcgttgcgcaatttcaaggtgacctggcccgatgatttcgaactgatggaaaaatggctatgaatatcccgtttcgcgtagggcagggcttcgatgtgcacgcgctggtcgaaggccggcccttgatcatcgggggcgtcaccatcgcccacacgcacggcctgctggggcattccgatgccgatgtcctgttgcatgcggtgaccgatgccctgctgggcggggccggcctgggcgatatcggccgccattttcccgataccgacccggcctaccgcggcgccgacagccgggtgctgctgcgggcggcgttcgacaaggttcgcgcggcgggctgggcgccggtcaacgtcgacgcgaccatccatgcgcaggcgcccaagatcggcccgcacgcggccgccatggtggccaacattgccgccgatctggcgttggacgccggcgcggtcaacatcaaggccaagaccaacgaaggcctgggctacctgggccgcaaggaagggattgccgccaacgtggtggtgctgctggcgcgcgccggctaggtgtga

SEQ ID NO: 14622 - DNA, 918 bp, Bordetella pertussis
atgattgtccgtccgcgccctaccgcctggggcctgctgttcattttgcgcggctccgtcattccgcacattgccgccaaggttgccgtcatcgtcgcgttgtcctgtgtcgttgcgtggctgcacgcgcgccagtggttcgcgcccggccacctcaatgccgtgcccttttcgctgttcggcctggccctgtcggtgttcctgggttttcgcaacaacgtctgctacgaccgctggtgggaggcccgcaagcaatgggccgaattgagcgcgcagtgccgcagcctcgcgcgcgagactgcggccgtgttgtccggcgcggccgacgcgccgcgccaggcgcgtatcgtgcgccgcctgatcggcttcaatcatgcgctggtcgcgcgcctgcgcggcggcgatcccttgaccgccgcgcgcccctggctgccggacgccgaaagcatggcgctggccggccaccgcaacgtgcccgatgccatcctgcgcgccgtgaccggcgacctgcacgaaggcgggccgcagcgccgctatggcgaggtggtgtaccaggggttgcagcaacgcgtgctggcctgcgcgcaagtgcaggcggcctgcgagcgcatcaagaccacgcccacgccgttcgcgtattcgctgctgctgcatcggacggcctggctgttctgcctgctgctgccgttcggcctggtgggcacgctggggccgctgacaccgttggcggtggcgttcgtcgcctacacgttcttcggcctggatgccttgggcgatgagctggaggagccgttcggcctggccgagaacgacctgccgctggccgcgctggcgcgcgatctcgaaatcgacctgctcgagggcctgggtgcccatcccctgcccgcgcccttgttgccgcgcggctatgtgctgacc

SEQ ID NO: 14623 - DNA, 2706 bp, Bordetella pertussis
atgcgcacagacacgcccgtcaccgtataccgcaaggattatcagccctatccgtataccatcgccgacgtggcgctggaattcgacctggatcccgcctcgaccaccgtgcgctgcctcatgcaggtggcgcgcaaggccgatgcccgggacgatgcgccgctggtgctggacggcgaagcgctcgagctggtttccattcgtgtcgacggccgcgactgggcgcgtgacggctatgtcctggacgacgccaccctgaccttgcgcggcctgccgcccagcgcggcggtcgaaattgtcagccgttgcaggcccgccgccaattccaccctgatggggctgtatgtctccggcggcaatttcttcacccagtgcgaggccgagggctttcgccgcattgcctggttcgccgaccggcccgacgtcatgtcgcgttatcgcgtgacgctgcgcgcggcgcccgattatccggtgctgttgtccaatggcaatctgctggccaccgctaccctgcccgatggccgcctgcaggcggaatgggaagatccgtttcccaagcccagctatctgttcgcgctggtggccggccgcctgacgcatcgcgaagagcgcgtgcgcacccaatcgggccgcgatgtgctgctgcaggtctacagcgatcccggttcggagaaccgcaccgaatgggcgctggaatccttgcgccacgcgctgcgctgggacgagtcgcgcttcggcctggagctggacctggaccgcttcatggtggtcgcggtacgcgacttcaacatgggcgcgatggaaaacaagggcttgaacatcttcaacgcggcctatgtgctggccgacccggccaccgccaccgacgccaactacgaaggcatcgaatccgtcatcggccacgaatacttccacaactggaccggcaaccgcgtcacctgccgcgactggtttcagttgagcctcaaggaaggcctgacggtattccgcgaccaggaattcagcgccgacatgatggcgcgcggcctggacgagcaagccgccgcgagcgcgcgcgcggtcaagcgcatcgacgatgtcgtcacgctgcgcgcggcccagttccccgaggatgccggcccgatggcccaccccatccggcccgacagctaccaggagatcggcaacttctataccgccaccgtgtacgagaaaggcgccgaagtgatccgcatgcagcacaccctgctgggcgagccgggattccgcgccggcatggacgagtacttccggcgccacgacggacaggccgtgacctgcgacgatttcgtcgccgccatggaatcggtctacgccgcgcgcaatccgggccgcgacctgtcggtgtttcgccgctggtacagccaggcgggcacgccgcgcgtcagcgtcaagctggatcacgacgcgcaaagcggccgttgcaccgtcacgctgacccagcgctgcgccccggtcggcgtggagaaacgcgccggacgcgacttcgccaaacaggcattccacattcctttcgcgatcggcctgctcgacgcgcagggccgcgcgctgccgctgcacctgaacggccagccggcgcgcgacaccgtgctgctcgaactgaccgaggcgcgcgccagctggacgttcgagcaggtgccggacatgccggtgccgtcgctgctgcgcggcttctcggcgccggtcatcgtcgaatacgactggagcgacgccgacctggcgctgctgtcggcgcacgacacggatccattcgcccgctgggaagcaggccaggaactggccacgcgcgagatcctcgcgctgacggccagccatcaggccggccagccgctggccgtgcgcccggccttcatcgcggcctggcgcgccctgctgaccgacccgacgctggacgcggcctatcgggcccgcgccctggcgttgccctcggaaaaaaccctggccgagcgcatggagcagatcgacccgcccgccctggccgtggcgcgcgatttcctgcgcgccgaggtgggccgccaactggccgccccctggcgcgcggcgttcgacgccaaccagacgccgggcgcctacagcccggcggccggcccggctggccggcgcgcgctgaagaaccaggcgctgagccatctgatggccgccgaaagcgcggacgcgcaagccctggcgcaggcccagtacgaccaggccgacaacatgaccgacagcatggcggctctgtcggcgctggtgaatttcggcgctccggacagcgccgcggcggcgctggcggcgttctacgaacgctggcgcgacgacccgctggtcgtcgacaaatggttcacgctgcaggccaccgcgcgctcgaccgacatcgacgcggtacgcgccctcatggcgcacccggcctttacgctgcgcaatcccaaccgcgcccgcgcgctggtgttccagttctgcctgaacaacgcccgcggcatgcatcgcgcagacggccgcggctatgacttctgggccgagcaggtgctcgccctggacgcgctcaatccggagatcgccgcccgcctggcgcgcggcctggataattgggcgcgctttgccgagccgctgcgcggcgccatgcaggccgcgctggcgcatgtgcgcgcgcatgccgggctgtcgcgcaacgtacaggaaatcgtatcgaaagccttggatctggctgct

SEQ ID NO: 14624 - DNA, 1065 bp, Bordetella pertussis
atgattttccggcgatcccggcctggcacgataggtgccgtcaccctgctgtgcgccagcctgctggccatgccggcgtcttcggcatgcacgcgctttgtctatcacggcgccaacgacgaggtgatcaccgcccgttcgatggactggaaagtggatgtcgggaccaacttgtgggccttcccgcgcggcatgcagcgctcgggccaggctggtccgaattcgatccagtggacgtcgaagcatggcagcgtcatcgcgtcgggctacgatatttccaccaccgacggcatgaacgaggccgggctggtcgccaacgtgctgtggctggccgagtcctcgtaccccgaatacgatggcaagacacccgggctgaccctggccgcctgggcgcaatatgtgctggacaacttcgcgagcgtgcgcgaagccgtcgatacgctggcgagcgagccgttcaccgtcgtcacggacaatgtgcccggcgagcagcggccggccaccttgcatctgtccctgtcggacgccagcggcgacagcgccatcatcgaatatatcgacggcaagcaggtcatccaccacaaccgcgcctaccaggtgatgaccaactcgccgaccttcgacaagcagctggcgctgaacgaatactggaagcagatcggcggcaccgtgatgctgcccggcacgaaccgggcatcggatcgctacgcgcgcgcgtatttctacgtgaacgcgattcccaagagcgaggatcccgtcgaggcgatagccagcgtatttagcgtgatccgcaacgtttccgtgccgtatggcattaccacgcccgaccagcccaatatttcatcgacgcgttggcgcacggtcgccgaccacaagcgcaagcgctacttcttcgagtcggcgctgacccccaatatcttctggatcgatctgggcgcgctggatttctcggcggaaagcgggaaggtgatgaagctggatcttggccccgatcaggcccatatctattccggtcaggccaacgcgcatttcgagcaggccgcgccgttcaagttcctggggctc

SEQ ID NO: 14625 - DNA, 1695 bp, Bordetella pertussis
atggttgcctccattaccgccccccggagatggagcatgaactggattgctggccgctatacgacattcgcgctgatgctgatcggcgccgccctgacctcggcgctggcggtccattcgtcgcgcgcctggctgtgggcagccgtccccttcgtgctgctgtccctgctcggcgtatacgacctgctgcagacccgccacgccatccggcgcaactacccggtcctgggcaacctgcgcttcctgttcgaactcatccggcccgagatccgccagtacttcctcgaagacgatacccacgcctcgccgttctcgcgcgcgcagcgctccatcgtctaccagcgcgccaagcaggacatcgacaagcggcccttcggcacgcaggaagatgtctatggcgaccgctacgagtggatcaatcactccatgacgccggcgcacgtggccgatgccgacttccgcgtcacggtgggcggccccgagtgccgccagccgtattccatgtcggccttcaacatctcggccatgagcttcggcgcgctctcggccaacgccgtgctggccctcaacgaaggcgcgcgcatcggcgacttcgcgcatgacaccggcgaaggcgggatcagccgctaccaccgtgagcgcggcggatcgctggtctggaatatcggctcgggttatttcggctgccgcgacgcccacggcgccttttccgaggaagccttcgtcaagaacgcctgtacgccgcaggtgaagatgatagaaatcaagctgtcgcaaggcgccaagccgggccacggcggcatcctgcccgccggcaaggtcaccccggaaatcgccgaggcgcgcggcgtgccggcctggcaggactgcaactcgccctccagccacagcgccttcgactcgccggtcggcctgctgcatttcgtggcgcggcttcgcgagctgtccggcggcaagccggtcggcttcaagttctgcgtcggccacccgtgggaatggttcgccatcgtcaaggccatgctgcaaaccaatatcacgccggacttcatcgtggtcgacggcgccgaaggcggcaccggcgccgccccggtggaattcgtcgaccacgtcggcacgccgctgcgcgaggcgctgcggctggtgcacaacaccctgatcggcgtgaacctgcgcgaccgcatcaagctgggcgcgtcgggcaagatcatcaccgccttcgacatggcgcgcgccatggccatgggagcggactggtgcaacgccgcgcgcggcttcatgttcgccatcggctgcatccaggcgcaggcctgccataccggcaaatgccccaccggcgtcacgacccaggacccgctgcgccaacgcgcgctggtcgtgccggacaaggcgcagcgcgtggccaacttccacggcaatacgctgcacgccctggccgagctgctgggcgccgccggcctgacccacccggggcagctgcgtccgcaccatatcgcgcggcgcatctcgtcgagcgaagtacgcctgctgtcggcgctgtttcccgaactggcgccgggcgagctgctgcgcggcgaattccgccatcatgtgttccaggtgggctggggcatggcgcaggccgactcgttccagcccgccatggacatcagcgcggcgctggccgcgctgcgcccggccggcgcgcctgcgcacgcc

SEQ ID NO: 14626 - DNA, 660 bp, Bordetella pertussis
atggccgatgacgcgatcaaggcgagcgccgccgcgcgggccgtgccggccgcccccctgacagcccgcgcgatcgggcgcatcaagccgctgctgttcgtggccggcctgctgcctttcgcgcgctggttctggctgggggccaacgacggcctgagcgccaaccccgtcgaattcctgacccggtcctccggcacctggacgctggtgtgcctgctggtcaccctggcgatcacgccgctgcggcggttgaccggccagcccgcgctggtgcggctgcgtcgcatgtgcgggttgtttgcgtttttctacggcagcctgcatttcctggcctgggtatggtgggatcgcggcctggatccggtgtccatgctgcaggatgtgggcgagcggccattcatcaccgtgggttttgccgcgttcgtgctgatggcggcgctggcggccacctcgacccagtgggccatgcgcaagctgggcaagcgctggcagaccctgcaccgggcggtctatgccatcggcctgctggccatcctgcatttctggtggcacaaggccggcaagaacgatctgcagcagccgctgctctatggctcggtgctggccctgctgctgggatggcgggtggcggcctggtggcggcgccgcggcgccgcccgc

SEQ ID NO: 14627 - DNA, 1452 bp, Bordetella pertussis
atgagccgccgcataggaatcatcgacacgacgctgcgcgacgcccagcaatgcctgtgggcgacgcggatgacggccggcatgatggacccgatcgcccaggcgctggacgaggcggggttcgacatgatcgatttcatggccccggtgcagttcgatgtgtgcgtgcgctacctgcgcgaggacccgttcgagaaggcgcgccacttccgcaagcgctttcgcaacacgcccatgcgcagctattgccgcagcaagagcctggtcgggttcagcatggtgcccgacgacatggtcgagctgtggatcgattgcctggcggccaacggcttcagcgcggtcggcacgctcgattcgctgctggacgtcgacaacatgaaggtcagcgtccggcgcgccaagaagatcggcatcaagtcgatcggcgcgctggtgttctgcgaaagccccctgcataccgacgcgctgtatgccggcacggccgccgagctggtgcgctgcggcgtggacggcatcatgctcaaggactccggcgccctgctgacgatcgagcgcatccgcacgctcatcccggcgctgcgcgccgccgtcggcgacatcccgatcgaagtgcacagccacagcaataccggcctggtccagcgcgtctacctggacgcggccgacctgggcatcgaccagctgcatacctcgatcgcgccgctggccggcggcgtggcgcagccctccatacagaacatgacgcgcaacctcgcgcagcgcggctaccgcaccgacgtggacatggcgcgggtcgaggagatcagcgcctatctgcaccggctggcggcccgctacgacttcccgctgggcaagccgatggaatacgacgaattccattatcggcaccagatgccgggcggcatgacggagaactggcgcttccagttgcgccaggcggggctggagaaccgcttcgaggaaatcctcgaagagatcggccgcgtgcgcgaggacctggcctggccgatcatggtgacgccgttctcgcagatcatcggcgtgcaggccatgctcaacgtggtcaacggcgagcgctaccgcgccgtgcccgacgaagtgaagatgtacgcgctgggccacttcggcaggctgctggggccggtcgagcccaacgccctggaccgcatcgtcgccaacggctcgcccgatgtcggcctgacgccgcaaccgaaggatcccgccttgccggggctgcgcaaggccaatcccggcatgaccgacgaggaactgctgctgcgctacatgttcccggccgacgacgtcgaggcgacgctgggctgcaagccgctgaagctgaccgttcccgccggcgggccgatcgtcaggctgatcgaggaaatcctgccgcgcgccggcatacgccatttcgaattgcgcagccagtccgaacacatttcgttcacgcgaccc

SEQ ID NO: 14628 - DNA, 1161 bp, Bordetella pertussis
atgacccagaacctttctacgatcacctgcatcgaagatctgcgcgtcatcgcgcaaaagcgcgtgccgcgcatgttctacgactacgccgattcaggcgcctggacggaaagcacctatcgcgccaacgaaagcgacttccagcgcatcaagctgcgccagcgcgtcgccgtcgatatggaaggccgttcgctgcgcaccaccatggcgggcagcgacgccgtgatgccggtggccatcgcgcccaccggcctgaccggcatgcagcacgccgacggcgagatcctggccgcgcgcgccgccgccgagttcggcgtgccgttcaccttgtcgaccatgagcatctgctcgatcgaggacgtcgcccagggcagcggcaagcccttctggttccagctctacgtcatgcgcgaccgcgagttcgtcggcaacctgatcgatcgggccaaggcggcggggtgctcggcgctggtgctgacgctggacctgcagatcctcggccagcgccacaaggacatcaagaacggcttgtccgcgccgcccaggccgacgctgcgcaacctgatcgacctggcgttcaagccgcgctggtgcctgggcatgctgggcacgcggcgacgcaccttcggcaacatcgtcggccacgccaagggcgtgaccgacctgtcgtcgctgtcgtcctggacggccgagcagttcgacccgcgcctgagctgggacgatgtcgaatggatcaagcggcgctggggcggcaagctgatcctcaagggcatcctggatgccgaggatgcccgcctcgcggccgagagcggcgccgacgccctgatcgtcagcaaccatggcggccgccagctcgatggcgcggtttcctccatcagcgcgctgccggccatcgcggaggcggtcggctcgcgcatcgaagtgtggatggacggcggcatccgctcaggccaggatgtgctcaaggcggtggcgctgggcgcgcgcggcaccatgatcgggcgtgcgttcctctatggcctgggcgcctacggccaggccggcgtgacgcgggcgctcgggatcctctacaaggaaatggacgtcaccatggcgctgtgcggccacaagcacatcaaccagatagaccgcggcatcctgatgccgggcacctatccgcag

SEQ ID NO: 14629 - DNA, 1837 bp, Bordetella pertussis
atgtcagatcaacagaacaccactcccgagaacaccggctatggcgccgattcgatcaagatgctcaaggggctggaggccgtgcgcaagcgcccaggcatgtacatcggcgatacctccgatggcacgggcttgcaccacatggtgttcgaagtggtcgacaacgcgatcgacgaggcgctggcgggccattgcgacgacatcgtcgtcaccatccataccgacaactcgatctccgtcaccgacaacggccgcggcatcccgaccgacatccacaaggatgacgagttcggccgcagcgccgccgaaatcgtgatgaccgagctgcacgcgggcggcaagttcgaccagaactcgtacaaggtgtcgggcggcctgcacggcgtgggcgtatcctgcgtgaacgccctgtccgagtggctgcgcctgacgatccgccgcaacggccaggtgcatcagatggaatttcgccaggggcagcgcgtcgcgcccctgacggcgaccggcccgaccgacaagcgcggcacggaagtgcgtttcctggccgatccggccatcttcaccaacatcgagtaccactacgagattctctcgaagcgcctgcgcgagctgtcgttcctgaacaatggcgtgaaggtccgcctggtcgaccagcgccagggcaaggaggagaactttgcgttctccggcggcgtgaaagggtttgtcgagtacatcaaccgcagcaagtcggtgctgcatctcaacgtgttcgcggtcagcgccgaatcgtcggccggcggcgtgctggtgggcgtggaagtggccatgcagtggaacgacagctacagcgaaagcgtgctgtgtttcaccaacaacattccgcagcgcgacggcggcacgcacctgacgggcctgcgcgcggccatgacgcgcgtgctcaacaagtacatcgccgacaacgagctggccaagaaggccaaggtcgagaccaccggcgacgacatgcgcgaaggcctggcctgcgtgctgtcggtgaaggtgcccgagcccaagttcagcagccagaccaaggacaagctggtctccagcgaagtgcgtccggccgtcgaggacgcggtggcgcgcacgctggaaacctggctgctggagcaccccaacgacgccaaggcgctgtgcggcaagatcgtcgaggccgcgcgtgcgcgcgaggcggcgcgcaaggcgcgcgagatgacgcgccgcaagagcgtgctggaaggcgccggcctacccggcaagctggccgactgtcaggaaaaggacccggcgctgtgcgagctgtacatcgtcgagggcgattcggcaggcggttcggccaagcagggccgcgaccgcaagttccaggccatcctgcccctgcgcggcaaggtgctcaacgtcgagaaggcgcgttttgaccgcctcatcgccagcgagcagatcgccacgctgatcacggccctgggcaccagcatcggccccgatttcaatatcgacaagctgcgctaccaccgcctgatcatcatgaccgacgcggacgtggacggcgcgcacatccgcacgctgctgctgacgctgctgtatcgccagatgcccgagctggtggcgcgcggccacgtctatatcgcgcagccgccgctgtacaaggtcaaggtcggccgcgacgagcgctacctgaaggatgaccaggaagaagcgcaattcatgctgcaactggcgctcaaggacgccgagctgattcccagccagggcgccgccccgatccgtggcgaggcgctcaacgaactggcgcgccagtacgtgctggccgacgcggtcatttcccgcctgtcgcgcg

SEQ ID NO: 14630 - DNA, 1113 bp, Bordetella pertussis
atgaccatgcaactcgtacaaaccacacgcgatgcattgctgaaaccgctgtcgactgtggcgggcatcgtcgaaagacgccataccctgcccatcctggcgaacatcctgatgcgcaaagagggcaacaaggtggctttcatcgccaccgacctcgaggtccagatcaccacgcatgccgacttcggcgtcggcccggagaacgagtccaccacggtggcggcgcgcaagctgctcgacatcctgaaggccctgccggacaccggcgaggtcaagctgggcctggccagcaacaagctgtcggtgcagtcggccaagagccgcttcgcattgcagacgctggcggccagcgagttcccgaccgtggcccagcccgaacagtgggacgtgtcgttgagcatgccgcagcgcatgctgcgccacctgttcaacatggtgcacttcgccatggcccagcaggatatccgctactacctcaatggcatgctgctggtgttcgagccgggccgtgtgcgcgccgtggccaccgacggccaccgcctggcgcactgcgccaccgaggccgacggcatcgccgagcgccatgaggtcatcgtgccgcgcaagacggtgctggaaatgcagcgcctgctcgaggactccgacgagccggtggcgctggacgtggcgccgggccagatccgtttccgtttcggcgacgtcgagctggtgtccaagctggtcgaaggcaagtttccggatttcacgcgcgtgattcccaccaactacacgcgccagttctcggtcagccgcgaagccctgcaaggcagcctgcagcgcgccgccatcctgaccaccgacaagttcaagggcgtgcgcctgcagctggcgcagcaccagatgaagatttcgtcctccaacgccgagcaggaagaggcgcaggaagaaatcgatatcgactacagcttcgagccgctggatgtgggcttcaacgtcagctacctgctggacgtgctgagcaacatcaaggccgagaacgtgcagtggtccgtcatgcccgacgccaacgcgtcggcgctcatcaccctgcccgacgacgagcagttcaaatacgtcgtcatgcccatgcggatc

SEQ ID NO: 14631 - DNA, 270 bp, Bordetella pertussis
atgaacaaaaccgaactcatcgatcacatcgccagcaaggccgatatctcgaaagccgccgccggccgttcgcttgacgccctgatcggtgccgtaaagaccaccctgaagaagggcggcacggtcacgctggtgggcttcggcactttcgccgtgtccgcgcgcgccgcacgcaccggccgcaatccgcgcaccggcgaaacgatcaagatcaaaaaggccaaggtgccgaagttccgtccgggcaaggcgctgaaagacgccgtcaac

SEQ ID NO: 14632 - DNA, 1908 bp, Bordetella pertussis
atgacccacaccgccgccggcgcgccccgcgacgccaagaccgccatccacgcgccgtcgtcgcgcatggcattgatgctgggggcgttgggcgtggtgtacggcgatatcggcaccagcccgctgtataccttgcgcgcctgtctgaacaccatcgacgacctgcagcctgcccacgtgctgggggtgctttccatcctgttctggctgctcatgatcgtggtgtcgctcaagtatgtgacgctggtgctgcgcgccgacaatcggggcgagggcggcacgctggcgctgctggagctggccgtgcgcggccgcgagggcagggcgcgctggctgctgatcgtgctgggcatcttcggcgcggcgctgttctatggcgacagcatgatcacgccggcgatttccgtcctgtcggcgctcgaaggcatcagcatcgtgtcgcacacgctcgaaccctgggtggtgcccgtggcgctggtggtgctggttgcgctgttcgccatccagtcgcacggcaccggcgcggtgggcaagctgtttggtcccatcatggcgctgtggttcgcgacgctggcggtattgggcggctatcaaatctggctgacaccggaggtgctggccgcgctcaatccagtgtgggcgctgcgcttcatcgccgagttcccggtgatgagtttcctgttgctgggcgcggtggtgctggcgctgaccggcgccgaagccctgtatgcggacatggggcatttcgggcggccggcgatccggcgcgcctggttcgccatggtgttgccggcgctgacgctgtgctatttcggccagggcgcgttgctgctgcgcgacccggcggcgatccgcaacccgtttttcctgatggcgcccgaatgggggctggcggcgctggtcgggctggccacggtggccaccgtggtggcgtcccaggcggtgatctccggcgccttttcggtgacgcggcaggccgtgcagctgggtttctggccgcgcatgcagatcctgcacacctcggcggtcgagaaggggcagatctacctgccgcaggtcaatgccttgctgctgtgcgccgtgctggtgctggtgctgctgtttcgcaattccgagaacctggccgccgcctacggttttgccgtgaccgggaccatgctgacgacctcggtgctggcgttcgcggtgttgccgcgcgattccaccggcggcaagcgggtgctgtggatggtgctgctgggcgcgctgctcgtgatcgacatcctgctgttcggcgccaatatcttcaagatccacgagggtggctggctgcccttgctggtcggggtggtggtgttcacgctcatgatgacgtggcggcgcggtcgccgcctgttggccgacatgcaggcgcgcgaccggcagcctttgcgggagttcatgacgcagctcgaggcgttcccgccggcgcgggtgcagggcacggcgatcttcatgaccatgaacgccggcaacgtgccgccggcgttgctgcacaatctcaagcacaacaaggtcctgcacgaccacgtgctgttcctgtcgatccgggtggccgatgtgccctacgtctcggaggacgagcgcttcgagatgcacaagatcagcgcgtcgagctggcaagcaagcatcaactacggcttcaaggaagatccggacgtgcccgacgccttgcgccaggtggccgaggcctatcccgagatcgacctcgaacccatgcggacctcgttctatctgtcgcgccagaccgtggtcgcggcccggcggccggccatggcgcgctggcgtcgcgccctgttcgctttcatggcgcgcaactcgacccgcagcacccgatttttcaagattccgcccaaccgcgtggtggaaatgggcatgcaggtggaactg

SEQ ID NO: 14633 - DNA, 1368 bp, Bordetella pertussis
atgaaactgaaaaaggtattgattgcgaacaggggagagatcgccctgcgtatcatccgcgcgtgccgggagatggacatacggaccgtccaggtctactccagcgcggatgaggattcattgcctgtcaggttggccgatgaagcggcccccatcggcggccccgagccgtcggcaagctacctgaacatcgcggcgctgatcgccgccgcgcgcgagcatggctgcgacgccatccatcccggctacggcttcctgtccgagaacgaagacttcgcccaggcctgcatcgacgccggcatcgtcttcatcggcccggaccccggcgcgatccgcatgatgggcgacaaggcgcaggcccgcaagatcgccaaggaggcgggtgtgcccatcgtaccgggctcgcccgagccggtcagcgacgtcgaggaggccatcagggtggcccgcgaggtcggctatccgttgctggtcaaggcggcggcgggcggcggcgggcgcggcatgcgcgtgatccagggcgaggcgcagctgcgcgaggggctggagcgcgcgtcgatggaggccaagtcggccttcggcgacggctccgtctatatcgaacgctatatctcgcccgtgcgccacgtcgagatccaggtgttcggcgatggcgaggacgtcatccacctgggcgagcgggaatgctcgatccagcgccgccaccagaagctgctggaggaaagcccgtcgccggtgctgtccgacgaaacgcggcagcgcatgggcgaggcggcctgcgcgctggcgcgcgcggtcaagtatcgcggcgcgggcacgctggagttcgtcatggacggcaagagcggcgaattcttcttcatcgaaatgaatacgcgcatccaggtcgagcaccccgtcacggaaaccgtcacgggcgtggacctggtcaggctccagctggcggtggccgccggcggcaggctgggcctgcgccagcaggacatcgtcatgaaggggcacgcgatcgaatgccgcatcaacgcggaggatccgcagaaggcgttcatgcccagcccgggcacggtcaacgatatccggctgccttcggggccgggcgtgcgcatggattcgcacgtgtaccgcggctacaagctgccgccgtactacgactcgctgctgggcaagctgatcgtctgggacgagtcgcgcgagaaagccatcgcccgcatgctgcgcgcgctgggcgaactggagatcgtcggcgtgaagacgaccaaggaattccacgaacggctcatgcgagacgaggatttcatcgccggcaatgtcagcacccagttcgtcaaggaaaagctgtacgccgaccaccccatgtgccatttgctc

SEQ ID NO: 14634 - DNA, 915 bp, Bordetella pertussis
atgggccacggggttatcatccgcgagaatgtcctgcaagagtgtcagatttttcatcccgtcagattcgtcaacaccagggagggttttatggcgcaagtaccggtactgaagctgaacgacggtaatgcaatgccccagctgggcctgggggtgtggcaggttcccaacgaccaggcggccgccagcgtcaaggccgcattggcggccggctaccgctcgatcgacacggctgccatctatggcaacgaggccggcgtgggcgaggggctgcgcgctgcgggggtagcccgcaaggatttgttcgtcaccaccaagctgtggaacgaccggcatggctacgacgaggcgcagcgcgccatggacgagagcctgcgcaagctgggcctggcctatgtcgacctgttcctgatccactggccggtggccggcagcgacaagttcgtcgatgcctggcgcgccatggtggcgatgaaggaggacgggcgcgcccgctcgatcggcgtgtccaatttcacgatcgccaatctgcggcgcctggtcgacgagaccggcgtggtgccggcggtcaaccaggtcgaactgcatccggggttcgcccagcgcgagctgcgcgccttccatgccgaacagggcatcgccaccgaatcctggagcccgctgggccagggcgccgtcatgcacgacgcgacgctggccgggatcgccgcgcgccacggcaagtcggcggcgcaggtgacgctgcgctggcatctgcagaatggcctgatcgtgattcccaagtcggtgacgccggcgcgcatccaggccaacatcgacgtattcgacttcgaattgtcggccgacgagatggccgatatcgacgccttgccggaaggcccgcggctcggacccgaccccgccaccttcaccggc

SEQ ID NO: 14635 - DNA, 939 bp, Bordetella pertussis
atgactcctcccacgacccagaacggccccttgcggcacttcctgcaattcaaagacttctcgcccgccgagatcgcctacgtgctcgaacgcacccgcatcatcaaggacaagttcaagcgctacgaaccgcacatgccgctgcacgaccgcacgctggccatggtgttcgagaaagccagcacgcgaacccgcgtctccttcgaggccggcatgtaccagatgggcggctcggtcatcaacctgacgtccaacgactcgcagctgggccgctccgagcccatcgaagacaccgcgcgcgtgatttcgcgcatggtcgacatcgtcatgatccgcaccttcgagcagacccgcatcgagcggttcgcctcgcattcgcgcgtgccggtcatcaatggcctgaccaacgaataccacccgtgccagatcctggccgacatcttcacctacatcgaacaccgcggccccatcgccggcaagaccgtggcctggatcggcgacgccaacaacatgtcgtacacctggctgcaggccgccgaaatgctgggcttcacgctgcatgtgtcgacgcccgccggctacgaactggacccggcccgcatcggcgcgccggccgccggcgtgctcaagcaattcaaggacccgatgcaggcctgccagggcgcgcacctggtgaccaccgacgtctggaccagcatgggctacgaagccgagaacgaggagcgccgcgccgccttcgccgactggtgcgtggacgccgagatgatggccgccgccgacccgcaggccgtgttcatgcactgcctgccggcgcaccgcggcgaggaggtcaccggcgaagtcatcgacggcgcccagagcgtggtctgggacgaggccgagaaccgcctgcacgtgcagaaggcgctgatggaattcctgctgctgggccagctcgcc

SEQ ID NO: 14636 - DNA, 987 bp, Bordetella pertussis
atgcagaaatcggcggccagggggctggggcatatccggatcaagcacttgcgcttgctcgaactggtggtgcagtacgggtccctgcgcaaggcggccgagggcctgcacctgagcgagccggccgccagccagatgctgcgcgaagtcgagtccacgttcggggtgacgctgttcgagcgaggcaggcggggcatgcggccgaatccgtttgccgatgtgctggtcggccgcgtgtgggtcatcctgcgcgagctgcacgagatgcaggccgacgtggctgagctggagcatcgccagggtgtgtcgagcgacctcggcgcgctgccgcgttgcctgcatacccttgtgcccacgacgctggtgcgcctgttcggcgccggcttcaggtcgcgcgtacggattgccgaaggcacgtcgcggcagctgctcgacgcgctggaccagggcgccatcgatatcgcggtcacccgtttgctggaaagccacgcgggcctggccggcgcgcgcaatttcgacagcgcggtcctctatgaggaagccattgccatcgtatgcagcacggaccatccgctgagcgcggtggacacggtcaccctggacatgctgacgcagtacgactgggtgctgccgccgtcgacctccatcaccggcaaattgatcgaagaggagttcgtcagcgcagggctgcggccgcccgtgccgaaagtggaatggcttacctcggcctcgcgcctgaccctggtgcagaaaagcaatttcctcggcatatgtcctgcctcggtggcggccgaattgcagcagggcggccgcctgcatgtgctgcccgtcaatccgcgggttccgctaccgccgatttcggtggtgtggcggcgcaccaagggcgacatcgcggaaatcatggacatgaagaacgcgctgatcgagtgcgcggccgccatgccgggcgccatggaaaccggggcggctgtccgcgccggcgaattc

SEQ ID NO: 14637 - DNA, 1179 bp, Bordetella pertussis
atgttgttgcccatcattctgctgtccgcggcaggctttaccattctgaccacggaattcctgatcgtcggcctgctgccgcccctggcgcgcgacctgcaggtcaccgtgtcgcaggccggcctgctggtgtcgctgttcgccttcacggtggccgccgccggcccggtgctgaccgccctgctggccaatctcgaacgcaagcgcctgttcgtctgggtgctggtgctgttcggcctggccaatgccctggccgccgtctcgcccaacatctgggtcatggcgttcgcccgcttcgtgcccgccctggcgctgcccgtgttctggtcgctggccagcgccaccgccgtcgagctggtcggccccgcctatgccgggcgcgccatatccatcatcggcttcggcatcgtcgccgccaccgtcctgggcattcccatcggcgtgctggtttccgacgccttcggctggcgcgccgccttcgcggtgctgaccgccgtggcctgggccaaggccctgctgctggcctactttcccaaaccgaggacggggcgccagaaccagcgcctgagcacccaactgcgcatcctgcgcgaccccaggctgctgggccatgtgatgctgtccctgcttgtcttcaccggcatgttcaccgcctacacctacctggccgacatgctcgagcacctggccggcttcgacggcaaggtcgtgggctggaccatgatggccttcggcggcgccggcatattgggcaactggctcggcggacgcctggtcgaccgcagcccgctgggcgccaccatcctgttcagcctgatcatgaccgccggcctgctgttcgtcgcccaggtcatgcaggcgccgtactggctggcgctcgcgctggcgctgtggggcgtcgcccaggccgcgctgctgacggtctgccacgtgcgcgtcatcaaggccgccccgcaggcgccggccttcgccgcgtcgttgaacatctcgggcgccaacatcggcatcggcctgggcgcagccgtgggcggccacttcatcgacagccgcggcctggcgtccctgggcacggtcgccgccgtcatcgtcctcgcggcggtgggcctggccatcgcgctggtgctgtcgcggcgcccgtccacgccccgcccggcggcgcccgcgccgggcatcgaacca

SEQ ID NO: 14638 - DNA, 2679 bp, Bordetella pertussis
atggattccttcgccaaggagacgcttccggtatcgctggaagaagagatgcgccgtagctatcttgattacgcgatgagcgtgatcgtggggcgcgcgctgccagacgtgcgtgacggtctcaagcctgtgcatcgccgcgtgctgtacgcgatgcacgaactgaacaacgattggaaccgtgcctataagaagtccgcgcgtatcgtcggggacgtcatcggtaagtaccacccgcacggcgaccagtcggtatacgacaccatcgtccgcatggcgcaggacttctccatgcgctacatgctggtcgacggccagggcaacttcggctccatcgacggcgacaacgccgcggcgatgcgctacaccgaaatccgcctggccaagatcgcgcacgagttgctggccgatatcgaccaggaaacggtcgacttcgggcccaactacgacggcagcgaacaggagcccctgctgctgccttcgcgcctgcccaacctgctggtcaacggcagctcgggtatcgccgtgggcatggccaccaacattcccccgcacaacctgcaggaagtggtcgacggctgcctgtattgcctgcgcaatccggaatgctcgatcgacgagctgatcgaactgatcccggcgccggactttcccacgggcggggtgatctacggcatcacgggcgttcgcgaggggtaccgcaccgggcgcggccgcgtcatcatgcgcgccaagacccacttcgaggacatggagaagggcaaccgccaggccatcgtggtcgacgcgattccctaccaggtcaacaagaagaccctgcaggagcgcatcgccgagctggtcaacgacaagaagatcgagggcatttcggacatccgcgacgagtcggacaaggacggcatgcgcctggtcatcgagctcaagcgcggcgaagtgcccgaggtggtgctgaacaacctgtacaagaatacgcagctgcaggacaccttcggcatgaacctggtggcgctggtcgacggccagccgcgcctgctgaacctcaagcagctgatcgagtacttcctgcagcatcgccgcgaagtggtgacgcgccgcaccgtgttccagctgcgcaaggcgcgcgaacgcggccacgtgctggaaggcctggcggtggcgctggccaacatcgacgacttcatcgccatcatcaaggcggcgcccaccccgccggtggcgcgccaggaattgatggcgcgttcctgggattcgtcgctggtgcgtgaaatgctggcccgcgtcgacggcgacgccgccggcggcgtcgcggcgttccgccccgacgacctggcgcccgagtacggcctgcagggcgatggcaactaccggctgagcgagacccaggcgcaggaaatcctcaacatgcgcctgcaacgcctgaccggcctggagcaggacaagatcatcggcgagtacaaggacgtgatggccaccatcgccgacctgctcgacatcctggcccgtccggatcgcatcaccacgatcatcagcgaagagctgcaggccatcaaggccgagttctcgacctcggccaaggatacgcgccgcgccgaaatcgaagtcaacgccaccgagctggataccgaagacctgatcacgccgatggacatggtggtcaccctgtcgcatggcggatacatcaagagccagccgctgtccgagtaccgttcgcaaaagcgcggcggacgcggcaagcaggctaccgccatgaaggagaacgactgggtcgaccagctgttcatcgccaatacgcacgactacctgctgtgcttctccaaccggggccgggtgtactggctgaaggtgtgggaggtgccgcagggcacgcgcaactcgcgcggcaagcccatcgtcaacatgttcccgctggccgacggcgagaaggtgaccgtggtgctgccggtcaaggaattcagcgaagaccactacgtcttcatggcgacgtcgcgcggcacggtcaagaagaccccgctgtccgacttctcgaacccgcgcaaggccggcatcatcgccgtcgacctggatgacggcgattacctgatcggcgcagacctgaccgacggcaagcacgatgtgatgttgttctccgacgccggcaaggcggtgcgcttcgacgagaacgacgtgcgtccgatgggccgcaatgcgcgcggcgtgcgcggcatgatgctcgaagagggccagaccgtcatcgcgctgctggtggccggcgacgagacccagagcgtgctgaccgccaccgagaacggctacggcaagcgcaccccgatcaccgagtacacccgccatggccgcggcaccaagggcatgatcgccatccagaccagctcgcgcaacggccgcgtggtcggcgccgtgctggtgatgccgtccgacgagatcatgctgatcaccaccggcggcgtgctggtgcgcacccgcgtggccgagatccgcgagatgggtcgcgccacgcagggcgtcacgctgatcagcgtcgatgacggcagcagcctgtccggcgtgcggcgcgtggtcgaaagcgatgccgacgccgatgacgaggatggcggcgaagagggcggcgaagagggcggcgaccaaggcggcgacgataccggcgcccagggcaaggattctgaaccgactgaacctacggag

SEQ ID NO: 14639 - DNA, 1047 bp, Bordetella pertussis
atgaatcttataaaagcctcgttttcatcctggcttgccgtatttcaatcggtttcgcgcgcgtcccgcgcgcacgtcgtggacacggatagaatcgtcgccatgtcctccaacccggtttccgcttcatgcgcgcctgtgctgcaggtgcatggcctgaccaagcgctacggcgagcgcgtgatcgtcgacggcctgtccttcgcgctgcggcgcggcgagtgctatggcctgctgggccccaacggcgcgggcaagaccaccaccttgcgcgccttgctgggcctgacgccgttcgacgacggggcggtcgaggtgctgggccacgccgtgccggcgcaggccaggcaggcgcgggcgcgcctgggcgtggtgccgcagctcgacaacctggaccccgacttcaccgtggccgagaacctgctggtattcggccgctacttcggcctgagcgacgcgcaggtgcgggccaggctgccgcaattgctggcgttcgcggccctggccgccaaggccgatgcccgcatcggcgagctctccggcggcatgaagcggcgcctgacgctggcgcgcgcgctcatcaacgatcccgacctcatcatcatggacgagccgaccaccgggttggatccgcaggcgcgccacctgatctgggagcgcctgaaggcgctgctggcgcgcggcaagaccatcctgctgaccacgcatttcatggacgaggccgaacgcctgtgccaccggctcggcgtgatcgaccacggccggctgattaccgaaggcgcgccccgggccctgatcgagcgctgcctggagccgcaggtggtcgaggtctatggcgatgacctgcacgcctggctggctgcgcaccgcgcggccttgccggcgcgggtcgaggtgagcggcgaaacggcgttctgccatacggacgacgccacgcccgtcgtgcaggcgctgcagggctggccggacctgcgctacctgcaccggcccgccaacctcgaagacctgttcctgcgcctgacggggcgcggcatgcgggaggacgca

SEQ ID NO: 14640 - DNA, 669 bp, Bordetella pertussis
atggctattttcgcatccgccggcgccgcgccggtcatcaccatcgacggccccacggcttccggcaagggcaccatcgcgcaccgggtagccaagcagctgggctgggacgtgctcgacagcggcgccctgtaccggctgaccgccctggccgcgttgcggcgcggcctgccggccaccgacgagccggcggtggccgccgtggcccaggctctggacgtacggttcgacgggccgcatgtctacctggaagggcgggacgccgggcatgaaatccgccaggaagaggtcggaaactacgcttcgcgcatcgccgcctacccgggcgtccgtcaggccttgctggagcgccagcgggctttccggcagccgccgggcctggtcgccgacggccgcgacatgggggcggtcgtgtttcctgatgcgtccctgaaaatatttctggtggccgatgtcgaggcgcgcgcgcaaagacgctgtaagcagttgatcgaaaagggaatttctgctaatctagatgacctgctacgcgatatgcgtgaacgcgatgcgcgtgacacgcagcgtgcggtggcaccgctagccccggctgccgatgcgcatgtgctggattcatctggcctgaccatcgaacagaccgtgcaggccgtgctggatttctggtgcgcc

SEQ ID NO: 14641 - DNA, 1728 bp, Bordetella pertussis
atggattccaacctaatgtcttccgtttccacctccgccatccttggcggcgaaaacttcgccgacctgttcgcagaaagcctcaagagccaggacatgaagtccggcgaggtcatcagcgcagaagtcgtgcgcgtcgaccacaacttcgtggtcgtcaacgccggcctgaagtccgaagcgctgattcccctggaagagttcctcaacgaccagggcgaactcgaagttcaacccggcgacttcgtctcggtggcgatcgattcgctggagaacggctacggcgacaccatcctgtcgcgcgaccgcgccaagcgtctgtcggcctggctgcaactggagcaggccctcgagaacggcgagctggtcaccggcacgatcaccggcaaggtcaagggcggcctgaccgtcatgaccaacggcatccgcgcgttcctgcccggttcgctggtcgacctgcgtccggtcaaggacaccacgccgtacgaaggcaagaccctcgaattcaaggtcatcaagctggaccgcaagcgcaacaacgtcgtgctgtcgcgccgccaggtgctggaagccagcatgggcgaagagcgccagaagctgctcgagacgctgcacgaaggcgcggtggtcaagggcgtggtcaagaacatcaccgactacggcgcgttcgtcgacctgggcggcatcgatggcctgctgcacatcaccgacatggcctggcgccgtgtgcgtcacccgtccgaagtcctgcaagtgggtcaggaagtcgaagccaaggtgctcaagttcgaccaggaaaagagccgcgtctccctgggcgtcaagcagctgggcgaagatccgtgggtgggcctggctcgccgctacccgcagggcacccgcctgttcggcaaggtcaccaacctgaccgactacggcgcgttcgtcgaagtcgaagccggcatcgaaggcctggtgcacgtgtccgaaatggactggaccaacaagaacgtcgatccgcgcaaggtcgtgaccctgggcgaagaagtcgaagtcatggtcctggaaatcgacgaagaccgtcgccgcatttcgctgggcatgaagcagtgccgccagaacccgtgggaagagttcgccaccaacttcaagcgtggtgacaaggtccgcggcgccatcaagtcgatcaccgacttcggcgtgttcgtcggcctgcccggcggcatcgacggcctggtccatctgtccgacctgtcgtggacggaatcgggcgaggaagccgtgcgcaacttcaagaagggcgacgagctggaagccgtggtgctgggcatcgataccgagaaagagcgcatctcgctgggtatcaagcagctcgaaggcgacccgttcaacaacttcgttgccacgcacgacaagggcgccgttgttccgggcaccatcaagtcggtcgagcccaagggcgccgtgatcaccctgtcggtggatgtggaaggctacctgcgcgcctccgagatctcctcgggccgcgtcgaagacgctaccaccgtgctgaaggctggcgagaacatcgaagccatgatcgtcaacatcgaccgcaaggcgcgttcgatccagctgtcgatcaaggcccgcgataacgccgagacggccgagaccatccagcgcatgtccgaggcgagcgcttcgtcgggtacgacgaacttgggcgcgctgctcaaggccaagctggaccaacagcgcaacgacggt

SEQ ID NO: 14642 - DNA, 1125 bp, Bordetella pertussis
atgccgcgtcccatatttgcttcgatctcccagtccgccctgcggcacaaccttgccaccgtgcgtcgtcatctcgatgacgtggcggccaaggcggacggcacgccgccctccatctgggcggtcatcaaggccaatgcctacggccatggcatcgaacaggcggtggccggtttctcggcggcccagggcctggccatgttggacctgcaggaggccgtgcgctgccgcgaagcgggctggggcggccctatcctgctgctcgaaggcttcttccagccgtccgacctggaaatcgtcgaccgctatcatctcgccaccaccgtgcatacgcgcgagcagttcgacatgctggcgcatgcgcggctgtcgcgccgcgtcgacatcatggtaaagctcaacagcggcatgaaccggctgggtttcgcgccggacgcctatgggtccgcctacgcgcgcgcgcagcagctgcatgagtacggcgtggtgggcggcatcggcaagatgacccatttcgcctgtgccgacgggccgcagggcgtgacccagcagatgaacgtcttcaacggcgccaccgcgcacctggccggggcgaccagcgtctgcaattcggccgccaccctgcgctatgccgacctggcggtcggccacgacggccagacccattgggtgcggccgggcatctgcctgtacggcgcctcgccgttcgccgatgcccaggccggggcgttcggattgattccggccatgacgctgcgctccgagctgatcgccatccaggatatcccggccggcgcggcggtgggttacggcgccattttccgcgccgaccggccgatgcgcatcggcgtggtggcgtgcggctatgccgacggctatccgcgccatgccggcaccggtacgcccctgaccgtgggcggcgtgcgcacgcggctggtcggccgcgtgtcgatggacatgctcatggtcgacctggatccggtgccggccgccggtatcggcacgcccgtggtgctgtggggcgaggacggcccgtcggtcgacgaagtggccgaggccgccggcaccatcggctacgaattgctgtgcgcgctggccccgcgcgtacccgtgcgccacgaaggc

SEQ ID NO: 14643 - DNA, 939 bp, Bordetella pertussis
atgaatcaataccccgctgaacgcatcgcccgcgcccgcgtgctggtcgtgggcgacgtcatgctcgaccgctactggttcggcgaagtcgaccggatttcgccggaagctccggtgcccgtggtgcgcgtggcgcgccgcgaagaccgcctgggcggcgccgccaacgtggcgcgcaacgtggccgcgctgggcgcccaggtgacgctgatcggggtggtcggcgccgatgaggtcggcctccgcatcgagcgcatggcagccgaagagggcgtgcgcaccgacctggtatccgacaccgaacacccgaccacgctgaagatgcgcgtgctcggccgccagcagcagctgctgcgggtggatttcgagcagcatcccgagccggccgcactcgacggcatcagcgccgccgtggcgcggcagctggcgcagcacgatatcgtggtgctgtccgattacgccaagggcgtgctggaccgggtcgaatccatcatcgccgccgccgtcggccacagcctgccggtgctggtcgaccccaagggcgaccactacgagcgctatcgcggcgccacgctggtcacgcccaaccgggccgaaatgcgcgaggcggtcgggcgctggaaaaccgaggacgaactggccgagcgcgcccagcggctgcgcctcgacctggacctggaggccttgctcgtgacgcggtccgagcagggcatgaccctctttaccgacgcggggcgcgaccatgccgacgccgccgcgcacgaagtctatgatgtatcgggcgccggcgataccgtgctggcgaccctggccgtcatgcgcgcggtgggactgtcctggggcgacgcgatgcgctgggccaaccgggccggcggcatcgtggtcggcaagctgggcacgtcggtggtgaccgccgcagaacttgcaggagaatcaaca

SEQ ID NO: 14644 - DNA, 909 bp, Bordetella pertussis
atgagcactcctacctaccccactatcgagcaaaccgtcggcaatacgccgctcgtgcgcctgcagcgcattcccggcgcggccgggcaggcgcgcggcaacgtgatcctggccaagctggagggcaacaaccctgccggctcggtcaaggaccgtcctgccctgtccatgatcctgcgcgccgaagagcgcggcgaaatccatccgggcgataccctgatcgaggccaccagcggcaataccggcatcgcgctggccatgacggcggccatgcgcgggtaccggatggtcctcatcatgcccgacaacctgtcgctcgagcggcgggccgccatgaccgcctatggcgccgaactgatcctcacgcccgccgccaagggcggcatggaatacgcccgcgacctggccacggcgatgcaggccgaaggcaagggcaaggtgctggaccaattcggcaaccccgacaacccgcgcgcccatatcgagggcaccggtccggaaatctggaaccagacggatggccgtgtcacgcatttcgtcagcgcgatgggcaccaccggcaccatcatgggcgtgtccacctacctgaagtcgcgcaacgcggcggtgcaggtggtcggcgcgcagccggccgaaggctcgcagatcccgggcatccgcaaatggcccgaggcctacatgccgaagatcttcgaccgtgcgctggtcgatgcctatgagtccatcgcgcaggccgagggggagaccatggcgcgccggctggccgccgaagagggcatattcgccggcatttcgtcggcgggcgccctggtggcggcgttgcgcgtggccgagcgggtcgagaacgccaccatcgtcttcatcgtctgcgaccgcggcgaccgctacctgtcgaccggcgtcttcaac

SEQ ID NO: 14645 - DNA, 1143 bp, Bordetella pertussis
atgttcaactgtcggcgattcctgcaaatcggcacgctgtcggccctgctggccggctgtgccacctccagccaaacaccccaagcccagcatcttcccgcgcaggccgccacaggccaggccgaccgcgtccgcatcggcccggacaaacccgtatcgagcgacgaaggccccgccacgctgacgccgaccggcgaactgcggcccgacgtccgcgccttcgccgaacagctggcggcgcagcgcgagctgcccctgccgcaagtgctggccagcctggaaagcacgcgctacaacgcgaccgtcgcccgcctcatcgccccgtccggcgcgtcgggcaagaaaatctggcgcagctggctgacctatcgcgggcgtttcgtcgaacccaagcgcatcgcctggggcgtggaattctggaacgccaaccaggacctgctcaaccgcgccgcccagcgctacggcgtgccggcctcgatcatcgcctccatcatcggcgtggaaaccctgtatggccgcaacgtgggcaacttccgcgtggtcgacgccctggcgacgctggcattcgactacctcgatcccgccaagcccgagcgcgccgacatgttccgcggccagctcggcgacttcatcaccctggcgctgcaggacaagctggaccccgagacgcgcggctcgtacgccggcgccatcggcatgccgcaattcatgcccggcagcatcatgcgctatgcggtcgatggcgatgacgacggccacatcgacctgaccaacagcgtcgcggacgcggtcatgtcggtgggcaacttcctggtcgaacatggctggcagcgcggcctgccggtgttcgcgccggtcgcgctgccggccgatccggcgccgctggtggccggcggccttacgccgacgctggactggaacggcctgcaggccgccggcgcgcgcccggcggcgggcgccggacgcggcgcctggcaggagcaccccatgggcatcgtggacctggtcgaggaagcgcgcggcaccgtgcaataccgtaccgccacgcccaatttctttgccctgacgcaatacaaccgcagctacttctatgccacggcggtggccgacctggcggccgaactgcaggcccgcacgggctat

SEQ ID NO: 14646 - DNA, 1359 bp, Bordetella pertussis
atggcgaaatcccgaaccatctatgtctgcgccgaatgcggcggcaccagcctcaagtggcaaggcaagtgcccgcactgctcggcctggaataccctggaagaaaccgtggagtccgccgcgccctcggccggcgggcatcgctacgcgcccctggcggcagccagcccggtgcgcagcttgtccgaaatcgaagcgcgcgagacgccgcgccagcccaccgggctggacgagttcgaccgcgtgctgggcggcgggctggtcgccggcgcggtggtgctgatcggcggcgaccccggcatcggcaagtccacgctgctgctgcaggcgctggcctcgctgtcggccacgaccaaggtgttgtacgtcaccggtgaagagtcggccgaacaggtcgcgctgcgggcgcgccggctgggcctgcagaccggcaatgtcgacttgctggccgagatccggctcgaggcgatccaggcggccgtgtccgaacagaagccgaccgtggcggtgatcgattcgatccagacgctctacagcggcgagctgaccgccgcgccgggctcggtgtcccaggtgcgcgaatgcgcggcgcagctgacgcggctggccaagcagaccggcatcgccatcgtgatgatcggccacgtcaccaaggacggcgcgctggccggaccgcgcgtgctcgaacacatcgtcgacacggtgctgtacttcgagggcgacacgcattcgtcgtttcgcctggtgcgcgcgttcaagaaccgcttcggcgccgtcaacgagctgggcgtgttcgccatgaccgaccgcggcctgcgcggcgtggccaatccgtccgcgctgtttctctcgcagcaccagcagcaggtggccggttcctgcgtgctggcgacccaggaagggacgcgcccgctgctggtggaagtgcaggcgctcgtcgatacttcgcatgcgcccaatccgcgccgcctgacggtggggctggagggtaatcgcctggccatgctgctggccgtcatgcaccgccatgcgggcgtctcgacctacgaccaggacgtattcgtcaatgccgtgggcggggtgcgcatcaccgagccggcggccgacctgccggtactgctggccatcatgtcatcgctgcgcgacaagccgctgcccgccggcctggtggcgttcggcgagatcggcctggccggcgagatccggcccgcgccgcgcggccaggagcgcctgcgcgaagcggccaagctggggttcagcgttgcgctgattcccaaggccaatgcgccgcgccagcctatcgaagggctggagatatgggccgtggatcggctggacgccgccctggacaaattgcgt

SEQ ID NO: 14647 - DNA, 375 bp, Bordetella pertussis
ttggatacattgccagacggcgcatcctggttgccgccacgcaagacgcgtggccgtgcgccgggctgcttgcccggcctggctggcgacccgctaacctgggaaattatcatgaaagaaggcattcaccccgaataccgcgaagtggtgttcatggacgttcagacgggcaacaagttcgtcacccgctcgaccatccacacccgcgaaaccgtcgaaatcgacggcaagacgtacccgctcttcaagtgcgacgtgacgtccgaatcgcacccgttctacaccggcgcgcagacgcgtatcgtcgagaccggccgcgtggaaaaattccgcgcccgcttcgcccgcaccgccgggacggtcaagtcggcgtcc

SEQ ID NO: 14648 - DNA, 675 bp, Bordetella pertussis
atgagtctgcccgaacccctgctccgcgccgactggccgcgcgaacgcctgctgcgccacggcgccgcgacgctgagcgatcccgagctgctggcgctggcgctgcgcaccggcgtggcgggctgcaacgcggtccagctggggcacgacctgctgcgccggttcggcggcctgcgcggcctgctcggcacctcgccggcggagctgcaggtggtgcccggactgggaaccgccaaggcctgcgtactggccgcggtgctggaactggcccgccgcacgctcgaagaagacctggtgcgccaggacgccctggccaaccccgacctggtgcgccgctattgccaggcggccctgggccaccgcaaggtcgagcactgcatcgccctgtacctggacgcgcggctcaagctgatcatctgcgccgaagtcgcccgcggcaccttgacccaggcgcagatctacccgcgcgaaatcgtccgcgaggcattgcgccaccacgcggccgcgctgatcctgacccacaaccatccgggcggcaccgccgccgccagcgccgcggacatcgccatgacgcgccagatcaggcaggcgctggccctgatcgacgtgcggctgatcgaccacgtcatcgtggccggcgccgccacggtatcgatggccgcgcaaggacacctc

SEQ ID NO: 14649 - DNA, 378 bp, Bordetella pertussis
gtgaacctcatcgctatcctggaacaggaagaaattgctcgccttaccggcggcaatgccgtaaccgaatttgctcccggcgacaccgtcgtggtcagcgtcaacgttgtcgaaggcacccgcaagcgcgttcaggctttcgaaggcgtggtcatcgccaagcgcaaccgcggcctgaactcgtcgttcatcgtgcgcaagatctcgtcgggcgaagccgtggaacgtacgttccagctgtactcgccgcagatcgccggcatcgaagtcaagcgccgcggcgacgtgcgccgcgccaagctgtactacctgcgcagccgctcgggcaagtccgcacgcatcaaggaaaagctggttctcaagaaagccaagtcggct

SEQ ID NO: 14650 - DNA, 723 bp, Bordetella pertussis
atgtctgactctgctccttctcgtccacgccgcacgccagtgcgtccgctcttcgatcccatggcgcagccttgggaaaccgccaatcaggggctggcccgcgtggacgaacgcctgctgacgccgcccgagctgcgctccagcctgcgcccggccgatcactggcggctcgatcccttgtgcgcggcggagccgcgcgcgcccggccgggaaggcagtctggtggccgcggcggtattgatccccctggtcatgcgggccgatggcgtgcgcgtcatgctgacccagcgcgccgcgcacctgcacgaccacgccggccaggtcagcttcccgggcgggcgtatcgaagtcagcgatgccacgccggtggccgccgcgttgcgcgaggcccaggaggaaaccggcctgccggtgcagcaagtggaagtgctgggcagcatgccccagtatttcaccgctacgggctttgccatcacgccggtggtctcgctggtgcagcccgatttcgagctggcgcccgatgcgttcgaagtggccgaggtgttcgaggtgccgctgtcgtttctcatggacccggccaatcatcggctgtaccgcgccgcgctgcccgatggctatgtgcgccaatactatgcgatgccatggcagcgctatttcatctggggcgccaccgcgggcatgctgcgcaatctgtatcagacggtgcgcgaggcgctgccgggt

SEQ ID NO: 14651 - DNA, 1476 bp, Bordetella pertussis
atgagtcgcgaaattcttctgttggtcgatgctttggcgcgcgaaaagaacgtcacccgcgaagtggtgttcggggcgctcgaaagcgcgctggcttcggcaatgaaaaagcgcttcaaggacgatgcggacatccgtgtctccatcgatcgtgaaaccggcggccacgaaggctttcgccggtggctggtcgtgcccgacgaggctggcctgcaagagcccgacaagcaggagctgctgtccgaggcgcgcgaaatggcgcccgacatcgaagtgggcgagtacatcgaggaagcgctcgagccggtcgagttcggccgtatcggcgcgcaggccgccaagcaggcgatcctgcagaagatccgcgacgccgagcgcgagcaggtcctgaacgacttcctcgaccgcggcgagacgattatttccgggtccatcaagcggatggacaagggcgacgtgatcatcgaaaccggcaagatcgaagcgcgcctgccgcgctccgagatgatcccgaaggaaaacctgcgggtcggcgaccgcgtgcgcgccttcgtgctgcgggtcgaccacgccgcgcgcggacagcaggtcatcctgtcgcgcacctcgcccgagttcatccgccaattgttcgaaaacgaagtgcccgagatcgaacagggcctgctggagatcaaggccgcggcacgcgacccgggcgtgcgcgccaagatcgccgtggtggcctacgacaagcgtatcgacccgatcggcacctgcgtgggcatgcgcggttcgcgcgtgaccgccgtgcgcaacgagctgggcggcgagcaggtcgatatcgtgctgtggtcggaagacccggcgcaattcgtgatcggcgcgctggcgccggccaacgtcgagtccatcgtggtggacgaagacaagcacgcgatggacgtggtggtcgacgaggaaaacctgcccaaggccatcggcgccaaggggcagaacgtgcgcctggcgtccgagctgaccggctggcagatcaacatcatgacgccggaggaaagcctcaatcgccaggaaaccgagcgtgccgcgttgcgcgcgacgttcatgagcaagctggacgtcgacgaagaggtggccgacatcctgatcgatgaaggtttcaccggtatcgaagagattgcctacgtgcccatgcaggaactgctggagatcgaggcattcgacgaggacaccatcaatgagctgcgtgcccgtgcccgcaatgcgctgctgaccgaggcgatcgcccaggaagagcgccttgaaacggcccaggacctgctcgaactcgagggcatcacgccggagctggccgccaagctggccgaacggcaggtgcatacgcgtgacgatctggccgagctgtcgaccgacgagctggccgagattgccggcctgcaggaagaggaagccagcgatctgatcatgcgtgcccgcgcccactggttcgacgaggaa

SEQ ID NO: 14652 - DNA, 2636 bp, Bordetella pertussis
aggcggcgcccgcgccggccgaaccggtgcgcgccgagccggcggtcgagacggctgccaagccggtcgagccgcccgtcgccgaggcgcccgccgagcccgttgcggcgccggcggccgaaccgcaacccgaacagcccgctcaggccgaagcccagcccgagccgactcccgctgcccaggccgagcctgagccgcaacccgagcctcaaccggaagccgctcctgcccaggcagtcgccgagccggtcgaacctgcaaagaatgtatctgtcaccgagaccgaggctgaacaggcccggccggaacccgttgtgcacgcccaaactgaactgacctcccaaaccccgactccggtcgcccagccgtccgcacccgctgaatctcccaagagcgtcaaggccgaaccggccgccgcgcccaagaccacggccaagccgggtgagatccgccgcgccgccgcgccggcggcgcccgaccgcgcccgcgaagaggcgcgccgcgccgccgaggccgaggccgccgcgctgcgcgagatgctcagccgtccgcgcaaggtgctgcgcgcgcccgagcccgagccgcaggcaggcgccctgtcgggcacgctgcacaagccggccggcaagccggccaccacggccgcgcccaagaaggacgccaagccgggcgcgccgggtgccaagaagaccatcaagactgccgaggtgtcctccacctggagcgacgacagcgcccgcaagaagccggccgacaacaagcccgcggtcgccacgcgtgacggctggcgcgccggcggcaagggcggcaggggcggacgcaacagccgcaaccagcaccaggaccgtcgtcacgagcaggtgcagcaggaattcatcgcgcgcgagatccacgttcccgaaaccatcagcgtggccgacctggcccacaagatgtcggtgaaggcggccgaggtcatcaagcaattgatgaagctgggccagatggtcacgatcaaccaggtgctggaccaggaaaccgcgatgatcgtggtgcaggagttcggccacacggcgatcgccgccaagctggacgatcccgaggccttcctggacgaaaccgcagcggtcaccgaggccgaagccgagccgcgcgcgccggtcgtgaccgtcatgggccacgtcgaccacggcaagacctcgctgctggattacatccgccgcgccaaggtcgcctcgggcgaagccgggggcattacccagcacatcggcgcgtatcacgtcgagaccggccgtggcgtggtgaccttcctggacaccccgggccacgaggccttcacggcgatgcgtgcgcgcggcgccaaggccaccgacatcgtcatcctggtggtggcggccgatgacggcgtgatgccgcagacgcgcgaagccattcaccatgccaaggccggcggcgtgccgctggtggtggccgtcaacaagatcgacaagcccgaggccaaccccgagcgcgtcaagcaggaactggtggccgaggaagtcgtgccggaagaatacggcggcgacgtgccgttcgtgccggtgtcggccaagacgggcgcgggcatcgacgatttgctcgagaacgtgctgttgcaggccgagatcctggaactgaaggcgccgatcgaagcgccggccaagggcctggtcatcgaggcgcgcctggacaagggtcgcggcccggttgccaccatcctggtgcaaagcggcacgctcaagcgcggcgatgtcgtgctggccggcgccagcttcggccgcgtgcgcgccatgctggacgagaacggcaagcagatccagaccgccggtccgtcgatcccggtcgagatccagggcctgaccgaagtgccggccgccggcgacgaactgatggtgctgtccgacgagcgcaaggcgcgcgagatcgcgctgttccgccagggcaagttccgcgacgtcaagctggcgcgccagcaggccgccaatctggagtccatgttcgacaacctgggcgagggcacgcagaccctggcgctgatcgtcaagaccgacgtgcagggttcgcaggaggcgctggtgtcttcgctgaccaagttgtcgaccgacgaagtgcgcgtgcaggtggtgcatgccgccgtgggcggcatctcggaaagcgacgtcaacctggccatcgcctccaatgcggtggtgatcgggttcaacgtgcgcgccgagcaaagcgccaagaagctggccgagaccaacggtatcgacctgcgctactacaacatcatctacgacgcggtcgacgaagtgaaggccgccatgtcggggatgctggctcccgagaagcgcgaagaggtcatcggcctggtcgaagtgcgcgaggtctacacgatctcccgtatcggcacggtggcgggctgcatggtactcgacggcgtggtgcgccgcgattcgcaggttcgactgctgcgcaacaacgtggttcaatggacgggccatctcgattcgctgcgccgtttcaaggacgacgtcaaggaagtcaaatccggcttcgattgcggcctgaccctgcgcggcaacaacgacctgcagctgggcgaccagctggaagtctttgaaatcaaggagatcgcgcgcacgctgtaaggtgcg

SEQ ID NO: 14653 - DNA, 732 bp, Bordetella pertussis
atggctaaacgacgcgggctcgcgctcgacggtgtgctgttgctggacaaacccgtgggtttgtccagcaaccacgccttgcagcgagccaagcgcaccgtggacgcggccaaggccggtcatacgggaacgctggaccctttcgccactggcctgctggtttgctgcatgggccgggctaccaagatctcgggccgcatgctcgaggccgacaagacctaccaggccacgctgcagtttggcgaggagaccgactcgggcgacctgaccggccacatcgtggcccgggccccggacggatttgccggtgtcgaagaggcggcgctgcgcgatgtgctgtcacgtttcgtgggcacgatcgagcagatcccgcccatgtattcggcgctcaagcgcgacggcaagccgctttacgagtacgcccgggcgggcatcgagctggaccgtccgcccaggcaggtgaccatccgccacatcgagctgctgtcgttctccggaatgcaggcgcagatcgatgtggcctgcagcaagggcacctatatacgcacgctggcccaggacatcggccgcgcgctgggctgccatgcccacctggcggcgctgcggcgcacgcacgtcgggccgttttcgctggaccgcgccgtaaccctggaagccctgcaggcgatgcccgacgccaagcaggccttgcttgccatgaatgaattgccggcgggcctgctgcccgccacc

SEQ ID NO: 14654 - DNA, 1869 bp, Bordetella pertussis
atgaattgccggcgggcctgctgcccgccacctgaacttaaaggacctgctatgacccgcgccctgcgcaacgtcgccatcattgcccacgtggaccacggcaaaacgaccctggtcgaccaattgctacgccaatccggcactttccgcgagaaccaatcggtggccgaacgggtcatggattcgaacgacatcgagaaagaacgcggcatcaccattctggccaagaactgcgccgtcgaatacgaaggcacgcacatcaacatcgtcgacaccccgggacacgccgacttcggtggcgaagtcgagcgggtgctgtcgatggtcgatggcgtcctgctgctggtcgatgccgtcgaaggccccatgccgcagaccatcttcgtcacgcgcaaggcgctggccctgggcctcaagcccatcgtggtggtcaacaagatcgaccgtccgggcgcgcgtccggatttcgtgatcaatgccaccttcgagcttttcgacaagctgggcgccacggaagagcagctggacttcccggtggtgtacgcctcgggcctgtcgggctacgccggcctgaccgacgacgtgcgttcgggcgacatgcggccgctgttcgaggccatcatgaagtacgtgccgcagcgcgatgacgatgccaacgggccgctgcagatgcagatcatctcgctggactacaacagctacgtcggcaagatcggcgtgggccgcatcaaccgcggccgcatgcgcggcaacatggatgtcgcgttccgcttcgggcccgatggcgaggtccagcgcggccgcatcaaccaggtgatgaaattcagcggcctggagcgcgttgtcgtggacgaggccgaagccggcgacatcgtgctggtcaacggcatcgaagacctgcacatcggttcgaccatcaccgacccgtccacgcccgagggcttgccggtactgcgcatcgacgaacccacgttgaccatgaacttcatggtcaacacctcgccgctggccggccgcgaaggcaagttcgtgaccagccgccagatccgcgaccgcctggagcgcgagctgaagtccaacgtggcgctgcgcgtacgcgacaccggcgacgatacggtgttcgaggtctcgggccgtggcgaactgcacctgaccatcctgctggagaacatgcgtcgcgagggctacgagctggccgtgtcgcgcccgcgcgtggtcttcaaggaaatcgacggcgtgaaatgcgagccgtttgaggcgctgaccgtcgacgtcgaggacgcccaccagggcggcgtgatggaagagctgggccgccgcaagggcgacctgcaggacatgcagcccgatggccgtggccgtacccgcctggaatacatcattccggcgcgcggcttgatcggctttcagaacgagttcctgacgctgacgcgcggcaccggcctgatgagccatatcttccacgagtacgcgccgctgcgcgaaggttcgatcggcgagcgccgcaacggcgtgctgattagccaggataacggcgacgcggtggcctacgccctgtggaagctgcaggatcgcggccgcatgttcgtcagccccggcgagccgctgtacgaaggcatgatcattggcatccacagtcgcgacaacgacctggtggtcaaccccatcaagggcaagcagctgaccaacgttcgcgcgtcgggcaccgacgaggccgtgcgcctggtgccgccgatccagatgtcgctcgagtatgcggtcgagttcatcgacgacgatgaactggtcgagatcacgcccaagtcgatccgcctgcgcaagcgctacctgcaggagcacgagcgccgccgcgcttcgcgcgaaaacgcg

SEQ ID NO: 14655 - DNA, 2712 bp, Bordetella pertussis
atgaaaaaaaccttattgctggtagacggttcgagctacttgtaccgtgctttccacgccatgcccgacctgcgcaatgcgcagggcgaacccacgggtgcgctttatggcgtggtcaatatgttgcgcaagctcgttcaggatcataaggcagagtatgccgtatgcgttttcgatgcacgcggaaaaacattccgggacgatttgttccctgactacaagtcgcaccgcccgcccatgccggaagacctggcggcgcagatcgagccgatccacgaggccgtacgcgccctgggctggccgctgctggccatcgaaggggtggaggcggacgacatcatcggcacgctggcgcggcaggccagcgcgcaaggcatcgacaccatcgtctccacgggcgacaaggacctggcgcaactggtcgacccgcacgtcacgctggtcaacaccatgagcggcgaggtgctcgacgttgccggggtgaacagcaagttcggcgtgccgccggagcgcatcgtcgattacctgatgctggtcggcgacacggtcgacaacgtgcccggcgtgaacaaggtcggacccaagacggccgtcaagtggctggccgaacatggctccatcgacgcgctggtggccgccgccgacagcgtcaagggcgtggccggcaacaatctgcgcgaagccattccgaactttccgctcacgcgcacgctgctgacggtcaagtgcgactgcgacctgaccggccatgtgtcggactgggaagacctggcatggcgcgagcgcgacgcggccaccttgaccgcgctgttcgaccgctacggttttcgcacctggctgcgcgaactgacgggcgaccaggagcgcctgcccacgggagacgcgcgcgccgtgccgcaggccgtcgcgccggccgagctggactaccgcatcatcaccgactgggccgccttcgatgcctggatggcgctggtggaggacgcgccgctggtggcgctggatacggaaaccacgtcgctcgatgagatgcaggcgcggctggtgggcctgtcgatggcggtcaagccgggcgtggcctgctacatcccggtggcgcaccgtggccccgaggcgggcgatcaattgcccagggacgaggtcatcgcgcgcctgcgcggctggctggaggacgccgggcgcgccaagctgctgcaccatgccaaatacgatacccatgtcttcgccaacgaaggcgtaagcctggcgggcgtggccgaggacacgatgctgcaggcctatgtgctggagtcgcatcgcggcgtgggcctgaacgacctggcccagcggtttctcgggcgcagcggcgtgaactacgaagacctgtgcggcaagggcgccaagcagatcggtttcgacgaggtggcggtccccctggcggggcattattcctgcgaggattccgatttcaccctgcagttgcacgaggtgctgcgcccgcgtgtggccgaggacgaagggctggagcgcacctacctgctggagctgcaggtctcgcgcgtgctgaccgtggtcgagcgcaacggtgtgaaggtcgatgcccaggagctggggcgccagagccacaagctgggccaggaaatgctggcgctggagcagcgcgcctacgagctggccggccagccgttcaacctgaactctcccaagcaattgggcgagatcctgttcggccgcatggggctgccggtcgtgcgcaagaccgcgggcggcgccccctcgaccgacgaggaagtgctgtccaagctggcgcaggactatccgctgccgcaggtgctgctggaataccggggcctgtccaagctgaagtccacctataccgacaagctgccgcgcatgatcagcccggccaccggccgcgttcatacgcactattcgcaggcggcggtgatcaccggccggctggcgtcgtcggatcccaacctgcagaacatcccggtgcgcaccgaggccggccggcgcgtgcgcgaggccttcatcgccgagcagggcaagctgctgtcggccgactactcgcagatcgagctgcgcatcatggcgcacgtctcggatgacgccaacctgcagcgtgccttcgcggcgggcgaggatatccaccgcgcgaccgcctccgaggtgttcggcgtgccgctggccgaggtcggcgccgagcagcgccgcgccgccaaggcgatcaatttcggactgatctacggcatgggcgtgttcgggctggcttccaacctgggcattacgcgcgacgccgcgcaggcctacatcgaccgctatttcacccgctatcccggcgtggcgcgctacatggacgacacgcgccggctggcgcgcgaccagggctacgtcgagacggtattcggccgcaggctgcagctgccggacatccgcgccgcctccgggccgcgccgccagggcgccgagcgggccgccatcaatgcgccgatgcagggtaccgccgccgacctgatcaagatggccatggtggcggtgcaggactggctggacgccgagcgcctgcgcacccgcatgatcatgcaagtgcacgacgaactggtgctggaggtgcccgacgaggaactggcggcggtcgccgaagcgctgccgcggctgatgtgcgacgtggccacgctgcgcgtgccgctggtggccgaggtgggcatgggcacgaactgggaacaggcgcac

SEQ ID NO: 14656 - DNA, 3177 bp, Bordetella pertussis
atggcaaagtttttcatcgacaggccggtgttcgcctgggtgatcgcgattgtgctgatgatggccggcgcgctctccatcctgagcctgccggtcgcgcaatatccgaacatcgcgccgcccgccatcagcatcaacgtgacctatcctggcgcctcggctcagaccgtgcaggacacggtggtgcaggtcatcgagcagcagatgaacggcatcgacaacctgcagtacatctcgtcggaaagcaattccgacggcagcatgtcgatcacgctcacgttctcgcagggcaccaacccggatacggcgcaggtgcaggtgcagaacaagctggcggtggcccagccgctgctgccgctggaagtgcagcagcagggcatccgcgtcaccaaggccaccaagaacttcctgatcgtcgccggcttcgtgtccaccgacggcaccatggacaagtccgacctggccgactacgtggcctcgtacatccaggacccgatcagccgcacgcccggcgtgggcaacttccagctgttcggcgcgccatacgccatgcgcatatggatcagccccgagaaactggtcaatttcggcctgaccgcctccgacgtcaccaccgcgatccgcgagcagaacgtgcaggtctcgtccgggcagctgggcggccagccggcggtgcgcggccagcagctcaacgccacggtgatcggaccgtcgcggctgcagaccccggaagccttcggccgcatcctgctcaaggtcaatagggacggctcgcaggtgcgcctgaaggacgtggccagcatcgagctgggcgcgcagacgtacgccatcgacagctactacaacggcaagcccgcctcgggcctggccatcaagctggccagcggcgccaacgcgctcgataccgcccaggcggtgcgcgagaccatcaacggcctcaagccgtacttcccgccgggcatggacgtggtgtatccgtacgacaccaccccgttcgtcagcctgtcgatcgagggcgtggtcaagacgctgttcgaagcggtgctgctggtcttcctggtgatgtacctgttcctgcagaacgtgcgcgccacgctcatccccacgctggccgtgccggtggtgctgctgggcacgttcggggtgctggcggcgttcggctattcgatcaacacgctgaccatgttcggcatggtgctggccatcggcctgctggtcgacgacgccatcgtggtggtcgagaacgtcgagcgcgtgatggccgaggagggactgtcgcccaggcaggccacccgcaagtcgatggggcagatcaccggcgcgctgatcggtatcgccatggtgctggcggcggtgttcgtgcccatggcgttcttcggcggttccaccggggtgatctatcgccagttctccatcaccattgtttcgtccatggtgctgtcggtggtggtggccattgtcttcacgccggcgctgtgcgccaccatgctcaaacccattccgaagggccaccatggctccaagaagggctttttcggctggttcaaccgcaccttcgagcgttccagccaggcctatgccaacaacgtggcccgcagcatggggcgcaccaagcgcctgttgctgatctacgtggtgatcctgctgggcatggcctggatgttcatgcgcattcccaccgcgttcctgccggacgaagaccagggcatcctgttcgcccaggtgcaggcgccggccggcgccaccagcgagcgcacccaggccaccatcgacgcggcggtcaagtacctgctggaagacgagaaggaatcggtggcctcggtgttcgcggtcaacggcttcagcttcggcggccgcgggcagaacgccgccatcctgttcatcaagctgcgcgactggaacgaacgcaagggcgccgagcaccgcgccgccgcggtggccgcgcgcgccaatgccaagttccgcgccgagttgcgcgacgcgcaggcggccgtgttcgcgccgcccgcggtgatggagctgggcaacgccaccggcttcgacttccagctgcaggaccgcgccggcgtcggccacgaaaagctgctggcggcgcgcaaccagctgctgcaagaggccggcgcaagccccatgctggtggccgtgcgccccaacggcatcgaggacgcgccgcagtaccagctggacatcgaccgcgagaaggcgcgcgcgctcggcgtgtcgatcaccgagatcaacaacacgctcgccaccgcctggggctcgtcctacgtcaatgatttcatcgaccgcggccgggtcaagaaggtgttcgtgcagggcgaggcatcgtcgcgcatgctgccgcaggacctggacaaatggtacgtgcgcaacaacgcgggcgacatggtgccgttctcggccttctcgtcggcgcaatggaccttcgggccgcagaagctgaaccgctacaacggcgtgccgtcgtacaacatccagggccaggccgcgccgggctacagctcgggcgacgccatggccgagatggagcggctggccgacaagctgccgctgggcatcggctacgactggaccggcctgtcgttcgaggagcgcctgtcgggcgcgcaggcgcccgcgctgtacgcgatctcgctgatcgtggtgttcctgtgcctggccgcgctctatgaaagctggagcattcccaccgcggtgatgctggtggtgccgctgggcgtggtgggggccttgctggccaccatgacgcggggcctgtccaacgacgtgtacttccaggtggggctgctgaccaccatcgggctggccgccaagaacgccatcctgatcgtggagttcgccaaggagcactacgaggagggcgccagcctgaccgaggcggcggtgcacgccgcgcgccagcgcctgcgccccatcctgatgacgtcgctggcgttcatcctgggcgtggtgccgctggccatctccacgggcgccggctcgggcagccagaacgccatcggcacgggcgtgatcggcggcatgctgaccggcaccttcctggcgatcttcttcgtgcccctgttctttgtccttaccctgcgcctgttcaaggtcaagcgcgcctcggagaaccgcgaggacgacgacccgcatggcggcgcccagccagccacgcacggaggacagccgcaa

SEQ ID NO: 14657 - DNA, 1659 bp, Bordetella pertussis
atgtccggactgctgccgctgctcgatttcgcgggctacgtagccctgctgctgtggggcgtgcacatggtgcagaccggcgtgcagcgcgccttcggcgccgcgctgagcatcgcgctgggacgcgcgctcgggacgcggttgcgcgccttcgcctccggcctgggcattaccgccgcgctgcaaagcagcaccgccaccgggctgatgatcaccggcttcgccgccggcggggtggtggcgctggtgccggcgctggccgccatgctgggcgccaacgtcggcaccaccctcatcgtgcagctgctgtcgttcgacctgacctcgctggcgcccatcctcatcctggccggcgtgtggatgttccgccgcgccgcgcccggccgcacccgcgacctggggcgggtattcatcggcctggggctgctgctgctgtcgctgcaccagttggtgcagctgttccagcccttcgagaccgcgcccttgctgggcgtcttgctcgacgcgctggccagccagccggtcgccgcggtgctgctggccgcggccctgacctgggccgcgcactccagcgtggccgtcgtggtgctggtcatgtcgctggccagccacggcatggtcaatccggcgctggccttcgcgctggtgctgggcgccaacctgggcaccgccatcaatccgatgatcgaaggcgttaccggcgacgacccggccgctcgccgcctgccgctgggcaacctgctcacgcgcgtggccggcgtactggccggcatcatcctgctgccctggctgcaaccctggctcagcggactggccggcgaccccgcgcacgcggtggccaacttccacaccttgttcaacgtcgtgatcgcgctggttttcctgcccatcctcacgccgtacgccgcgctgctgacgcgctggctgcccaagcgcgccgatcccaacgacccggcgcggccgcaatacctggacgaatgggcccatgacgtgccggccgtcgcgctgggcaacgccgcgcgcgaggcattgcgcatggccgacatgctgcagaccctgctgctgtacgcccgcgccggtttcaagcgcgacaaccggcaccgcatggtgcaggcacgccagctcgacagcgcgctggacaagctggagaccgccatcaccacctacctggccacgctcgaccaggaaaacatgacgcgcgaggatcaccagcggctcgacaccatcctggcgttctgcagcaacatcggccacgccggcgatatcgcctaccacggcctgctcaaccatatcggccgcctgcgcaagcaaggcctgctgctgtcagccgatcagcgcgccagcctggacgccacgctgggcgagctgatcgccaaccagcgccaggccgccgcgctgttcgtcaccgacgacctgcgccaggcgcgcgcgctggcgggcgaaaaggcgcgttttcgcgccctcgaggcggaggccgccgaaacgcagctgcagcagatcaagtccggcaaggtcgatgccgccgaggtcggcgcgctctacctggacatcctgcgcgatctcaagggcatcaactcgcacgtggtaggcgcatcggcgtatccgctgctggcgcgccacggcgaactcctgcccagccgcctgcgcgacgcgggcaac

SEQ ID NO: 14658 - DNA, 1395 bp, Bordetella pertussis
gtgcgcgtggcagtttccgttttcgaccttttcaagataggcatagggccgtccagttcgcatacggtgggcccgatgcgggcggcgctcctgttcgtgcaggggctggagcgcgatggcctgctggcgcgcgtggccagcgtgcgcgccgagctctatgggtcgctgggcgcgaccggcaaggggcacggcaccgacaagggcgtgctgctggggttcatgggccaggcgcccgatacggtcgaccccgcggccatcgccggcatgctgcaggccgtgcgcgccaatcggcgcgtgttgttgctgggtcggcatgatgtgccgttcgtcgaaaaagagcatatgttgttctatcgccgcgaggcgttggccgaacatcctaacgggatgaagtttcacgcttttgacgccgatggccaaccgttgcgcgaatcgcgctatctgtcggtgggcggcggtttcgtggtcacggccggcgcggccaatgcccaggtcatcggcgcgcacgaccagctgccgtacccgtttcgcaccggacgcgagctgctggacatgtgccgcgccagcggccactcggtggcgggcctgatgatgcgcaacgagctgacctggcgcggcgccgccgagatcgagcaggggctggaccgtatctgggaagtcatgcaggagtgcgtggcccgcggctgcggcatcggccatccggaggccgacggcgacctgccgggcccgctcaaggtgcgccggcgcgcgccggagctgtatcgcgcgctgacgcagcgcgccgagcgcacgctgtccgaccccttgtcggtgatggactgggtgaacctgtacgccatggccgtcaacgaggaaaacgccgcgggcggcagggtggtgacggcgccgaccaatggcgcggccggcatcattccggcggtgctgcattattacgaccgttttgtcccggccgccaaccgggcgggcgtgcacgatttcctgctgacggcggcggccatcggcctgctgtacaagtacaacgcctcgctgtcgggcgccgaggtgggctgccagggcgaggtgggcgtggcctgttcgatggcggccggcgcgctggccgccgtgcagggcggcagcgtcgaacaagtcgagaacgccgccgagatcggcatggagcacaacctgggcctgacctgcgacccggtgggcgggctggtgcagattccgtgcatcgaacgcaacgccatggcctcggtcaaggccgtcaacgcggcgcgcatggcgttgcgcggcgacggacatcactacgtatcgctggattccgtcatcaagaccatgcgcgaaaccggcgccgacatgaagaccaaatacaaggaaaccgcgcgcggcgggttggcggtgaatatcgtggagtgc

SEQ ID NO: 14659 - DNA, 1254 bp, Bordetella pertussis
atgcacctcaatgaactgaaggcgctgcacgtgtcgcagttgctggaaatggccgccggcctggaaatcgagaacgccaaccgcctgcgcaagcaggagttgatgttcgccatcatgaagcggcgcgccaagcaaggcgaacagatcttcggcgacggcgtgctggaagtcctgcccgacggcttcggattcctgcgctcgccggacacctcgtacctggccagcaccgacgacatctacatctcgccgtcgcagatccgccgcttcaacctgcacaccggcgactccatcgagggcgaagtacgcaccccgaaggatggcgagcgctatttcgcgctggtcaaggtggacaaggtcaacggctcgccccctgaagcgatcaagcatcgcatcatgttcgagaacctgacgccgctgcaccccaaccaggtgatgcgtctggaacgcgacatcaagagcgaggaaaacctcaccggccgcatcctcgacatcttcgcccccatcggcaagggccagcgcggcctgatcgtggcgccgcccaagtccggcaagacggtgatgatgcagcacgtggcccacgccatcaccaccaattatccggatgcggtgctcatcgtcctgctggtcgacgaacgccccgaggaagtgaccgaaatgcagcgcaccgtgcgcggcgaagtggtggcctcgaccttcgacgaaccggccacccgccacgtgcaggtcgccgaaatggtcatcgagaaggccaagcgcctggtcgagatgaaaaaggacgtggtcatcctgctggactcgatcacccgcctggcccgcgcctacaacaccgtggtgccggcctccggcaaggtgctgaccggcggcgtggacgccaacgccctgcagcgccccaagcgcttcttcggcgcggcgcgcaacctcgaggaaggcggctcgctgaccatcctgggtaccgccctgatcgaaacgggcagccggatggacgaagtcatctacgaagaattcaagggcaccggcaactccgaagtgcacctggagcgccgcctggccgaaaagcgcgtctacccgtccatcaacctgaacaagtcgggcacccgccgcgaagagctgctgatcaagcccgaactgctgcagaaggtgtgggtgctgcgcaagttcatccacgacatggacgaaatccagtcgatggaattcatcctcgacaagatgcgcgccaccaagaccaacgccgaattcttcgacatgatgaagaaa

SEQ ID NO: 14660 - DNA, 771 bp, Bordetella pertussis
atggcgcatgcaatccacctacaatgctgcgccatgaaatatgctgttgtattggctgcgctgctcagcctgccgctggccgcccaggccgagctggtcacccgtccgaacgccgtcggacaccgcgatttccgacacgccaagaaagtgctgccacgcgtctaccagaacctggagcgcgacttctattgcggctgcccctaccaggacaagcgcatcgacctgcaggcctgtggctacgagccgcgcaaacagctgcgacgcgcacagcaactggaatgggagcatgtggtgccggcctggacgctgggccatcagcgccagtgctggcaacagcgcgtcaacggcaagccgggcgggcgcaagcattgcagccggaccgacccctcgttcgcgcgcgccgaaggcgacctggtgaacctgatgccgtcggtcggcgaggtcaacggtgaccggcagaacttccgctacgccgtctgggccgaccggcccgcccccatgtacggccagtgcgaaaccatcgtggacttcaagacccgccgcatacagccgcgcaagtacgtgcgcggccgtatcgcgcgcatccagttctacatggtcgagcgctacaggctgaagctgtcgcgcgaggaccggcgcgtactgtgcgtatgggcgcgcgcctacccggtggacgactgggaacgcgcgcgcgaccagcgcatccggacgctgcaaggcaacggcaatcactacgtgaccgatcccgccgcgatccagcgccagtgcggc

SEQ ID NO: 14661 - DNA, 1236 bp, Bordetella pertussis
atgacccaacaaagtcctctcaagaatgccacgatcgccgcggtcatgaccgccgtcatcgtgacgccgatcttcggcctgcagctggtgcgccagggcgcgcgcaccctgatggagccgcgctgggacctggtcgcgctggcctgcgcgctggtttttgcgttccaactgttgcgcccgtggatttccaagcccttcaaggcgctgaaaacaggcctgccgacgctgccgtcggcgctggcgcgcggccacaaatggctggtcgtgctgctgatcgccgtctcggtgatctggccgttcttcagcgggcgcagctcggtggacatcgccacgctggtgctgatctacgtcatgctgggcctggggctgaacatcgtggtcggcttcgccggcctgctcgacctgggcttcgtgggcttttacgcggtcggggcctatacctacgccttgctttaccactggggcggctggagcttctgggaagcgctgccgttctcgggcgcggtcgcggcgctgttcggcttcgtgctgggctttccggtgctgcgcctgcgcggcgactacctggccatcgtcacgctgggctttggcgaaatcatccgcctgctgctcatcaacctgaacatgctgaccggcggcccggacggcatatccggcctgcccaagcccagcgtgctgggcatggaaatggcgcgccgcgccagcacggaaggcggccagaccttccatgagatcatgggctggactttccagaaccagcacatggtgatctacctgtacctgatggcgctggcgttggcgctggcgacgctgttcgtctccacgcggctgatccgcatgccggtggggcgcgcctgggaggcgctgcgcgaagacgagatcgcctgccgctcgctgggcctgaaccccacgcgcatcaagctgtcggccttcacgctgggcgccatgttcgccggtttcggcggcgccttcttcgcggcccgccagggcatggtcaaccccgagtcgttcaccttcatcgaatcggcgctgatcctggccatcgtggtgctgggcgggatgggctcgcagatcggggtgatcctggcggcgatcctgctgacggtgctgccggagctggcgcgcgagttcgccgaataccgcatgctgatgttcggcctggtgatggtattgatgatgatgtggcgtccgcagggattgctgcccatgaagcgtccgcatgtggagctgcgcaaa

SEQ ID NO: 14662 - DNA, 924 bp, Bordetella pertussis
atgtcagacctcatcccacaacttacccagcagttcttcaacggactgtccctgggggcgatctacgcgttgattgccattggctacacaatggtctacggcatcatcggtatgatcaacttcgcccacggcgagatctacatgatcggcgcctacgtcggcctggtcacgctgacggccatcggcaccaacagcggcctgccgctgcctttcatcatcgccgccatgctggtggtcgccatcttcgtgaccggcgtctacggctatagcgtcgaacgcgtggcgtaccggcccgtgcgcggcagcccccgcctggtggcgctgatctcggccatcggcatgtcgatcttcctgcagaactgggtcgccctcgggcagggcgcgcgcgacatggccgtgccggcgctggtctcgggcgcggtgcagttccacatgggttccagcttcgacgtcaccgtaccgtattcgcgcatcatgatcatcgtggtgactgtggtgctgatggtggcgctcacgctgttcatcaagtattcgcgcatggggcgcgcctcgcgcgcctgctcgcaggacatgcacatggccaacctgctgggcatcgacaccaaccgggtgatttccttcaccttcgtgctgggcgccatgctggccgcggtgggaggcgtgctgatcgccatcaccatcggcaagctgaatccgttcatcggcttcctggcgggcatcaaggcgttcaccgccgcggtgctgggcggcatcggcagcattcccggcgcgatgctgggcggcgtgctgctgggcctggccgaaaccttcgcggccgcctacatctcatcgcaatacaaggacatcgtggcttttgcgctgctggtgctgatcctgctgttccgtcccaccgggctgctcggcaaacctgaggtggaaaaagtc

SEQ ID NO: 14663 - DNA, 579 bp, Bordetella pertussis
atgagttcggcgtcgcgccgctacgagccgctgcgcagcggcccgttcctgctggcggtgttttgcatgggcctggtggtggtggggtccaatatcctggtgcaggtgcccctgaacgactggctgacctggggcggcctgtcctatccggtggcattcctggtcaccgacgtgctgaaccggcgctacgggccggacgcggcgcgccgggtggcctggttcggcttcgccgcggcgctggcggtgtcggtctgggtggcctcgccgcgtatcgcgctggcttcgggcctggcctacctgtgcgcgcagttgatcgatatccgggtgttcgaccggctgcgcgaccagcgctggtggcgcgccccgctgatctccggcgtgatcggggcggtggcggacacggcggtgttcttcagcgtggcgttcgccggctccgatacgccctgggtcacctggatgctgggcgacctggcgatcaagctggccgtcaatatcagcatgctggcgctgttccgggcgctgatgtggaacctggcgcggccggccgaggcgcggcccgcccaggcctcgacggggcgt

SEQ ID NO: 14664 - DNA, 2415 bp, Bordetella pertussis
atgcaatttcctgaatcctggctacgttcgctggtcaacccttcgatcggcaccgatgagctcgcgcaccggctgaccatggccggcctggaagtcgaagaaaccgagccggccgccccgccgtttaccggcgtggtggtgacgcgcatcgtcgacatcgcgccccatcccgacgccgacaagctgcgcgtgtgccaggtcgacgacggttcgggcgctctgctgcagatcgtgtgcggcgcgcccaatgcggccgcgggcctgaccgtgccgctggcgcgcgtgggcgccgaactgcccggcggcatgaagatcggcgtggccaagatgcgcggcgtgcaatcctcgggcatgctgtgctcggcgcgcgagctgggcctgtcgcaggaccatgcaggcctgctcgaactgccggccgcgttgcgcccgggcaccgatatccgcgccgcgctggatctggacgacaccttgttcacgctcaagctgacgcccaatcgcgccgactgcctgtccattctcggtgtggcccgcgaagtcgccgcgctgaccggcacgccgctcacggcgccggcggccgagcccgtgccggtcacgatcgaccatcgcctgccggtcgccatccaggccccggatctgtgcggccgctttgccgggcgcgtgatccagggcgtcaacgcgcgcgccgcgacgcccgaatggatgaagacgcgcctggagcgtgccggccagcgttcggtgtcggccctggtcgatatttccaactacgtcatgctcgaggtggggcgtccctcgcatgtgttcgatctcgacaagatcggcggcgatctctccgtgcgctgggcgcgcgaaggcgaaacgctcgaactgctcaacggccaggccgtcgcgctggaccccaaggtgggcgtggtggtggccggcgaacaggtggagagcctggccggcatcatgggcggcgaagcgacctcggtgacgctggatacgcgcaacatctacctcgaggcggcattctggtggcccggcgcgatcgccggccgcgcgcgccgctacaagttcagctccgaagccagccaccgcttcgagcgcggcgtggactacgcctcgatccccgagcacatcgaactgatcacccggctcattctcgacatctgcggcggacaggccggcccggtcgacgaccagtgcgtcaacctgcccgtgcgcgagcccgtgcgcatgcggctggcgcgctgccaccgtgtgctgggcgtggcggtggagcgtgccgaagtggcgcagatcttcacccgcctgggcctgccgttccaggagcagggcgacgacttcgtcgtgacgccgccgtcgtaccgtttcgacatcgagatcgaggaagacctgatcgaggaagtcgcgcgcgtctacggcttcgagcggattcccgacgtgccgccggtggcgcgcgccaagatgcacgcgcagcccgaagcgcgccgcggcgcgcacgccgtgcgccgcctggtggccgcgcgcgactaccaggaagtggtcaactacagcttcgtcgaagccgcgtgggaacgtgactacgccggcaacgacaacccggtgcgcctggtcaaccccatcgcgagccatttgtcggtgatgcgttccagcctcatcgcggggctggtcgccatcgtgcgccacaacgccaatcgcaagcaaagccgcatgcgcctgttcgaactgggccgcgtgttccatcgcgatccgcaactggccgacggcccgctggaagtggcgggcgtgcgccagccgctcatgctggcgggcgtggcctggggcggggcggtcgaagagcagtggggcgtgccgcaccgccaggtcgacttctacgacgtcaagcaggacatcgaggccctgttcggcgcgcgcgccgacgcgttgcgcttcgtcgccgaccgctatcccgccctgcatcccggacgcagcgcccgcatcgagctggacggccagcccatcggctggctgggcgaactgcatccgcaatggacgcagcaagccgacctgcaccatgcaccggtcgtcttcgagctggacttcgaggcgctggccgagcggcgcctgccggcggtgcgcaagctgtcgcgccagcccgtggtcgtgcgcgatctggccttgtgggtcgatgcgaaattgccggcccaggccatgctcgatacggtggccgcggccatcgcgcgcgatccgcaactgtcggtggtgcaggatgcgcaggtgttcgacgtctggcgcgaaaagccggtggccgggcaaactgttaccgagaaaagccttgctttccgattctggctacaggacactgaggtcacgctggacgaagcccgcgttgccgattgcattgcccgcatcaaggatgcgctggttgccgcgcacaacgcgcgccaacgggcc

SEQ ID NO: 14665 - DNA, 1020 bp, Bordetella pertussis
atgacattactggtcgacgacctggtttctcaggctcaagaacgattcgccgctgcctccgacgccgccgcgctcgaaaacgccaaggcgcgctttctgggcaaggaaggcgcgctgacggtcctgctcaaggcactgggcaagctggaccccgagcagaagcgcgaaatgggcgctcgcatcaaccaggccaagcagcagatcgaagcgttgctcaacgcccgccgcgccgcgctggcgcaggccgagctggatgcccgcctggcctccgaaaccatcgatgtcaccctgcctggccgcggcaaggccgccggcgggatccacccggtcatccgtacctgggaacgcgtcgaagaaatcttccgttccatcggcttcgacgtggccgacggtcccgaggtggaaaacgactggaccaatttcactgccctgaacaacccgctggaccacccggcgcggtcgatgcaggacaccttctacgtcgacatgcacgatgccgacggcctgccgctgctgctgcgcacgcacaccagcccgatgcaggtgcgctatgcgcgcatgcacaagccgcccatcaaggtcatcgcgccggggcgcacctaccgcgtcgacagcgacgccacccactcgcccatgttccaccaggtcgaggggctgtggatcgccgaggacatttcgtttgccgacctcaagggcgtgtacaccgacttcctgcgctgcttcttcgaaagcgacgatctggtggtgcgcttccggccgtccttcttcccgttcaccgaaccgtcggccgagatcgacatgatgttcacctccggacccaatcgcggccgctggctggagatctcgggttcgggccaggtgcatccgcaggtcgtgcgcaacttcgggctcgaccccgagcgctacatcggctttgccttcggctccgggctggagcgcctgaccatgctgcgttacggcgtcaacgacctgcgccagttctacgaaggcgatttgcgcttcctgcgccagttcaacgaa

SEQ ID NO: 14666 - DNA, 1311 bp, Bordetella pertussis
atgagatcccaacgtctagcgctcactttcgccgccgtcatggccgcgttcgccggtgcctcggcgcacgccgccactgaaatccagttctggcactcgatggaaggcgcgctcggcgatcgcgtcaacggcctggtcgaggagttcaacaagcagaacgccgactaccagatcaaggcggtctacaagggcaactacggcgaatcgatgaacgccggcatcgcggcctttcgcgccggcaacgcgccggacatcctgcaagtgttcgaagtcggcaccgccaccatgatgtacgccaagggcgccatcaagccggtgcagcagatgtccgaggaagtgggcgaccccatcgatcccaagcaattcatcggcgcggtcgcggggtactactcgtcgcccgagggcaagctggtatccatgcccttcaacagctccaccgtggtgttctactacaacaaggacgccttcaagaaggccggcctggacgccgacaaaccgcccaagacctgggaagagctggccgccgtcggccagaagctgaaggcagccggccaggaatgcggctacaccacctcctggccgtcctgggtgcagctggagaccttctcggcctggcacaacgtgccctatgccaccaaggacaacggcttcgccggcctggacgcccgcctggcggtcgacacgcccctgcacgtgcgccatctcgacaacctcgccaagctggccaaggaaggcatcttcatgtacggcgggcgcggcgacgagcccaactcgctgttcatcagcggcaagtgcgccatgatcaccggctcgagcggcctgcgcgccaacatcgccaagaacgccaagttcgagttcggcacctcgaccctgccctactacagcgacgtgcagggcgcgccgcagaacaccatcatcggcggcgcctcgctgtgggtcttcgccaacaagaaacccgagacctacaagggcgtgaccaagttcttcaagttcctggccagccccgagatcgccgcccgctggcaccagcagaccggctacgtgccggtgaccaaggccgcctacgaactgacgcagaagcagggcttctacgacaagaatcccggcaccgacgtcggcgtcaagcagctgaacgtggaaaccaccgcgcagtcgcgcggcctgcgcctgggctacctgccgcagatccgcgagatcgaggacgccgagatcgaacgcatcgtcgcgggcaaggtgccggccaaggacggcctgcagagcatcgtcaagcgcggcaacgagctgctggagaagttcgagaaaagtgtaaag

SEQ ID NO: 14667 - DNA, 357 bp, Bordetella pertussis
atgcctcgcgttaaacgcggcgttaccgcccgcgcccgtcacaagaaagtcattgccgccgccaagggttaccgtggccgtcgtggcaacgtattccgcatcgccaagcaagcggtcatgcgcgccggccaatacgcctaccgcgaccgccgcaacaagaagcgcacgttccgtgccctgtggatcacccgtatcaacgccgccgtgcgtgagcagggcatgagctacagcgtgttcatcgccggcctgaagaaggctgcgatcgaactcgatcgcaaggtgctggccgatctggccgtgcgcgacaaggccggtttcgcggccatcgtgcagcaagccaaggctgccttggctgcc

SEQ ID NO: 14668 - DNA, 195 bp, Bordetella pertussis
atgcccaagatgaaaaccaagaaaagcgccgccaagcgctttaaggttcgcggcagcggatccatcaagcgtggtcaggcgttcaagcgtcacatcctgaccaagaagaccaccaagaacaagcgccagctgcgcggttcggctgcggtccacgaaaccaacgtcgcttccgtgaaagcgatgatgcctttcgct

SEQ ID NO: 14669 - DNA, 1539 bp, Bordetella pertussis
gtgaactggggggtcggcgatttccagtttctcaaatccggttcggatgaaccatgcatacaacctattgaatcttcacagcgagccctgccgatgcaccatcgcgccatgaacacgcagccgctgtatctgcgcctagcagaccactatcgccgcgccatccagacgggcgtactggccccggcgcaacgcatgccttcggtacgcaatctggtgcgcgcccatcacgtcagcctgtccactgccctgcaggcatgccgccagctcgaggacgacggcctgatcgaggcccgcccgcgctcgggctattttgtcctgcgcccgcggcgtccggcccttgcgccggtgcccgagcccgatatcaagggcgcgctcgatcccgcgcaatacgtcggcatccacgaccgggtctcggatttcattgcgtcgtgccagcagcatccgctgagcgccgacttcgcgctggccgccgccccgccgcaggcctatccgatgcgggcgctgcagctggcgctcacgcgcgcggcgcggcacacgccggaactgctgacagcgccggtgccgccctacggccatccggagttccgcgccgtgctggcgcgccgtgcgatggaatgcggcatcagcgcgaccccggacgaagtgctggtcacgcacggctgcatcgaagccctcaacctggccctgcgcgcggtggcgcggccaggcgatacgatcgcggtcgaatcgccgacctacttcggcctgctgcaaatcctcgaaagcctgggcctgcgcgcgctggaaatacccaccagcccgcagcgcggcatttcgatcgaggcgctggagctggcactgcagacgcacgcgaacgttcgcgccgtcgtcgtcgtgcccaacttccagaacccgctgagttgcgtcatggacgatagcgacaaagcccggctggtcacgctgtgcgaacgcaccggtatcgccctgatcgaggacgacacctatggcgcgctgggcgaccatggcacgccgctggcgctcaaatcatgggacgacagcggcaacgtgatctattgcgcatcgctgcacaagacgctggctcccggcatgcggctgggatggatgctgggcagacgctggagccgacgcatcggcatgctgaaattcgcccaaagccggcccaacccgccgctgccccaggccgcggccgccgactatatgggcaccaaggcctacgaccgccacctggcgcgcctgcgccagacgctgcgcgtgcagcgtgaagccatggcggccgccgtcgcgcgccactttccggacgacacgcggctgagcgtgcccacgggagggatgctgctctgggtggaattgcccgcgggcatgcccgccatgcgcgtgttcgagcaggcgctgcgggccggcatccgcatcacgccgggcccgatgttctcgaactcgaaccgctacgatcatttcctgcggatcagctgcggcgtcccctacaccgccgatatcgccgcggccatgcagcgcctggcggatatcgtcgccgccggcctg

SEQ ID NO: 14670 - DNA, 1468 bp, Bordetella pertussis
cctgaacggcgctgcctgagagcggccacggccgcacacaacacaaggggaatgcatgatgagcaagacgggaaagatggcggccgcgctggccgcgctgtgcttgagcgtgggcctggccggcgccgcgcgggcggagtcgacgctgcaggtggccctgtccaccagcctgaacagcctggaccccaacgtcacgacgctgggcgaggagtatgtgttcaacgggctggtgttcggcgggctgacccgcatcgacgccaactccaaggtggtgcccgacctggcggtaagctggacgccgtcggccgatctgcgcgaatggacgttcaagctgcggcccggggtgaagttccaccacggcaagccgctgacggccagcgatgtggtgttttcgttccagcgcatcgtcgacccggcgaccggctcgcccggccgcacccagctggaggtgatgaagtcggtggacgcgcccgatgacgccacggtgcatttcaccctgacgcagccgtatgccgattttcccggtttgctgaccggccgccagttgcgcgtggtggcgcaggatcgcatcgacaccatcaagacccagcccagcgggacgggcccgttccgcttcgtgcgctacacgccgggcgaccagctcgagctggagcgcaatcccgactactacgacaaggaccgcatcaagatcgacagggtggtgatgcgcgtcatgcccgaggcggccgcgcgcgtggcggccttgcgctcgggcagcatcgacatgatctggaagctgccgctggagaccattccggacctgaagaaggacgccgcggtggtggtggactcggtgcccagcgccagctgggatggcatcgtgctgaacaactccaagccgccgttcaatgatgtgcgggtgcgccgcgcggtgttcctggcgctggacaagaaggagctggtgaacttcgcgctgttcggcgagggctcgcccacccacagcccgatcgcgccgaccgatcccgcgttcaacaaggatatcggctttgcccccgacctggcgcaggccaagcagttgctggccgaggccggctatgccaagggtttcgcggtggacatcttcgtgccggcgggccggccttcgcgcgaacggctgggcgtggccgcgcagcagctgctgcggccgctggggatcaagctgaacgtgcagcgggtgccttacaaccgctattcggctggcgtggcgggaatcgcgcccatgtatgtggatggctttttcgccagcccggtgatcgacgcggcgacctcgccctggttctacagcacgggttcgtggaacgcgcgcatgtggcatttctcgagcaagcgcgtggaccaggcgctggacgcggcgcgcgccagcaccgaccgcgccgagcagatccgccactaccaggatttccagcgcgcgctcaccgaggaggtgccgggcatcatcggctacgtgacc

SEQ ID NO: 14671 - DNA, 1770 bp, Bordetella pertussis
atggcgctggctgacaatctgcctaacgtcgggaataaccctagcacctgtacagatatctccgcagcggcgcctgcggcgtgtcggcgaggcgagcggcgcaacttggtacactgccagatttatctccattgcgcccttgcggcgcgtcaggctcgcacatacaccgtgatttccactgccaatctcactatccagttcggccccaagccgcttttcgaaaacgtcagcgtcaagttcggggaaggcaaccggtatggtctgatcggggccaacggttccggcaagtcgaccttcatgaaaatcatcggcggcgacctcgagccctcggcgggcaacgtgtcgctcgaacccggcgtgcggctgggcaagctgcgccaggaccagttcgccttcgaggaggtgcgggtgctggacgtggtcatgatgggccacaccgagatgtgggcggccatgtccgagcgcgacgcgatctacgccaaccccgaggccaccgaagacgactacatgcgcgcggccgacctggaagccaagttcgccgaatacgacggctacacggccgaagcgcgcgccggcgaactcctgctaggcctggagatcgccgtggaccagcacaacctgctcatgcgcgaaatcgcgcccggctggaagctgcgcgtgctgctggcgcaggcgctgttctccaaccccgacgtgctgctgctggacgagcccaccaacaacctggacatcaatacgatccgctggctggagaacgtgctcaacggctaccagagcacgatgatcatcatcagccacgaccggcacttcctgaaccaggtttgcacccacatggcagacgtggactatggcgagatccgcgtctaccccggcaactacgatgactacatgctggcctccacccaggcccgcgagcgcctgacggccaacaacgccaaggccaaggagcgcatcgtcgaactgcaggacttcgtgcgccggttcgcggccaacaagtccaagtcgcgccaggccacgtcgcgcctgaagcagatcgaccgcatcaaggccgaccaggtcgaggtcaagccctcgtcgcgccagaacccgtacatccgcttcgagcagaacaaggtcatgcaccgcctggcggtcacgatcgagaagctgtccaagtcgtacgaccagccggtcatccgcgatttctccgccatggtcgacgccggcgagaaagtcgccatcatcggcgccaacggggtgggcaagaccacgctgctgcgcatgctggcgaccgacctggcgccggattcgggcaccgtcaagtggtccgagaacgccgacatcggctacatggcccaggacgtgtccgaccagttccagcagggcgacatcaacctgttcgactggatggccgagcatcgccagccgggcgacgacgaccagtcgatccggtccgcgctgggccggctgctgttctccggcgacgatctccccaaggcgcccaaggtgctgtccggcggcgagaagaaccgcatgaccttcggccgcctgatgttgggccggcacaacgtcatgctgctcgacgagcccaccaaccacctggacatggaatccatcgaatcgctgcagttcgcgctggaaaagtacgaaggcgcgctgattttcgtgtcgcacgaccgcgagttcgtctcggggctggccacgcgcatcatcgagatcctgcccgacggcgagctggtcgactatcgcggcggctacgaggattacctggcttcgcgcggcatcgaggcg

SEQ ID NO: 14672 - DNA, 1029 bp, Bordetella pertussis
atgaaagaaacgtacagggcgatgcaggccagcaggcccggcgtgctggaactcgtcgagcggcgcacgccgcgtcccgccgccgcggaagtgttgatccgggtggaggcttgcggcatgtgcggcgccgacatcgccgatatcgagaaggccggccccaccgtgccgccccgcgtgcccggacacgaggtggtgggacgtatcgtggccctgggcggtcaggtgccgccgatctggaggctgggccagcgcgtgggcgtgggccgcctgggcggccattgcaacgagtgcgaccaatgccggcagggacgtttccagctttgcgagagccagccgatcgtcggcgccagttgcgatggcggttatgccgagatgatgctggcgcgcgccaccggactggtgtcgatcccggatgagctggatgcgcaggaagcggcgcccattctttgcgccggcgtggccacgttcaatgcattgaggaaatgcggcgctcagcccggcgacctggtggccgtcgtgggcatcggcggcctggggcacatggccttgcaatatgcgcgacgcatggggttcagggtcgtcgccatcgggcgcggtgcggatatcgccacggatgccatggcgctgggcgcgcatgcctacatcgacaatctcgagcagaacgtcgtcgccacgctcaggcgcatgggaggcgcgcaggccgtcctgaccacgatcgaccaggccgaggcagtgtcggcattgcttggcgcgttggcgcccgaaggacgcctggtcgttctcaacccgggcaagtctgcgttgcaggtttccgccggactgttggtcggtgggcaacgcagtatcgtcgggtcgctcaccggcacgccccatgacaacgaaaaagcgttgaacttcagcgtgctggtggatgcgcgcccgagcatcgaggtctggccgctggcgcgggccgacgaggcctacaggcagttgcaatccggcgcgcccaggttccgcctggtgctggccatgggaaataccgaccaagac

SEQ ID NO: 14673 - DNA, 813 bp, Bordetella pertussis
atgcacgccgatactgcccaggatgcgcccgacgcggcggcgcgttacccccgcgccgacagcgtggccgatttcgagcacaacctggcggcggtgcgggcccgcatggcggcggcctgccagcgggccgggcgcgacccggccggcgtgcggctgttgccggtcagcaagacggtggacgaggcccgcatccgcatgtcgtatgccgccggctgccgcgagctgggcgagaacaaggtccaggaggcctaccggaaatgggaggccatggccgacctggccgacttgcgctggtcggtgatcggccatctgcagaccaacaaggccaagctggtggcgcgcttcgcggccgagttccaggcgctcgacagcgtgcgcctggccgaggcgctggagcgccgcctgcaggccgaggggcgcgcgctggatgtgtacgtgcaggtcaatacttcgggcgaggccagcaagtacggcctgcatccggacgaggcggcggccttcatccgccaactgccgagctacggcgcgctgcgtgtgcgcgggctgatgacgctggcggtgctgtcggccgacgccgcgcgcgtacggcagtgcttcgtgctgctgcgtaccttgcgcgaccgcctgcggcaggaagcgccggccggcgtgagcctggacgagctgtccatgggcatgtcgggcgactacgagatcgccatcgaggaaggcgccaccgtggtgcgggtcggccaggcgatctatggcgcgcgcgccttgcccaacgattattactggcccgacagcggcgcggcggaccgggcggaggacgaa

SEQ ID NO: 14674 - DNA, 1146 bp, Bordetella pertussis
ttgttgtgtgcttgcgccggcgccgcctgccgcgcaggcgataatgtaagcgcaaaacccgtatttttgcacccgggcccgcggaccctggttgtaaactctgcgcccatgatcattctcggctttgaaagctcgtgcgacgaaaccggcgtggccgccgtctgcaccgagcgcggcctgcttgcgcacgccctgcatacccagatcgccatgcaccaggaatatggtggcgtggtgcccgaactcgcctcgcgcgaccatatccggcgcgtggtgccgctgacccgccaggtgctggccgaggccggcctgacgctggctgacgtgggcgcggtggcctacaccgccgggccgggcctggccggcgccttgctggtgggcgccagcgtggcccaggcgctggcctggtcgcgcgcgctgccggccatcggcatccatcacctggaaggacatctgctgtcgccgctgctggccgagccgcgtcccgagtttccgttcgtggccttgctggtctcgggcgggcatacccagctgatgctggtcgacggcgtgggccgctacgaactgctgggcgagacgctggacgacgccgccggcgaggccttcgacaaatcggccaaactgatgggcctgggctatccgggcggccccgcgctggcgcgcctggccgagcagggcgacgccagccgctacgacctgccgcgccccatgctgcacagcggcgacctggatttcagcttcagcggattgaagaccgcggtcctgacccgtgtgaaagcggccacgcgcgatggcggcgaactgggcgaacaggaccgcgccgacctggcggcggcaacgcaggccgccatcgtcgaggtgctggcggccaaggccatccgcgccttgaagcagacgggcctgcgccgcctggtggtggccggcggggtaggcgccaacgcgctgctgcgcgcgcatctggcgcgcgcgctcaagcccttgcgggccgaagcctattttccgccgctgtcgctgtgcaccgacaatggcgccatgatcgcgttcgcggcggccgagcgggtcaaggccggactggccgacctgcgcgagggcgaccacgccttcacggtgcggccgcgctgggatctggcggacatccaggccggg

SEQ ID NO: 14675 - DNA, 645 bp, Bordetella pertussis
atgcctgccaccatggtcctgaccgccccttcgctcctgtccagttcggcactgattgtcctggcctatctgatcggctccatcccctttgccgtcgtggtcagcaagctgatggggctgcaggatccgcgcagttacggctccggcaatccgggcgccaccaatgtgctgcgcaccggcaacaagactgccgccgcgctgaccctgctgggcgacgcggccaagggctggttcgcgctgtggctggcccgcgcgctggtccccgaactctcctggggcgcctacgcgctggtggcgctggcggtgttcctgggccacctctaccccctgttcctgcgcttcaagggcggcaagggcgtcgccacggcgctgggcgtactgatggccatcgaaccatggctggccgtggccaccatcgcaacctggctgatcgtggccgtgttctcgcgctattcgtccctggcggccctggtcgccgcatttttcgcgcccgtctactacgtattcggctcgggcgccgcctggcatgcgcggctggaagtcggcctggccatcgccgtcatcagcgccctgctgttctaccgccaccgcgccaacatcgcgcggctgctcaagggcaccgaaagccgcatcgggaagaagaag

SEQ ID NO: 14676 - DNA, 1569 bp, Bordetella pertussis
atgaacccaactaccttggccgacgtggatacggtcatcatcaacgccaatatcctgacgctcgatcgtgactgcccgcacgcccaggccatcgccttcgctgcggggcgaatccttgcattgggaacgacgcaggagctgtcgccgctggccgggcgggccgcgaccgtggtcgatgctcgaggaagcacgctgttgcccggattcatcgactcgcactcccatctgatgttcggcggcgtggtggcccaggcgctcgatctgaccgaggcagcctgtttgagcgatctgctcgacatggtccggagccgggcgcagtctacgcccgagggcgagtggatacgcggctacggcgtggccgccggtcggctcaaggaaaagcgctatccgacccggcaagagctcgaccaggtgtcgggcggccgcccggtatggctggcggaggactcgttccacgccagcctggtcaatagcaaggcattccggatgctggagattccgctgagtacgcctggggtcgaacttgccgcggatggcagtccgaccggggcgttcctgaacgatgcagcgaatgtgccggcccgccagcgcgtgttcggtttcatttcggacgacgaggcgaggcagatgcttcagcacgtgacgcaactgggcgcgacgcgcggggtgaccacggtccatgctttcgagggcagccggatgagcgcggaccgcgacatcgaattattgatgcggtttcgtcacgaattgccgatacacgtggtcccttactacgagaccttcgacgtcgaacgcgccatgcagctgggagtgagtggcgtcggcgggtgcgggcggaattgcctggatggaatgcccaatatccagacggccgccatggtggatccgtactgttgcagcgaagagcggggttcgttgttccaggagagcatcaaactgcacaacttcgtgattgcggcgttcgagcggggcatgcaggttggcatgcacgccatgggcgatgcggctatcgagcaactgctcgccacctacgaacgcgctattgaagagacgggccggaccgatctgcggccgcgcatcgagcattttcatgttccttcgcgcgaccatgtgcgccgcgccgcagatctgggggtcgggctggccgtccagcccatcttcacgcatttgtggggcggccgggacggcattttcttcgagcgcttgggcgagcggagatacaagcgcatcgatacctaccgcgagattctcgacagcggcgcgattgccagttgcggcgccgatctgcccgtgcatccggccgatcccttgcgctggatccagttgctggtcgacaaccagatcgaccgggaccagagcgtctcgatgaccgaggcaatccggatgtgcacctacaacggcgcctggctgggttttcaggaaagcgaaacgggcacgctcgcggtatccaaggcggccgatgccgtgatgctgggccgcgatccgcaccagtgcatgccgcacgagattgcggcgattcccatcctgaagaccttagggggaaagttggtgttcgagtcgtccaggccg

SEQ ID NO: 14677 - DNA, 666 bp, Bordetella pertussis
atgatgaaaaaccccatctgcgcaatcacgccgaaccctgccatgactcaactcgccccctcccccaccgtcgacggccgccggttgcgcggcgaacgcgcgcgcgcacgcgtcctggacgaagccgtcaaactcctctccgtcgagggactggatggcatcaccttcggccaggtcgccgagcgggccgaagtgggaaaaagcaatctccaggtgctgttcggcgacaaggaacgcctgcaactggcggccctggaccatgcgatcggcctgtaccaggcccaggtcatcgaaccggccatgcgcaagcgcacgcccttggcgcggctgcgcgcgctgatgaacggctggttcgacttcgtggagacccgtcagctgccgggcggctgcgtcattaccgcggccagcagcgaataccgcgcccgccccggaccgctacgggacgccatccggcaataccgcgatggcgcccgcgcacgcctgcgcgaactgattcgccaagccaaagcccagggccagctcgccgccgacaccaacgaagccagactggccatggacctgctcgcctaccaggcattcgccaacgtcgccgcgtcgatggacgacgccgcggagttcaagcgcgcaaaggccgccgtcgcgcaaatgcttgcgggcggtgcgggc

SEQ ID NO: 14678 - DNA, 1590 bp, Bordetella pertussis
atgcaccagcgcatcctcattcttgactacggttcgcaagtcacccagctgatcgcccgccgcgtccgcgaagccggcgtctactccgaaatccacgccggcgacgtcgacgatgccttcgtgcgcgaccaggtcgcgcagggcctcaagggcatcatcctctcgggcagccacgcgtcggcctacgaagaaggctcgatgcgcgtgccggcggccgtgttcgacgtgggcgtgcccgtgctgggcatctgctacggcatgcagtccatggcgcaacagctgggcggcaccgtcagcttcagcgaccaccgcgaattcggctacgccgaagtgcgcgcccatggccacaccaaactgctcgacggtctggccgacttcaccaccgacgaaggccacggcatgctcaaggtgtggatgagccatggcgacaaggtcaccgaactgccgcccggcttcaagctgatggcctccaccgcctcgtgccccatcgccggcatggccgatgaaagccgcggcttctacgccgtgcagttccaccccgaagtcacccacaccgtccagggcaaggccatgctggcgcgcttcgtcaaggacatctgcggctgcgagggcgactggaacatgcccgactacatctcggaagcggtcgcccgcatccgcgaacaggtcggcagcgacgaagtcatcctcggcctgtccggcggcgtcgactcctcggtggccgccgcgctcatccaccgcgccatcggcgaccagctcacctgcgtcttcgtcgaccacggcctgctgcgactggacgaaggcaaacaggtcatgcagaccttcaccgagaacatgggcgtcaagatcgtccacgtcgacgccaccagccagttcatgggcaagctgaccggcgtcgccgaccccgaagccaagcgcaagatcatcggccgcgaattcgtcgaagtctttcaggacgaagccggcaagctgcaaggcgccaaatggctggcgcaaggcaccatctaccccgacgtcatcgaatcggccggcgccaagaccggcaaggccacctcgatcaaatcgcaccacaacgtcggcggcctgcccgacacgctcaacctgcaactgctcgagccgctgcgcgaactgttcaaggacgaagtgcgcgaactgggcgtggccctgggcctgccgccgcagatggtctatcgccacccgttccccggccccggcctgggcgtgcgcatcctgggcgaagtcaagcacgagtacgccgaactgctgcgccgcgccgacgccatcttcatcgaggaactgcgcaacgccaaggacccggccagcggcctgacctggtacgaactcacctcgcaagccttcgccgtcttcctgcccgtcaaatcggtcggcgtcatgggcgacggccgcacctacgaatacgtcgtcgccctgcgcgccgtgcagaccttcgacttcatgaccgccgactgggcgcccctgccgcacccgctgctggcgcgcgtctcctcgcgcatcatcaacgaagtgcgcggcatcaaccgggtggtgtacgacgtatcgagcaagccgcctgcgacgattgagtgggag

SEQ ID NO: 14679 - DNA, 861 bp, Bordetella pertussis
ttgttcagttaccgacacgcctttcacgccggcaaccatgccgacgtcctcaagcacgccattctggtccacgtgctggactacatgaatcgcaaggaagcgccctattgggtggtggacacgcacgccggcgccggcctgtacgcgctcggcagcgactgggccagcaagaacgccgagcatgccgacggcgtggcgcgcctgtgggagctctccggcctgcctccgctgctggccgactatgtcgcccgcatccgcgactacaacacggacggcgtcctgcgccattacccgggctcgccctggctgaccctggacgtgctgcgcgagcgcgaccgcctgcgcctgttcgagatgcacccgagcgagtcggacgtgctggtcaggaacctggaacggcgcaacgagcgcaccgccctgcgccagaccacggtcttcgccgcggacggcttcgagggcgtcaaggcgctgctgccgccgccgacgcgccgcggcttggtgctcatcgatccttcctacgaggacaagcaggattatcggcgcacgctgactgccgtgcgcgaaggcgtcaagcgcttcgccaccggcacctttgtcgtctggtatccgctggtgcagcgccgcgaggcatcggagatggcgcgccagctggagcggctgccggtcaagagctggctgcacgccacgctgaccgtgcgcaaacccgccgccgacggcttcgggctgcacggcagcggcatgttcctggtcaacccgccctggacgctgcacgacgcgctcaagccggccatgccgctgctggcgcgcgaactggcccaggacgaccgggccggtttcacgctgcagtaccgcgagaacccc

SEQ ID NO: 14680 - DNA, 747 bp, Bordetella pertussis
atgaccgcaccccttcccgcctggccctattctccctatatcgcgcaccgcggcggcggccgcctggcgcccgaaaacaccctggccgccatgcgcgtcggcgcggcccatgggttcaccatgttcgaattcgacgtcaagctcagccgcgacaatgtcgaggtgttgctgcacgatgacgacgtggaccgcaccagcaatggccacggcccggcggcgtccaagacgtacgccgagctggcccagctggacgccggcagctggtatgcgccgcagtacgcaggtgaacccgtccccactttttcggcagtggcgcgctatgcgctggccaacggcatcgcctgcaatgtcgagatcaaaccctgcccgggccgcgaggccgagaccggcgcggccgtggcgcgcgcggccgccgcgctgtggcaggatgccctgcccgccccgctgctgtcctcgtttgccgagcccgcgctgcacgcggcccgcggcgccgccccgcagctgccccgcgcgctgctggtggatcgcgtgccggccgactggctcgaacggctgcgcaaatacgattgcatcgcgctgaacatcaatcagcgcgacgccagccgcgagctggtcgacgccgtgcaccaggccggctaccgcatcgccgcctggaccgtcaacgacccggcccgcgcccggctgctgctggattggggcatggacgccattttcaccgacgagctggccaccatccggcccgccgtc

SEQ ID NO: 14681 - DNA, 666 bp, Bordetella pertussis
atgcgcattgttttccgtttgctcgcaccttgccttgccgccatcgcgctcgccgccaccttgccggcccaggctcagaccgcgtccgcgcccacaggttccgcaccgcacgccgtcctggtggtcggcgacagcctgtcggccgaatacggcctgcggcgcgggtccggctgggtgccgatgctggcccagcgggtttcgcaacaatcccccaactaccgcgtcgtcaatgccagcatcagcggcgatacgaccagcggcgggctggcgcgcctgccggcgctgctgcgccagcacgcgccggccgtcgtcgtgctggaactggggtccaacgatgccctgcgcggcctggcgctggacatgaccgagcgcaatctgcgcgccatggcgcaggcgtcgcgccaggccggcgcatcggtgctggtggtcggcatgcagatcccgccgaactacggccgcgactacacccagcgcttcgcgcaggtctttccagccgtggccgaacaggaaaaagcccggctggtgccgttcctcatggaaggaatcgccaccaaccgggccatgttccaggccgacggcatccatcccaacgagaacgcccagccggcgctgcttgacaatgtctggcccttgctcgagccgatgctggctcagcctgcggccgac

SEQ ID NO: 14682 - DNA, 1122 bp, Bordetella pertussis
gtgacccgattcattcataccgcggattggcagatcggccgccagtacggccagttcgacagcgatgacgcggccgtgctggccgaggcgcggctggagcccgtggcccgcattgccgcccaggccagcgaactggccgtcgacgccgtgctggtggccggcgacgtcttcgatacgcaaagcgtttcggatcgcacgatccggcgcctgttcggcgccatgcaggcctacgagggcccgtgggtgctgatcgccggcaaccacgatgcggcgctggccgacagcgtctggtcgcgcgcgcgccggctcgagtgcatcggaaccaacgtccacgttccccaggacacggccgcggtcgagctgccgctggcggggctggccgtgctggccgcgccgctgacccagcgccatacctatgacgatgtgactgccgcgttcgacaccatggacagcgccgcgggcctggtgcgcgtggggctggcgcacggcagcgtggccgaccggctgcccgagcaggccgatgccgccaacccgatcgcgccggaccgcgcgcagcgcgcccggctggactatctggcgctgggcgactggcacggctgcctgcgcatcgacgaacgcacctggtatgccggcacgcccgagcccgaccgctttcgcggcaatgccccgggatatgcgctgctcgtggaggtggcggcgccaggcgcgccgccgcaggtgcgccagctggaggtcggcaaatatcgctggtcgcactgggtcgagcggctggacctggcttccgatgccgaggatctgggccaccggttggccggcctgcaggccggcgacgtgctgcgcctggaactgcacggcgcgctgtcgctggcgcggcgctgggacgcattgcgccgcgatgtcgagcgcgccgcggcacgcgtgcgcgcgctggtcgccgacagcgccggactggtgctggagccggatgcggccgacctggccgcgctctcggtcgatggctacgtgggcgcggccgccgcgcgcctgcaggccatgcagggcgacggcgcgcaggccgccgcagcgcgcgtcgcgctgcggctgctgctgcaataccagcgcgagctggcggagggcgcttcg

SEQ ID NO: 14683 - DNA, 655 bp, Bordetella pertussis
atgaaaatactgatggtgctgacttcgcatgaccagctgggcgacaccggccgcaagacggggttctggctcgaggagttcgccgcgccttattacgtattcgtcgacgccggcgcccgtgtcacgctggcctcgccggccggcggccagccgccgctggatcccaagagcgacgagcccgacgcccagaccgaggcgacccgccgcttcgcggccgacacccaggcgcagcaagcgctggcgcacacggcgaagctggccgatatgcgtgcggccgatttcgacgcgctgttctacccgggcggacatggcccgctgtgggacctggccgaaagcgcgcattcgaccgcattgatcgagaccttcctggccggcggcaagccggtggcggccgtgtgccatgcgcctggcgtgctgcggcacgccgttggtggccggccggcaggtgaccggcttcagcaacaccgaggaagcggtcgtgcaattgaccgaggtggtgccgttcctggtggaggacgaattggtcgacctgggcgcgcgctacagcaaggccgaggattggcacgcctacgtggtcaacgacggactgctcatcaccggccagaacccggcctcgtccgagcgcgccgcccgcgccatgctgacagcgctggac

SEQ ID NO: 14684 - DNA, 2859 bp, Bordetella pertussis
atggactataaaaaatccctcaatctgcccgacactcccttcccgatgcggggcgacctggccaagcgcgagcctggctgggttgccgaatgggaagaaacccaggtctaccaggccatccgcgccgccagccgcggccgtccgcgcttcgtgctgcatgacggcccgccctatgccaacggcgacatccacatcggccacgccgtcaacaagatcctcaaggacatcatcgtcaagagccgcaacatggcgggctatgacgcgcactacgtgccgggctgggactgccacggcatgccgatcgagatccagatcgaaaagaaatacggcaagcacctgccagtcaccgaggtccagtccaaggcgcgcgcctacgccctcgaacagatcgatcgccagcgcaaggacttcaagcgcctgggcgtgctgggcgactggcacaacccttacctgacgatgaacttcagcaatgaggccgacgagatccgcgtgctcggccgcattctggaaaaaggctatgtgttccgcggcctgaaaccggtcaactggtgtttcgactgtggctcggcgttggccgaggccgaggtcgagtacgccgaccgggtcgatccggccatcgatgtggcctttccgttcaccgaccgcggcgcgctggcgcgcgccttcggcctggacgaggtcgacgccggcgccattgtcatctggaccaccactccctggaccattccgtcgaaccaggcgctcaacgtgcaccccgagatcgactacgcgttggtgcgcgtcacgcccgcgccggtgcacggtccgctgctgctgctggcgcaggaacgcgtcgaacccagcctgaaggcgtgggggctggaaggcgagatcatcgccaccgccaagggcgaggccctcgaaggcctgcgctttcgccatccgctggccgccgccgcccaagggtacgaccgcacctcgcccatctacctgggcgactacgtcaccctggacaccggcaccggcgtcgtgcactcggcgcccgcctacggtatcgaagacttcgtgtcgtgcaaggcacacggcctggcggacagcgacatcctcggcccggtcatgggcgacggcaagttcgtcgacagcctgccgctgttcggcggcctgtcgatctgggacgccaatcccaggatcgtcgaagcgctcaagctggccgactcgctgatgctggtccagaaactgtcgcacagctacatgcattgctggcgccacaagacgccggtcatctaccgcgccaccagccaatggtttgccggcatggacgtcaagccgcgcgacggcggcccgagcctgcgcgaaagcgccctggccggcatcgacgccaccgccttctaccccgcctggggccgcgcgcgcctgcatgcgatgatcgccaaccgccccgactggacgctgtcgcggcagcgccaatggggcgtgccgatggcctttttcgtgcacaaggaaaccggcgagctgcacccgcgcaccgtcgagctgctggagcaaatcgcgcagcgcgtcgagaaaggcggcatcgaggcctggcaatcgctcgatccgcgcgaactgctgggcgacgaagccgagctgtacgaaaagaaccgcgacacgctggacgtgtggttcgactcgggctcgacccatgccacggtgctgggcggcaaggacggcgtgctgggcggctcgcacggcgccgaactggcctggcccgccgacctctacctcgaaggttcggaccagcaccgcggctggttccactcgtcgctgctgaccggttgcatgctgtacggccatcccccctacaagggcctgctcacgcacggcttcgtggtcgacggccagggccgcaagatgagcaagtcggtcggcaacgtcatcgcgccgcagaaagtgtccgattcgctcggcgccgagatcctgcgcctgtgggtcgcctccaccgactactcgggcgagctgtcgatctccgacgagatcctcaagcgcgtggtcgaaagctatcgccgcatccgcaacacgctgcgcttcctgctggccaacgtggccgacttcgacgcggtcggccaggccgtgccgtatggcgagctgttcgaaatcgaccgctacgcgctggcgatgaccgcgcagatgcaggccgaagtccagggccactacgaacgctacgatttccatcccgccgtctcccgcctgcagacgttctgctcggaagacctcggcgcgttctacctggacatcctgaaagaccgcctgtacacgacggctgccggcagcgccgcgcgccgttcggcgcagaccgcgttgctcgacatcacccagacgctgctcaagctgatggcgcccatcctctcgttcaccgccgaggaagcctggaagatcctggccggctcggcgctggccaagcaggccgacgccccgcgcgtcaccatcttcaccgaggtctatcacgcgttgccgccatttgccgacggcgaggccctgaccgccaagtggacgcgcctgcgcgccatccgcgcggaggtgcagcgcaagctggaagaggtgcgttcggccggcgccatcggctcgtcgctgcaggccgaagtggacctgtacgccaacgcggccgaccacgacatcctggccagcctgggcgatgacctgcgtttcgtgctgatcgtctcgcgcgccaccgtgcatgccgacgccgacgacttgcgcatcgagatcgccgcgtcggggcacaaaaagtgcgagcgctgctggcactggcgcccggacgtcggccaggacgccgaccatcccgagatctgcggccgctgcgtgagcaacctgttcggcgccggcgagccgcgcacgcgggcc

SEQ ID NO: 14685 - DNA, 963 bp, Bordetella pertussis
gtgaaaccatcgctgcgcatctaccgctacccgcccccgccctcgcaacgcacgccgtgcgccctgacgatcggcaatttcgacggcgtccatctcggccatcaggccatcctggcgcgcgtgcgccaggaggcccgcgcgcgcggcctggtgcccgccgtcatgaccttcgagccgcacccgcgcgagtacttcgccaccctgaaccgccgccccgaactggcgcccacccgcatttccgggctgcgcgacaagctgcaggcgctggcggccgccggcatcgaacaggtcgtggtcgagcgcttcgacgcccggctggccgaaatgtcggccaacgccttcatcgaagacctgctggtggccggcctgcagacccgctggctgctggtcggcgaggatttccgctatggccacaagcgcagcggcgacatcgacctgctgcgcgaagcgggcctgacgcacggtttcgaagtctgtaccctggccgacatcaccgaccgccagggccaccgcatttccagctccgaggtgcgcaccgccctggcggtgggcgacctggaccgcgccgcgcaactgctgggccagccgttccatatcagcggccatgtcatccatggccagaaactgggccgcgaactgggcttcccgaccatgaacctgcgggtggcgccgcgctgcgccacccgctcgggcatttacgtggtgcgcgtgctcggcctgcaggaccggcccttgccggcggtggccagcctgggcgtgcgtccgacggtcgaagaccgcggccgggtgctgctcgaagcccacctgctcgacgagagcctcgacgcatacggtaaactcgtgcgagtcgagttcctgcacaagctgcgggacgaagaaaaattcgccgatctcccctccctgactgccgccatcgcccaagacgcgcaaaacgcgcgcgcctattttgccgttcatggacta

SEQ ID NO: 14686 - DNA, 2370 bp, Bordetella pertussis
gtgccagcgcgcccagcaaagcggcatcgccgggctcgagcaatttgctctgcatctgcgccgctacgcggcatgatgctggaaaagctcaatcctgaacaacgcgctgcagtaacgctcgaaccgcaacacgccctggttctcgccggggcgggcagcggcaagacccgcgtactgacgacccggatggcctggctgattcaaaccggccaggccagtccatttgcgctgttggcagtcacctttaccaacaaggcggcgcgtgaaatgctcacgcgcatgtcgaccctgttgccgatcgacacgcgtggcctgtggatcggtaccttccacggcctgtgcaaccgcatgctgcgcgcgcaccatcgcgacgcgggcttgccgcaggcattccagattctcgataccaccgaccagctggccgccatcaagcgcctgctcaaggcgggcaatatcgacgacgagaagtacccgccgcgcgatgtgcagcgtttcatcaacggcgccaaggaagaggggctgcgtcccggcgacgtcgaggcctacgatccgcaccggcgcaagctgatcgagatctaccagctgtacgaggcgcagtgccagcgcgagggcgtggtcgatttcgccgagctgctgctgcgcgcgtacgagctgctgtcgcgcaacgcgccggtgcgagagcattaccagcggcgcttccgccatatcctggtcgatgagttccaggacaccaacacgctgcagtacaagtggctgcgtctgctggcgggcaccggggcggcgattttcgcggtcggcgacgacgatcagtccatctatgcgtttcgcggcgccaacgtcggcaacatggccgacttcgaacgcgattacgcacatggccgtgtcatccgcctggaacagaactaccgctcgtacggccacatcctggattcggccaatgccctcatcgggcacaacaccggacgcctgggcaagaacctctggaccgaacagggcgagggcgagccggtgcgcgtcatcgagcagccctccgacggcatggaggcgcaatggctggtcgacgagatccgcgcgttgatcaacgacggccgcatgcgcagcgaaatcgccgtgctctaccgcagcaacgcgcaatcgcgcgtgctcgagcatgcgctgttctcggtgggcatcccctacaaggtgtacggtggcctgcgcttcttcgagcgccaggaaatcaagcacgcgctggcctatctgcgcctgatcgccaatccgaacgacgacacctcctggatgcgggtggtcaactttccgacccgcggcatcggggcgcgcacgctcgagcagctcagcgacgcggcgcgcgcgcacgacaccagcctgttcggcgcggtggcccgcgtcggcggcaagggcggctcgaatctggcgcaattcgcgcagctgatcggacagatggcgcacgacacgcgcgagctgccgctgccagaactggtggaccatgtcatcgaggccagcggcctgaaggcccactaccagaccgaacgcgaaggcgccgagcgcctggagaacctcaacgaactgatcaccgctgccacggtgttcgcggccgaggaaaacttcgaaggcttgccggccggcgtcgtgcccgatcacgatgtgagcggcgccctgatgccgggcgtcgtcgatgccccgcaacccgatacgctgggcggcctgacaccgttggcggctttcctgtcgcatgcggcgctggaagccggcgacaatcaggcgcaggtgggccaggacgcggtgcagctgatgaccgtgcacgccgccaagggccttgagttcgacgccgtgttcatcaccggcctggaggaagggctgttcccgcacgagaacagcatcatggagcccgccggcctcgaggaagagcggcgcctgatgtacgtggcgatcacccgggcccgggaaaggctgtatctcagcctggcgcaaagccgcatgctgcacggccagacgcgttacgccatgcgttcgcgttttctcgaagaaattcccgagcagcatctgaagtggctgagcccgcgcgccggcctgcatcagggcggcggcttcggcggcgcggcgccggcctggagcagtcgcggcgacgcctttggccgcaagcctaccggcactgccgcacctcggcagccgcgtggcatggccagcggcgtcaccgtgggcgagcagcagttccgggtggggcagggcgtgcgccacgcgcgctttggcgacggcaccatcataggcctcagcggttcggggcaggacgcccaggcccagatccagtttcgcgacgtgggcgccaagacgctggcgctgggcatcgccaagctggacatcatcacggcc

SEQ ID NO: 14687 - DNA, 441 bp, Bordetella pertussis
atgatttccgtcacccgccgactcgaattcgacgcaggccaccgcatccccgaccacaacagccagtgccgcaacctgcacgggcaccggtacgtgctggaggtcacgctcagcggcgacgtcgtgcaggcgcccggcgcctccgacaatggcatgctgatggatttttccgagatcaagcgcatcgccagggcgcatatcgtcgacgtctgggaccacgccttcctggtctacgagggcgaccatgccgtgcgcggctttctcgatacgctgccggaccacaagacggtggtgctcgaccgcattcccacggccgagaacctggccagcatcattttcgcgacgctggcgccccactaccacgggcactatggcgcggacctgcgcctgacccgggtgcgcctgtacgaaacgccgaactgctgggccgactgcggcagc

SEQ ID NO: 14688 - DNA, 831 bp, Bordetella pertussis
atgggcctgcccatggccggtcacctggcccgcgcgggccatcaggtcacggtctacaaccgcacggcagccaaggcgcaggcctgggccgccgaattcggcggcaaggccgccgccacgccgcgcgaagccgcggcaggcgcgcaaatcgtgttctgctgtgtcggcaacgacgacgacctgcgcagcgtggtgctgggcgcggacggcgccttcgccggcatgcaggccggcgcggtcttcgtcgaccacaccaccgcctcggccgatgtggcgcgcgaactctatgcggcggcgcgcgaactgaatctgcagttcatcgatgcgccggtctccggcggccaggccggcgccgtcaatggcgcgctgaccatcatgtgcggcggcgacagcgccacgttcgaggacatcaagcccgtggcgcacgccttcggccgcgccgtgacgctggtgggcccgccgggagccggccagctggccaagatggtcaaccaggtctgcatcgccggcgtggtgcaaggcctgtccgaagccatcgctttcggccagaccgcgggattggacatgaagctggtgctggatgtgatcagcaagggcgccgcgcaaagctggcagatggaaaaccgcggcgccacgatggtggacgaccagttcgatttcggtttcgccgtggactggatgcgcaaggacctcggcctggtgctggcagaggcgcgcaacaatggcgcacgcctgccgctgaccgccctggtggaccagttttacggcgatgtgcagaaaatgggcggcaaccgctgggatacgtccagcctcatcaagcggctgcgcgac

SEQ ID NO: 14689 - DNA, 1722 bp, Bordetella pertussis
atgcatatgcgccgctatatgcggcaaggaaaagctatgtctttcgaagacttgggcttggcgcccactattctctcggccctgagcgaggccggtttcaccgaacccacttcggtgcaagccgctgccattccccaggccatggccggcgccgacctgatggtctcttcgcaaaccggtagcggcaagaccgccgcgttcatgctgccggcgctcaaccgcatcgcccaccagcccggcaacaagggcgtcggcgtgcaagtgctggtgctgaccccgacgcgcgaactggcgctgcaggtcgccgacgccacggcgtcgtatggccgcaacctgcccggcctgcgcaccgccaccgtcgtgggcggcatgccctatggcgcgcagctcaaggcgctgtcgcgccgcgtcgacgtgctggtggccaccccaggccgcctgatcgaccacctgaaagccggccgcgtcaaactgaataccgtgcacaccctggtgctggacgaagccgaccgcatgctggacatgggcttcatcgaagatatcgaaaccatcatcgagcgcctgccgaaagagcgccagaccctgctgttctcggccaccctggacggcagcgtggcgcgcctggccgagcgcatgatgcgcgagccacagcgcatcgaaatcgccggccatcgccagaagcacgccaacatcacgcaaagcctgctgtacgccgacgacgccgcgcacaagatgcgcctgctggaccacgtgctgcgcgacgcgcgcctggaccaggccatcgtgttcacggccaccaagcgtggcgccgacgacctggcagaccgcctggccgaccagggctttgccgccgcggcgctgcatggcgacatgaaccagcgccagcgcacccgtacgctgggccagctgcaacgcggccagctgcgcgtgctggtggcgaccgacgtggccgcccgcggcatcgacgtgcaaggcatcagccacgccgtcaacttcgacctgcccctgcaggccgaggattacgtgcaccgcatcggccgcaccggccgtgccggccgcgacggccaggccttcacgctggccacgcacgccgaacgccacaaagtgcgccgcatcgagcactacatcggccagtcgatcaacgccgaagtcatcgccggcctggagccgcagcgcaccccgcgcccgagcacgggcggcccgcgccgcggcggcaagccgatgggcggcaagcgtcccggcggctacggcgcgccgcgcgagttcggcgatcggccccagcgcccctatggcgaccgtccgcaacgcgacttcggcgatcggccccaacgcgacgccagcgaccgcccgcagcgcagcttcggcgatcgtccccagcgcgatttcggtgaccggccccagcgcccctacggcgaccgtccgcaacgcgacttcggcgatcgtccgcaacgcgatttcggtgaccgtccccagcgcccctacggcgaccgtccgcagcgcgacttcggcgatcgcccgcagcgcagcttcggtgaccgtccgcaacgcgacgtcggtgaccgtccgcaacgcgacttcggcgaccgcccgcagcgcagcttcggcgaccatccccagcgcgaaggcggctggcatggcgccccgcgtgaaggccgttcgttcgacaagcgccccggcggccccgccaagcgctttgccaagccggccgcgccccgccgcggc

SEQ ID NO: 14690 - DNA, 819 bp, Bordetella pertussis
atgactctcgacctgcagaccaccatcgaacaagcctgggaaaaccgggccaacctgtcgcccgtcgacgcgagcgccgaagtgcgcgatgccgtcgaacacacgatcgacggattggatctgggccgcctgcgcgtggccgaaaaaatcgacgatcaatggatcgtgcaccaatggatcaagaaggccgtgctgctgtcgttccggctgcacgacaatgccgtcatgggccagggcccgctgcagttctacgacaaggtgccgaccaagttcgccggctacggcgaagccgcgttcaaggccggcggctaccgcgtggtgccgccggccgtggcgcgccgcggcgctttcatcgcccgcaacgtggtgctgatgccctcctacgtcaacatcggcgcctatgtcgatgaaggcaccatggtcgatacctgggccaccgtgggctcgtgcgcgcagatcggcaagaacgtgcacctgtccggcggcgtgggcatcggcggcgtgctcgaaccgctgcaggccaaccccaccatcatcgaggacaactgcttcatcggcgcgcgctcggaagtcgtcgagggcgtggtggtcgaggagaactcggtgctggcgatgggcgtgttcctgtcgcaaagcaccaagatctacgatcgcgccaccggcaaggtttcgtacggccgcgtgccgtcgggctcggtcgtggttcccggctcgctgccgtccgaggatggctcgcacagcctggcctgcgcggtgatcgtcaagcgcgtcgacgcgcagacccgcgccaagaccagcatcaatgacctgctgagggcc

SEQ ID NO: 14691 - DNA, 1092 bp, Bordetella pertussis
atgagcaggaccgacgatccaggcgttgccgggctgcgggtctacatcgtcggcggcgcggtgcgcgacgacctgcttggcctgccggccggcgatcgcgactgggtcgtggtgggcgccacgcccgaggacatggcgcggcgcggcttcatcccggtgggcggcgatttccccgtgttcctgcatccgcgcacgaaagaggaatacgcgctggcgcgcaccgaacgcaagtcgggacgcggctacaaggggttcaccttctacaccggcgccgacgttacgctggagcaggacctgcagcggcgcgacctgacggtcaatgcgatcgcccgcacgccgcagggcgaactggtcgacccgctcgatggcgtggccgatgtacgggcccgcgtgctgcgccacgtgggcgaggccttcgccgaggacccggtgcgcatcctgcgtctgggccgttttgccgcgcgctttggcgacttcagcatcgcgccggaaaccatgcagctgtgccgccgcatggtcgaggccggcgaggccgatgcgctggtgcccgagcgggtctggaaagaagtgtcgcgcgggttgatggcgcaggcgccgtcgcgcatgctggatgtgctggcccgggccggcgcgctggcgcgcgtgatgcccgagttgcacgacgacacggcggtgcgcgccgagatcgatcgcgccgcggccgcgggcctgccgctggccggccgctatgccttgctgtgtcgccatacgcccgagcgcgacgcgctgggccgccggctgcgcgcgccggtcgaatgcatggatcaggctcgcctgctgccgctggcggtcgacgcgctggccgccagcgcgacgccggccgcgcaactggacctgatcgagcgctgcgacgccttgcgcaagcccgagcgtttcgacgcgctgctgcaggcggcggcgatcgtggcgccggtggacctgtccgcctggcgcgcgcgcgtgcaggccgtgcgcgccatcgacgccggcgcgatcgcgcggcaatgcgccggcgatccggcgcgcatcaagccggcgctgcgccaggcgcgcttgcaggcgctgggcggcgcg

SEQ ID NO: 14692 - DNA, 1059 bp, Bordetella pertussis
atgaagctgcctaccgccgatgaggcggtgttctcgatcaagtgctacctgggcgccatgctggcgctctacctggcgtactccatcgggctgccgcgtccgttctgggccatgaccacggcctatgtcgttgcgcagccgtggtccggcgccgtgcgctccaaggcggtgtaccgcctgggcggtactttcttcggctcggccatgacgatctataccgtgccgcgcctggccaactaccccgtgctgatgacgctggccatggtgctgtgggtcggcctgtgcctgtacatcgccgtgctcgaccgcacgccgcgctcgtatctcttcatgctggccggctataccgccgccatgatcggctttcccagcgtgaccgacccggcgctggtgttcgacaccgcgctggcgcgcgtcgaggaaatcagcctgggcatcatctgcgccacgctggtccacagcgtggtgctgccgcgcggcatcggccgcgccatgatgggccgcctggacgccaccgtgcgcgacgcgcgcagctggatccaggatgtactcaaccagcgcggcgccgcgcagcacgccagggaccgccgcgcgctggccaacgacatcacccagctgcgcctgctgtcgacccacgtgccgttcgacaccggcaacatccgctggaccgccaacgccttgcgcgccatgcaggagcacatcaccgcgctgacgccggcggtctcggccgtcgaagaccgcctgcaagccctgcaggcgcagggccgcgcgctgccgccgccggcggccagggtgctggccgacatctcggcctggatggacgacagtgcccacgccacgcgcgagcaagcggtgcagctgcgcgccgcgctgacgcgcctggcgcccgcgatcgaccggcagtccggctggcacgacgcgctgctggccagcctggtcgcgcgcttgcgcgaactggtcgacagctacgacgcctgcctggtgctgcgccaggatatccacgccggcctgggcggcgcgccgaccggccgcacccgccgcctaactgtgaagattcaa

SEQ ID NO: 14693 - DNA, 1413 bp, Bordetella pertussis
gtgcagtggtggccgtataacaacggcggccaccgggcaatcgtgccggccatccgccagtcatacgagagaaacatgcaggggaatcaccaaacggctacccatcagccggtgcgcgcgtccatcgccgcattcgtcggcaccatgatcgagtggtacgacttctatatctacgccacggcagccgccctggtattcggcaaactgttcttcccgtcggtcgacggcttctacggcaccctggccgcgttcggcaccttcgccgtgggcttcctggcgcgtccgctgggcggcgcggtgttcggccatatcggcgaccgcatcggccgcaagaagtcgctggtcatcacgctgctgctgatgggcacggtcacggtgctgatcggcctgctgcccacctatgcctccatcggcatctgggccccgatcctgctggtggcgctgcgcttcatccaggggattgccgtgggcggcgagtggggcggcgccgtcctgatggccggcgaacactcgcccgaccgcagcaagcgcaccttcttcgcctcgttcgcgcagctgggcagcccggccggcctgatcctgtcgatgctgatgttcaagctggtgacctcgctggacgacgccgccttcatggactggggctggcgcgtgccgttcctgttcagcgccgcgctgctggtggtgggcttcgcgatccgcctgagcgtgaacgagtcgcccgacttcctggccgagcaggccgagaaggcgcgcctgaaggacgccgccgcgaagcaggccgccgacaaggcgcccatcgtggaagtgctgcgcggcgcctccggcctgctggccctggccgtgggcgccaacgtgctgggcatcgccggcttctacttcaccaacacgttcatgctggcctacaccacgcagtacgtggggctgagccgcggcgtcatcctcgactgcctgctggtggtgtcggtgatgcaattcatcatcacgccgctgtcggcctacatcgccacccgcatcggcagccggcgcttcctgctgatcacctcgttcctgtcgatcttcacgccgtacgtgatgttcaacatggtcgaccagggcacgctgaccagcctgacgctgggcgtgggcctggccgtggtctgcctgggcgcctactatgcggtgatcgccggctacgtgagcgacagcttccccacccgcatccgctataccggcatttccatggcctaccaattgtcgggcgccatcttcggcggcctgacgcccatcctgggcaccatcctggccgagaagttccagggccactggtggccgctggccctgctgttcagcggcatctcgctgctgtcgatgatttcggtaatcttcctggccaaccatcgcaccgatgcggtgacggccccgctgcggagcgca

SEQ ID NO: 14694 - DNA, 4044 bp, Bordetella pertussis
gtgtcccttgtccagcatctgcccggttcctccgtcctttccgctttccgccgcgagcgcctgctggcgcaactgaagaaggccggcctgccggttgccgatatctccgcgcgctacgagcatttcatccataccgacagcgccttgccggccgaacagcaggcgcgtctggcgcaactgctggactacggcacgccggccgccgagacgccggccaagagcctggagctgctggtcattccgcgcctggggacgatgtcgccgtgggccagcaaggcgaccgatatcgcgcacaattgtggcctggacgccgtgcgccgcatcgagcgcggcgtgcgttacgcgctgacgcccgaacgcggcctgctgggcgccaagtcgttcgacgccgacatgctggcgcgcgcggccgactgcctgcacgaccgcatgaccgagaccgtggtcgacggcgcgttcgacggccaggcgctgttcgagacgctggccggcaagccgatgcgcaccgtggcggtgcaggccgagggccgcgccgcgctggagcaggccaacgtggcgctggggctggcgctgtccgaagacgaaatcgattacctggcgcagtcgttcggcgacctggggcgcgatccgaccgacgtcgagctgatgatgttcgcgcaggccaacagcgagcactgccgccacaagatcttcaacgcgcagtgggtcatcgacgggcaggagcagtccaacaccctgttcggcatgatccgcgccacccacaaggcccagccggccggcaccgtggtggcctattcggacaacgccgccatcatggaaggcggtccggcgcagcgtttccaggccggcgtgccgggcgtggccggcgagggcgcgcaggccgcgcgctacgtgcgccgcgacaccaccgtgcacaccctgatgaaggtcgagacgcacaaccacccgaccgcgatcgcgccgtttccgggcgcggccaccggcgccggcggcgaaatccgcgacgagggcgccacgggccgcggctccaagcccaaggccggcctgaccggctttaccgtttcgcacctgcgcttcgacgatgcgctgcaaccgtgggagaacgaccaccacggcctgcccgagcgcatcgcctcgccgctgtccatcatgatcgatggcccgatcggcggcgccgccttcaacaacgagttcggccggtccaacctgctgggctatttccgcgccttcgaacagaccgcgggcggcacgcgctggggctaccacaagcccatcatgatcgccggcggcctgggcagcatcgacgccggcctcacgcacaaggaagtgattccgccgggcgcgctgctgatccagctgggcggcccggggctgcgcatcggcatgggcggcggcgccgcctccagcatcagcatgggcagcaattcggccgaactggacttcgattcggtgcagcgcggcaaccccgagctggagcgccgcgcgcaggaggtcatcgaccgctgctggcagcagggcgagcgcaaccccatcgtcgcgatccacgacgtgggcgcgggcggcctgtccaacgcgtttcccgaactggtcaatgacgccggccgcggcgcgatcttcgacctcaagcgcgtgccgctggaagagtcgggcatgtcgccggccgagatctggagcaacgagtcgcaggagcgctacgtgctgtcgatcctgccgcaggacctggagcgcttcgacgccatcgcgcggcgcgagcgctgcccgtacgcggtggtcggcgtggcgaccgaagagcgccagctgcgcgtggtcgacggcgagggcctgcccgggctggacacgatccgcgcgcaaggcgagaacgaagtgcgtccggtggacgtgcccatcgacgtgatcctgggcaagccgccgcgcatgacgcgcgacgtgcagcgcctgcccggcgtgagcgagccgctcgacctggccggcctggatctcaccgaggcggcctatcgcgtgctgcgccatccgacggtggcgaacaagtcgttcctgatcaccattggcgatcgcaccgtgggcgggctgtccagccgcgaccagatggtcggtccgtggcaggtgccggtggccgattgcgccgtgacgctggccgatttcgaaggcacgcgcggcgaagccatgtccatgggcgagcgcacgccgctggcgatgctggacgcgcccgcttccggccgcatggcggtggccgaggcgctgaccaacctggcggccgccgacgtggcgcgcctcgaagacatcaagctgtcggccaactggatggccgcctgcggcgtgcccggccaggatgccgcgctgtacgacaccgtgtcggcggtcagcgagctgtgccagtcggtcggactgtcgattccggtgggcaaggactcgctgtcgatgaagacgtcctgggacgaggtgggcgagcagcgccaggtggtggcgccggtctcgctcgtcgtgacggcgttcgcgccggtgggcgatgtgcgcgccagcctgaccccgcagctgcgcaccgatgccggcgatacggtgctgatcctgatcgacctgggccgcggccggcaccgcatggccggctccatcctggcgcaagcctataaccaggtcggcgagacggtgcccgatatcgacgcgccgcaggatctgcgcgccttcttcgtgacgatccgcacgctggccgaggccggcaccatcctggcctaccacgaccgctcggacggcggcctgttcgccacgctggccgaaatggcgttcgccgggcgcaccggcgtgtcggtcaacctggacatgctcaccttcgatccgcagtcggccgactggggcgattacaagatccgtcccgaacaggtggcggtgcagcgcgaggagctcaccctcaaggcgctgttctcggaagaggccggcgcggtcatccaggtgccggcttcgcagcgcgacgcggtgatgcaagtgctgcgcggcgccggcctgtccgcgcattcgcatgtcatcggcggcctgaacggcgccgacgaggtcgagttctaccgcgacggccgcaaggtctggagccagccgcgcgccgacctgggccgcgcctggagcgaggtcagctaccgcatcatggcgcggcgcgacaacccggcctgcgcgcaggccgagctggacgtctggaacgacgccaaggatccgggcctggccccgcgcgtggcgttcgatccgcaggaagacgtggcggccccgttcatcggcaccggcaagcggccgcgcgtggcgattctgcgcgagcagggctgcaacagccaggtcgagatgggctgggcgttcgacacggccggcttcgaggccatcgacgtgcacatgaccgacctcctgtcgggccgcatcgacctggccggcatgcagggcctggtggcggtgggcggtttcagctatggcgacgtactgggcgccggcgagggttgggcccgcaccattcgctacaacgacaaactgtcggatcagttcgcggcctactttgcccgccccgacacctttgcgctgggcgtgtgcaacggctgccagatgatggcggcgctggcgcccatgatccccggcgccgagcactggccgcgctttacccgcaaccagtccgagaagtacgaggcgcgcctgtcgctggtcgaagtcacggcttcgccgtctatcttcttcgccggcatggagggcgcgcgcattccggtggccgtggcgcacggcgaaggctacgccgacttctcccagcagggcgatgcggcgcgcgcgttgatggcggtccgctacatcgacaaccatggcgcggccaccgaaacctatccgttcaaccccaacggcagccccggcggcctgaccgcggtgacgacggccgacggccgcttcacggtcatgatgccgcaccccgagcgcgtgacccgcaacgtcatgatgtcgtgggcgccggcgcaatggggcgagcgcgatgccggcggcgcgttcagtccctggatgcgcatcttccgtaacgcgcgcgtctggctgaag

SEQ ID NO: 14695 - DNA, 1026 bp, Bordetella pertussis
atgaaattccgcaatatcgtgggcgccgccctttgcgccgctttcgcgctgggcgtggcgccggcccaggcccagaactacaagtccgaatacaagctgtccatcgtggtgggcaccaccttcccgtggggccagggcgccgtgatctggtccgacctggtgcgcgagcgcaccgagggccgcatcaatatcaaggtctatccgggcacctcgctggtgcagggcgaccagacccgtgaattcaccgccatccgccagggcgtgatcgacatggccgtgagttcgaccatcaactggtcgccgcaggtcaagcagctcaacctgttctcgctgcccttcctgatgccggactatgccgccatcgacgcgctggtgcagggcgaggtcggcaaggaggtcttcaagctgatcgaaaaggccggcgtggtgccgctggcctggggcgaaaacggctatcgccagctcagcaactccaagcacgaaatcaagacgccggccgacatgaagggcctgaagctgcgcgtcgtgggctcgccgctgtacatcgacaccttcacggcgctgggcgccaaccccacgcagatgagctgggccgacgcccagccggcgctggccagcggcgcggtgaacggccaggagaacccgctgtctatctacaccggctccaagctgtacacggtgggccagaagtacctcaccctgtggaactacgtcgccgacccgctgatctacgtggtcaaccgcgaggtatggaactcctggtccgagaaggatcgcgagatcgtccgccaggccgcgctggacgccggcaagcagcagatcgtcatcgcccgcaagggcgtcacgcccgaagacccatcgctgctgaaggaaatcgccggccacggcgttaccgtcagcagcctggacgccggccaacacgccgaattcgtggcggccaccaagccggtctatgaaaagtggaagaagcagatcggcgccgaactggtcgacctggccgagaaatcgatcgcggcccgcaagaaa

SEQ ID NO: 14696 - DNA, 1359 bp, Bordetella pertussis
ttgatcgcgccggccctcatccggctggcgcgtcttcaccagagatacgaaacacttatgcctgaaaaaaagggatcggcagacgcaaaagtgctgcattgctcgttttgcaacaagagccagcacgaagtccgcaagctgattgcaggtccttcggtattcatctgtgatgagtgcatagacctttgcaacgacatcatccgcgaggaagcgcaggctaccgcgcgcgctgccattcgctccgagctgcccaccccggccgaaatcaagacctttctcgaccagtacgtgattggccagaccagccccaagcgcatgctggcggtggcggtctacaaccactacaagcgtatccgccacggcgagatcaagggcgacgaagtcgagctctccaagagcaacatcatgctgatcggcccgaccgggtcgggcaagacgctgctggcgcagacgctggcgcgcatgctcaacgtgccgttcgtcatggccgatgccacgaccctgaccgaggccggctacgtcggcgaggacgtcgagaacatcatccagaagctgttgcagaactgcaactacgatgtcgagaaggcgcagcgcgccatcatctacattgatgagatcgacaagatttcgcgcaagtccgacaacccgtcgatcacccgcgacgtatcgggcgagggcgtgcagcaggcgctgctcaagctgatcgaaggcacggtcgcttcggtgcccccgcagggcggccgcaagcatcccaaccaggacttcgtccaggtcgacaccaccaacatcctgttcatcgtcggcggcgccttcgacggcctggaaaaggtcatccgcgaccgcaccgagaaatcgggcatcgggttttcggcggcggtgcgcgccaagtccgagcgcggcgtgggtgagctcttcagcgaggccgagcccgaggacttgatcaagttcggcctgatccccgaactggtcggccgcctgcccgtggtcgccacgctggacgagctggacgaggccgtgctggtgcagatcctgaccgaacccaagaacgcgctggtcaagcagttccagaagctgttcgccatggaaggcgcggaactcgacgtgcgcccggatgcgctgaaggcgatctcccgcaaggcgctcaagcgcaagacgggggcgcgcggcctgcgctccatcctggagggcgcgctgctggacaccatgtatgacctgccgtcgcaaggcaacgtcagccgcgtggtgctcgaggccaatgccgtcgagggcgtcggcaagcccctgttgatctacgccgacgaatccgaagccgcctctggcgagaaggccgggcgtggcgaggtccgtgacgcggcggct

SEQ ID NO: 14697 - DNA, 2451 bp, Bordetella pertussis
atgtctgccagtcagaccctgtcttccgacccgattgacctgccgttgttgccgctgcgcgatgttgtcgtgtttccgcacatggttattccgctgtttgtcggccgcccgcgctcgatccgcgcgctggaggtggcgatggaagcgggcaagagcatcatgctggtggcgcagaagtccgccggcaaggatgacccgactcccgaggacgtctatgagatcggctgcgtggcgagcatcctgcagatgctcaagctgcccgacggcaccgtcaaggtgctggtcgagggcacccagcgcgcccgcatcgacagcatcgaagacgtcgattcgcatttcacctgccaggtgacgccgatcgagcccgataccctgcagggttcggagaccgaggcgctgcgccgcgccatcgtcgcgcagttcgagcagtatgtgaagctgaacaagaagattccgcccgagatcctgacctcgctggccggtatcgacgacgccggccgcctggccgacaccatcgccgcgcatctgccgctcaagctggagcagaaacagaagatgctcgaggtcgtcgtgaccgccgagcgcctggaagggctgctgacccagctggaaaccgagatcgacatcctgcaggtcgagaagcggatccgcgggcgcgtcaaaaagcagatggagaaaagccagcgcgactactacttgaatgagcaggtcaaggccattcagaaggagttgggcgaaggcgaggaaggcgccgacatcgaagagctcgagaagaagatcatcgccgcgcatatgcccaaggaggcgcgcaagaaggccgatggcgagctcaagaaactgaagctgatgtcgcccatgtcggcggaagcgacggtggtgcgcaactacatcgatacgctgatcaacctgccctggaagagaaagagcaagatcaacaactcgatcggcaatgccgagcgggtgctcgacgacgaccactacgggctggaaaaggtcaaggaacgcattctcgagtaccttgccgtgcaacagcgcgtggacaaggtcaaggcgccgatcctgtgcctggtgggccccccgggcgtgggcaagacctcgctcggccagtcgatcgccaaggcgaccaaccgcaagttcgtgcgcatggcgctgggcggcgtgcgcgacgaggccgagatccgtggccaccgccgtacctatatcggttcgatgccgggcaagatcctgcagaacatgtccaaggtcggcgtgcgcaatccgttgttcctgctggacgagatcgacaagctgggcatggacttctgtggcgatccgtcgtcggcgctgctcgaggtgctggatccggagcagaaccacacgttccaggaccactacatcgaggtcgacttcgacctgtccgatgtgatgttcgtggccaccagcaataccttgaacatcccgccggccctgctggaccggatggaagtgatccgcctgtctggctacaccgaggaagagaagatccacattgctcgcgaccacttgctgccgaagctgatgaagaacaacggcgtcaaggacaacgagctgacggtggacgattccgcgctgcgcgatatcgtgcgctactacacccgcgaggcgggcgtgcgggcgctggagcgcgaggtcggcaagatctgtcgcaaggtcgtcaagcaactgctgatcaagagcgatgaagccaaggcggccgggaacaagaccgccgaggcgcaaacggtgctggtcaacggcgacaacctcaacgatttcctgggcgtgcgccgctataccttcggcatggccgaaaaggaaaaccagatcggccaggtgaccggccttgcatggaccgaagtgggcggcgatctgctcaccatcgaagtcgcggacatgcccggcaagggcaatatccagcgcaccggttcgctgggcgacgtcatgaaggagtcggtcgaggccgcacgcaccgtggtgcgttcgcgggcgcgccggctggggttcgccgacagcgtgttcgagaagcacgacatgcacgtccacgtgcccgagggcgccacgcccaaggacggcccgtcggcgggtatcgccatcaccaccgccatggtgtcggcgctgtcgcgcattccggtgcgcgccgacgtcgccatgacgggcgagatcacgctgcgcggcgaggtgttgcccatcggcggcctgaaggaaaagctgttggccgcgcatcgtggcggtatcaagacggtgctgattcccgaggagaacgtcaaggatctggccgagattccggataacgtgaagaacttcctggagatcgttccggtgcgctggatcgacaaggtgctggagcttgcgctggagcgcatgcccgagccgctgtccgaggaagaagccgtcaaggaagccatcgtggccaagcccgcggaggccggcgccgccgatccggtcatgaagcac

SEQ ID NO: 14698 - DNA, 1161 bp, Bordetella pertussis
gtggccaataacgattttctgtttacctccgaatccgtctccgaagggcaccccgacaaggtcgccgaccagatttcggacgcgatcctcgacgccatctttacgcaggaccccaacgcccgcgtagccgccgaaacgctgtgcaacaccggcctggtggtgctggccggcgagatcaccaccaccgccaacgtcgactacatccaggtcgcccgcgacacgatccgccacatcggctatgacaacaccgagtatggcatcgactacaagggttgcgcggtgctggtcgcctacgacaagcagtcgcccgacatcgcccagggcgtggaccgcagttcggaagactatctgaaccagggcgccggcgaccagggcctgatgttcggctatgcatgcgacgagacccccgacctgatgccggcgccgatctggtatgcgcaccgcctggtgcagcgccagagcgaattgcgcaaggacggccgcctgccctggctgcgtcccgacgccaagtcgcaggtgacgttccgctacgtcgacggccgcccggccgaggtcgacaccgtggtcctgtccacccagcactcgcccgagatttcgcaggcctcgatccgcgaggcggtgatcgaggacatcatcaagcccagctttcccgagggcctgatcacgcccaagaccaagttcctggtcaacccgaccggccgcttcgtcatcggcggcccgcagggcgattgcggcctgaccggccgcaagatcatcgtcgacacctacggcggcgcgtgcccgcacggcggcggcgcgttctcgggcaaggatccgtccaaggtcgaccgctcggccgcctacgccgcccgctacgtggccaagaacgtggtggccgcgggcctggcgcgccagtgccaggtgcaggtcagctacgccatcggcgtggccgagccgatcaacatcacggtgtacaccgaaggcaccggcgtgattcccgacgagcagatcgccaagctggtgcgcgagcacttcgacctgcgccccaagggcatcgtcaacatgctggacctgctgcgccccatctacaccaagaccgctgcctacgggcacttcggccgctcggagccggagttctcctgggaagccaccgacaaggccgccgcgctcaagcaaggcgcc

SEQ ID NO: 14699 - DNA, 1311 bp, Bordetella pertussis
atgtccaccaccatgagcaagccggggttggatccgatcgagcacgccagccgcgacgagatcgcggccttgcagctggagcggctcaagtggacgctcagccatgcctaccagaacgtgccccattacaagaaggcattcgacgcggctggcgtgcaccccgaggatttgcagcagctgtccgacatcgccaggtttccgttcaccaccaaacaggacctacgcgacaactatcccttcggcatgttcgccgtcccgcgcgagcgcgtgtcgcgggtgcatgcctccagcggtaccaccggcaagccgaccgtggtgggctataccgcgcgcgatctcgacaactgggccaacctggtggcgcgctcgatccgcgcggccggcggcaagcccggcgacatcgtgcacgtgtcctacggctacgggctgttcaccggcgggctgggcgcgcattacggcgccgagcggctgggctgcacggtggtgcccatgtcgggcgggcagaccgagaagcaggtgcagctgatcaacgacttccggcccgacatcatcatggtcacgccgtcctattactgcaatatcctggaggaacagcgccgccagggcatggacccgcgccaaagctcgctgcgcatcggcattttcggcgccgagccctggacagggcagatgcgggcggacatcgaggccgagggcggcatcgacgcggtcgatatctatggcctgtccgaagtgatggggccgggcgtggccagcgaatgcgtcgaaaccaaggatggcccggtcgtgtgggaagaccatttctatgccgagatcgtcaatccggataccggcgagccggtggccgacggcgaaccgggcgagctggtgttcacatcgctgaccaaggaagcgatgcccatcatccgctatcgtacgcgcgacctcacgcgcctgctgccgcccacctcgcgcagcatgcgccgcatcggcaagatcaccggccgcagcgacgatatgctgatcgtgcggggcgtgaacctgtttccgacccaggtcgaggagctggtgctgaagatcgcccagctggcgccgcactaccagttggtgctgtcgcgctcgggcaacctggacgagctggaaatcctcaccgaggtacgcgccgaattctccaccctgaccgaggccgagcgcgccggcctgggcaagcagctgcagcatgcggtcaagtcatacatcggcgtcagcgcccgcgtgcaggttgccgacacgggcttcgtcgagcgtaccctgacgggcaaggcgcggcgcgtcatcgacaagcggccgcgc

SEQ ID NO: 14700 - DNA, 786 bp, Bordetella pertussis
atgacctaccaggacatcctgttcgagctggccggcggcgtggcccgcctgacgctgaaccgcccggacaagctcaacagcttcaccgcccgcatgcactgcgaggtggccgatgcgctcggccggatcgagcgcgagggcgcccgcgtgctggtgctgaccggcgccggccgcggcttttgcgccggccaggacctgagcgaacgccgccccacggccgacggagcgccgctcgacctgggcgagacggtcgagaaattctacggaccgctggtgcgccgcctggccgcgctgcccctgcccgtggtggtgggggtcaatggcgtggccgccggagcgggcgccaacctggccctcgccggcgacatcgtgatcgcccgcgagtccgccagtttcatccaatcgttctgcaggctggggttgatccccgacaccggcgggactttcgcgctgccgcgcctggtcggccgcgcccgcgccgcgggcctggccctgctgggcaacaagctgagcgcccggcaggcgcaggattggggcctgatctggcaatgcgtggccgatgacgagttcgacagcgcgctcgacggactggccgcccatttcgcgcaggcgcccaccaagggcctggcgttcaccaagcgcgcgctgcaggccagcctgggcaacgatctgtccacccagctcgacctggagcgggacatgatgcgcgagctgggccgcagcgccgactacgccgagggcgtggcggcatttctcgataaacgcgaaccgcaattcaaggggaaa

SEQ ID NO: 14701 - DNA, 978 bp, Bordetella pertussis
atgagcgccgcccccgccgccagccccctgccccagcccatggcggactggctgcggcacctgcaggcgcaccgccgctattcggcgcacacgctggacggctatacgcgcgacttgcggcaactggcgcaacaggccgccgcggccgggctgccgctggagcgcgtggccaacggccatatccgccacttcgtcgcccgcctgcatgcgcaaggcctgggcccgcgcagcctggcgcgcgcgctggcggcgtggcgcggcttctatcaatggtgggccccggccgccggcctgcccggcaatccggccaccggcgtgcgcgcccccaaggcgccgcgcggcctgcccaaggcgctctcggtcgaacagacccaggtgctgctggaccacgcccccgcgcgcctggccaccgagccggccgcgctgcgcgaccacgccatgttcgaattgctgtattccagcggcctgcggctggccgaactggtcagcctggacctgcgctacgagcgcacgcccgagtacgaatcccgcagctggctcaaccgcgacgacgccgaggtcatcgtcgtcggcaagggcggcaagcggcgctcggtgccggtcgggcagagcgcgctggccgcgctggacaaatggttgcaggcgcgcccgcaactggctgccgccggcgccggtgcgcaggatgcggcggcgctgttcgtcggcgcccgcggccggcgcatcgcgccgcgcgtggtgcagctgcagctggcgcgcctggcccaggcggccggactgccggcgcatgtgcatccccacgtgctgcgccacagcttcgccagccacgtcctgcaatcggcccaggacttgcgcgcggtccaggaaatgctgggccatgccaacatatcgaccacccaggtctacacgcggctggatttccagcacctggcgcgcgcctacgaccaggcgcacccgcgcgccggccgcaagacctcgcgc

SEQ ID NO: 14702 - DNA, 966 bp, Bordetella pertussis
atgtccgtagttcgagcaggcgcgctggccgtgctggtattgggttgtctggcggcgctgccggccgccgcgcaaggggcgcatccgttcggggtgcccgaggccacgggcgcgcccggctggctggccggctggttcgggcaggtcgcgatgtggcaggcgcatttctaccggcagttgaccggcgcggtgcgggcctggcaggccgagggcggcgcggcctggatgctgatcggcctgtcgttcgcgtatggcgtcttccatgcgctgggccccggccacggcaaggcggtgattgcttcgtacgtgctggccaatcgccagacggcgcgcaacggcgcgtggctcgccctgttgtcggcgctggcgcaggcgctggtggccgtggcgctggttacggtgctggcggtggccctgggggccacggccgcggcgatgaaccgtgcgacgcaatggctggaaaccgccgcgtacgcggtggtaagcctgctgggcgcgtggctggtctggcagaaggcgttgcggccgtggtgggggagcaagggtggccacggccatggccatcacgcgcatcaccacgcgccgggctgcgcttgcggacacgcgcacgcgccgtcggcgcggcaggcggccggtccgctgaacgcccgcaaggcgtgggccgcgattctggcggtggggttgcggccgtgcagcggtgcgctgatcgtgctggtgttcgcgctggcgcagggttttttcctggcgggcgtggtggccaccctggccatggggctgggcacgggcttgaccgtggccacgctggtggcgctggcggctggcgcgcgcgatgccgcgacccggctgggcgcgcgcctgtcgacccgccgcgccgcgatgctgcgccaggccatcgaggccttggcggccgtggcggtgctgctgctcgggctgtcgttgctgggagggcaattggcggccttgcgc

SEQ ID NO: 14703 - DNA, 1242 bp, Bordetella pertussis
ttgctccggggtttgcccctggcccccgtctgtgctgtaatcctgcgtccggccgcgaatggcggcccctcgcagccccaacatccgagccgcggcctgcgcgactcgaccttagctttcgcttcgcccatgaacaccgcgcgcagtctggacaaaatggttcccgtcacgatcctcaccggctttctcggtgcgggcaagaccaccctgctcaagcgcatcctgaccgaataccacggccggcgcgtggcggtgatcgaaaacgaattcgggcccgagagcatcgacaacgacctgctggtgcaggatcgcgacgaagaaatcatcgagctgtccaacggctgtgtctgctgcaccgtgcgcggcgacctgatgcgcacgctgtcggacctgcgcgccaggcgcgaagcgggcgaactgtcgttcgagcgcgtcatcatcgagaccaccggcatggccaaccccggcccggtgtgccagaccttcttcatggacgacgacatcgccgagtactaccgcctggacgcggtggtgacggtggtcgacgccaagcatggcatggcgaccctggacgcccaggaagaagcccagaagcaggtgggcttcgccgaccgcatcctggtttccaagaaagacctggtcaacgacgtcgactacgcggcgctgcaccagcgcctggtgcgcatcaacccgcgcgcgccgatcacgccggtgcatttcggcgaagccgacctcaagtccatcatcgacatcagcggcttcaacctgaactcgatcctggacatcgacccggccttcctggccgacgagcaccccgacgccgcccacgaccatcatgaccacgaccatggccacggccatgatcacgatcatgatcatgatcacgaaggcgaatgcggggcccattgcaaccatcaccaccatcatcaccacgcccaccacgatgacgaaatcggcgcgttcgtgtttcgctcgaacaagcccttcgatccagcccggctggaagaattcctgggcggcgtggtgcaggtctatggtcccgacctgctgcgctacaagggcatcctgtacatgaagggcatcaaccgccgcatgttgttccagggtgtgcacatgatgatgggcgccgaacccggcaaagcatggaccgcggccgaaaagccatccaccaagatggtgttcatcggccgcaagctgccccaggagattttcacccggggtcttgagcagtgcctggtcgga

SEQ ID NO: 14704 - DNA, 489 bp, Bordetella pertussis
atgatgaccaaggtacttttcgtttgcatgggcaatatctgtcgctcgccgagcgcagaaggtgtcttccgctatctggtgaatgatgccgggatgggcgatgtcgtgcgggtcgattccgcgggcacgcatgccttccacattggcgaggcgcctgacgcccgggcccaggccgccgcccgcaagcgcggctacgatctcacgcactgcgcagcgcgtcaggtgacggcggacgatttccgcgaattcgacctgatcctggccatggattgggacaacctggctgccctgcagcagcagtgccccaaggcctatcagcacaagctgatgctgctgatgcggtttgccaacgagttcgaggaagccacggtgcccgacccctattatggcggccccgagggtttcggcaaggtgctcgactatctggaagacgcctgtcagggcgtgctggaactggtgcgcaagcgcgccacgcaataccaggcggcc

SEQ ID NO: 14705 - DNA, 510 bp, Bordetella pertussis
atgcggttaactaccaaagggcgtttcgccgtgacggccatgatcgatttggcgatgcggcagcatagcggcccggtcactctcgcggcgatcagccagcgccagaatatctcgctctcctacctcgaacagctgttcggcaagttgcgccgccacgagctggtcgacagcgtgcgcgggcccggcggcggctattcgctggcgcgcctggcgcgcaatgtcacggtagccgacatcattttcgcggtcgacgaacccctggacgccaccagctgtggcggcaagcgcgattgcaccagcggcaacgacggcaagccgggcaagtgcatgacccacgaactgtggaccacgctgaatcgcaagatggtcgactacctggactcggtctcgctgcaggatctcgtcgatcagcagcgcgtgcgccagttgcaggaagcggccaaccaggcgcagggctgttcggccgtgcgcgtgaaccggtcgacgcccgtcgccgccaacgccaccgca

SEQ ID NO: 14706 - DNA, 462 bp, Bordetella pertussis
atggctacgaaggcagcaacgaaaaaatcaagcaagtcgacgagcgatacggcgattgatctgcccagcgaacaggaattgctggccatgcccgaggccgactacatgaacgatcgccaattggcgttcttcaaggaacggctcaaacaactcgaacaggacatcctggccaacgcgggcgaaaccaccgagcacctgcgcgaaacgcagttcgtcccggatccggccgaccgcgccaccatcgaggaagagcatgcgctggaactgcgcacgcgcgaccgcgagcgcaagctgctgaagaaggtgcagcaggcgatcgcacgcatcgacagcggcgaatacggctggtgcgaggaaaccggcgagcccatcggcgttccgcgcctgctggcacgccccacggccaccctgtcgctggaagcgcaggaacgccgtgaaatgcgccagaagctgtacggcgac

SEQ ID NO: 14707 - DNA, 537 bp, Bordetella pertussis
atggaacaatttcacgccaccaccatcgtgtgcgtacggcgcggcaaccatgtcgcgctgggcggcgatggccaggtcacgctgggcaatatcgtcatcaagggtacggtccgcaagatccgccgcctgtaccacgacaaggtgctggccggtttcgccggcgccaccgccgatgccttcacgctgcaggaacgtttcgaagccaagctggaaaaacaccagggccacctgatgcgcgccgccgtcgaactgacgcgcgactggcgcaccgaccgcgtgctgcgccgcctggaagccatgctgatcgtggccgacaccgaacatacgctggtgctcaccggcaacggcgacgtgctggagcccgaacacgggctggcggccatcggctcgggcggggcatacgcccaatcggccgcgctggcgctgctgcgcaataccgaactgccgcccgaagccatcgtcaagcagtcgctggagatcgccggcgacctgtgcatctacacgaaccagaatcacgtgatcgaaacgctaggcgcg

SEQ ID NO: 14708 - DNA, 408 bp, Bordetella pertussis
atggcttacagcagcaaagttctggatcactacgaaaacccccgcaacgtcggctcgttcgacaagggtgacgactcggtcggcaccggcatggtcggcgcgcccgcctgtggcgacgtgatgaagctgcagatcaaggtcaacgaggccggcgtcatcgaggacgcgcgcttcaagacctacggctgcggctcggcgatcgcctccagctcgctggtgacggagtgggtcaagggcaagacgctggacgaggcgatgaacatccgcaacacccagatcgccgaagaactggccctgccgcccgtgaagatccactgctcgatcctcgccgaggacgcgatcaaggctgccgtgcaggactacaagaccaagcacggggccgagacgcccgaggccgtcgcggcgaac

SEQ ID NO: 14709 - DNA, 462 bp, Bordetella pertussis
atgagccacgatacgctcaaagcccgcctgtccgactcggtcaaggacgccatgcgcgccaaggccaccgatcgcctggccacgctgcgctttctgctggccgccatcaagcagcgcgaagtcgacgagcgccgcgaactgagcgacgcggaaatcaccgccgtcatcgagaagcaggtcaagcagcggcgcgaatcgatcgccgcgttcgagcaggccggacgcaccgaaaccgccgaacacgagaaagccgagctggccgtgctgcaggaattcctgccccaggcggccgcgcccgaggaagtggccgccgccgtcgatgccgcgctggccgaagtcagcgcgcaaggcgtcacgggcgcgcccgccatgggcaaggtcatggccatcctgaagcagaagctggccggccgcgccgacatggccgcgctgtcgcagcaggtcaaggcgcgcctgctcccc

SEQ ID NO: 14710 - DNA, 1107 bp, Bordetella pertussis
atgccatccgatttcccgccgggccaggccggcatccacgcccgcttccgggtggactatcccgagttctccctcgatgtcgatctgcggctgcccggccgcggcgtcacggcgctgttcggccagtcgggctcgggcaagaccacctgcctgcgctgcatggccgggctggccccggtcagcgacggttacctcgacatcaacggcgaggtgtggctggacagcgcggcgcgccgcgccgtacccacgcacaagcgcgcgctgggctatgtattccaggaagccagcctgttcgaacacctggacgtgctggccaacctgcgctacggcatgaagcgcgtgccgcccgcgctgcgccgcgtcgacctggagcaggccaccgggctgctgggcatcggccacctgctggcgcgcatgccggccggcctgtcgggcggcgaacgccagcgcgtgggcatcgcccgcgcgctgctgaccagcccgcgcctgctgctgatggacgagccgctggcggcgctggacgtgcagcgcaagcgcgaaatcctgccctacctggagcgcctgcacgacgaactggacatcccggtgatttacgtcagccattcgcccgacgaagtggcgcggctggccgatcacctggtgctgctggagcagggccgcgcggtggccagcggcccgctggacgcgctgctgacgcggctggacctgcccatggcgatgaccgacgacgcctcggtcgtggtgaccggcgaggccgccggtttcgaccccggctatgccttgctgacgctgcagctgcccggcgggcgggcgcggctgcgcttcgtgcaccaggccgcgccggccggccagcgcctgcgcgtggtggtgcatgcgcgcgatgtcagcctggcgctgcagcagccgcgcgagggcagcatcctgaacgtgctggcggtgcgcgtgctggagatggcgccggcggccaacccggcccatgtcatggtgcgcctggacgccgacggcacgccgctgctggcgcgcatcacccgctactcgcgcgaccggctggcgctggcgcccgagatgcaggcctgggcgcagatcaaggccgtgtcgctgctggcc

SEQ ID NO: 14711 - DNA, 753 bp, Bordetella pertussis
atgaaaatccgtgccattccgacgctgtgggccctggccgccaccctgcttgccgcccccgcgctcgccggcgaggtgcaggtggcggtcgccgccaatttcaccgcgcccatgcaggcgatcgccaaggcgttcgaggaagacaccggcaaccgggcggtggcctccttcggcgccaccggccagttctacgcgcagatcaagaacggcgcgccgttcgaagtgttcctggcggccgacgacagcacgccggccaagctggacgccgagcaggaaaccgtgcccggctcgcgcttcacctacgcgaccggcgcgctggcgctgtggtcggcgcgcgccggctatgtcgacgaccagggcgccgtgctcaagcaaggcgatttcaagcacctgtccatcgccaacccgaagaccgcgccatacggcctggccgccacccaggtgctggccaagctgggcctggccgacaagctggcgccgcgcatcgtcgaagggcagagcatctcgcaggcgtaccagttcgtcgccagcagcaatgccgagctgggcttcgtggccctctcgcagatctacaaggatggcaagctgaccggcggctcggcctggatcgtgccggcctcgatgcacgagccgatccgccaggacgccgtcatcctgaagaaaggccaggacaacgccaccgcgcgcgccttcgtcgagtacctgaagtcgccccgttccgcggctatcatcaagtccttcggctatcagctg

SEQ ID NO: 14712 - DNA, 900 bp, Bordetella pertussis
atggcgttgtccgccattgaaccctttgcgctggaccgttccggcgcaacgcccctgcatgcgcaggtggcggacgcaatccgcaaccatatccgcgatcaccggctgaccgccggtaccgtgctgcccagcgaagcggcgctgtgccacagcttcggcgtggcgcgcagcgtggtgcggcaggccctgggcgccctggtggccgaagggctgatccgtcgcgacccgggccgcgcgccggtggtggcgccgccgcgcgaacaccggcgcatggtgcagcgctcggccggcctgtacgagcagttcgccggcctgggcgtggcgctgcgcacgcgcgtgctggcctgccggcccgccgagccgccgcccgaggtggcggccttcttcggcacgaccgagacgctgctgctggagcgtttgcgcagcgtcgacgcccagccgctggcctacgtgcgcacctggctgccgcgcgcggccatcgccgggttggcggcggaccacctgcaggacgcctcgctgcaccgcgtgctggcgcagcgcttcggcctgcgcccgggacgcggccgcaaccgcatccgggccgtggccgccgaagcggcgctggcgcaggcgctggacgtggcgccaggcagcccgctgctgatgctggaagggcaggggctggaccaggacggccatccgctggagtggttcaccacctggcatcgccccgagaacctggtgttcgacgtggacgtggggcaggagcgggaaagcgtgcagcccgcgctcacctgcggcacggccgccgtggcgccgccggcggtggccgcgccgccgtccggcgcgctggacgccgtcgaacagtcgctgctgcaggcgctgcaggccgtgcggcgggcccgcgaggaccagcaggag

SEQ ID NO: 14713 - DNA, 1044 bp, Bordetella pertussis
atgagtttccaggtcactatcgaacccagcaagcaccagttccaggccgaggccggccagacggtcctggatgcggccctggcggccggcattgtgctgccctatagctgccgtaccggcgcgtgttcgacctgcaagggcaaggttgtcgccggcgaggtggatgcggggccctatccggcccagatcctgtcgcccgaggacctcgcgcagggctacacgctgttctgtcaggccaagccgcaaagcgacctggtggtcgagtccaccgaagtgcggctggccagcgacatccagatccgcaagctgccttcgcgggtgcagacgatagagcgcgtcgcgcccgacgtcgcggtgctgaagctgcaattgccggcttccgagcagttccgctactacgccggccagtacatcgaagtcatcctcaaggacggcaagcgccgcagctactcgatggccggcgcgccgcataccggcagcccgctcgaactgcatatccgccacatgccgggcgggctgttcaccgaccacgtattcggcgcgggcgatacccagatgaaagagcgcgagatcctgcgcctggaggggccgttcggctcgttcttcctgcgcgaggacagcgacaagcccatcgtgctgctggccagcggcaccgggttcgcgccggtcaaggccatcgtcgagcacatgatccacaaccagatccagcggcctgtcgtgctgtactggggcggacggcgcccgcgcgacctctaccacgacgccttggcgcaatcgtgggccgggagactgccgggctttcgctatgtgccggtggtttccgacgcgctggacgaggacggctggagcggccgcaccggctacgtgcacgaagcggtcatgcaggacctgcccgacctctctggttacgaagtgtatgcatgcggcacgccgctgatggtcgacgcggcgcggcgcgaattcagcgcgcagtgcggcctgcccgccgaggcgttctatgctgacgccttcacctcggaagccgatctggccaaggccacgccc

SEQ ID NO: 14714 - DNA, 1437 bp, Bordetella pertussis
atgcgcgcgtcaacgaatcagaccttgcagctagaccggcgcgccgccctgcccgcattggcgcgcagctactggttcaagcaagccgtgccgcaagagtccgcgccgcaaggcctgcgtggccgccacagcgtggacatcgccatcgtcggcggcggattcgtcggcctgtggacggccctggcggccaaggccatgcagccaacggcccgcgtcatcgtgctggagcgcgacctgtgcggcggcggcgcgtccggccgcaacggcggtttcgccatgtcatggtggcccaagatatccaccctgctgtccatggcgggccgcgacgaggcgctgcgcctggcgctggcctcggaacgcgcgatcggcgagctcgaacggttctgcctggcgcgcggggtcgacgcgcatttcgtgcggggcggctggttctggacagccaccaccgaggcccagcgcggggcctgggccagcaccctgcaggcctgcgagcgggtcggacaccagcctttcacggccgtggcgccggacgagctggcgcgccgcaccggctcgccggtacacctggaaggcatattcgacacggccacggccaccgtccagcctgccctgctggcgcgcggcctgcggcaggccgcgctggacgacggcatcgaggtgtacgagggcagcgcggtgcgcaccctgcacaccggcgcgcccgccgtgctcggcctggacgaggccgaggtgcgggccggcacggtcgtcctcgccaacaacgtctgggccgccgccattcccgaactggcgccgctgatcacgcccgtcaacagcgcgctcgtcgtcaccgaacccatcggcgagcgcctgcaggaactgggctggcgcggcaacgaagcgatcaccgactcgcaattgctggtggggtattaccgcaagacgcgcgacggacgcctggtgttcggcaaaggcagcggcgcgctgtcgagcggcgggcgcatcggccaggtgttcagccgcgatcccggcaccgaagccctgaccgaggcggatttccggcgcacttatcccgaattgcgcgacgtcgcgatcgcgcaggcctgggccggccccatcgaccggacctacgacagcctgccggtattcggccgcctgcgcggcgccgaccacatctgctacggcatcggctggagcggcaacggcgtcgcgccgagctgggtgggcggacagatcctggcctcgctggcgctgggccgcaagaatgaatggagcgagtccgccctggtcgggcgggagtgcaggaagttcccgcccgagcccatacgcttcatgggcggtacgctggtacgcaacgcggtattgcgcaaggagcgcgacgaagcgctcgggcgcaagcccgcgtggctggacacccgcctcgccaccctggcgccggcgggcctggaagacaaatcc

SEQ ID NO: 14715 - DNA, 954 bp, Bordetella pertussis
atgagaccacaggccgatctgtccacccgccaattgcgcgccttcgtcatgcttgccgacctgcgccacttcaccaaggccgcgcaggcatgccatttgtcccagcccgcattcagcgcactgatccagtccctggaggcgacgctggccatgcagctgttcgatcgcagtacgcggcgggtggtgctgacgcaggaaggcgagctgttcgagcccctggcgcgcaggctgctggccgaccttggccacgccatgacgcacatcgccagcttcgtcgagttgcggcgcgggcgcgtccatgtcgccgcccttccctccctggcggcgggatggctgccgaaagtcctgcatgagttccacgccgagcaccccgacatcgaactcatgctctcggatgtcctgtccgacgagtgcatcgaactggtgcgcagcggccaggccgatttcgcgcttgcctcgcgcggcatccgcgcctcggaccccgcggtcctgcatgcgcgcgagctgtgcagcgacacgttccacctgatctgccgcaaggaccatccgctggcgcgcgagccgcgccttaccctcaagcacctggcgccgtggcctttcatccatctcacgcgcaacagcagcgtacgccagacggtggaagcggcgctgcgcccgcaggtcgcgaaaacgatactggaggtcgcgcagctcgcgaccgtggcgggcatgatcgaagccgggctgggcatcagcgtcgtgccgaccttcacgctgtaccagttcgaacgacccggcctgctcatccgccccatctcgctgcccggcctgacgcgccagatctacatcgtccgccggcaggaggaaaggctgtcgatcgccgcgcaggcgctgtacgacctggtggtcgcgaaactgggcacgccggcggcttccccggccaggccgcggcggcggcgcaccgagaagcgcgat

SEQ ID NO: 14716 - DNA, 1089 bp, Bordetella pertussis
atggctctgcaatgcggcatcgtcggcctgcccaatgtcggcaaatcgacgctcttcaacgccctgacccgcgccggcatcgccgccgagaactatccgttctgcaccatcgagcccaacgtgggcgtggtggaagtgcccgacccgcgcctggacaagctggccgagatcgtcaagcccgagcgcatcctgccggccaccgtcgaattcgtcgacatcgccggcctggtggccggcgccagccagggcgagggcctgggcaaccagttcctctcgcacatccgcgaaaccaacgccatcgtcaacgtggtgcgctgcttcgaagaccccaacgtggtccacgtcgccggcaaggtcgaccccatcgcggacatcgaagtcatcgagaccgaactggcgctggccgacctgcagaccgccgagaaagccctgcatcgccactccaagaccgctcgttccggcgacaaggacgcgcagcgcctggtgaccgtgctggagaaatgcatcgcccagctcaaccaggccaagccggtgcgcggcctggacctcagcgacgaagagcagaccctgatcgcgcagctgtgcttcatcaccgccaagcccgccatgtacgtgggcaacgtcagcgacgacggcttcaccgacaacccgctgctcgagcgcctggccgagttcgccaagtcgcgcaacgcgcccatggtcgccatctgcgcggccatcgaatccgagatcgtcgacctgcccgaggaagaccgccaggccttcctgtcggacatgggcatggaagaacccggcctgaaccgcctgatccgcggcgccttcaccctgctcggcctgcagacctacttcaccgccggcgtgaaggaagtgcgcgcctggaccatccccatcggcgccaccgcgccgcaggccgccggtgtcatccacaccgacttcgaacgcggcttcatccgcgcccagaccatcgcctacgaagacttcatcgcctgcaagggcgagcagggcgccaaggaagccggcaagatgcgcgccgaaggcaaggaatacgtggtcaaggatggggacgtgatgaacttcctgttcaacgtc

SEQ ID NO: 14717 - DNA, 612 bp, Bordetella pertussis
atgaaattcaacgccactgcgcgtagcgtccagggttcgagtgcgagccgccgcctgcgccgcgcgggccgcgtgcctgccatcgtttacggcggtaccgctgcccccctgaacatcgaactggatcacaacgagatctaccatgccctgcgcaaggaagaattccacgcgttgatcctgaacatggtcatcgagggcggcaagaccgaagaagtgctgctgcgttcggttcaatggcacgcctacaagccgcaagtcatgcacgtcgacttccagcgcgtcgaagccaaccaagccctgcacaccaaggtgcccctgcacttcatcaacgccgaagtgtcgccggccgtcaagctgagcggcgcgatcatctcgcacgtgctgaccgaactggacatcacctgcctgccggcgctgctgccccagttcatcgaagtcaacctgggcgacctgctgggtggcggttcgatccacctggccgacatcaagctgcccaagggcgtgacgttcaacgcccacggcggcgacaccaaccccctgatcgctgccgcggtcgtcaagggtggcggtgccgctgacgaaggcgacgctgccgccgagcaacctgccgcc

SEQ ID NO: 14718 - DNA, 948 bp, Bordetella pertussis
atggcaaacgacagcttcatgattttcacgggtaccgccaacacgcggctggccgtggacgtagtcaaccacctcgacatgtcgctgggaaaaatgaccgtcggtcgttactccgatggcgaggtgatggtcgagatcaacgagaacgtgcgcggcaaggacgtcttcgtgctgcagcccacctgtgcgcccacgaacgacaacctgatggaaatcatggtgatggtcgatgccctgcgccgcgcctcggccggccgcatcaccgccgccatcccgtatttcggctatgcccgccaggatcgccggccgcgctcggcgcgcgtggcgatctcggccaaggtcgtggccaacatgctgcaggtcgccggcgtcgaccgcgtgctgaccatggacctgcacgctgaccagatccagggtttcttcgacatcccggtcgacaacatctatgccggtccgatcctgctgggcgacatctggcgccgcaatttctcgaacctggtggtggtgtcgcccgacatcggcggcgtggtgcgcgcccgcgcgctggccaagcagctggaagccgacctggccatcatcgacaagcgccgtccgcgcgccaacgtgtcggaagtgatgaacatcatcggcgaagtcgacggccgcacctgcatcatcatggacgacatggtcgacaccgccggcacgctgtgcaaggcggcccaggccctgaaagaccgcggcgccggcgccgtctacgcgtattgcacgcacccggtgctgtcgggcggcgccatcgagcgcatcgagacctcctcgctggacgagctggtcgtcaccgacaccatcccgctgtccgagcaagcccaggcctgcggcaagatccgccagctgtcgtgcgccgcgctgctgggcgagaccattctgcgcatttccaacgccgagtcggtcagctcgctgtttgccgac

SEQ ID NO: 14719 - DNA, 1857 bp, Bordetella pertussis
gtgtacgaagattgtgccatcaaccggacgggccgcgtgaagttgtcgctcaaacacattaatttcggagtagccgcgctggcgctggcgttggcgggcttgcagtccctacccgcgcaggccgccgaggtgcgtccgcgcgatgccaccggcccgcgcctgatccagccgagcaagcagcccgagaccgaagtcatccgcctgcggccggggcaactgccctatgtttcgcttaccgccgacatcttctatcgcatcgtcggcgccgaactggccgcccagcgcggcatgtacggcaccgccgccgccacgctggtgacgctggcgcgcgagacgggcgatccgcgcctggcccgccgcgggctggagttccagcttgccgggggcaatctgccgggcgccctggatgcggcgcgcgcctggtccagcctggcgcccaacgatatcgaggccagctccaccgagctggcgctggccgccgccaacggcgagacctcggggctggcgacggcgctgcgcaagcgcatcgacacggcgcgcgacaagccggcggccatcgtgcaggccatgggcgtgctcagccgcctgaacgaccgccgcctggcgctgcgcatcctggacgaatcgctcagcgacagcgcccgcaagctgcccgccgcccacctggccttggccgacgtggcgcaggccgccggcgactacccgcgcgccgccaacgaagcctacgccgcgctggccgccgaccccaagtccgaggccgccgcgcagcgcgtgctcgaatacggcgccaaggtcgacgccacgcgcgcgcagcaccaggcgcgcgccttcatcaaccgcaatccggacgcgcgcaagctgcgcctgatgctggccggccagatcgccgacggcggcgactacgacggcgcgctggccgagctgcaggcgatgtcgcggcgctcgcccgaggatttcgacctgatgttcatgcaggcccagctggcctacaaggcgggacgcctggaccaggcgcgcggctacctgcagcaatacctcgacgtgcagaaccagcgccagatggccaccgcgccgggcgccaccgacgccggcgccgccgcggccgacgcccacgtgctgctgtcgcgcatcgccgaagaccagggccgctacgacgaagccatccgcgagctgggccgcatcgacgacccggccatgcgctattcggcgcacatgcgccaggccacgctgcgggcgcgccaggggcgcatcgacggcgcgctggccatggtggaccgggccgatccgcaggacgacgaagagcgcacgctgggcgtgctgaccaaggcgcagatcctgcgcgacgccgaccaggtcgatcgcgcggtggctatcctggtggcggccgacaaggccatgcccgacacggtcgagatcaagtacgaactggccatgctgtacgagcgccaggggcgcatcgaccagctcgagcgcctgctgcgcgaagtcatcgcgctcgaccccgaccatgcccatgcctacaacgcgctgggctacacgctggccgaccgcaaccagcggctgcccgaggcgctggacctcatcacccaggcgctcgagctgtcgcccgaggatcccttcatcctcgacagcatgggctgggtcaaattccgcatgggcgagccttccgctgcgatcgagtacctcaagcgcgcctatgcgctgcgccccgaggccgacatcgccgcccacctggccgaagtgctgtgggtgcagggcgagcgcgacagcgccaccgaactgctgcgcaccgcctacgccaaggatcccaagaaccgcgccctgctcgacacgatgcgccgcctggaggtgcgcccg

SEQ ID NO: 14720 - DNA, 843 bp, Bordetella pertussis
atgatcttacactggctcatgccggaactgcctgaagtcgagaccacccgacggggaatcgacaccgtcataacgggccggacgctacgccgcctggtcgtgcgcgaagcgcgcatgcgctggcccattccacccgccctgcccgatctgctggccggccgcaccgtgctcgaatgcgggcggcgcggcaaatacctgctgctgcgcttcgaccatggcgtgcagatcgtgcacctgggcatgtccggatcgctgcgccgggtgcccgagcaggaggcgccgcgcaagcacgaccacgtcgactgggttttcgaccacgccgtcctgcggctgcacgatccgcgccgcttcggcgcggtgctgtggcaccccgacgaggccggcccgatcgccgcccacccgctgctggcccgcctgggcatcgaaccgttcgacccgcgctttgacggccgctggctgcacgcctacttccgcggacgccgggtcgccatcaagcaggccctgctggccggcgacgccgtggtgggcgtgggcaacatctacgcatcggaaagcctgtttcgcgccggcatcgatccgcgcacggccgcccagcgcgtctcggcggcgcgctgcgaccggctggcggccgccatccgcgccaccctgtcggacgcgctggattccggcggcagcacgctgcgcgactacgtcggcgccagcggcgagccgggcgcgtatttcgccatccacgccgccgtctacgagcgcgccggcctgccctgccgcgtgtgcggcacgccgatccgccgcctggtgcagggccagcgcgccacgtatttctgtccgagctgccagaaacgc

SEQ ID NO: 14721 - DNA, 1407 bp, Bordetella pertussis
atgaaagaattctggcagacctgcgtcagtcgtcttgagcaggaactccccccccaacaaatcagcgcgtggatccgaccgctggtcccgcttgcgtatgacgaagcgcaagcggttctgcgcgtggccgcgcccaatcgcttcaagctggattgggtgcggaagaacttttcccatcagatcgaggcgctggccgccgagtggtaccagcgcccggtgcaggtgacgttcgagctgcccggcaccagctccgcgccacgcataccgatggccgtgccgcgcccggtggcggtctcggtgccggccgtcgttgctgcggtgcagcaagcatcggagcctgctccgccggcgccggcaagcgccgacgccgcgaacatcgtttacgagcggtcgcgcctgaacacggatctcaccttcgagaatttcgtgaccggcaaggccaaccagctggcgcgcgccgcggcgctgcaggtggcggagaatcccggcacgtcctacaacccgctgttcctgtacggcggcgtggggctgggcaagacccacctgatccacgccatcggcaatgccatggtggccgcggggaccggcgtgcgggtgcgctacgtgcatgcggaccaatacgtctctgacgtggtcaaggcctaccagcgcaaggcgttcgacgatttcaagcgctactaccattcgctcgatctgctgctgatcgacgatatccagttcttttccggcaagaatcgcacgcaggaggagttcttctatgcgttcgaggcgatggtggcgcagcgcaagcagatcatcatcaccagcgatacgtacccgaaggagctctcgggtatcgacagccggttgatttcgcggttcgactccgggctgaccgtggccatcgagccgcccgaactcgagatgcgcgtggcgatcctgctgcgcaaggccgagtccgaaggcgtgccgatgcccgaggaagtggcgttcttcatcgccaagcacctgcgcagcaacgtacgcgagctggaaggcgccttgcgcaaggtgctggcctacgcgcgtttccatggccgcgacgtgctgacggtggatgtctgcaaggaggccctgaaggacctgctttcggtgtccaacggccagatcacggtcgagaacatccagaagacggttgccgatttctacaagatcaaggtggccgacatgtactcgaaacgccggccggccaatatcgccctgccgcgccaggtggcgatgtacctggccaaggagttgactcagaagagcttgccggagatcggcgacctgttcggtggacgagaccacaccaccgtcctgcacgctgtgcgcaagatctccgatgcccgcgccaaacaagccgagcttaaccataccctgcacgtgttggaacaaactctaaaagga

SEQ ID NO: 14722 - DNA, 132 bp, Bordetella pertussis
atgaaacgcacctaccaaccttccgttacccgccgcaaacgcacccacggctttcgcgtgcgcatgaagacccgtgccggccgcgccattctgaatgcccgccgcgccaagggccgcaagcgtctggccgtc

SEQ ID NO: 14723 - DNA, 1689 bp, Bordetella pertussis
atggatatccgacgaaccgtcctctggatgattttctctttttcgctgttgctcctctggaacaactggcaaatccataacggcaagccgtcgctttttggcgggccggctcccgaagcggccgccacgcagcagcccaaggccgatgcgaacggcacggcggcttcgtccaccgcgtcgatcccgagttcgccggccgccgcccccgccgcggcatcggtgccgggcgctgcggcgcccgcggccgccaaatccgagcaggtggtaatcaccaccgacgtgctgcgcctgactttcgactccaacggcgcgcaactgatccgcgccgagctgctgaagtacccgtcgagcagccagagcgacaagcccacggtgctgatggaccgctccgccgacctggtctatgtggcccagaccggcgtggtcggcgcgccgcaaggcgaatccttccccacccaccagacgccgttccatctagtgtccagcgagcgctcgctgaccggcgacacgctggatgtggtgttcgaggcggaatccggcggcctgaaggtcaccaagacatacacgctgcatcgcggccgctacgacgtggacgtgcgccacgccatggccaataccggcggcgcgccgctcaatccggccctgtatctgcagctcgagcgcgacggcaccgacccggccggcacctccagcttctatcacacgttcaccggcgtcgcggtgtactccgagcaggacaagttccaaaaggtcaccttctcggacatcgagaagaagaagggcacgtacatcaagcaggccgacaacggctggatcggcatcgtgcagcactacttcgccacggcctggatcccggcccagggcaagcagcgcaccaacgaactgctgcaggtgcagcagaacctgtacgcggcccgcaccatcgaagccgtgggcacgatcgccccgggttccagcgccaacgtcgacgcgcacctgtgggtcggcccgcaggaccagaaggccatggccgcggttgcgccgggcctggaactggtggtcgactacggctggctgaccatcatcgccaagcccctgttcaccctcatgacctggctgcacggcctgctcggcaactggggctggaccatcgtcgccctgacggtcatcatcaaggcggtgttcttcccgctggccgcggcaagctatcgctcgatggcccgcatgaagcaggtcgccccgcgcctgcaggccctgaaagagaagtacggtgacgatcgccagaagctgaaccaggcgatgatggagatgtaccgcaccgagaagatcaacccgctgggcggctgcctgcccatggtggtgcagattccggtgttcatcgcgctgtactgggtgctgctggccagcgtcgagatgcgcggcgcgccgtggatcctctgggtgcacgacctttccgtgcgcgatccgttcttcatcctgccggccatcatgatggccaccatgttcctgcagatcaagctcaaccccacgccgcccgatcccgtgcaggccaaggtcatgatgatcatgccgctggtgttcggcgggatgatgttcttcttcccggccggcctggtgctgtactggtgtgtcaacaacacgctgtcgatcgcccagcaatggaccatcacccgcaacctggagcgccaggccgcggcagcggccaaccgc

SEQ ID NO: 14724 - DNA, 939 bp, Bordetella pertussis
atgtctgtttctccgacttcgcccggctctttcggggccggccctgtctttgactccgaattgcaggccccggccccgtcggcgcagcgtcgcggcggtgcggcgcctgtgccgccgcccgtcgatcggcgcggcgtcgagccgggagatcccacgctgggcatgctgcccgcgccagatttgctcgcggggggcgccgtcagccgcacccgcgcggcgctcgacgatctggacgccgcacggctcggtgaagacatctacgccttgatggcggtgttgcaacaggccagtcagcagatgcgggacgccgcccgtatcgctcgtgatgccgaggctacgcggcaaacgcaggctctcggcgatgcggccagccagatgcgccaggcggcgagcgagcgcatggccggagcgatcgtggcgggcgccatgcagatagcgggtggtttcgtgcagctgggggcgggcctggcagcgggtttgcaggccatgggtggcgctgctgcgcaagccaagggcgccgcattctccgagcaggcctcgacaagccgcaaggtggcggccggcttgcacgatgcccccgagctgcaggcaacggtgcaggcccgcgcaacccagctcgaagcgcaagcggcctcgtttggtgcggacgcggctcgttcgtcggcaaagtcgcagcgcgtatcgagcgttgcccaggccggcgccgcagcggccggcggtatcggcggcctgaccagcgccgcccaggaacgccgcgccgccgagcacgaggccaggcgcgcggagctggacgtcgaagcgaaggtgcatgaaacggcctcgcggcgggccgacgaagccatgcagcagatgctcgacatcatccgcggcatcagggaaaagctggccgggatggagcagtcccgcagcgagaccgcccgtagcgtggcccgcaatatc

SEQ ID NO: 14725 - DNA, 1959 bp, Bordetella pertussis
ttgcgcgtctttttttgcaacgaggcggacgaggccctggccctcccgccgccgacgaggaatcccgtgcgcaggctgaccatacgtttcgcgatcgccatcctggttctgctgacactcagccggctgggcctgtccgcctggcaatgggaacgcgtccaggccgccggcggcctgggccccatcatgctcggcggcctgcgcatggacctgcgcctgctggccctggtcctggccttgccggccgtgctggcgccgtggttcgggcaccgcgcctgggccgccagcgccacggcatggtggtatcgcgtctggtggatgctgtttgtgttgctggaagtatccacgccgcagttcatcgccgaatacgacacccggcccaaccgcctgtatttcgagtacctggtgcatccgcgcgaagtcgcctccatgctgtgggaaggctacaagggcgtgctgctggcatccttcgtggtgctggtgctggccgcctggctggccgtgcggctgtttcccaccggccgccaggacggcttcatgaagtggtggaagcgccccttcgtcaccctggcggtgctggccgtggtggtgctggccgcgcgcggcaccctgcagcaccggcccatcaatgcctccatggtggccttcagcagcgacgccatggtcaacacgctgccgctcaattcgctgggcaacgtgctggacgcggcctatcgcatgcaggacgagcgctcgtcggccgccttgtatccgcccatgaaaaccgaggagatgaaccgcatcgtgcgggcggcggccgggctggaagatccgccgctggacgcccgctaccccagcctgcacaagcagacggccaccgtgcgccgcgacaagccgctcaacctggtgatcatcctgcaggagagcctgggcgcgcagtacgtgggcagcctgggcgggcgcgacctcacgccccagctggatcgcctggccaaggacggctggatgttcaaccgcgcctatgccaccggcacgcgctcggtgcgcggcctggaggcggtcaccgcgggcttcctgcccaccgtggccgaggcggtgctgaagctgccgcgctcgcagaccggcttcttcaccctggccgacctgctgggccgccacggcttccattcgcgcttcatctacggcggcgaagcgcacttcgacaacatgcgcggcttcttcctgggcaacggcttcaacgaggtgatcgaccgccagtcgttcgtcgatccggtgttcgtggggtcgtggggcgcgtccgacgaggacatgttcaaccagctcgatcgcctgctgcgcgccgacgacggcaagtccaccttcacgctggccttctcggtcagcaaccactcgccgtgggaatatccggcaggacgcatcgagccggtgggcgacccggcctcggtggacaacaccgtgcgctacgccgactgggccatgggccagttcttcgacaaggccaggaaggcgccgtactgggacaacaccgtgttcctggtgatcgccgaccacgattcgcgcgtgtatggcgccaacctggtgccggtgcggcatttccagatcccggcgctgatcctcggcggcacggtcccgccgcgcagcgacgatcgcatcgtgagccagatcgacatggggccgaccctgctgtcgctgatcggcctggacaacgtcaaccccatgctgggcagcgacctgacccagcgcgaccccaaccgggccatcatgcagtatggcgacaacttcggctacctgaagggcgattcgctgctggtcatcgagcccggcaaggacccgcgcgagtaccgctatacggcggcggcgtccatgcgcgacgagaagtacgtccccatcgacctcgacccggcgttgcgcgacgaggcgctggccttcgccctgtggcccagctgggcgtaccgcgaagagcgctacaagctgccgaag

SEQ ID NO: 14726 - DNA, 1158 bp, Bordetella pertussis
atgaccgcgcgcgcgacactcactgcaccagtaggcaaatggttccttctccgaggactccccatgactcgtatcgatgccgcccccaatcccttccacgccgccatgcaggggcgccacgacgcctcggccaacacctcctccggctggctgcaaggccagcgcatcgcaccggcgcccaccggcatatcgctggcggacgcggccgaggagctcagcctgcacatggcgcaggctgccgaggaaaagcatcactccgaacgcaaggtcacggccgaacgtccgatgctctggctggacgcggcgcagcttgcggaactgttttcccacacccacgaccccgacgcgcaggcaaaactggaagccctgaccgccgagctgctgcgcggccggggcgcccccatgcagctggccgcgcaagcgtttcccggtgtcacgcagcaatacctcgcgctgcagcacgcgctgcagcgcggcgagcacgaggacgccgcgccgcacgcgctcgaagccctgcgcgatgcattggccgacctggagctcgcccatggccccgaaatccgcgccggcatcaacaccctgcccacggccggcgcattcgcgcgttccgctgacgagctggccggcttccagcacgcgtaccgcgacatcgccctgggccagctgtcgttggcgcgcacgctggacctggtgctggaacgctatgggaacgacgacatccacggcgcgctgggcgcgctgattcaggcgctgggacacgacctggccgcggcgacaccgtcgacggacggcgtcaggctgcaagtgttggcgagcgatctctatcaagtcgaggtggccgccacggtactggaggaatgcaatgccctgaaacaacggttgggcaacgcaggctcgcaggagtgtgcggacgcccagggcctgatgcgcgatcttgtgggaatcagcgaggacaaatggattgcgcccgcgcgcttcgagaagctggccgagcgccacggtgcgaatgccctctccgagcgcatcgcattcctcggtggcgtacgccagattctcaaagacctgcccacgcagatctacgccgacatggacgtgcgcgccaccgtcctggcggccgcgcaggacgcgctggacaacgcgatagcaatggagaacgca

SEQ ID NO: 14727 - DNA, 1563 bp, Bordetella pertussis
atgcctacaccgctgccctccagttccgcctggctcgcgttcgccgacgcggcgcgccactcgtcgcgccgcggcgcccggttgcgcgtcatcgaagcggcggggctgcgggtggacctgaccgcccaggcgcactccgacgacctcgacagcgccgccgaggacctgctggcgcagcaggatttcgacaacgcccgcgcccagctgttcgacggcggcccggccaactggaccgaacaccgcccggcctggcacacggcgctgcgcgccgcccggccgcccacgccggtggccggcgccatcctgggcgagcgcgacaggctgcgccgcttcgtgcaggacgccgacatgcgcggcgcctaccgccatgtgctgcacctgggcataggcggcagcgactggggcccgcgcatggtcacgcgcgcgctgcgccacaacggcctcaagcgcgaagtgcgcttcgcctccaacgtcgattcgcatgcggtcgccgacgcgctgcatcatctcgacccgcacgatacgctgatcatcgtggcgtccaagtcgttcaccacgaccgagccgctcgccaatgccgaagtcgccatgaactggttgcgcaacgccggcgtggccgacccggtgcggcaggtcgtggcgatcaccgccaacgtcgacgcggcgctggatttcggcatttcgccgcagcacatcttccgtttctgggactgggtgggcggccgctattcgctgtggtccgccatcgggttgccggtggcgctggcgctgggctgcgatgcgctggacgaactgctggccggcgccgccgccatggaccagcatttcctgcatacgccgatgcgccgcaacgcgccgctgcagatggcgctggcgggcgtggccaaccgcagcgtgctgggctatggctcgctggcgatcacgccctacgattcgcgcctgacgcacctggtgccatgggcgcaacagctggagatggagtcgctgggcaaggtcgccggccatgacggctcgccggccggcgttcccaccggccccgtggtctggggcatgacgggcaccgactgccagcacaccttcttccagtggctgcaccaggacacggccggcgcgccggtggatttcatcgtctgcgagcaggccgaccatccctacgaccacttccacaagctgctgatcgccaactgcctggcgcaacgcgcggcgctgctgcgcggcaagccgttcgacgaagcgctcaaggaagcgcggctggtcgagtccgacccgcagcaggccgagatcctggcgcaccaccgcgtgcatccgggcggacgcccgtccacgctgatcatgctgccgcgcctgtcggcccacgcgctgggcgcgctgctggccatgtacgaacacaaggtgttcgcgcagggcgtgctgtgggggatcaacccgttcgaccagtggggcgtggaatacggcaaggcgttggcgcgcaatatcatccgcgagctggagaacccgtcgagcgaggtgaaccagcaggacccctcgacccgctactggatcgacgcgctgcgcaagcagccc

SEQ ID NO: 14728 - DNA, 6174 bp, Bordetella pertussis
atactcgacggcggctctaccatcaccggatccttgaacggtggcagcggcaacaacagcctgacgctgaaagccggcgacggcacgctgggccgcgcaatccgcaacttcggcacgatcaccaagcaggaggctggaacctggaccctgaatggccaggtcggccgcaacgacaacaacctcaagtccacggtcaaggtggagggcggcacgctggtcttgcgcggcgataacagcggcgccacccagggcggcgtgttgcaggtgtccgccggcgctacggcggacgtaactgccgccagcgccatgcagtccatcagcaacgccggcacggttcagttcacgcaggacagcaatgccgcctacgccggcgtgctgagcgggaccgggagcatcgtcaagcgcggcggcggcgacctgacgttgacgggcaacaacacccataccggcaaggtggtggtggaggcgggcagcctcagcgtatcggcggccaacaacctgggtggcgcaggtagttcggtacagctcaagggcggcgccctcgccctcaagaaaaccatcgtcgtcaatcgcggcctgacgctcgattccggggcgcagacgttgatcatcgagccgggaacaaccacgacctggcaaggccaggttagcggcgccggcaaactggtgacccagggcggcacgctggtgctggagcacgcgtccaatacgtatagcggcggtacggagatcaacaacggaacgctgcgggcggcgcatgatgccagcctgggttccggcacgttggcgctcaagaacagccagctggccgccacggacagcttcacggccacgcgtgcattgacgctcgctggaaacgaaagcatagacgtcgcagccaccaagatactcagttggaacggcgaaatcagcggcgccggcaccctggtgaaggaaggccaggggaccttgctgctgcgcggaaccaatcagcaaaatggcggcacgaccgtcaatgccggtacgctgcagatatcccgcgacgccaatcttggccgaggggcgctggcgctgaacgacggcacgctgcagagcaccggcagcttcgcgacctcgcgcgcggccaccttgcgcggccaggccaccatggaggtcgacgcttcgcataccgtgacctggaatggcgagctgagcggcggcggcatgttgcgcaagtcaggccagggcacgctggtcctggccggcgccaacacgtactcgggtggcacggtggtcgaggccggcgcgcttcgggcaggacacgaagacaacctgggacggggcgcaataaccctgcagggcggagatctgcttgccggcggcagtttttcgagcaaccgcgatctcacgcttgtccgcggttccttggacgtggctcgcgacgctaccctgacctggagcggcgcgatatcgggcgccggcgatctggtcaagaaaggggacgggcgcctgacactcacgggcgtcaacgagtacgccggccagaccgtgctccggggcggcaagctgcgtgtggccagggacgaaaacctgggccgcggagcactggtgctggaagacaataccgtgttcgagagcatgggctcgcatgccgccacgcggcaggtcacgctcaagggcgcgcccaaggtagagacgcttgacggcactacgctcgaatggcgcggcacggtcgacggcgacggcaagctgtacaagcaaggcggcggcacgctcgtgctgagcggcaacaatacctacgccaagggcgtcgaggtctggggcggggtcgtgcaagtctctcgcgaccagaacctgggcgcggccaatggcgcggtcacgctcaacggcggcgggttggcggccaacggggatttcaccagcaatcgccagctggagctgaccgccggggccaaggccatcgacgtcgcggccggcaaggacgtgacgtggcgcggtgtcgtcaacggcgccggcgcgctgaccaaggccggcgacggtacgctggcgctggccggcgccaacacctacaccggcggcacgcgcttgcagggcggcaccgtgcaggtatcgcgcgacaacaacctcggccaggccgccggcgcggtcacgttcgacggcgggcggctggccaacacgggcagctttgcgaccgcgcgcacggccacgctcaacaaggctggccagatcgataccgaccggggcaccacgctgacatggaacggcgccatcggcggcaagggcgagctgcgcaagcaaggggcgggcaccctggtgctgggcggagccaacacttaccagggcgacacccgcgtcgaggccggcacgctgcaagtgtcggccgacgccaatctgggccagggcgccgtgcatctgcacgacagccggctggcgacgaccggtacgttcgcgacctcgcgccgtctggagttgaccggacgtggcgcggtgcaagcggctgccgccgccacgctggattggcgcgggacggtcgctggcgccggcacgctggtcaaggagggcgcaggcacgctggtgctggccggtgacaaccagcatgccggcggcaccgaggtcagggccggcacgctgcaggtatcgcgcgccaccaacctggggcccggcgcgctggcgctggagaacgcggcgctggccacgaccgccagcttcacggccacgcaggcagccaccctgactggcaacgccgccatcgacacggccgccggcaccacgctgggatgggagggggccatcggcggaaccggcagcctgcacaaaaagggcgagggcaagctggtgctggtcaaggacaaccaccatgacggcggcaccacgatccacgccggtaccctgcaggtgtcgcgcgacgccaacctgggctcgggacagagcgcggtgacgctggatggcggcgccctggcggtttctgccgggttctccagcgggcgcgagatcgtcgtgggcgccgggcacggcgcgctttcggtgacgggcggccacaccctgcaatggcagggccaggtcggcggggcgggggcgttgaccaagacgggcgacggcacgctcgtgctggagcacgacaatacccacgccggcggtacccggattaccggcggggtgctgcgcgtctcgcgcgatgagaacctgggcgaggcgcatggcatgctgacgctcgacggcggcacgctgtcgaccaccgccgggttcgcgagccggcgcaacgccaccgtgggcaacggcggcggccggatcgtcgtcgccgacgccgccacgctggatttgcagggcgacgttgccggcgcgggccggctggtcaaagagggcgcgggcacgctggccttgggcggcacgaacacctatgccggcggcaccgtggtcgaggccggcacgctgcgggtcgcgcgcgacgccaacctgggcggcggcgcgctgaccctgaacaacagccgcctgcatgcgaccgccggctttgccaccggccgcgatgcgaccctctccgggcgcgcctcgatcgacaccgacgaccgggcgacgctgcaatggcgcggcacggtcaatggcgccggcaggctggtcaagcagggcctgggcaccctggtactggacggcgacaaccggtacgcgggaggcaccgaggtcaatgccggcacgctgcaggtcgcgcgcgacgccaacctgggcgcgggcgacgtggcgctcaatggcagcagcctggccgcgaccgccagcttcgccaccgcgcgcacggccacgctgagcggcgcggccgccatcgacacggccgacggcgccaccttggactggaatggcctgctcgacggtgacggcgccctggtcaagcagggcaacggcaccctggcgctggccgcggccaaccgctatggcggcggcaccatcgtcaaggcgggcgccgtgcggatcgcccgcgacgccaacctggggcgggccggcaccggcgtaacgctggacggcggcgcgctggccaccacggcggatctcgcgaccggccgcgcggcgaccctgggcgcggccaacggcacgctggacgtggccgccggcacccgcctggactggaacggggcgatcggcggcgccggcgcgctgaccaagaccggcgccggcaccctggcgctcaaccacgacaaccagcatgccggcggcaccctggtccatggcggcacgctgcggatcgcccgcgacgccaacctgggcgcggcgggcacggcggtgacgctggacggcggcacgctggccaccacggcgtcgttggcgcccgagcgcgcgctgcgcgtcggggcgcgcaacggcgtattgctgccggacgcgggcacgaccctggattggcggggcgtggtcgccggcgcgggcaagctgaccaaggccggtccgggcacgctggtgctcagcgccgataaccgccatggcggcggcacggcagtcaccggcggtacgctgcaagtttcgcgcgacgccaacctgggcgcggcggccggcgccctgacgctggacggcggcaccttgctgagcaccgccagctttgcctcggcgcgtgtcgccaccctcgatgccgcgggcggcaccttcgtcacccgcgacggcacccggctggattgggacggcgcgataggcggggcgggtggcctggtcaaggaaggcgccggcgagctgcggcttggcaatgccaatacctaccaggggccgacccgcatcgccgccggccgcctggccgtcaacggcagcatcgccagcccggtcacggtcgagcaggccggcgtgctgggcggcacgggccgcatcgtcggggatgtggccaaccgcggcgtggtcgcgccgggcaactcgatcggcgcgttgacggtggccggcaattacgctggtacgggcggcagcctggaagtggaggcggtgcttggcggcgacgccgcgccggccgatcggctggtgctcgacggcggcgcggccagcggcgtcacgccggtcgtagtcaagccgcagggcggggtgggcggcctgaccctgcgcggcattccggtggtcgtggcccagggtggcgccacgaccgcgcccggggccttccgcctggcgcagccgctggtcgcgggcgcctacgagtaccagttgctgcgcggcgcgggcgacggcgccgcggcgcaggcgcaagactggtacctgcgtacctcccgcgtcgagcgcgacaaggcgggcaggatcgtcaaggtcgtgcccttctaccggcccgaggtggcgctgtatgccggcacgcccatgctgatgcgcatggtcggcacggaagcgctgggcagctaccgcgaacgcgcgggccagcccggcgcggccgcgcccgaggcaggcgccgcagcccggcgtggcgtgtgggcacgtaccttcgggcgtcgtttcgagcgctccgcgggcagcgaagcggcgccgtccttcaacggcagcctggccggcatgcagctgggcgcggacctctacacgcgtcgctcggccacccggcatgccgacgccttcggcgtgttcggcggatacgccacggcccgcggcgatgtgcggggcctggcgcgcggcgagatccaggcggtgggcacgtccacgctgcgggccgcccagctgggcgcctactggacgcacactggtccgagcggctggtacgtcgacacggtgctggcgggcacgcgctacaagcagcagaccagctcgtcggcccatgtcggcgcgaccagccgcggctggggcatgatggcctcggtggaggccggctacccgtggcagctcaatccgcgctggcaaatcgagccgcaggcccagttggtgtatcagcagcttggcatcgccaatggcgccgaccgcgtgtcttcggtgtcgtacaagacgcccgatgcgctgacggggcggctgggcacgcgcctggcgggccagtacgcatacgggaaggcgcagttgcggccgttcatgggcgtatcgctgctgcacgatttcaccggcgccgacaccgtcacgttcgcgggcgtgcacagcgtacgcgccagccgccagaacacggccgtggatctgaaggcgggcgtggacacgcagctgggcaagagcgtaggcctgtgggggcaggtcggctacggcaagtcggtcggcagcggcgacggcagcgaccgtggctggagcgccaacctggggctg

SEQ ID NO: 14729 - DNA, 546 bp, Bordetella pertussis
atgaaaactgttggcgacaaactcgagcctttcaaggttaccggcgtcaagcccggcttcaaccagcatgaagaaaacggcgtttcggctttcgaggacatcaccgaaagctccttccccggcaagtggaaagtgatctatttctacccgaaggatttcaccttcgtgtgcccgaccgaaatcgtcggcttcaacaagctggccaaggatttcgaagaccgcgacgccgtcctgctgggcggctcgaccgacaacgaattcgtcaagctggcctggcgccgtgagcacccggacctgaacaagctgggtcactaccagttcggcgacaccaccggcgcgctgatcgatcagctgggtgtgcgtgaaaagggtgccggcgtcgcgctgcgcgccactttcatcgtcgaccccgacaacacgatccagcacgtttcggtgaacaacctgaacgtcggccgcaaccctgaagaagtgctgcgtctgctcgacggcctgcaaaccgacgagctatgcccgtgcaaccgttcggttggcggcgccacgctg

SEQ ID NO: 14730 - DNA, 1426 bp, Bordetella pertussis
atggcccgccccgggcaggagcgccgtctcgtgccccgcatgcgcagactgttcagaaacctgacctcgcggttgcgtctcggcctgttcggacgcacctttctgctgctcgcggcactgatgctggtcagcctgggcgcctggctgcaagtcttcttcagcatggagctggggccgcgcgccaatcagatggcgcagcgggtgatcacggccgtcaatatcacgcgtacggccctggtctattcgcatacggacgagcgcagcaagctgctgctggacctggccaccaacgaaggcatccaggtctacccgcgcgagctcaccgacttcaccgaggcgctgcccgacgacgactactggcaacgggtcgcgcagcatatccgcgtgcgtttcggacccgaaacccagatcgcctggggggtcaaccaggtacccggcttctgggtcagcttccagatcgaccaggacctgtactggctggtcttcgagcgcgagcagatcggcctgaccggcggcatcgaatggctgggctggggcgccacggcgctgctgctgtcgctggtcggcgcggccgtcagcgtggggttcgtcaaccggccgctgtcgcggctggcgcgcgccgcccaggtgctctcgcgcggcgaaacgcccgcgccgctgcccgagcaaggtccgctggaaatccgcgacctgaatgccctcgttcaaccgcatggccaaggacctgcggcaggccgaggccgatcgcgagctcatgctggccggcatttcacacgacctgtgcacgccgctggcgcgcatgcgcctggaaatcgagatgagcggcgtctcggaggacgcccgccaggccatcgacgaggacctcggccagatcgaccacagcatcgggcagctgatggaatacgcgcgcccggccggaaccctgccccagctcgccaccgacatttcgtcggtgctggccgagctgtatgagcgcgagcgcagccataccgcctcgctgggcggcgagctggaagcctcgatcgatccgggcctgcgggcgcgcatcacggcgctggatctcaagcgcatcgtcagcaatctgatcgagaacgcgcgccgctacggccgctcgtccgacggactggcccacctggccatcagcgtgcattcggaaggcaatatcctggcgatcgaagtggccgaccgcggccccggcatcgcccccgaggaagtcgaccgcctgctgcgtccgttttcgcgtggagaagcggcccgcaccggcgtcagcggcgcggggctaggcctggcgatcgtcgaacgcctgctcaagcacgtgggcggctcgctgcgcatgctgccgcgccagggcggcggcctgatcgcgcggatagagttacccaaagccaaatttagaaattatcaattagacagcgaaaaccaatag

SEQ ID NO: 14731 - DNA, 1923 bp, Bordetella pertussis
atgtgcggaattgtcggaatctggggtcccttgcgggacaaggccaatgtgctggccgaaagctgccggcgcatccgccaccgcggccccgacagcaatggctattgggaagacgccgaggccgacctggcgctggcgcatgtgcgcctggccatcctggacctgaccgaggccggccaccagcccatggtgtcggcctgcggccgctacgtcatcgttctcaatggcgagatctacaaccacatggagctgcgcgagcgcctgcagcaggacgggctggcgccggcctggcgcggccactccgataccgagacggtgctggcctgcttcgccggctggggcatcgagcagaccctgcaggccgcggtgggcatgttcgccatcgtgctctgggaccgcgccgagcgcaagctggcgttgatgcgcgaccgcatgggcgagaaaccgctttactacggctattcgcaggccaacctgctgttcggctcggaactcaaggcgttcatgccggtgcccggcttcggccgcgagctcgatcgcaatgccctagcctcgttcatgcgccacaactacattcccgcgccgcagtcgatctacgccggcatccgcaagctgccgccgggcgcctgggtcgagatcgacgcggcgcagatgcgccgtggcgagttgcccgaaccccaggtgtactggtcggcgcgccgcgcggccgaccagggcctgggcgaccggcgccgcttcgagtccgacgcgcaggcgatcgacgcgctggagcaggtggtgtcgcaggcagtgcgcggccagatgctgtcggacgtcagcctgggcgcgtttctttccggcggcatcgactcgtccaccgtcgtggccctgatgcaggcgcaaagcgcgcagccggtgcgcaccttcgccatcggctttcacgagaagggctataacgaggccgagcacgccaaggcggtggcggcgcacctgggcaccgagcataccgagctctacgtcaccgccgaggacggcctggccgtggtgccgtccctggcagacatgtacgacgagcccttcgccgactcgtcgcagatcccgacctcgctggtcacgcgcatggcgcgccagcacgtgacggtggccttgtcgggcgatggcggcgacgagctgttcggcgggtattcgcgctatttccgcgtcgacaactggtggcgcaaatgcgccgccatgcccgggccgctgcgccatctggcgggcgcggcgctgcgcggctcggccgcgctgccgggcgccggcgcctggcgcggcaaggtcggcaagctgggcgagctgctcggcgccgacacgcgcggcgagttctatcgtctgttcgtctcctactgggccgatccgggccgcgtggtgatcggcggcacggagccgctgtcgccgttcgagcagccgatggagggctccaccttcgacgccatgatgaagctggacacggtcacctacctgcccgacgacatcctggtcaaggtcgaccgcgcggcgatggccgtcagcctggagacgcgcgtgccgctgatcgaccatcgcgtctacgaattcgcctggcaactgccgttcgaatacaaggtgcgcggcggcaccggcaagtggctgctgcgccagctgctgtaccgccacgtgccgcaggccatggtggaccggcccaagcgcggcttcgccgtgccgctggccgcctggctgcgcgggccgctgcgcgactgggccgaggccttgctggatccggcgcgcctgcgccaggaaggctggttcgagcccgagcccatcctgcgcaaatggcgcgaacacctgtcggggcaccgcaactgggacagccatctgtggggcgtgctgatgatgcaggcctggctggaccgctatcgcgccggagccggcgatgaggccggccgccga

SEQ ID NO: 14732 - DNA, 3525 bp, Bordetella pertussis
gtgcgtctcacccagctaaaactcgccggcttcaagtccttcgtcgatccaaccgtaatccccgtgcccagccaactggtgggcgtggtgggtcccaacggctgcggcaagtcgaacatcatcgacgccgtgcgctgggtattgggcgaagccaaggcgtccgaactgcgcggcgagtcgatgcaggacgtcatcttcaatggctcgggcaaccgcaagccggctgcccgcgcctcggtcgagatggtattcgacaataccgaagggcgggccgcgggccagtggagcgcctattcggaaatcgccgtgcgccgcgtgttgacgcgcgacggcaccagcagctactacgtcaacaaccagcaggtccggcggcgcgacatccacgacatcttcctgggcacaggcctgggcgcgcgcggttacgccatcatcggccagggcatgatcaaccgcctgatcgaggcccgcccggaagagctgcgggtcttcctcgaagaggcggccggggtgtcgcgctacaaagagcgccgccgcgagaccgagaaccgcctgtccgatacgcgcgagaacctgacccgggtcgaggacatcctgcgcgaactgggcagccagctcgacaagctggaggcccaggccgaggtggcgcgcaaataccgcgaactgcaggccgacggcgagaaaaagcagttcgcgctgtggctgctgaaggaaaccggcgcccgcgatgagcgcgagcgcaagaaccaggacatggcgcgggcccagaacgatctggaagccgccatcgccggcctgcgggctggcgaggccgagctggaatcgcgccgccaggcccattacgccgccagcgacgcggtgcacgcggcgcaggggcagctgtacgaggccaatgcccaggtcagccgcctggaggccgaaatccgccatgtggtcgattcgcgcaaccgcctgcaggcgcgccgcgaacagctgcaggcccagatcgccgagtggaacacccagcaggagcactgtaccgaacagatcgccctggccgaggaagacctggccaccggcgcggcgcgcaccgaggaagcgcgcgccgcggccgaggacgcccaggccggcctgccggccatcgaagcccgggtgcgcgacgccgcggccgggcgcgacgacatgcgcgccgcgctggcgcgcgtcgaacagaacctggccctggtggcccagacccagcgcgacgccgaccgccagctgcaaacgctggagcagcgccgcgagcgcctgcagcaggaactgcgcgaactgcacacgcccgaccccgagcggctggaacagctggccggcgatcgcctggccggcgaggaccagctcgaggcggcgcaagccgaactggccaccctggaagggcgcgtgcccgaggccgacgccgagcgcagccgcgcccaggccgccgcccagcaggatgcccagggcctggcccgcctcgaggcccgcctggcggcgctggtcaagttgcaggaggacgtccagaagcagggcgcgctggaaccgtggctggccaagcacgagctggccggcctgggccgcctgtggcagaagctgcatatcgagccgggctgggaaaccgccctggaagccgcgctgcgcgagcgcatggccgcgctcgaggtgcgcagcctggactgggcgcgcgccttcgccgacgacgcgccgccggcccgcctggcgttctaccaggtgccggtcgccgcgcccgcgccggccgccccgcagggccagacgccgctggccagcctgctgcgggtcaccgaccccgacctgcgcacgctgctcaaccagtggctggccggcctgtacaccgccgccgacctgacccaggccctgggcgggcgcgccagcctgccggccggcgccgcctacgtcgtcaaggccgggcacctggtcgatgcccacagcgtacgtttctacgcgcccgactccgagcaggccgggttgctggcgcgccagcaggaaatcgaaaacctgcagcgcgagatcaaggcgcagcagttgatcgccgaccaggcccgcgccgccgtggcgcgcgccgaggcggcctggcaacaggtatcgcaggccatcgcgccggcgcgccagcgggtggtcgaagtcacccggcgcgtgcacgacatccagctcgagcattcgcgcctgcagcagcaggccgaacagtccggcgagcgggccgcccgcctgcgccaggatctcgaggagctcgcggcgcacgaggaagacctgcgcgccacccgcgaggaggccgaagtgcgcttcgaggcgctcgacggcgaactggccgagcaccaatcgcgtttctccgacgccgagatcgacggcgaaaccctgtccgcccaggccgatgccgcccgcacccggctgcgcgagctggagcgcgccgcccaggaggccgagttcgccgagcgcggcgtccaggtgcgcatcaccgacctgcagcgcaaccggcaactggccgccgaccagagccagcgcgccgccaccgagctgcagcagctcgaaaccgacctggtcgacctggacgcctcggcctcgcaggcaggcctgcaggacgccctggagttgcgcgccgagcgcgaagaggcgctgacgcgcgcgcgcctggaactggacaacctgtcggccctgatgcgcggcgccgacgaggagcgcatgcaacaggagcgcgggctcgagccgctgcgcgcccgcatcaccgaactgcaactgcaggagcaggccgcccgcctggccgaggaacagttcaccgagcagctcaacgcccgcgaggtcgaccgcgagacgctggcccgcgagctggccgagatgcccgacgagtggcgcaaggccagttggctgcagtccgaggtgggccgcatttcgcgccaagtcgacgcgctggggccggttaacctggccgccctggacgaactgaatacctcgcgcgaacgcaagactttcctcgacgcccagcagcaggacctcctgacggccatggagaccctcgaggacgccatccgcaagatcgaccgggaaacccgcgagctgctgcaggagaccttcaatacggtcaaccgccatttcggcgagttgttccccaagctgttcggcggcggcgaggccaggctgaccatgaccggcgacgaaatcctcgacgcgggcgtgcaggtgatggcacagccgccgggcaagcgcaacagcaccatccacctgctgtccgggggcgagaaggccttgacggccacggccttggtgttcgcgctgttcaagctgaatcccgcgccgttctgtctgctcgacgaggtcgacgcgccgctggatgacgccaataccgaacgctatgccaatctggtcagcaacatgagcgaacagacccagttcctgttcatctcgcacaataaaatcgccatgcagatggccaagcaactgatcggcgtgacgatgcaggagcagggcgtatcgcgtattgttgctgtggatatagactcggccgtgcaaatggccgccgaagcc

SEQ ID NO: 14733 - DNA, 2088 bp, Bordetella pertussis
atggcgcaggcaggtcctacgccgcagcaagcgatcgcgcgcctgcgggccgagatcgagcagcacaatatccgttattacgtccacgacgatcccagcgttccggacgccgagtacgacgcgctcatgcgcgacctgcaagcgctggaggccgaacaccccgagctggtcacgcccgattcgccgacgcagcgcgtgggcgccgcgccgctggccgaattcggcagcgtgcgccacgccgtgcccatgctgtcgctgggcaatgctttcgacgaagaggacgtgcgcgccttcgacaagcgcgtggccgataccctgcgcggcgcgggcctgctgggcctggaccagcaggttgaatacttctgtgagctcaagctggacggcctggccatcagcctgcgctacgaggagggcaggctggcccaggcggccacgcgcggcgacgggcagaccggcgaggacgtcacggccaacatccgcaccatcaaaggcgtgccgttgcgcctgcatggcgcgccgcgggtactcgaggtgcgcggcgaagtcctgatgaaccgtgccgagttcgaacgcctgaaccgtacgcaggcagcgcgcggcgagaaagtgttcgtcaacccgcgcaatgccgcggccggcagcctgcgccagctcgatccgcgcatcacggcgcagcggccgttgcgtttcttcgcctatagctggggcgaagtccatggcctgcccgaaggcatgccgacgcgctttgacgagcccgcgccgggcgtgcgcgtggcgtccacgctgccgcgcgacacgcatggcggcatgctggactggctggccgaactgggcctgccggtcaatctgcggcacaaccaccgagagcgcggcgccgacgggctgctggccttttacgagcgtatcggcaagctgcgcgccgatctgccctacgacatcgacggcgtggtctacaaggtcgacgccttgccgtcgcagcgcgtgctgggcttcgtcgcgcgcgcgccgcgctttgcgctggcgcacaagtttccggccgaggaggccgtcacgcaactgctcggcatcgaggtccaggtgggccgcacgggcgcgatcacgcccgtggcgcgcctggcgccggtgttcgtcggcggggtgacggtcaccaacgccaccctgcacaacgaagacgagatccgccgcaaggatgtgcgcatcggcgataccgtgatcgtgcggcgcgccggcgacgtcattcccgaggtggtcgggccggtgctggaaaaacggccggccgacgcgcgcgagttcgtcatgctgaccgcctgccccatctgcggctcggcgatcgagcgccccgagagcgaggccatcgcccgctgcacgggcgggctgttctgcgccgcccagcgcaagcagaccctgctgcatgccgccggccgcaaggcgctggatatcgaaggcctgggcgaaaagctgatcgaccaactggtcgacgccgatcgcgtcaagtcgctggccgatatctacagcctgaccgcgttcgaactggcggcgctcgaacgcatgggcaagaaatcggcggaaaacctggtggcggccatcgaccaggcgcgccgtccggctctgggccgcttgctgttcgcgctgggcatacgccatgtgggcgagacgacggcccgcgacgtggcgcgccatttcggcagcatggaacgcatcatggacgccagcgaagaagcgctgctggccgtgcccgacgtgggcggcgtggtggccggctcgatccggcgcttcttcgccgagccgcacaatcgcgagatcgtcgagcagctcacgcagcagggcgtgcacccgcaagccgaggccgagcccgagggcaccagcctggccggcaagaccttcgtcctgaccggcaccatgccgaactggacccgcgatgaggcgactcgccgtatcctggccgccggcgggaaggtcagcggttcggtctccaagaagacggcctacctggtgacgggcgaggatgccggcagcaagctgaccaaggcccaggagcttggcgttccggtgttggacgaggacggcctgaaggcgctgctgggcctg

SEQ ID NO: 14734 - DNA, 1101 bp, Bordetella pertussis
gtgacctggctgtacatatgcgtggtcgcattcatggtggggggactcatcgtggcgtcggagcgctggcatggcgcgtttaccggcgatagcgacctcaacaagccgcaggcttcgcacacgcgggcaacgccgcgcgtgggcgggctggcggtcctggccggctcgctggccggcctgctggtgctcggccccagcaacatgacgctgacctggctgtggccggcgctgttcgtggcggcgctgcccgtgttcgtggccggcctgctcgaagacattaccaaggacatcggcgccagcaagcgcctgctcgccgcgttcgcctcggcggcgatcgcctggtggctgctgggcggggtgagccgcgtgggcatcgcgccggtcgactgggtgctgtcgttctggccggtgtcgctgatcttcaccatgttcgcggtgggcggctgtacgcacgcgctgaacatcgtcgacggcatgaacgggctggccggcatgatcgccaccctgatggcggtgtcgatcagcctggtggcgctgcaggtcggcgacatgcccattttcatgatcgccgcggcgctggcctcggccacgctggggttcctggtctggaacttcccgttcggacgggtgttcctgggcgatggcggtgcgtacttcctcggcttcatgctggcggagctggccgtgctgctggtggtgcgcaatccgtcggtgtcgccgttctacgcgctggcggtgctgttctatccggtgttcgaaacgggcttttcgatctggcggcgccgcttcaagcgcggcgtgccggtcgaccagccggatgccctgcacctgcaccagctggtgttccgccgcctggtgcgcgtgacgttcagccgcggccgccgccatgcggtgccggcattgtgcaatgccctggcctcgccctacatgtgggtgctggcgctcatcggcctggtgcccgccaccatctggtgggacaacgcctggttcctgtgcgccagcctggtcgtgtttgccgcggtctacacgtggctgtacatgcggctggtgtcctggcgccgccccggctggctgctgctgccgtccgtcattcgaacgcac

SEQ ID NO: 14735 - DNA, 666 bp, Bordetella pertussis
atgtccacctccagttccgcttccgcgctcggccgccgcgccggcccgctcgatggcctgatcggcgaaatcgaccgcgccttgcgcgtgctttcgggcgccgccaccgccgcccggccgtatcccgcccaggcgcccgaggcgccggatgcgttgtccgagcgcgagaagcgccatgccgccggcctgatgcgcgtcaaccacgtgggcgaggtgtgcgcgcaggcgctgtatcgcggccaggcggccgcctgccgcgagccggccgcgcgcgcgctgctgcgcgaggccgcggccgaggaagtggaccaccttgcgtggtgccacgagcgcctgcgggaactgggcagccgccccagcctgctcaacccgttctggtacaccggctcgttcgcgctcggcgtgctggccagctatgccggcgtgccgcgcaacctgggcttcatggccgagaccgagcgccaggtcgaggcgcacctggacgggcacctgcgcaccttgccggtgcaggaccagcgctcgcgcgacatcgtccagaaaatgaaggaagacgaagcgcagcaccgcgccagcgccgagcgcgccggcggcgtgccgctgcccgcgccggtgcgcggcgcgatgcgggcgatgtccaaggtcatgacgtccaccgcctattggctt

SEQ ID NO: 14736 - DNA, 1311 bp, Bordetella pertussis
atgtccaatacctatttcccgcgctggcggctggccgacgacaccgtgccgggcgcggtcatcgcgcccgacgaacgcctgtcctggcccaagaacatcgccatgggggcccagcacgtggtcgccatgttcggttccaccgtgctggcgccgctgctgatgggtttcgaccccaatgtggcgatcctcatgtccggcatcggcacgctgatcttcttcctgttcgtcggcggccgggtgcccagctacctgggctccagcttcgccttcatcggcggggtggtggcggtcaccggctatgtggcgcccggcgccaacgccaatatcggcgtggcgctcggcgcgatcatcgcctgtggcctggtgtacgcgctgatcggcctggtcgtatgggcggccagcgcgcgcggcaacggggcgcgctggatcgaggccatgatgccgccggtcgtcacgggcgcggtggtggcggtgatcggcctgaacctggccccgatcgccgccaagggcgccatgggttcgtccggcttcgaggccagcatggcgttgatgaccatcctgtgcgtgggcggcatcgccgtctacacgcgcggcatggtgcagcggctgctgatcctggtcggcctggtgctggcctgcgtcatctacgcggtctgcgccaacggcctggggctgggcgcgcccatggacttcgccaaggtggccgccgcgccgtggttcggcctgcccagcttcgccgcgccggtgttcgagccgcaggccatgggcctgatcgtgccggtggccatcatcctggtggccgagaacctgggccacgtgaaggcggtcgccgccatgaccggacaggacctggaccgctacgtgggccgcgccttcgtgggcgacggcgtggcgaccatggtttccggcgccgtcggcggcaccggggtgaccacctacgccgagaatatcggcgtgatggccgtgacgcgcatctattccacgctggtgttcgtggtggcggccgtgatcgcgctggtgctggggttctcgcccaagttcggcgcgctgatccagaccatccccggccccgtgctggggggcatgtcggtcgtggtgttcggcctgatcgccatcgccggcgcgcgcatctgggtggtcaaccaggtcgatttcagcgacaaccgcaatctgatcgtggccgccgtgaccctggtgctgggggcgggcgacttcagcgtcaagctgggcgatttctcgatgaacggcatcggcaccgccacgttcggcgccatcatcctgtacgccctgctgggcctggcgcgtcgccgc

SEQ ID NO: 14737 - DNA, 969 bp, Bordetella pertussis
atgaaacaatatctagacctcgtccaatccattctcgaccagggcgcctggcaggaaaaccgcaccggcgtgcgcacgctctcgctgcccggcgcggcgctgcgcttcgacctgcagcaggggtttcccgccgtcaccaccaagaagctggcgttcaagtccgccatcggcgaaatggtgggcttcctgcgcgccacgcgcagcgccgcgcagttccgcgcgctgggttgcaaggtctgggaccagaacgccaacgagaacgagcaatggctggccaacccgtaccgcgagggtcccgacgacctcggcccggtctacggcgtccaatggcgccattggccggcctacaagctgctgccgagcagcgccggcggccaggtggccgacgcgctggcgcgcggctaccgacaagtggccgaggtcgacgaaaacggcgcgccgcacgtgctgctgtacaaggcggtggaccagttgcgccagtgcctggacaccatccgccaatcgccgggcgaccgccgcatcctgttccatggctggaactgggcgcagatcgaggaaatggccctgccgccctgccatctgctctaccagttcctgcccaacgccggcacgcgcgaaatctcgctgtgcctgtacatccgctccaacgacgtcggcctgggcacgcccttcaacctgaccgagggcgcggcgctgctgcacctggtcggccgcctgaccggctacaagccgcgctggttcagctatttcatcggcgatgcgcacgtctacgaaaaccacctgccgatgctgcgcgagcaactggcgcgcgagccctatccggccccgcagctggtgctgtcggaccgcattcccgatttcgccgtgaccggcaagtacgagccgcaatggctggagcaggtcgagccgggcgatttcacgctgagcggctaccagcaccacgcgccgctgaccgcccccatggcggtc

SEQ ID NO: 14738 - DNA, 1572 bp, Bordetella pertussis
atgagcagtctcgaacagcacatgcagccgccggggcatacctggtgggacatcatcgaagagcacgcccggcgctttccggagcgcgacgcgctggcgcacggcgacggcgccatcacctatggcgagctggccgcgcgggtgcggcgctgcgccgccggcctgagcgcacgcggcatcggcgcgggcgactgcgtggcgctgctggctccgccgacgcccgacgccatggtctgtctgctggccgcggcgcggctgggggcgttgtgggtggggttgaaccccaggtaccagccgcgcgaaatggcatatgtgatcggccacgcgcagcccaagctggtgctgtcggtgcgggagttcgaggcgcgccgctatgccgacgacctggacgcggcgctggccacgctggcgccgcaggcccggcgccccgatctgctgttctatgacagccgggcatcctgtgacgaggcgatgctgcacgcgttgtgcgacgcgccggatgcgccatgtccggcgccgttcgaggatgccgcccagccttgcatgctggtctacacctcgggcaccacgggcattcccaagggcgtgttgctgagccagacggcgctgatctaccgctctaccgtgcaggcccgcaccttcgccacgcaaagccacccggtggtcatcaacttcgcgccgatcaaccatatcggcggcatgcacttccggggcctgtcgcagatcctggccggcggcaccatcatctaccaggagcgctaccggccggccgaggtgatgggcctgatcgagaagcatcgcgtcaacatgctgatgctgggctcgaccatgctgcagatgctgatccgcgagccgtccttcgacatgtccatcatgcgcgggatggagtggttcattttctcgggcgcggccattcccatgcccatcctgcagcgcgtcaaggagcactgcccgcgcatcggctccacctacggcctgaccgaatcgtgcgggtcggtcagctacatcgtcgccagcgattcgctcgaggcggccgcctataccgtggggcgcgccattcccgaaggccagttgcgcgtggccgacgagcaagggcagccgctgcccgccgggacccagggcgagctgcaggtgcgcggccagtactgcatgaatggctacctgcgcgacgccgccgccacggccggcgccttcacgcgggacggctggctcaagaccggcgacatggcccagcgcgacgacgacggcaacttccgactggtcgggcgcatcaaggaaatgtataaatccggtggctacaacgtttacccgcgcgagatcgaggtcgtgctcgagcagcaccccaacgtgttgatgtcggccgtcatcgccgtcgacgacgagctctaccagcaggtcggccacgcgcacctgatcctcaggcccgacaccgaggtgtcggaaccggagctggtgcagtggtgccgcgaacgcatggccaactataaagtgcccaagcgcattttcgtccgcaactcactaccgatgctgtcgataggcaaggtcgacaagattgccttgcggcagcagcac

SEQ ID NO: 14739 - DNA, 495 bp, Bordetella pertussis
atgtccgccactcccctgctcagcctggtcgtcgcctattcgaccaaccgcgtcatcggacgcgacaacgccctgccctggaagctgcccggcgacctggcgcacttcaagcgcacgaccctcggccatcccatcatcatgggccgcaacacctgggaatcgctgggccgcccgctgccggggcgcaccaatatcgtgatcacccgcaacccggcctatgacgccgccggcgccgtggtggtgggctcgcttgccgccgccatccaggcctgcggcgacgccgccgtggcctgcgtcatcggcggcgcgcagatctacgcccaggccctgccgctggcgcagcgcgtggtggccaccgaggtgcatgccgagatcgagggcgacgctttcttcccgccgctgccggccgggcagtggcgcgaaacgcagcgcgcggcgcaaccggccgagaacggcctgcgctacgacttcgtggaatacgagcgcgtggcgggc

SEQ ID NO: 14740 - DNA, 1239 bp, Bordetella pertussis
atgaacatgccagcacccgccgccacgcggcgcgaccggatcgaggacgaactcggcgcccacaactaccagccgctcgatgtggtgctggcgcgcggcagcggggtctggctgtacgacacggcggggcggcgctacctggattgcctgtccgcctactcggcggtcaaccaggggcattgccatccgcgcatcctggccgcgatggtcgagcaggcgcagcggctgacgctgacctcgcgggccttccgccatgaccagctggcgcccctgtacgaagacctggcgcgcctgaccggcgcgcacaaggtgctgcccatgaacagcggcgccgaggcggtcgagacggcgctcaaggcggtgcgcaaatggggctacgaggcgcgcggcgtgccggccgggcaggcggagatcatcgtgtgcgccaacaacttccacggccgcacgctgggcatcgtcggcttttccaccgacccggatgcgcgcggcggctacgggcctttcgcgccgggcttcacggtggtgccgttcggcgacttcgccgcgctgcaggctgccgtcacgccgcgcacggtggccttcctggtcgaacccatccagggcgaggctggcgtcatcctgccgccgccgggctatttccgccaggtgcgcaagctgtgcagcgaacgcgatatcgtgctcatcctcgacgagatccagaccgggctggggcgcaccggcgctttcctggccgaggcgcacgaaggcatcgaggccgatgtcacgctgatcggcaaggccctgtcgggcggcttctatcccgtgtccgcggtgctgtcgaaccaggcggtgctgggcattttccagccgggccagcacggcagcaccttcggcggcaacccgctggcctgcgcggttgcgcgcgccgcgctgcgggtgctgcatgacgaaggcatgatcgacaatgcgcgcgagcagggcgcctatttcatgcagcgcctgcgcgcgctgcccggcccggtgcgcgaagtgcgcggccgcggcctgatgctggcgctcgaactcgagcccgacgccgggccggcgcgcgcctattgcgagcggctgatggcgcgcggcatgctggtcaaggacacgcacggccagaccctgcgcctgtcgccgcccttgattgtcacgcgcgaacagatagactgggcctgcgcgcaactggcgcacgtgcttgcgcattccgcgccaggctcttccggaggtccatcg

SEQ ID NO: 14741 - DNA, 567 bp, Bordetella pertussis
atgaagaagttcctgtttgacctgtttccgctgatactgtttttcgttgcctatcggtacgccgatatttatgcggccacggccgtcgcgattaccgcgtccatcgcccagatactctggctgcgcctcaccggcaaggccatcgagggcatgcactggataaacctgtcggtcatcgtgattttcggcggcgccaccctgtggctgcacagcgacgtcttcatcaagtggaagcccaccgtgctgtactggctgttcggcggcgcgctgctgggcgcgcggtacctgttcgggcgcaacctggtccgccgcctgctgggcaagcagatcgcgttgcccgatccggtctgggagcgcctcaacctgagctgggcgctgttcttcgtggcggccggcgcggtcaacctgtatgtggccttctccggccatttcaccgaatcccaatgggtcaatttcaaggtcttcggcctgatgggcctgctggtcgctttcgtcatcgcccagtcgctgtggctgggcaagcatctgcaggcgtcggacacgcccgatcaagatcgaaacgaagac

SEQ ID NO: 14742 - DNA, 1020 bp, Bordetella pertussis
atgaagcgcattccctcgatcctgttggccaccgtcctggccgccgcgaccggcgtcgccgccgccaacaccacgctgacggtctacaccgccctggaggccgaccagatcaaggcctaccaggccgccttcgaaaaagcccatcccgacatcaggatccaatgggttcgcgattcgaccggcatcgtggccgccaagctgctggccgagaagaacaaccccaaggccgatgtgatctggggcctggccggcacggcgctgggcctgatggacaaggaaggcatgctgctgccgtacgcgcccaagggcctggaccagatcgcggccaacatgcgcgacggcaaggacgtgccggcctgggtcggcatggacgcctacgccgccgcggtgtgcgtcaacaccatcgaggccagcaagcagaacctgcccatgcccacctcgtggcaggacctcaccaagccggaatatgccggcaagatcgtgatgcccaatccggcatcctcgggcacgggcttcttggacgtgagcgcctggctgcagatgttcggcgaggaaaagggctgggcgttcatggacgccttgcacaagaacatgggctcgtacacgcactcgggctccaagccctgcaacatggccgccgccggcgaatacccgatcggcatctcgttcgactaccgcgccgccaagctgaaggccgacggcgcgccggtcgaagccgtgttcccgtccgaaggactgggctgggaagtggaagccaccgccatcgtcaagggcaccaagcatctcgaggcggcccgcaagctggccgacttctcggccagccggcaagccaacgagctgtacaagagcaacttcgccgtgctggcgatcccgtcggtggccacggtcaacccccatctgccggccaatctgtccgagcgcatgatcaagaacgacttcgtgtgggccgcgaccaaccgcgatcgcatcatcgccgaatggtccaagcgctacgacggcaagtccgagccgaagaagaag

SEQ ID NO: 14743 - DNA, 642 bp, Bordetella pertussis
atgcatgacatctcttcattgaccacccgtaccaaggccctgccacccctgcgcgtcggcgtgggcggcccggtggggtccggcaaaaccaccttgctcgaaatggtgtgcaaggcgatgtacccgcagttcgacctgatcgcgatcaccaacgacatctacaccaaggaagaccagcgcctgctgacgctgtcgggggccttgccgcccgagcgcatcctgggggtggagaccggcggctgtccgcacacggcgatccgcgaggacgcatccatcaacctgatcgccatcgaccagatgctggagcagtttcccgatgccgatatcgtgttcgtcgagtccggcggcgacaacctggccgcgaccttcagccccgaactctcggacctgacgctttacatcatcgacgtcgccagcggagagaagattccgcgcaagggcgggcctggcatcaccaagtccgacctgttcatcatcaacaagacggacctggcgccgtacgtgggcgcggacctcgcggtgatggaggccgatacccgccgcatgcgcggcgacaagccctttgtgatgtgcaacctgaagaccggcgatggattggaccaggtgattgccttcctgaagacggaaggcttgttccgcggc

SEQ ID NO: 14744 - DNA, 1317 bp, Bordetella pertussis
atgtcttcccccaaagtcggcttcgtcagcctcggctgtcccaaggccctggtcgattccgaacgcatcctgacccagcttcgcaccgaaggctacgaggtcacgcccgaatacaacgacgccgatgtcgtggtggtcaacacctgtggcttcatcgacagcgccaaggccgaatcgctcgaagcgatcggcgaggcgatcgccgagaacggcaaggtcatcgtgaccggctgcatgggcgtggaagaatccgtcatccggcaggtgcatcccagcgtgctggccgtgaccggaccgcagcagtacgaggaagtggtgcgcgcggtgcacggcgtggcgccgccccgccaggaccacaacccatacctggacctggtcccgccgcaaggcgtcaagctgacgccgcgccattatgcctacctgaagatttccgaaggctgcaaccatcgctgcagcttctgcatcattccctccatgcgcggcgacctggtgagccggccggtgggcgacgtgctcagcgaggccgagcggctggtgcgggccggcgtcaaggaactgctggtcatctcgcaggacaccagcgcctatggcgtggacatcaagtaccgcagcggtttctggaatgggcggccggtcaagacgcgcatgaccgagctgtgcgccgcgctgtccgagctgggcgtgtggacccgcctgcattacgtctatccgtatccgcacgtggacgaagtgatcggcctgatggccgacggcaaggtgctgccctatctggacatcccgttccagcatgccagcccgcgcatcctgcgcgccatgaagcgcccggcgttcgaggacaagacgctggcgcgcatcaagcgctggcgcgaagagtgccccgacctgacgctgcgctcgaccttcatcgtgggctttccgggcgagaccgaggaagacttccagtacctgctggactggatgagcgaagcccagctcgaccgcgtcggctgtttccagtactcgccggtcgaaggcgcgccggccaacacgctcgacaatcccgtgccggacgaggtcaagcaggagcgctgggagcgcttcatggaacaccagcaagccatctccaccgcgcgcctgagcacgcgggtaggccgggagatcgacgtgctgatcgacagcgtggacgaagaaggcgcggtcggccgctccagcgccgacgcgccggagatcgacggctgcgtctacgtcgacagcgagcagccgctgaaggccggcgacatggtgcgggtgcgcgtcaccgactccgacgagtacgacctctggggcgagcggatcgcc

SEQ ID NO: 14745 - DNA, 624 bp, Bordetella pertussis
atgcaactggtaacgagcgcatggactcttgaacgagttatgaaaattcagaacatctgtgtgtactgcggctcgaacagcggccgccaacccgagtacatcgagcacgcgcaaggcttcgcacgcgagctggtcaagcgcggcctgggactggtgtacggcggcgccagcgtcggcatcatgggcgcggtggccgataccgtgatggccgaaggcggccgggtcatcggcatcattcccgaggcgctgatgaagaaggagctggcgcaccgcggcctgaccgaactgcatgtggtgcagtcgatgcacgagcgcaagacgctgatggcgcagaaggccgacggtttcgtcgccctgcccggcggcgcgggcacgctggaagagatcttcgaaatctggacctgggcgcaattgggcatgcaccagaagccatgcggcctgctcaatatcgccggctattacgacctgctgggtcagttcctgaatcacacggtggatgaagccttcatgcgcccgcaacatcgcgccatgctcgccatcgaccacgacccggcagccctgttggaccacttcgccagctacgtcgcgcccacggtttccaagtggatcgcgccgggcgaacac

SEQ ID NO: 14746 - DNA, 987 bp, Bordetella pertussis
atggccagcaacatcgtcaaggcagtccgcatcgaacagcacggcggcccggaagtcctgcaagtcgtcgacgtcgaggtgccgccgccggcggccaatgaagtcaccatccgccagcatgccgccggcctgaacttcatcgacatctacttccgcaccggcctgtatccgcatccgctgccgcatggcctgggtttcgaaggcgccggggtggtcgaggccgtgggcgccgacgtgcgtcacctcaagaagggcgaccgcgtcgcctatggccagagcccgctgggcgcgtacgcccaggcgcgcaacgtgccggccgcgcaggtcgtcaagctgcccaagggcatcggcttcgacgaggccgccgcgctgatgctcaaggggctgacggtgcaatacctgttccgccagacctaccgcctgcagggcaacgagaccatcctgttccatgccgccgccggcggcgtggggctgatcgcctgccaatgggccaaggcgctgggcgtcaagctgatcggcacggtctccagccccgagaaggccgaactggcccgcgcccatggcgcctgggcgaccatcgactattcgcgcgagaacgtggtcgaacgcctgctggagctgaccggcggcaagaaggtgccggtggtctatgacggcgtgggcaaggacacctgggaaatctcgctggactgcatcgagccgcgcggcctgatggtcagcttcggcaacgcctcggggccggtggccggcgtcaacctgggcatcctgaaccagaagggcagcctgtacgtgacgcggccgtcgctgggcgtgcacgtcaatacccacgagaagctggctgccgccgccgacgaactgttcggcctggtgctgaagaagaagatcaaggtacgcatcgaccagcgctacagcctggcccaggccggcgacgcgcagacggcgctggccggccgcaagaccaccggcgcgaccgtcctgaccctggac

SEQ ID NO: 14747 - DNA, 948 bp, Bordetella pertussis
atgaatcgcaacaggcagctttccgacccctcccgcttttccggcatggcagcgggcttttttatggccacgctgggggcggtgttgttttccggcaaggccatcgtggtcaagttcacctaccgctacggcatcgacgcggtgacgctgatcgcgtttcgcatgctgtttgccatgccgttctttgccgcggtggcctggtggcaggcgcgccgcgcggcgcgcggcgaattgccggtgctgagctggcgcgagcgcggccagctgtgcgcgctgggcctgctgggatattacctgtccagcttcctggatttcctcgggctgcgccacatcacggccgggctggagcgcctgatcctgttcctgtcgccgtcgctggtggtgctgctgtcggcgtggtggctgaagcggccggtgacgcgccgccagtggggcgccatgctgctgtcctacgtgggcgtggcgctggtcctgtcgcacgacctgagccagagcggcgcgggcgccgacgtgctgacagggtctttcttcgttttttgctccgcgctcagctattctgtgtacctgatctgttcgggagagctggtcgagcgggtcggggcaacccggctggtgacctatgccatgctggtctcgtgcgtggccagcctgatccagttcttcctgatccacccggcatcggtgctggtccagcccgccgccgtctatggctattcggtgatccacgccaccgtcaacacggtgctgccggtgttcatgctgatgtgggcggttgccctggtcggcgcgcccactgcgtcgctgcttggcatggtggggccggtgtcggtcctgttcctggcggcgtggttcctcgacgagcccattacggtgtggcagctggccggtaccgcgctggtgctggcgggcgtgttcgtcctggccgggcgccgccgcccggccaggcca

SEQ ID NO: 14748 - DNA, 1173 bp, Bordetella pertussis
atgatcatcacatcgctgctcgacacggacctgtacaaattcagcatgatgcaggtcgtgctgcatcattttccggctgcacaggtcgagtaccgctacaagtgccgtactccgggcatcaatctgcggccctatctcgacgaaatacgcgccgaggtgcacgagctgtgccagctgcgcttcaccagcgaggagctggattatctgcgcggcctgcgcttcatcaagagcgatttcgtcgacttcctgggcctgttccatttgcccgagcgttgcatattcatcggcgagggcgagcagcccggcgaaatatccattacggtcaaggggccatggctgcacacgatattgttcgaaataccggtgctggccatcgtcaacgaagtctattttcgtaatacgcgcaggaatcccgattgggaggaaggccgcaagcgcttgcaatcgaagatgaacctggtgctcgacgaccccgcgctggccgatttccgggtcgcggaatacggcacccggcggcgcttctcgaaggtctggcacgaggaaatcgtctcgaccatgaaggcgcgcatgggggtgcatttcgccggcaccagcaacgtgctgctggccatgcggcacggcgtgctgccgctgggcaccatgggccacgagtatctgcaggcctgccaggcgctggggccgcggctgcgcgactcccaggtgttcgcactggaagtctgggccaaggaataccgcggcgatctcggcatcgccctgtcggacgtctatggcatggatgctttcctgcgcgacttcgacatgtacttctgcaaactgttcgacggcgcgcgccacgattcgggcgatccgttcgtgtggggcgagcggctgctcgagcactaccgcaccaatcgcgcggatccgcgcgccaagaccctggtgttctcggattcgctgacatttccgcgcgccatcgagctggcgcgccagttcgccggccgctgcaaggtgtcgttcggcatcggcaccaacctgaccaacgacctgggccacgagcccctgcagatcgtcatgaagatggtgcgctgcaatgggcagccggtcgccaaggtatcggatgcgcccgagaagacgatgtgcgacgatcccgcctatctggcctacctgcgccaggtgttccagcttccgccggcc

SEQ ID NO: 14749 - DNA, 897 bp, Bordetella pertussis
atgaaactcgatcacggcaatctgcgcgcgctggccgcggtggtgcgcgaaggcagtttcgagcgcgccgcggccgcgctgtccgtcaccccctcggccgtttcgcagcgggtcaaggcgctggaggaccgcatgggacgcctgctggtgcagcgcacggttccggcgcgggccaccgacgacggccaggtgctggtgcagctggccgagcaggccgcgcttctggagcacgacgcgctgaaccgcctgggcgtggccgaggacgaagtgccgcatgccagcatcccggtggcggtcaaccacgacagcctggagacctggttcgtcgacgcggccgtgcggttcgcggcgcgctcgcgcgccacgctggacctgcaatcggaggaccaggaccataccgccgccctgttgcgcaagggcgcggtgctgggcgcggtgacgaccctggccgatccggtgcagggctgccgcatccatgccctgggcagcatgcgctacgtggcctgctgcacgccggcgtttcaccagcgctacttcgcccagggcgtcagcgcccgcacgctggccagcgcgccggtgctagtgttcaaccgcaaggacgccctgcaggcgcgctacgcgcaccgcatcatcggccgcgccgcctgggagccgccggtgtggtggctgccgtcgtcgcgggcctttgtgcaagccacgctgggcgggctgggctggaccatgaacccgctgccgctggtgcaggccgagctcgatgccgggcagctggtgccgctgcgcgcccgcgcctgggaggacgtgccgctgtactggcagcattggcgggtaaactcgcaggcgatggaagccttgaccgatgcggtcctggcggccgcccgcgccctggtgcggcggcgc

SEQ ID NO: 14750 - DNA, 831 bp, Bordetella pertussis
atgttgcgatggctacgcggccggggcgccaaggcaggcgaagtggccgccatgcaggcccgcatcccgcccgatctgtggcggcggacgctgcacgcctacccgttcctggcggccctgtccgaggccgagcagcaggccctgcaggcgcgcgcggcatggctgctggcaagcaagaacatcaacggcgcgcacgggctggaaatcaccgatttcatgcgcctgtcggtcgccgcgcaggccgccctgccggtactgaacctgtcgcccaccctgtacgaaggctgggacgaaatcatcatctacccggccggtttctccatccagcgcgagcgcatggacgaggacggcgtcatgcacgaatacatcgaggaggcggtcggcgaggcctgggagggcgggccggtgatcctctcgtggagcgatgcggcgggctccgacggcgccttcaatgtggtcatccacgaattcgcgcacaagctggacctgctggccggccaggccgacgggatgccggcgctggcggcccacccggacatcgacccgcgccagtggcgccgcgtgctggaagacagcctggaccgtttcgccgccgccgtcgaagccgtcgagcgcgcgattccggcgcacgtcgatccggaaagcccgcaggccgatccctggtatgcgcgcctgccgctggacccctacgccgccaccgacgaggccgagttcttcgcggtgagttcggaacacttcttcgtcgagccggagcccctggccgacgccctgccgcagtggtacgccctgctgcgcgcctactatcgccaggatcccctggcccggctggca

SEQ ID NO: 14751 - DNA, 2211 bp, Bordetella pertussis
atgtccgccacgtccgcaccagatacgcctacgccgttcgacgatgcctggcgccagttggccgccgccgggctggacgatgccggccagcggcaactggcgcacgcggcggcctgggcctggccgcgcttcgaggcgcagaaggcgctgaccggcgagccgctggccagccatgccgccggcgcggtgcgcatcctggccagcctgcataccgaccaggccacccgcgtggccgcggtgctggcctcgctgccggcggacctgaacgcccccgcgccgaccctgcgcaacgacccggtggccagcgagttcggggtcgaggtggcgcggctggtgcagggcgcgcgcgcgctgctgcggctgggcatcgtggcgcgccatgccagcgacagcgaggccgaaagcggctcccagaaggagatgcagcgcaagatgctgctggccatggcggccgacctgcgcatcgtgctgatgcggctggcgtcgcggctgcagagcctgcgctggcatgccgagaccaagacgccgtgcgcggccggtttcgcgcgcgagacgctggacctgtataccccgctggccaaccgcctgggcatctggcagctcaagtgggaaatggaagacctggcgttccgcttcctcgaacccgagcgctacaagcagattgcgcacctgctggaggaaaagcgggtcgagcgcgaagccttcatcgccgaggccatcgcccgcatgcaggaggcgctggcgcgggccggcgtggtcgccgaggtaagcgggcggcccaagcacatctacagcatctggaacaagatgcgcctgaaagggctggatttcagccagatgtacgatctgcgggccctgcgcatcatcgtcgacgacgtgcgcgcctgctatacggcgctggggctggtgcacgagatgtggacgccgctgcccgaggagttcgacgactacatctcgcgccccaagcccaatggctaccgttcgctgcacacggtggtgaccgacgcccaggggcgcgcattcgaggtgcagatccgtacccgcgagatgcaccagttcgccgagtacgggatggcggcgcactggcgctacaaggaggccggcgcgcgcggcggccaggtggccgcctccagcgaatacgatcgccagctgtcctggatgcgccagctgctggcctggaacagcgacgtcgaggacgagggcgaggccgcgcgccgtgccgaccagcgtatctatgtgctcacgccgcaggcccgggtgatcgaattgccggccggcgccacgccggtcgatttcgcctatcacctgcataccgacctggggcaccggtgccgcgggacgcgggtggacggccagatggtgccgctgaacacccgcctggccaccggccagaccgtcgaagtcatcgcggccaagtcgggcggcccgtcgcgcgactggctcaatacccagctgggctacctggccagtccgcgcgcgcgggccaaggtgcgcatgtggttcaacgccatcgagctgcagcagcgcatcacccaggggcaggcgctggtcgagaaggagctgcagcggctgggcaagacggcggtcaacctggagcaattggcccagggactggggttcgcgcgcgccgacgacctgtacgtcgccgccgccaaggacgagttcagcctgcgccagatcgacgcggtgttccagcagccggcgcccgtggccgaacccgagccggccgcgcttgcgcatgcgcgcagcgccgacagcgccgagaaaagcggcaagagcggcgtgctggtggtgggcgtggggtccttgctgacccagctggcccgctgctgccggcccgcgccgccggacgagatcgccggtttcgtgacgcgcgggcgcggggtctcgatccatcgcgccgattgcccgagttacaaggcgctggccgagcgcgagccggagcgggtcatcgaggtcgcctggggcaagaccagcgattcgttctacccggtcgatatcagcgtgcgcgcccaggatcgcccgggcctgctgcgcgacctctcggaagtgttcgcgcgccagcggctcaacgtggtcggcgtgaacacgcagagccgccagtcgctggcgcacatggtgttcacggtggaagtgcgcggcggcgagtcgctgcacaaggcgctcgatgccctgggcgaggtggccggggtcacctcggcggcgcgccgc

SEQ ID NO: 14752 - DNA, 1197 bp, Bordetella pertussis
gtgaaaccttacgaccttccggatgcccggggccatttcggcccctatggcggtgtgtttgtggcggaaacgctgatgcacgccctagacgagctgcgcgcggcctatgaccagtgccgcgtcgatcccagcttcatcgacgagttcaattacgagctcaagcatttcgtcggccggcccagcccggtctaccacgccagccgctggtcgcagcgcctgggcggcgcgcagatctggttcaagcgcgaagacctcaaccatacgggcgcgcacaaggtcaacaattgcatcggccaggcgctgctggcgcggcgcatgggcaagccgcgcgtcatcgccgagaccggcgccggccagcacggcgtggccacggccacggtggcggcccgctatggcatggaatgcgtggtgttcatgggcagcgaggacgtgcgccgccaggcctccaacgtctatcgcatgaagctgctgggcgccacggtggtgccggtggactcgggctcgtgcaccctgaaggacgcgctgaacgaagccatgcgcgactgggtcaccaacatcgagaatacgttctacatcatcggcacggtggccgggcccgacccctacccgcgcatggtgcgcgacttccagaccgtcatcggccaggagtgcctgacccagatgcccgaagtcatcggccgccagcccgactatgtggtcgcggcggtgggcggcggctccaacgccatgggcattttccatccctacatcccgtacgagaacgtgcgcctgatcggcgtcgaggcggcgggcgagggcatggaaaccggccgccatgcggcgtcgctggcggcgggccagatcggcgtgctgcacggcaaccgcacctatgtcatgcagaatgccgacggccaggtgcaggaaacccattcggtgtcggccgggctggattatcccggcgtggggccggagcatgcatggctcaaggacagcggccgcgccgagtacgcgggcatcaccgacgacgaggcgctggcggcgttccacgattgctgccgcatcgagggcatcatgccggcgctggagtccgcgcacgccattgcgcaggccgtgaaaatgacgcctgcgctttccaaggacaaggtcatcctggtcaatctgtccggccggggcgacaaagacatgcacaccgtggccgagcgcgcgggccttcagctc

SEQ ID NO: 14753 - DNA, 1635 bp, Bordetella pertussis
atgaccatgaacgaccaagagaccctgctttcggtacgcgacctgaccattgcgctgccgcgcggcggcgaccgcgaatacgccgtgcgcgatgtgtcctacgacatccgcgtcggggagatcctgtgcatcgtcggcgagtccggctcgggcaagtcgatgagcgccaacgccatcatgggcctgctgcccgactacctccagccgcagggcggccagatcctgttccgcggcaaggacctgctgcggcaggacgaggccaccctgctgtcgatgcgcggcaaggacatggccatgatcttccaggagccgctgtcggccctcaatccgctgatgaccgtgggcgagcagatcggcgaagtcatgcgcgtgcacgacgcctaccccggtccgcaacgccagcgccgcgtgctcgagctgctggcgttcgtcggcctgcccgacccggccgtcctgtgcgacgtgtacccattccgcctgtccggcggccagcgccagcgcgtgatgatcgccatggccctggcgctcgagccggccctgctgatcgccgatgagccgaccaccgccctggatgtcaccacccaggcgcagatcctcgccctgatcgcccggatccagaaggaaaagggcatgggcgtgatgttcgtcacgcacgacttcggcgtggtggccgagatcgcccatcgggtggcggtgatggaacaaggcatcctggtcgagcaaggtccggccgaggaagtcctcaaccgcccgcaacacccgtatacgcgccgcctgatcgccgccgtcccgcaccggcgcgccgacgcccgccccccggtggcgcaggacgcgccggtactggcggtcgacaagctgtgcaagacctatgtcaccggccatggctggttcggcaagaagcgggtggtgcgcgcggtcgacgaggtcagcttcgaggtgcgccgcggcgaaacgctgggcatcgtcggcgaatccggttcgggcaagtccaccatcggcaaatgcctgctcaagctgatcggcatcgacggcggcaagctggtgttcaacgggcgcgatatcgccggattgtccgaaagccagttccggccgctgcgcaaggacatccagatgattttccaggatccgttcgcctcgctcaacccgcgccagaccgtgggccgcatcatcagcgacggcccggtcgccaacggcaagacgcgcgcccaggccgaagcccgcgcgcgcgaactgctgaccctggtggggctcgatccctcggccttcgaccgctatcccaaccagttctccggcggccagcgccagcgcatcggcatcgcgcgcgccctggcgctggagccgcaggtgctggtggccgacgagtcggtttcggcgctggacgtgtcggtgcaggcgcaggtgctgcagctgctgcacgaattgcagcagcgcctgcgcatcgcgctgatcttcatcacccacgatctgcgcgtggcggcgcagatctgcaatgccgtgctggtcatgcaccgcggcaaggtggtggagtacggcacccccgcgcagattttcgaccagccgcagaacccttatacgcagcagttgatcgccgccgttcccggccagcactgggacccgaccaaggcgcagaccgcc

SEQ ID NO: 14754 - DNA, 876 bp, Bordetella pertussis
atgagctggatcgagaaactcctgcctccgcgcatcaacaagaacagcgacagcggcgcgcgtcgcgtgccggaagggctgtgggtcaaatgtccctcgtgcgaatcggtgctgtacagcgaagacctcgccgccaatctgcatgtgtgtccgaaatgcgaccaccacatgcgcatcggtgcgcgcgcgcgtatcgactccctgctcgatatcgagggccgggtcgagatcggccagaccacccgctcggtcgataccctgaagttcaaggactcgcgcaagtatcccgaacgtgtccaggaagccatgaagcagacgggcgagaccgacgcgctggtcgtcatgagcggttcgatccgcggcgtgtcggcggtgctggcctgcttcgaattcgagttcatgggcggttccatgggctcggtggtgggcgagcgcttcgtgcgtggcgtgcaggccgcgctggagaacaagacgccgttcatctgtgtggccgcctcgggcggcgcgcgcatgcaggaaagcctgctgtcgctgatgcagatggccaagaccaacgccatgctgacgcgcctgtcggccgcggggctgccgttcatcagcgtgctgaccgatcccaccatgggcggcgtgtcggccagcttcgccttcgtgggcgatgtggtgattgccgaacccaaggcgctgatcggtttcgccggcccgcgggtgatcgaacagaccgtgcgcgagaagctgcccgaaggcttccagcgcgccgagttcctgctgaagacgggcgccatcgacatggtggtggaccggcgccagttgcgcgaggaaatcgcccgcctgctggccctgcttggcaacgagtcggccgacatcgtggctgccgcc

SEQ ID NO: 14755 - DNA, 1779 bp, Bordetella pertussis
ctggacaagcgcatcctgatcctggatggtgccatgggcacgatgatccagcgctacaagctgggcgaggccgatttccgtggcgagcgcttcgccgagcaccacaaggatctcaagggcgacaacgaactgctgtcgctggtgcgcccggacgtgatcgcggaaatccaccggcagtacctcgaggccggcgccgacgtgatcgagaccaacaccttcggcgccacgtcgatcgcccagggcgattacgacctgccggagctggcctacgagatgaacctggagtcggcccgcctggcgcgcgccgcctgcgacgcctacagcacgcccgagcatccgcgcttcgtggccggggcgctggggccgcagcccaagaccgcgtccatctcgcccgacgtcaacgacccgggggcgcgcaacgtcaccttcgacgagctgcgcgcggcctatgtcgagcagctcaatggcctgctcgacggcggcatcgacatcgtcctgatcgaaaccatcttcgatacgctcaacgccaaggcggccatcttcgccgtcgaggaagcgttcgaggcgcgcggcgtgcgcctgccggtgatgatttcgggcaccgtgaccgatgcgtcgggccgcatcctgtccggccagaccgtcgaggcgttctggaactcggtgcgccatgcgcggccggtcaccatcggcctgaactgcgcgctgggcgcggcgctgatgcgtccgtatgtggccgagctgtccaagatctgcgacacctatgtgtgcgtctatcccaacgccggcctgcccaatcccatggccgagacgggctttgacgaaacgccggccgatacctcggccctgctggaagagttcgcccaggccgggctggtcaacatggccggcggctgttgcggcaccacgcccgagcacatccgcgccatcgccggcaaggtggccgcgctgacgccgcgcgcggtgcccgaggtgccggtcaagacccgcctgtcgggcctggaggcgctcaacatcgacgacgagactctgttcgtcaacgtgggcgagcgcaccaacgtgacgggcagcaagatgttcgcccgcctggtccgcgaggagaaatacgacgaggcgctggccgtggcgcgccagcaggtcgagaacggggcccagatcatcgacgtcaacatggacgaggcgatgctggactcggtggcctgtatgcaccgcttcctcaacctgatcgcgtccgagcccgacatcgcgcgggtgccggtgatgatcgacagttccaagtgggaagtgatcgagaccggcctgaagtgcgtgcagggcaaggccgtggtcaactcgatctccatgaaggaaggcgaggagccgttccgccatcatgcgcgcctgtgccgccgctacggcgcggccatggtggtcatggccttcgacgaacaggggcaggccgactcgctggagcgccgcaaggaaatctgcggccgcgcctaccgtatcctggtcgaggaagagggcttcccgcccgaggacatcatcttcgatcccaacgtgttcgcggtggccaccggcatcgacgaacacaatcactacgccgtcgatttcatcgaaggcgcgcgctggatccgcgcgaacctgccgcatgcccgcatttcgggcggcatctcgaacgtcagcttctcgttccgcggcaacgagccgatgcgcgaggcgatccataccgtcttcctgtactacgccatcgaggccggcctgacgatgggcatcgtcaacgcgggccagctgggcgta

SEQ ID NO: 14756 - DNA, 1287 bp, Bordetella pertussis
gtgggcccgcgcatcatcacccacggtgaaggcgtatacgtgttcgacgaccagggcaaccgctacctcgaaggaatggccggcctgtggagcgtcgcggtgggtttcggcgagcagcgcctggtcgaagccgcggcgcgccagttccaggaactgccctactaccatacgttcacgcacaagtcgcaccccagcgtcatcgcgctggccgagcgcctgatcggctacacggacgggcgcatggcccaggcgttcttcaccaactccggctccgaggccaacgacacggtcgtcaagctggtgtggtactacaacaatgcgctgggccgccgcgacaagaaaaagatcatcgcgcgccagcgcggctaccacggcgtcacggtcgcctcggccagcctcaccggcctgcccggcaaccacaaggacttcgacctgccgctgccgcagatccgccacaccgcctgcccgcactactaccgctacggcctgccgggcgaaaccgaagaagatttcgccacccgcatggccggcgaactcgaggccatgatcctgcgcgaaggcccggacacggtggcagccttcatcggcgaacctgtcatgggcgccggcggcgtcatcgtgcccccgcgcacgtactggcagaaaatccaggcggtgtgccgcaagtacgacatcctggtcatcgccgacgaagtcatcaccggcttcgggcgcctgggccagcgcttcggctcgcaggtcttcgacatcgagccggacatcatggtgctgtccaagcagatcacctcctcgtaccagccgctgggcgcggtgctgctcaatacccgcgtggccgacgtggtggccgaacacagcggccgcctgggcactttcgggcatggctatacggccagcggccacccggtcgccaccgcggtggcgctggagaacctgcgcctgatcgacgaacgcggcctgatcgagcacgccgccgaaatgggcgcgctgctgcaccaggagttgcaggccctgtccagccatccgctggtgggcgaggtgcgcggcgtcggcctgatcgccggcgtggagctggtggccgacaaggccacgcgccagcccttcgacccgctcggcaaggccggcggctatgcctacgagcgcgcgcacgaccatggcctgatcgtgcgcggcatccaggacaccgtggccttctgcccgcccctgatcatcaccgccgaacaggtgcgcgacatggtcgcgcgctttgcccgcaccctggacgacgtcgccgcccacgtcgcgcaaggc

SEQ ID NO: 14757 - DNA, 1422 bp, Bordetella pertussis
atggccgggcaagcgtgcagtgtgacgccggccgccggtcgcgtccagtgtccggctaccatatcggtcctgccgtcagaaacgtttcatatgccttcctctgtcgattcctccgtcctggccccgcccctgtcggccgtgctgctgggcgccgccgccgccgtgcaggcggtgcgcaagggacgctcgctgaccgatgcgctggccgagacgccgccggcgctgcggccggccgtgcaggcgatcagtttccacgccatgcggcagctgggctgggccgacgccgtggccgaaacgctggtgcggcgctcgcccggacccttgttcgacgcgctgctgcgggtggcgctgagcctgctgcgtcccgcgcccggcgccgcggcgcagcccggcgcgccgcagtatgcgccgcatacggtggtcgaccaggcggtgacggcggcggccggccagcgcaagctggccgcctacaagggcctgctcaacgccagcctgcggcgcttcctgcgcgagcgggaagccttgcaggacagcgtggccgagcgccccgcggcgcgctggaaccacccgcgctggtgggtggagctgctggagcgcgcctatccggaccaatggcgcggcatcctggccggggccaatgtgcccgcgccgctgaccctgcgggtcaaccgccgccgcgccacggtagagcaggcgcgccaggcgctggcgcaggccggcgtggccgccgcgccggtgggcgatgccggcctggtgctggccgagccgcgcccggtgccgcagttgccgggctatggcgcgggctggtggtcggtgcaggatgcaggcgcgcaactggccgcgccgctgctggcgccggccgacggcatgcgagtgctggacgcctgcgccgcgccgggcggcaagaccgcccacctgctggaactggccgatatcgacctgctggccctggacgcggacgtgcaacgcctggagcgggtggaccagaacctggaacgcctgggcctgcgcacgccgcgggtgcggctggcggccgccgacgccagcgacctggacgcctggtgggacggccggcccttcgatgcggtgctggccgacgtgccgtgcaccgcgtcgggcatcgtgcgccgccacccggacatccgctggctgcgccgcgccaaggacgtgccgcgcaccgccgccctgcaggcgcgcatcgccgacgccctgtggcgcacggtcgccccgggcgggcgcctgctttacgtgacctgctcggtgtttccggccgaagggcgcgagcaggccgaggccttcgcgcgccgccatgccgacgccgcgcccctggacgcgcccgggcagctgctgcctgttgccatcgatgcaacaccgcaggcgcaacacgacggttttttctatgccttgtttgccaagcggacc

SEQ ID NO: 14758 - DNA, 2238 bp, Bordetella pertussis
ctacgccttgccctggtggtcggcggcgtcagcggcctggccctgctgggcctgctggcctggtccaccggcaatgcgtcacgctttgcgcgctattacgacaccctgctgattctcaacggtattttcgccttcgcgctgttcgtctgggtggtggcgctgaccgtgcggctggcgcgccagatccgccggcgccagttcggcgcccgcctgacggcccgttttgcgctggccttcgccctgatcggggtggtgccgggcgcgctgatctacaccctgtcggtgcagttcatgtcgcgctcgatcgagtcgtggttcaacgtccgcgtcgacagcgcgctggagtcgggcctgaatctgggccgcgccgcgctcgactcgcagctggccgacatggatgtgcgcgcccgcgccatggcggccgagttgaacaacatgtccgataacgacattccgctggcgctgacgcggctgcgcgaggccaacggggcgcaggaggccaccgtattcaccggcagcgggcggatactggccttctccaccaatacctacgggcagctgctgccgcccagcttgcctgccaccttgctgaaccagctgcggctggcgcgcggctactcggccgccgaggccgacgacccggcgattccgggcgccgagggcggcctgcacctgcgcgtggtgatcccgttgtcggcgccggcgcgcttcgacggcatcctgggcggctcggccgagccgcgctggctgcaattgatgcatgccgtgcccgaccagatcgcccataacgccaaccgggtgcagcagggctttcgcgactaccaggagctggcgctgtcgcggctgggcctgcgcaagctgtacggcatcaccctgaccctggccctgctgctggcggtgttcgccgccatcgcggtggcgctgtcgctgtccaagcggctggtgcggcccctgctgcggctggccggcggtacccaggcggtgggcgtgggcgatttccggccgctgcccgagccgcccgaacgcgacgaagtcgggcaactgacccgctcgttcaacgccatgacgcgccagctcgaggaggcgcgccagatggtggaaagcaaccggcgccagctggagcgctccaacgtctacctggaaagcgtgctgtccaacctgtcgtccggggtgatcgccttcgacgaagggttccgcgtcaccacggtcaaccagggcgcccagaccattctgcaggccgacctgcgctcggtcatcggccggccgctggaaaccgtggacggcatgctggagttcgcccaggtggtgcgccaggccttcgcggcccacgcggcggtgggctcggaacgcctgcactggcagcagcagttcgagattaccccggggctggacgaaaccggcgggcagccggtgacgctgctggcgcgcggcacccacttgcgcgtggacggccgcggcaacggctacctggtggtgttcgacgacatcaccgaggtcatttcggccaaccgtaccgtggcctggggcgaggtggcgcgccggctggcccacgaaatcaagaacccgctcacgccgatccagctgtcggccgagcgcctggccatgaagctggccgaccggctgcagccggccgacgcgcagatgctgatccgctccaccaacaccatcgtcaaccaggtgggctcgctcaagcagatggtcgacgacttccgcgagtacgcccgcacgccgccggctgtcatgcagcgcatcgacctcaatgcgctggtggccgacgtgctgtcgctgtatgggtgggatccgggcgacggcggcggccgcggcgcggcgcgcgtgctcaatctggacgtggagctggcgcccggcctgccggacatcgagggcgacccgacccagctgcgccaggtcatccacaacctgctgtccaacgcccgcgacgcggtcgccgagcagggcggcgaggggcgcgtgaaggtcaccacgcagatcgtgcaaagcgagcagcccgacggcgggcagcagcgcgcggtgcgtttcaccgtggccgataccggaccgggctttccgccgcaggtcatgcagcgcgccttcgagccctacgtgacgaccaaggcgcacgggactgggttaggattagccattgtgcgcaagatcattgaagaacatggcggccgcatcgatctcgccaatcgcaaggaagggggcgcgcggatctccatattgttgacccgcctggct

SEQ ID NO: 14759 - DNA, 1377 bp, Bordetella pertussis
atgaagatcctcatcatgggggcggggcgcgttggcaccagcgtggccgaaaacctggtgtccgagcagaacgacatcacggtcatcgataccgacgtcggccagctgcgctacctgcaggatcgcttcgacctgcgcgtggtgcagggcgacggcatccaggtatcggtgctggagtcggccggcgccgacgacaccgacctgttcatcgcctgcgcggcttccgacgcggccaacctggtggcgtgcaagatcgcgcgcgaagtcttcaacgtgccgcgccgcatcgcccgcatccgcatgcccgagttcgccgaccatcccgagctgatgagcgacgagggtttcgccatcgacgcgctcatcagtcccgagcgcagcgtcaccacctacctgcacagcctgatcgagtttcccgaggcgctgcaggtggtcgagttcgccggcgggcgcgtcagcgtcatcacggtccgggtgggccacggcagtcccatggcgcatcacccggtcgacgaactgcgcgaggtctggccggacgtcacggcccgcatcgtcgacgtgctgcgcgacggacgcccgctgcatgccgggacgggcacggtggtggcgccgggcgacgaggtcgtgctggccgtcgacacccggcacgcgcggcgcgctgtgcgccagctgcgcgaggccgagaagaccgtgcaccgggtcatgatcgcgggcggcggcaacatcggcctgcggctggcgcgccagctggccgaggaaggctacagcgtgcgcatcatcgagcacgatgccaagcgctgcgaatacctggccgccgagctgcccgacaacgtactggtgctgcatggcaacggcaccgacgaagcgctgctcgagcgcgagaatatcgaggacatggacacctggctggccctgaccagcgacgacgaggacaacatcatgtcctcgctgctggccaagcggctgggcgcgcgcaaggtcatcgccctgatcaaccggcaggcgtatggcgaacttatgcagggcagccatatcgacgtggcggtttcgccgtcgcaggccaccatgagcgagctgctgcggcatgtgcggcgcggcgacgtggtggcggtgcaccggctgcgccagggggtggccgaggccctggaggccgtcgcccatggcgaccgctccaactcgcgggtggtcggccgcgcggtgggcaagatcgggctgcccaagggcgccagcatcggcgtgctggtgcgtggcgacgagatcatcgttcccgacgccgacaccgaaatccagtcggacgaccatgtcatcgttttcgtgccttcgcgccggcagatgccgcgcgtcgagaaactgttccaggtgtcggcctcctttttc

SEQ ID NO: 14760 - DNA, 1467 bp, Bordetella pertussis
atgaagcgtttgctggcgaccttttacgtgctgggtctgaccatggtggtgttcgcgctcaccatggtgattccgctggcggtcgcctacatcggccaggacgccggcttcaccgcctttctcgaaggtttcctgctggcgctgggcatcggcgcgggcacctggctggcgacccgccgcggccgcagcgagctgcacgcgcgcgacggcttcctgctggtgtccaccgtatgggccgcgctgcccgcgctggcggccatcccgctgctgctctactacgacgacgtgggcataccgctgtcgttcaccgatgcctatttcgaggccatgtccggcctgaccaccaccggcgccacggttctgagcgggctcgacgccctgccggcctcgatcaacctgtggcgcgccacgctgatctggatcggcggcatgggcatcctggtgctggcggtggccatcctgcccttgctgggcgtgggcggacaccaggtggtgcgggccgagacgcccgggcccatgaaggacgagcggctcacgccgcgcatcgccagcaccgccaaggcgctgtacgcggtgtatttcggtttctccatggtatgcctgctggcctatcgggccgtcggcctgtcgtggttcgacgcctggtgccatatggccacgaccatggggctgggggggttctcgacttatgacgatggcttcgcgcatttcgactcgctgtcggtcgagctggtggccatcgtcttcatgaccatctcgggcatcaacttcgccacccacttcaacgcgctgcgccagcgcaactggcgcgcctacgtggtgtgcccgcagaccattccgtacctcacggtcatgctgggcgcgggcctggtgatctccgtattcctctatatcaagggcgtatacggagacccctgggaggcgttgcgctatggcatgttcaacaccatttcggtggccaccacgaccggctacgccaatgtggactacgcgtcctggccgctgttcgcgccgctgaccatgctgttgctgtcggcgttcgtgacctcggccggctcgaccggcggcggcatcaagatgatccgcatcatcctgctggtcaagcaggcgcgcaacgagctggtcaccatgctgcacccccacgcggtcagcccggtgcgcatcggttcgcgcgtggtggaccagcgcgtcatggcgtcggtgctcgccttcatgctggtgtacggcctgtcggtgggcgtgctgagcagcctgctgctgctgtcagggctggacctgatcacggccttttcggccgtcatggccatgatcaacaataccgggccggggctggggccggtggggccgatgggcaacttctcggtactgaatgatttccagacctgggtatgcacgttcgcgatgctgatcgggcgtctcgaattgctgacggtgctggtgctgttcacgccgctgttctggcgcaaa

SEQ ID NO: 14761 - DNA, 891 bp, Bordetella pertussis
atgtccgccgcccgcctcgccctgcgcctgatcgctctgaccgtggccgcgctggccgcgtcgggcgcggccggcgcggcgcccgtgcgggtggtcgacgaccagcggcgcactgtcgagctggcccagccggcgcgccgcgccatcgcgctggcgccgcacgccgcggaactggtctacgcggccggcgccggcgaccggctggtcggcgcggtgcgcggcaccgactacccgcccgcggcgcgccagttgcccagcgtaggcgacgccatgcagcccgaccccgaacgcatcgccgtcctgcgccccgacctgctgatcggctggcaacccgccgccggcgcgccgctggccccgatcgcggcccggctgggcgcggcgctgtactacagcgacccgcgcaccctggccgatatcccggccgccatcgagcaactgggacgcctgttcggcaccgaagcgcaggccgacgccggcgcggccgccctgcgcgcgcgcctggcggccctggccgcgcgctatgccggcaaggcgccggtgcgggtattcgtgcaggcgggcaccgatccgctgttcacgctcaacgaccacagcatcgtcggcgacgtgctgcgcctgtgcggcggggtgaacgtctacggccaggcccccatcctggcgccccaggtcaccctggaaggcgtgctggccgcgcgcccggacgccatcgtggccggcgtgaccgggaccgccgacgcggccgccaccctgcgggcctggcagaccgccggcgtgccggccgccctgcgcggccatgtctatggcatcgacgccgacagcctgtaccgccccaccggccgcctgatcgacgccgccgagcagctgtgcgcgcgcctggacgaggcgcgcggc

SEQ ID NO: 14762 - DNA, 873 bp, Bordetella pertussis
gtgctttatcattggccctaccgccgcaaacactcttgcgcacgcgcgcctgcgcgttgcgcctaccgaagcatcgccatgaccactgaagataccctcaccatcgccggccgcagctaccaatcgcgcctgctggtcggcaccggcaaataccaggatttcgcgcagacgcgcgccgcgctggacgccagcggcacccagatcgtcaccgtcgccatccgccgcaccaatatcggccagaacccggatgagccgagcctgctcgacttcgtgccgccgtcgcagttcacgctgctgcccaacaccgccggctgctacagcgccgacgatgcggtgcgcacgctgcgcctggcgcgcgaactgctcgacggccatgacctggtcaagctggaggtgctgggcgacccgcagaacctgtttcccaacatgccggaaaccctgaaagccaccaagacgctggtcgacgaaggcttcaaggtcatggtgtattgcaccgacgacccgatccagtgccgcatgttggaagacctgggcgcggtcgcggtgatgccgctggcctcgctgatcggctcgggcatgggcatcctgaacccctggaacctacgcctgatcatcgatcagagcagcgtgccggtgctggtcgacgccggcgtgggcaccgcctcggacgccgccatcgccatggagctgggctgcgacggcgtgctcatgaacaccgccatcgccggcgcgcgcgatccgatcctgatggccagcgcgatgcgcaaggcggtcgagggcggccgcgaggcctacctggccggccgcgtgccgcgcaagctgtacagcgcggcccccagctcgcccaccgaaggcctgatcgccgcagccaaa

SEQ ID NO: 14763 - DNA, 486 bp, Bordetella pertussis
atgtcttctgcccgtttcgaatccaagatcctgtcgcgcgccgagctggttgccgcggtggccgctggccgtctgccgcgtccgctggtgttcaccaatggcgtgttcgatatcctgcaccgtggccacgtcacttatctggaccaggccgcccagctgggcgcgaccctggtggtggcggtcaatacggatgagtccgtgcggcgcctgggcaagggcagcgacaggccgctcaatcaggtgcaagaccgcgccgcgctgctggcggccctgggctgcgtcgacgcggtgacttcttttcacgaggacacgccgcaggaactcatcggcgagctgcgtcccgacctgatcgtcaagggcggcgactacgatatggacaccctgccggagacggccctggtcaagagctggggcggccgcgcggtggcgattccgttcgatttcgagcgctccaccaccgcgctgctgggcaagatccgccagggc

SEQ ID NO: 14764 - DNA, 468 bp, Bordetella pertussis
atgaaactcatcgtcgccgcggtcggcacccgcatgcccggctgggtcgaaaccgcctgggatgactacgccaaacgcctgcccgccgactgcgcgctcgaactgcgcgaaatcaagcccgaaccgcgcaccagcggcaagacgccggcgcaaatgatggccgccgaagcgcgccgcatcgaaacggcgctgccgcccggcgtgctgcgcatcgcgctcgatgagcgcggccgcgacctcaccaccgtggcgctgtcgcagcaactcgaaaaatggcgcgccggcgggcgcgacgtcgccttcctggtgggcggccccgacggcctggacgccgccctcaaggcctcctgcgaaggcctgctgcgcctgtcctcgctgacgctgccgcaccccatggtgcgtgtgctgctggccgaacagctctaccgcgcctgggccatcatgaccaaccacccctatcaccgcgcc

SEQ ID NO: 14765 - DNA, 531 bp, Bordetella pertussis
atgccagaaccagacaagcaagcaacgagaaagaagcgcacaacgtcctccctgacggacagtacggtgttcgatcctgccaagcaggtgctgtggtcgcggcccggataccttgtgcggcgcctgaaccagatccactacgcgctgttctacgaagagtgcaagacgcagaacgtcacgccggtgcaatatggcgtgctgacggccctgtcgctgagcccctggctggaccagaccgcgatcggcatggagctggggctggaccgcaccaccaccgccgacgtcatcaagcggctgcaggagcgcgggctggtcgagcgccgcgtcaaccccaacgacaagcgttcgcgccaggccgtgatcacgcaggaaggcctgcgcatcatggggctgctgcaaggcggcatggcgcgcgcgcagcaacggctgctcgagcccctgtcgccgtgcaaccgcgaaatcttcatgaagctgctgtcgacgctggtcgacgccaacaatcagtacagccgcacggcgctcaaggccatg

SEQ ID NO: 14766 - DNA, 960 bp, Bordetella pertussis
atgacaaaagtgcgcaagatcgccttcgaggagcatttcacggcggtcggctttggcgattactccaaggcattcgtacagcatctcgatccgggctttgccgccgaactgggcgcgcgcctgaccgacttcggcgcggggcgcctggccgaaatggacgccgccggcatcgactatgcgatcctgtcgcagacaggcccgggcgtgcagggcgagcccgacgccgccgtggccttgcgccgcgcgcgcgagaacaacgatttcctggccgaacgcattgcccggcatccggaccgcttcggcggattcgcgaccctgcccatgcacgatcccaagaccgccgccgccgaactgacgcgcgcggtgcgcgaactgggcttcaagggctcgctggtcaatggccacaccaacggcgtgtattacgacgaccccgcctacgatgcattctgggagcagatgcaggagctggacgtgccgctgtacctgcatccgttcgacgcctacgtgctgccgcatgcctacaagggccacccggaactggccggcgcgacctggggctggggcgtggaaaccggcacgcatgcgctgcggctgctgttcggcggcgtgttcgaccgtttcccgaagctgaagatcatcctgggacacatgggcgaaggcctgccgttccagcgctggcgcttcgacagccgtttcgccgcctacccgtacggcgtcaagctgcagcgcgcgccgtccgagtacatcggctccaatatcctgatcacgacttcgggcgtctgttcccacccgacgctggtcggcgcgatcgccgagatgggcgccgaggccgtgatgttctcgatcgattatccgtacgagtcgaccgcgctggcggtcgagttcatcgaatccgcgccgttggacgcggcgacgcgcgacctggtctgctacggcaacgccgcgcgcctgttcaaactg

SEQ ID NO: 14767 - DNA, 1260 bp, Bordetella pertussis
atggacgagatccaatccatcgtgatcgtgggcgcgggccaggctggcgcggtcgccgcggccagcctgcggcagctgggctatcgcggcgggctgaccctggtcggccaggaggcccacccgccctacgagcgcccgccgctgtccaaggcggtcttgcagggtacggccacgcatgccgaggccgccgtgcaccccgccggcttctatgccgagaacgacatcgcgctgcttaccgagacggcggtcgccgcgctcgatccggccgcgcgcacggtgcggctggccgacgggcgcacgctgccatacgaccgctgcctgctggccaccggcggccatgcgcgcgaattgccggccctgccgcgcggacgcgccggcgtgcactacatccgcacgctggacgacgccctggacctgcgcgcggcgctgcgcccgggcgtgcgcgcagccgtcatcggcggcggctttctgggcctggaggtggcctccaccgcccgcgaactgggcgccaaggtcacggtaatcgaaaacgggtcccgcctgctcgagcgcgccctgccggccatcgtgtcggactggctggccgaacgcgtgcgcgccagcggcgtcgacctgcgcctgggcggcgcgatcgccgccatcggcgacggcccgccctatgccatcaccctggccgacggtacgcaggtgaacgccgacctgatcgtggtcagtatcggcctggcgcccgaggtcacgctggcgcggcaggccggcctgccgctggacgacaacggcgggatttgcgtcgacagccaggcgcgcacggccgacccccaggtctatgcggccggagactgcgccagccagccgcgcgcctgcctgggcacggccgcgcgcttcgaatcgtggcagaacgccaacgaacaggcgcgcgcggcggccgcggccatgctgggcctggcgcccgccgccgaaccctatccgtggttctggaccgaccagtacggctgcaacatccagatcctgggcttgccgcaacccggcctgcgctatgtatgccgcccgcaaacggacccgcaggccgcgccgcgcgtgctgtggatcggcttgcgcgatggcgtgccctgccatggcatcgccgtcaacgcgggcggcgacctgcgccagctgcgggtgctgttcgaacgcggcatccccgtcgatccgcaccgcctggccgatccggccgaagcgctcaaacccctggtcaaggcctggcaggccgccatcgccgtggcc

SEQ ID NO: 14768 - DNA, 1188 bp, Bordetella pertussis
atgatcagactgcgcaatttcctgcgccgcatcggccgctacttcccgcccaattggtggctggcggcgctggttgccatcgacggctatctgttcgtgcgccccgtgctcgggcgcgcggtcgattaccccatggactactggctgtcgttcgacagctggcgcgatgcgatggacgccgtcgggctgctgcagatcccgcgcgtcatcctcggcgccggcctgctgctgatggcggccgggctggtgctcaaggcgcgtatcgcctgggctttctcgctggtgttgctgggcgccatcggcgtggtggccgggtgggacggcgggcatggcctgctgctggcctacacgggcgtgctgatcgcggcgctggtgtgcttctggcgccgcttcgatcgcgccagcctggcggccggcagcctgttcgccgtgatcagcatcacgtcgctgctgatctacgccgtgttcggcacgctctacctgggcgccgagttctcgcccaaggtcgagagccccgccaccgcgttctatttctccatcgtgtcgatgtccaccgtgggctatggcgatatcactccgcagacgaccgccgcgcggctgttcgcggcctcgatcatcatcctgggcatcacggtgttcgccacgtcgatcagcgccatcgccgggccggtgatcggcggcaatctcaaacggctggtccgaggacggatatcccacgccatgcgcaaacatcacatcatcatcgccggcgccacgccgctggcgcaaagcgtctacgccggcatgcgcgaacgcggcaacaacgtcaccgtcgtggtcgccccgggcatcgcgcacaattatccggaggatgccgacctggtgaccggcgatccctccaacaccgccgtgctggccgaggccggcgccgcccatgcgcgctatgtgctggcgctgcgcgacgacgacgccgacaacgccttcatcgtgctggccgccaaggaagtggccggcccggacaccaagacggtggcggtggccaataccgccatgcacctggccaagatccgccgggtacagcccgacatggtgttctcgctgcagctgctgggcgccgagctgctggcccgcacgctcagcggcgagaccatcgacaacgcgttgatcaccgatctgttcttcaccaaggccacgccttcgggcgcggcc

SEQ ID NO: 14769 - DNA, 375 bp, Bordetella pertussis
atgcctaccattagccagctcgtgcgcaagccgcgcgaagtcagcatcatcaagagcaagagccccgcgctcgagaactgcccgcagcgtcgcggcgtttgcactcgcgtctacaccaccacccccaagaagccgaactccgcgctgcgtaaggttgccaaggtgcgtctgaccaacggttacgaagtcatttcgtacatcggcggtgaaggccacaacctgcaggagcactcggtggttctggtgcgtggcggtcgtgtcaaggacttgcccggtgtgcgttatcacatcgtgcgcggttccctcgacctgcaaggcgtcaaggatcgcaaacaggctcgttcgaagtacggcgccaagcgtccgaagaaggcc

SEQ ID NO: 14770 - DNA, 519 bp, Bordetella pertussis
atggccgtgtcacgagacgcggttcaactgaacagacacaaggaagcaaaaatgccccgtcgtcgcgaagtacccaagcgcgagattctgcccgatcccaagttcggcagcgtcgaactcgccaaattcatgaacgttgtgatgctggacggcaagaaggccgtcgccgagcgcatcatctatggtgccctcgagcaagttcaggtcaagaccggcaaggatgccatcgaagtcttcaacctggccatcaacaacatcaagccgatcgtcgaagtgaagagccgccgcgtgggcggtgccaactatcaggtgccggttgaagtgcgccccgtgcgccgcctggccctggctatgcgttggctccgtgaagccgccaagaagcgtggcgagaaatcgatggatctgcgtttggctggagaactcatcgacgcctccgaaggtcgtggcgccgcgatgaagaaacgcgaagacacgcacaagatggccgaggccaacaaggccttcagccatttccgctgg

SEQ ID NO: 14771 - DNA, 2100 bp, Bordetella pertussis
atggcccgcaaaaccccgatcgagcgctatcgcaacattggtatctctgcgcacatcgatgcagggaaaaccaccaccaccgaacgcatcctgttctacaccggcgtcaaccacaaacttggcgaaacccatgacggctcggccaccatggactggatggagcaagagcaagagcgtggcatcaccattacgtcggctgctacgacggcgttttggcgtggcatggccggcaactatcccgaacaccgcatcaacatcatcgacaccccgggacacgtggacttcaccatcgaggtggagcgttccatgcgcgtcctggacggtgcctgcatggtgtactgcgcggtgggcggcgtgcagccgcagtccgaaaccgtgtggcgccaggccaacaagtatggcgtgccccgcctggccttcgtcaacaagatggaccgcaccggcgccaacttcttcaaggtctatgaccagctgaagacgcgcctgcgcgccaaccccgtgcccatcgtgatcccgatcggcgtcgaagactcgttcaccggcgtggtcgacctggtcaagatgaaagcgatcatctgggatgaggccagccagggcaccaagttcgaatacggcgacattccggccgagctggaaggcacggccaacgagtggcgcgagaagctggtggaagccgccgccgagtcgtccgaggaactgatgaacaagtacctcgagaccggctcgctggacgaagacgacatcaacgtcgcgctgcgccagcgcaccatcgctggtgaaatccagccgatgctgtgcggcaccgcgttcaagaacaagggcgtgcagcgcatgctcgacgccgtgatcgactatctgccttcgccggcggacattcccccggtcgacggccaggacgacgatggcaatcccatcaagcgcagcgccgacgatgccgagaagttctccgcgctggcgttcaagctgatgagcgatccgttcgtgggtcagctgaccttcgtgcgcgtgtattcgggcgtgctgaagtcgggcgataccgtctacaaccccatcaagggcaagaaagagcgtatcggtcgtctgctgcagatgcatgcgaacaaccgcgaagagatcaaggaagtgctggccggcgacatcgccgccgtggtgggcctgaaggacgtcaccaccggcgagacgctgtgcgatatcgattcgcacatcctgctcgagcgcatggagttccccgagcccgtgatttcgcaggccgtcgaacccaagtcgaaggccgaccaggaaaagatgggcctggcgctgtcgcgcctggcgcaggaagatccgtcgttccgcgtgcgcagcgacgaagaatccggccagaccatcatttccggcatgggcgaactgcacctggaaatcctggtcgatcgcatgcgtcgtgaattcggcgtggaagccaacgtcggcaagccgcaggtggcctaccgcgaaaccatccgcaagaactgcgacgaagtggaaggcaagttcgtcaagcagtcgggcggccgcggccagtacggccacgtggtgctcaagctggaacccctgcccccgggcggcggctacgaattcgtggatgccatcaagggcggcgtggtgccgcgcgaatacatcccggcggtcgacaagggcatccaggaaacgctgcccgcaggcatcctggccggctacccggtcgtggacgtgaaggcgacgctgttcttcggttcgtaccacgatgtggactcgaacgaaaacgcgttcaagatggctgcttcgatggccttcaaggaaggcatgcgtcgcgccagcccggtcctgctggagccgatgatggctgtggaagtggaaacgccggaagactacgccggtaccgtgatgggcgacctgtcgtcccgccgcggtatggtgcagggcatggacgacattgtcggcggcggcaagaccatcaaggccgaggttcccctggccgagatgttcgggtacgccaccaacctgcgttcgctcacgcaaggtcgcgccacctacacgatggaattcaagcattacgccgaagcgcccaagaacgtcgctgacgaagtcatcgccgctcggggcaag

SEQ ID NO: 14772 - DNA, 1188 bp, Bordetella pertussis; identical to SEQ ID NO: 14613

SEQ ID NO: 14773 - DNA, 687 bp, Bordetella pertussis
atgtcgaattcgacgcccacgcccgccgcccatcggctgggcctggtgggtcgcaaggtcggcatgacccgtattttcacggaggatggcgagtccatccctgtgacggtgctggacgtgtcgaacaaccgtgtgacccaagtcaagtccctggaatccgacggctacgccgccatccaagtgacttatggcacccgccgcgccacgcgcgtggtcaagccgcaagccggtcactacgccaaggctggcgcggaagccggtagcatcctgaaggaattccgcctcgaccccgctcgcgccgccgaattcgcggctggtgcggtcatcgccgtggaatccgtgttcgaagccggccagcaggtcgacgtgacgggcacgagcatcggtaagggtttcgccggtacgatcaagcgccacaacttcggttcgcagcgcgcctcgcacggtaactcgcgctcgcaccgcgttcctggctcgatcggccaggcacaggacccgggtcgcattttccccggcaagcgcatgtccggccatatgggtgatgtcacccgcaccgttcaaaacctcgacgtggttcgcgtcgatgccgaacgcggcctgctgatggtcaagggcgctgtcccgggccacgccggcggtgatgtcatcgtgcgtccggctgtcaaggcgccggccaagaagggggcg

SEQ ID NO: 14774 - DNA, 615 bp, Bordetella pertussis
atggatctcaagctcctgaatgaccaaggtcaggccgctacgttcagcgcacccgacaccatcttcggtcgcgacttcaacgaagcgctggttcaccagatcgtggtggccttccaggccaatgcccgcagcggcaaccgcgctcagaaggaccgcgccgaagtcaagcactccaccaagaagccctggcgccagaagggtaccggccgcgctcgcgccggtatgacctcgtcgccgctgtggcgtgggggtggtcgcgcgttcccgaactcgcctgaagaaaacttcagccagaaggtcaacaagaagatgtaccgcgccgggatccgctcgattctgtcgcagttggcccgtgaagaccgcgtcgccgtcgtcgatacgttcacgctcgaatcgcccaagaccaagctggctgccgccaagctgaagagcctgggcctggattcggtcctgatcatcaccgacaacgtcgatgagaatgtttatctcgccacccgcaacctgccgtacgttgccgtggttgagccccgctatgccgatccgttgtcgctgatccactacaagaaagtgctgatcaccaagccggccatcgcgcaactcgaggagatgctggga

SEQ ID NO: 14775 - DNA, 825 bp, Bordetella pertussis
atggccctcgttaaagtcaaaccgacctcggctggccgccgtggcatggtgaaggtcgtcagcccgaagctgcacaagggtgcgcctcacgctgcgctgctcgagaagaagacccgtggttcgggccgtaacaacaacggccacatcacggttcgccatcgtggcggcggtcacaagcagcactaccgcgttgtcgacttccgtcgcaacaaggatggcatcccggccaaggtcgagcgcctggaatacgaccccaaccgtaccgcgcatatcgcactgctgtgctatgccgacggcgagcgtcgctacatcatcgcgccgcgcggcctggaagtgggcgccacgctgatctcgggcatcgaagccccgatccgcgccggcaacaccctgccgatccgcaacattccggtgggcacgacgatccactgcatcgaaatgatccctggcaagggtgcccagatggcccgttcggccggcgcttccgccgtcctgatggcccgtgaaggcacgtacgcccaggtgcgcctgcgctccggcgaagtgcgccgcgtgcacatccaatgccgcgccaccattggcgaagtcggcaacgaagaacatagcctgcgccagattggcaaggccggcgccatgcgctggcgtggtgttcgtccgacggttcgtggcgttgccatgaacccgatcgatcacccgcacggtggtggtgaaggccgtaccggcgaagctcgcgaaccggtgagcccgtggggtactccggcgaagggtttcaagacccgccgcaacaagcggacgaacaatatgatcgtccaacggcgcaagcgcaag

SEQ ID NO: 14776 - DNA, 789 bp, Bordetella pertussis
atgggtcagaaaattcaccccactgggttccgtctcgcggtcacccgtaattggacctcgcgttggttcgccgacgacaaggctttcggcaccatgctggccgaagacatccgcgttcgcgagtacctgaagaagaagctgaagagcgcttccgtcggtcgcgtcatcatcgagcgtcccgccaagaacgcccgcatcaccgtttactcggcccgtccgggtgtggtgatcggcaagcgcggcgaggacatcgagaacctgaaggccgatctgcagcgtctgatgggcgtgcccgtgcacgtcaacatcgaggaaatccgcaagccggaaaccgacgcccagctgatcgccgactcgatctcgcagcagctcgaaaagcgcatcatgttccgccgcgcgatgaagcgcgccatgcagaacgccatgcgcctgggtgctcaaggcatcaagatcatgagctcgggccgtctgaacggcatcgaaatcgcgcgcaccgaatggtaccgcgaaggccgtgtaccgcttcacacgctgaaggcgaacatcgactacggcacctcggaagcccacaccacctatggtgtgattggcatcaaggtgtgggtctacaagggcgatatgctggccaatggcgagctgcctcccgaagccgccaccccgcgtgaagaagagcgtcgtccgcgccgcgccccgcgtggcgatcgtccggacggtgcccgtaccggtcgtccgggtggtcgtggccgtggtccccgcaaggcggacgcggctccggcgcctgaaggagaa

SEQ ID NO: 14777 - DNA, 309 bp, Bordetella pertussis
atgaactggatcaagatcgcgactaccgaccaactcgaggacgacgaggtcatgcccgttaccgccggcgaggcgaaattggccctgtatcgcagcgaaggcgaatacttcgcttcggacaatgtctgtacccacgcctatgccctgctgtccgacggctatctggaggatggctgcatcgaatgcccgctgcatcaggccaggttcgacatcaagaccggcaaggccatgtgcgcgccggcgacggccgacatccgcatctatccgctgaagatcgagaacgacgacatctacgtcgatctgcaagcc

SEQ ID NO: 14778 - DNA, 1383 bp, Bordetella pertussis
atgtcacgaatttcaatcttcttgccacaaagttgcggctatcatgccttcataagacgccgtcgagtgctccccgggcagtttccgggcttcaaagccgaatggcgcgttccctcaatcgaaagaacacgcaaggagtcggagatggaacagatccccttcgtttcgtcagcccccaacaccttgggtatcgagctcgaattgcagttggtcgatccccgcagctttgacttggctgccgcgtctgacgagttgttggcccagttggccaaccatcccatcgccgatcgggtcaaacccgaaatcacccgatcgatgatcgagctgaattcctcggtgcacgagcacccggccggcttgctggccgaaatgcgcgaaatgcgcgatgtcctttgcgaagccgccgacgcggtcggcgttggcgtcacgggcggtggcgcccaccccttcatgcgttggcaggaccgcgccatttccgatacgccgcgcttccagtacctggccgagatgtacggctacctggcgcgccagttcacggtgttcggccagcatatccacctgggcgtgccctccggcgacgcggcggtgcgcatggtgcgcgggctgtcgccgtatgtcccgcatttcatcgccctgtcggccgcctcgccctattgcgaaggcgtggacaccctgttttcgtgctgccgcctcaacgcggtcaacagtttcccgctggctggccacatgcccgccgacgtgaccgactggtaccgcttcgaggcccacctggcccagctgtgcgccagcggcctggccgagagcatcaaggacctgtactgggacatccggcccaagcccgagtacggcacggtcgagatccgggtctgcgacaccccgctgaccgtcgagcgggcctgccagctggctgccttcgcgcaggcgctggcggtgcaggtggcgcgcgaccccgaacccagccagcaggcctggctggcctatcgcagcaaccatttccaggcctgccgtttcggcctgcacggcagctacgtcacgccggacgggcagcgcgtgcggctggtggaccacctgcgcgcgctgttcgagcgcttggcgccggtggccgaagaactgggcaccggcgacatgctgcaaaccctgcgcgacgagatcctgcgcaatggcaacgacgcgcgctggctgcgcggccaattcctcaaggtgcgcgaactgcccctggtggtcgagtccatggcgcaaaactggcgcggccagggcgtccaggacacccccccgtcggcggtgcggcgccgcatccgcgcgacctccgagccagtgggaggcgtgtgcgccctgagcacgccgcagggcgatccgctgcccggctgggccgagcgcctgcac

SEQ ID NO: 14779 - DNA, 366 bp, Bordetella pertussis
atgatccaaatgcagaccacgctggacgtggccgacaacactggtgcgcgtgctgtcatgtgcatcaaggtgctcggtggctccaagcgccgttatgccggtatcggcgacatcatcaaggtgagcgtcaaagatgcggctccgcgcggacgcgtcaagaaaggcgaaatctacaacgctgtggtggtgcgtaccgccaagggcgtgcgccgcaaagacggttcgctgatccgtttcggtggcaatgccgccgtgttgctcaatgccaagctggagccgatcggcacccgcatcttcggacccgttacgcgtgaactgcgtaccgagcggttcatgaagatcgtgtcgctggccccggaagtgctg

SEQ ID NO: 14780 - DNA, 537 bp, Bordetella pertussis
atgtctcgtttgcaagagttttacaagagcaaggtcgttgccgacctgcaggccaagttcggctacaagtgcgtgatggaagtgccccgcatcaccaagatcaccctgaacatgggtgtctcggaagcggtcgccgacaagaaggtcatcgagcacgctgtttccgacctgaccaagatctccggccagaagcccgtggtgaccaagacccgcaaggctattgccgggttcaagatccgcgaaaactatccgatcggttgcatggtcacgctgcgtggtcagcgcatgtacgaattcctggatcgcctggttgcggtcgcgctgccgcgcgtgcgtgacttccgcggcatctcgggtcgtgcgttcgacggccgtggcaactacaacatcggggtgaaagagcaaatcatcttccccgaaatcgaatacgacaagatcgacgcgctgcgtgggctgaacatcagcatcaccaccaccgccaagactgacgacgaagccaaggcgctgttgacggccttcagcttcccgttccgtaac

SEQ ID NO: 14781 - DNA, 393 bp, Bordetella pertussis
atgagcatgagcgatcccatcgccgatatgctgactcgcattcgcaatgcgcagcaagttgacaaaaccacggtgaccatgcccgcctcgaagctgaaagtggccattgccaccgtgctgaaagacgaaggttacatcgatggctattcggtcaagggtacccaggccaagcctgagctcgagatcaccctgaagtactacgccggccgtccggtcatcgagcgcatcgaacgcgtctcgcgccccggtctgcgtatctacaagggccgcaccagcattcctcaggtcatgaacggcctgggcgtggctatcgtttcgacctcgcgcggcgtgatgaccgaccgcaaggctcgcgccaatggcgtgggcggcgaagtcctgtgctacgtggcc

SEQ ID NO: 14782 - DNA, 531 bp, Bordetella pertussis
atgtcacgtatcgctaaatacccggtagaactgcccaagggtgttgaagccagcatccagccggaccagattaccgtcaagggcccgctgggtatcttggtgcaatcgctgactggcgacgtcaacgtcgcccaggaagacggcaagctgacctttgtcgttgccaacgacagccgccatgccaacgcgatgtcgggcaccttgcgcgccctggtcgccaacatggtgaccggcgtgagcaagggcttcgaacgcaagctgaacctggtcggcgtgggttaccgcgcccagattcaaggcgacgcggtcaagctgcagctgggtttttcgcacgatgttgtgcaccagctgcccgccggcgtcaaggccgaatgccccacccagacagaaatcgtcatcaagggcccgaacaagcaagtcgtcggtcaggtggccgctgaaattcgcaagtaccgtgaacctgagccctacaagggcaagggtgtgcgctacgcggacgaacgcgtcgtcatcaaagaaaccaagaagaaa

SEQ ID NO: 14783 - DNA, 360 bp, Bordetella pertussis
atggacaaaaaagtttcccgtttgcgtcgtgcggttccgacccgccggaagattgcgcagctgcgagtgcatcgcctgtcggttttccgctcgaacctgcacatctacgccaacatcatttcgccggaaggcgatcgcgtgctggtcagcgcctcgacgctggaagccgaagttcgcgcgcagctgggcggcgccggcaagggtggcaacgccaccgccgccgcgctggtgggcaagcgtgttgccgagaaggccaaggccgccggcatcgagctggttgcctttgatcgctcgggctttcgttaccatggccgcgtgaaagcgttggccgaagccgcgcgcgaagccggcctgaagttc

SEQ ID NO: 14784 - DNA, 515 bp, Bordetella pertussis
aagcacgccgcggaaaaagagaacgacgacggtctgcgcgagaagatgatcgcggtcaaccgcgtgagcaaagtggtcaagggtggtcgcaccatgagctttgccgcgttgtccgtggtgggcgatggcgatggccgtatcggcatgggcaagggcaaggcgcgtgaagtgccggtgtcggttcagaaggcaatggaacaggcccgccgcggcatgttcaaggtcgccctgaagaacggcacgctgcaccataccgtggtgggcaagcacggcgcctcgacggtgctaatttcgccggccgctgaaggtaccggcgtgattgccggcggtccgatgcgcgctattttcgaagtgatgggtgtgcgtaacgtggttgccaagagcctgggctcgagcaacccctacaacctggttcgcgccacgttgaatggtctgcgcgcttccctgaccccggcggaagttgctgccaagcgcggcaagtccgtcgaagagatcctggggtaaatcatggctca

SEQ ID NO: 14785 - DNA, 438 bp, Bordetella pertussis
atgtcggatattcaactcaatacgctgaagcccgccgagggcagcaagcacgccaagcgccgcgtcggccgtggcatcggctcgggcctgggcaagaccgccggccgtggccacaagggccagaagtcgcgttcgggcggcttccacaaggttggcttcgaaggcggccagatgccgttgcagcgtcgcttgcccaagcgcggcttcacgccgctgggtcagcacctgtacgctgaagtgcgcctgtccgagctgcaattgatggaagccgaggaaatcgacgtccaggcgctcaaggcagccggtgtggttggccaaagcgtgcgttacgccaaggtcatcaagtcgggtgaactctcgcgcaaggtggtgcttcgcggcattaccgcgacggccggcgctcgcgccgccatcgaagccgcgggcggctcgcttgct

SEQ ID NO: 14786 - DNA, 249 bp, Bordetella pertussis
atgaacatcatcatcatgatcatcgtcgggtttgtcgtcggactgatcacccgggccatcatgccgggagaccagaacatgggctacatcatgacgacgatcctgggcatcatcggatcggtggtcgccggtttcctgggccagcaactgggctggtacgcaccgggcgaacccgcgggctggatcggttcggtcgtcggcgcgatcatcgtgttgttcgtcgtgggcctggtcgccaagaagcgcgcc

SEQ ID NO: 14787 - DNA, 1323 bp, Bordetella pertussis
gtggctaaagcgcaggctctgggcaaaaccggtgcacggtacggcgatctgaaacgccgtctcgtgttcctggtgctcgccttggtggtttaccgcctcggtacccacatccccgtgccgggcatcaacccggacgcgctggcggacctgttccgccagcacgagggtgggatcctgggcctgttcaacatgttctcgggtggagcgctgtcgcgtttttccatcttcgccctggggatcatgccgtacatttcgacatccatcatcatgcagttgatgtcggtggtggtgccgtcgctggaagcgctcaagaaagagggcgaggccggccgtcggaagattacccagtacacccgctacggcacggtcgtgctggcgctggtgcaggcggtgggcatttcggtggcgctggagtcccagccggggctggtcatcgatccgggcatgttgttccgcttcacgacagtggtcacgctggttaccggcaccatgttcgtcatgtggctgggcgagcagatcaccgagcgcgggctgggcaatggcatctcgatcctgatcttcgccggtatcgtcgcgggcttgccctcggcgctggcggggctgctggacctggtgcggacgaactcgatgtcggtgctgtcggcgctgttcatcgtggccctggtcgtgctggttaccgccttcgtggtgttcgtggaacgcggacagcgcaagatcacggtgaactatgccaagcgccaggtgggcaacaaggtgtatgggggccagagctcgcatctgccgctcaagctgaacatggccggggtgattccgccgatcttcgcgtcgtcgatcattctgttcccggccacgatcaccagctggttctcgagcggcgaacgcatggcctggctgcgtgaccttgctgccgcgctcgagcctcgtcaaccgctgtacatcacgctgtattcggtcgcgatcattttcttctgctttttctacacggccctggtgttcaacagccgcgaaactgcagacaacctgaagaagagcggcgctttcgttccgggcatccgtccgggcgagcagaccgcgcgttacattgacaagattctgatgcgcttgacgctggctggtgcgatttacatcacgctggtgtgcttgctgccggaattcctggtgatgcgttggaatgtgccgttctacttcggtggtacgtccctgttgattattgtcgtggtgacgatggatttcatggcgcaagtacaggcctacatgatgtctcaccaatacgactcgctgctcaagaaggcgaacttcaagggctcgggtttgccgatgcgg

SEQ ID NO: 14788 - DNA, 516 bp, Bordetella pertussis
atggcggtcttcccgtcatgcacgcggcgcccgcgcgcccatcccgccatgttccacgtcgtcctggtctctccggaaatcccgcccaacacgggcaatgccatacgcctgtgcgccaataccggcgcgcagctgcatctggtgcgcccgctggggttcgagctggacgatgcgcgcctgcgccgcgccgggctggattatcacgaatggcagccggtgcaggtgcacgacacgctgccgcaggcgctggcggccaccggcgcggctgcgccgcgcatcttcgcgctgaccacgcgcgcgcgcaccagcctggccgacatggcgttccaggcgggcgatgtgttcgtgttcgggcgggaaaccgccgggctgtccgaggcgcacatggcgctgttcggaccagcccagcaactgcggctgcccatgcggccgggccagcgcagcctcaatctgtccaacgcggtggcggtgacggtgttcgaggcctggcgccagtcggggtacgccggcagtatc

SEQ ID NO: 14789 - DNA, 1053 bp, Bordetella pertussis
atgagccaagcacgccccgccacgctgcgcgtcgccgtgctgggcgccggcagctggggcaccgccctagcggccgcggccagccggcgccaccccactgtcctgtgggcgcgcgacggcgcccaggcgcaggccatggcggcccggcacgaaaacacccgctacctgcctggcgtggcgctgccgcacgccctgcaggtcagcgccgacctggcgcaggcgctcgcgcacctggcgcacgatcccgcccacgccctcatcatcctgggcgtgccggtcgccggcatgacgccgctgtgcaccgaactggccgcccgcctgccggccctgggcctgcaggccgtgccgctggtatggacctgcaaggggttcgaggaacagaccgcccgcctgccccatgaaaccgtgcaggccgcgctgggcgccatgcccggcctggccgccggcgttctttccggcccgtcgttcgcgcgcgaggtcgcgcaggggctgcccgtggcgctgaccgtcgccagcggatcgtccgccgtgcgcgacgccgtcacgaccgccctgcacggcgcggcggtgcgcatctacgccagcaccgacgtggtcggcgtcgaagtcggtggcgcgctcaagaacgtcatcgccgtggcctgcggcatctgcgacggcctggcgctgggcaccaacgcgcgcgccgcgctgatcacccgcggcctggcggagatggcgcgctttggcgccgcgctgggcgcgcaacaggaaaccttcgccggccttaccggcctgggcgacctggtgctgaccgccaccggcgaactgtcgcgcaaccggcgggtcgggctggaaatcggcgccggccgcaagctggccgacatcctggccagcggcatgaccgccgagggcgtacgctgcgcgcgggccgcgcgcgaccgcgcccgcgcactgaacatcgaattgccgatcaccgaggccgtctgcgccgtgctgttcgagggactgtcgcccatgacggcggtatcggccctgctggcacgcgaggcgcgccccgaaagcccgacgcca

SEQ ID NO: 14790 - DNA, 258 bp, Bordetella pertussis
atgcagaaagtagtgatgtacagcaaggactattgtccctactgtgcgcgcgcccaggcgctgctcaagcagcgcggcgtcgccgatctcgaaatcatccgtatcgaccaggatccgtcgcaacgcgacatcatgatcgagcgcaccggccggcgcacggtcccgcagattttcatcggcgagacccatgtcggcgggagcgacgacctgcaggcgctggaccgctcaggcggcctgctcccgctgctcaacggcggc

SEQ ID NO: 14791 - DNA, 420 bp, Bordetella pertussis
gtggatttactgcaattcttgatcgataaaaacaacgtcttcatcgtcgccgtggccgtggtgtcgggcatcatgctgatgctgccggccctgcgcaagggccgcgccggcgccgcggtgggtacgtccgaagccatccagatggtcaaccagcgccaggccgtctgggtcgacgtgcgcccgaccgagcagttccaggccggccacatcgcgcaggcccgcagcctgcccgccgccgacctcgagaaaaaggccggcgcgctgcccaagaacaagcccctgatcgtcgtgtgcgagcagggccgcgacgccgcgcgcatcgccgcgcgcctgcgttcgcagggctttgccgaagtgtcggtgctcgagggcggcatgcgcgcctggtttgccgccggcctgccggtcacccagaaaggc

SEQ ID NO: 14792 - DNA, 792 bp, Bordetella pertussis
atgaacgaccagcagctgctgcgctacgcccgccatatcctgctcgacgaactcggcatcgaggggcaggagcggttcctggcggcgcgtgtgctgatcatcggcgcaggcggcctgggctgcccggccgcgctttacctggccacggccggcgtggggcatatcaccctggtcgacgacgacgtggtcgaactgagcaacctgcagcgccagatcctgcatgccagcgacagcgtgggccgcgccaaggccgaatcgggccgcgacatgctggcccgcttcaatccggaaacgcaggtcgaggcgcgcgtcgagcgcctgggcggcgccgccctggatgccgccgtggcgcaggctgacgtggtgctggactgttcggacaacttcgccacccgccacgccatcaaccgcgcctgtgtacggcaccgcaagccgctggtgtcgggcgcggccattcgcttcgatggccaggtcagcgtgtatgacctgcgcgatgcgcaggcgccgtgctatcactgcctgttccccgaggccgacgatgtcgaggaactcaactgcgccaccaccggcgtgttcgcgccgctggtgggcatcatcggcagcgggcaggccgccgaggccttgaagctgctggccggcatcggccagagcctggccgggcgcctgctgcagctggacgtgcgcagcatgcaatggcatagcgtcaacgtgccgcgcgatccggactgcgcggtgtgcgggcagggcgggcaggccgccgagcacgcgcgcggcgacgcggcgcattgcgcc

SEQ ID NO: 14793 - DNA, 216 bp, Bordetella pertussis
atgtctaaggacgacgtcatccagatgcaaggagaggttcttgagaacctccccaacgcgaccttccgcgtcaagctcgaaaacggccacgtggtgttgggccatatttccggcaagatgcgtatgcattacatccggattctgcccggcgacaaggtcacagtggagctcacgccctatgacctcacgcgagccagaattgttttccgctccaag

SEQ ID NO: 14794 - DNA, 363 bp, Bordetella pertussis
atggcccgtattgctggcattaacattccgccgcaacagcacgccgagatcggcctgaccgccatttttggcatcggtcgtacgcgcgcccgcaagatctgcgaagctgctggtgtgcccgttaccaaaaaggtcaaggatctgaccgacgccgagctggagcgcatccgtgaacacattggcgtgttcgcggttgaaggcgacctgcgtcgtgaagttcagctctcgatcaagcgtttgatcgacctgggaacctaccgcggcatgcgccacaagcgtggcctgcccgtgcgcggccagcgcacccgcaccaacgcccgcacccgcaagggcccgcgtcgtgctgctgcgtccctgaagaaa

SEQ ID NO: 14795 - DNA, 399 bp, Bordetella pertussis
atggcgaaagcttccaccagcggcgcttcgcgcgtacgcaaaaaggtcaagaagaacgtctcggacggcatcgcgcacgttcacgcttcgttcaacaacaccatcatcaccatcaccgaccgccagggcaatgccctgtcgtgggcgacgtcgggtggcgcaggcttcaagggctcgcgcaagtcgacgccgttcgccgcgcaggtcgccgctgagacggctggtcgcgttgccatggaatatggcatcaagaccctcgaagtgcgtatcaagggccccggccccggccgcgaatcgtcggtgcgcgcgctcaatgcgctgggcatcaagatttcgagcatcgccgacatcacgcccgttccgcacaacggctgccgtccgccgaagcgtcgtcgtatc

SEQ ID NO: 14796 - DNA, 621 bp, Bordetella pertussis
atggcacgttatattggacccaaatgcaagctctcgcgccgcgagggtaccgacctgttcctgaagagcgcgcgccgctcgctggattccaagtgcaagctggattccaagcccggccagcatggccgcacctcgggtgcccgtacttcggactacggtctgcagctgcgcgagaagcagaagctcaagcgcatgtacggcgttctggaaaagcagttccgcaagtacttcgttgaagccgagcgccgtcgtggcaacaccggcgaaacgctgatccagctgctcgaatcgcgcctggacaacgtcgtctaccgcatgggcttcggctcgacgcgcgcggaagcccgtcagctggtgagccaccgcgccatcgagctgaacggccacaccgccgacatcgcgtcgatgctggtcaaggccggcgacgtgatctcgattcgcgagaaggccaagaagcaaggccgcatccgcgaatcgctggatctggctgccagcatcggcctgccccagtgggtggaagtcgacgccagcaagatgaccggtacgttcaagtcggcccccgatcgcgctgacgtcgcccgcgacgtcaacgagtcgatggtcgtcgaactgtactcgcgt

SEQ ID NO: 14797 - DNA, 984 bp, Bordetella pertussis
atgtccactcaaggttttctgaagccgcgttccatcgaagtcgaaccggtcggggcgcatcacgccaagatcgtgatggagccgttcgagcgcggctacggccatacgctgggcaacgccctgcgccgcatcctgctgtcgtcgatgaccggctacgcgccgaccgaagtgcagatgaccggcgtggtgcacgaatattcgaccattgccggtgttcgcgaagatgtcgtcgacatcctgctgaacctcaagggcgtggtgttcaagctgcacaaccgcgacgaagtgaccctggtgctgcgcaagaatggcgccggcgccgtggtggccagcgatatcgagctgccgcacgacgtcgagatcatcaatccggatcacctgatctgcaatctgaccgatgccggcaagatcgaaatgcaggtcaaggtcgagaagggccgcggctatgtgccgggcaacgtgcgcgcgctgtcggaagatcgcacgcacacgatcggccgcatcgtgctggacgcttcgttcagccccgtgcgccgtgtcagctatgccgtcgaaagcgctcgcgtcgagcagcgtaccgacctggacaagctggtgctggacatcgaaaccaacggcgtgatctcgcccgaggaagcggtgcgccaggctgcccgcatcctgatggaccagatctcggtgttcgcggcgctggaaggcgcgggcgatgcgtacgagccgccggtgcgcggtacgccgcagatcgatccggtgctgctgcgcccggtcgacgatctggaactgacggtgcgttcggccaactgcctgaaggccgagaacatctactacatcggcgacctgatccagcgtaccgagaacgaactgctcaagaccccgaacctgggccgcaagtcgctcaacgagatcaaggaagtgctggccgcacgcggcctgacccttggcatgaagctggaaaactggcccccgctgggcctcgagcgcccg

SEQ ID NO: 14798 - DNA, 393 bp, Bordetella pertussis
atgcgtcacggtaatggcttgcgtaagctcaaccgcaccagcagtcaccgtcttgccatgttccgcaacatggccgtttcgttgatcacgcacgaagcgatcaagaccacgctgccgaaggcgaaagaactgcgccgcgtcatcgaacccctgatcacgctgggcaaggagcccaccctcgcgaacaagcgtctggcgtttgcccgtctgcgcgatcgcgacgcggtggtcaagctgttcgccgaaatcggtccgcgctacgcgaaccgcaacggcggctatacccgcgtgctgaagatgggcttccgtcaaggcgacaacgcgcccatggctttcatggagctggttgaccgtccggaagtggatgcatccgaagcggacagcgacgccgag

SEQ ID NO: 14799 - DNA, 1659 bp, Bordetella pertussis
atgagcaatatcgtggaaatcaaggtaccggacatcggtgacttcaaggaggtggaagtcatcgaggtgctggtatcggcgggcgacacgatcaaggccgagcaaagcctgatcacggtggagtccgacaaggcatcgatggagattccggcctcggccgcgggcgtggtgaagtcggtcaaggtgaaggtgggcgacaagatcgccgaaggcacggtcatcctggaagtggaggcggccggcgaggccgccgccgcgcccaaggccgaggcccccaaggccgaggcccccaaggccgagcaggccgccgagacgcccaaggccgacgccgcgaaggccgaggcgccccaggcgcaggcggcccaggccgaggcgccggccgccgccggcccgatcgaagtcaaggtgcccgatatcggcgacttcaaggaagtcgaggtcatcgaggtgctggtcgccgagggcgacaccatcaaggccgagcaaagcctgatcacggtcgagtccgacaaggcctcgatggaaatcccggcctcggcgggcggcgtggtgcagtcgctcaaggtcaaggtaggcgacaaggtcgcgatgggcacggtcatcgccgtggtgcagggccagggcgccgccgcggcgccggccgcagccgagcccgccgcgccggcttcgcccgtggccccggcttcggctccggcgcagcggcccgccccggccgccgcgctgcaggacgaagacctcaagcccggccaattgccgcatgcctcgccgtcggtgcgcaagttcgcgcgcgagctgggcgtgaacctgagccgcgtcaccggctcggccgccaagggccgcatcacggccgatgacgtgcgcgcctacgtgaagcaggcgctgtcggctggtgcgccggctggcgcctcgggcggcggcgatggcgccgcgctggggctgctgccgtggcccaagatcgatttcaccaagttcggccccatcgaagccaagccgctgtcgcgcatcaagaagatctcgggcgccaacctgcaccgcaactgggtcatgatcccgcacgtcaccaacaacgacgaagcggacatcaccgacctggaggcgctgcgcgtggcgctgaacaaggagaacgagaaatcgggcgtcaaggtcaccatgctggccttcctgatcaaggcggtggtcgcggcgctgaagaagttccccgagttcaacgcctcgctggatggcgacaacctggtgctcaagcagtactaccacatcggcttcgccgccgacacgcccaacgggctggtggtgccggtggtgcgcgacgccgacaagaagggcatcctggagctggcccgcgaaacctccgagctggccaggaaggcccgcgaaggcaaggcctcgcccgccgagatgcagggcggctgcttctcgatctcgtcgctgggcggcatcggcggcacgcatttcacgcccatcatcaacgcgcccgaagtggccatcctgggcgtgtcgcgctcggcccacaagccggtctgggacggcaagcagttcgtgccgcgcctgaccctgccgctgtcgctgtcctatgaccaccgcgtcatcgacggcgcctcggcggcgcgcttcaacgcctatctcggccagctgctggtcgacttccgccgcatcgcgctg

SEQ ID NO: 14800 - DNA, 1788 bp, Bordetella pertussis
atgagcaatatcgtggaaatcaaggtgcccgacatcggtgacttcaaggaagtcgaagtcatcgaggtgctggtcgccgccggcgacaccatcaaggccgagcaaagcctgatcacggtcgagtcggacaaggcgtcgatggaaatcccggcctcgtcggcgggcgtggtgaaatcggtcaaggtcaaggtgggcgacaaggtcgccgagggcacggtcatcctggacgtggaggcggccggcgaggccgccgccgcgcccaaggccgaggcgcccaaggccgaggcgcccaaggccgaggcgccgaaggcggatgcaccgaaggcgccggccgccaaggcgagcgcgccggccgcggccgcctacagcggctcggccgacctcgaatgcgacatgctggtgctgggcgcgggccccggcggctattcggccgccttccgcgccgccgacctgggcatggacaccgtgatggtcgagcgctacgccaccctgggcggcgtgtgcctgaacgtgggctgcattccctccaaggcgctgctgcacaacgccgcggtgatcgacgaagcgcgcgcgctggccgcccatggcatcagcttcggcgagcccaaggtcgacctggacaagctgcgcggctacaaggacagcgtggtcgccaagctgaccggcggcctggccggcatggcccgcgcgcgcaaggtgcgcgtggtcaccggcacgggcgagttcgccgacccgcaccacctcacggtgaccgacggcgagggcaagaagcagaccatccgcttcaagcaggccatcatcgccgccggcagccagtcggtgaaactgccgttcctgcccgacgacgaacgcatcgtggactccaccggcgcgctgcagctgcgcgccatccccaagaagatgctgatcgtcggcggcggcatcatcggcctggaaatgggcacggtgtactccaccctgggcgcgcgcctggacgtggtggaaatgctcgacggcctgatgcagggcgccgaccgcgacctggtcaaggtgtggcagaagatgaacgcgccgcgcttcgacaacatcatgctcaagaccaagacggtaggcgccgaggcccgcaaggacggcatctacgtcagcttcgagggcgagggcgcgcccaaggagccgcagcgctacgacctggtgctgcaggccgtgggccgcagccccaacggcaagaagatcggcgccgagcgcgccggcgtggccgtcaccgagcgcggcttcatcgaggtggaccgccagatgcgcaccaacgtgccgcacatctacgccatcggcgacgtggtcggccagcccatgctggcccacaaggccgtgcacgaaggccacgtggcggccgaggcggcccatggcgagaagtcgtacttcgacgcgcgcgtcattccgtcggtggcctacaccgatccggaagtggcctgggtgggcctgaccgaggacgaggcgaagaagcagggcgtcaaggtcgagaagggcctgttcccgtgggcggcctccggccgcgccatcgccaacggccgcgacgagggcttcaccaagctgctgttcgacgccgagacccaccgcatcgtcggcggcggcatcgtcggcacgcacgcgggcgatctcatcagcgaaatcgccctggccatcgaaatgggcgcggacatggtcgacatcggcaagaccatccacccgcatccgaccctgggcgaatccgtcggcatggccgccgaagtcgccgaaggcgtgtgcaccgacctgccgccgatgcgcaagaag

SEQ ID NO: 14801 - DNA, 1173 bp, Bordetella pertussis
atggctgcagtcatcaataccaactacttgtcgctggttgcccagaacaacctgaacaagtcccaatcggccctgggtagcgccatcgagcgcctgtcgtcgggtctgcgcatcaacagcgccaaggacgacgcggccggccaggccatcgccaaccgcttcaccgccaacgtcaagggcctgacccaggctgcccgcaacgccaacgacggcatctcgatcgcccagacgaccgaaggcgcgctgaacgaaatcaacaacaacctgcagcgcatccgcgaactgacggttcaggcctccaacggcacgaactcggcttcggacatcgactcgatccagcaggaagtcaaccagcgcctggaagaaatcaaccgcatcgccgagcagaccgacttcaacggcatcaaggtcctgaagtccaacgccaccgacatgaccctgtcgatccaggtcggcgccaaggacaacgaaacgatcgatatcaagatcgatcgcaactcgaactggaacctgtatgacgccgtgggcaccgtccccggtggcacggtcaacggcgaggctcgcaccgtcaacgcgctgggctttgacgtgctgtcggccgtcacgaccaccatcgcttcggacaccgtgaccttcgacgccgccgtggcggccgccgaacaggctgctggcgccgccgcaggcgacggcagcgtcgtctcgtacggcgatgccgccaacccgcaatacgcggtcgtggtcgacaacgccggcacgctgacctcctacgccctgaccttcgacaaggacggcaaggccgccctgggcgaccaactgggtgccgtcgcttcgcaagccgctgaagccgccgtcggcgtcaacgacgtcgcctccggcgacaacgtcaccgtgtccggcggcaacgccaacgcgctgtccaagctggacgacgccatgaaggccgtggacgagcagcgcagctcgctgggcgcgatccagaaccgtttcgaatcgaccgttgccaacctgaacaacacgatcacgaacctatcggctgcccgttcgcgcatcgaagattcggactacgcgaccgaagtgtcgaacatgaccaagaaccagatcctgcaacaggctggcacctcggtcctggcccaggccaaccaagtcccgcaaaacgtcctgtcgctgctgcgc

SEQ ID NO: 14802 - DNA, 2034 bp, Bordetella pertussis
atgagcaacccgaccgcccctaaacttgccttggcggatgccatccgcgtacttgcgatggacgccgtgcagaaagcgaattccggacaccccggcgcgcccatgggaatggccgaaatcgcgcaagcgctgtggctgggcaacctgcgccacaacccggccgatccggcctgggccaaccgcgaccgcttcgtgctgtccaatggccacggctcgatgctgatctacgccctgctgcacctgacgggctacgatctgcccctggaagagctgaagaacttccgccagctgcattcgcgcacgccggggcaccccgaagtgggcatcaccccgggcgtggaaaccaccaccggcccactgggccagggcctggccaacgcggtcggcatggcgctggccgaggccctgctggcggccgaattcaaccgcgccggccacacggtggtggaccaccacacctatgtcttcctgggcgacggctgcctgatggaaggcatctcgcacgaggcctgctcgctggccggcacgctcaagctgtccaagctggtggcgctgtacgacgacaacggcatttccatcgacggccatgtcgagcactggttcgccgacgacacggcgacccgcttcgagggctacggctggaacgtgatccgcggcgtggacggccacgacgtggcggcggtggacgcggccatcaagcaggcgcgcgcgcaatccgagaaacccaccctgatcgtctgccgcaccgtgatcggcaagggttcgcccaacatggccggcacgcacaatgtgcacggcgcgccgctgggcaacgacgagatcgccgccacccgcgcggcgctgggctggtcggccggccccttcgaggtgccgcaggatatctacgccgcgtgggacagccgtcccgccggcgcgctggcgcaggccgcctgggaagacaagttccaggcctatgcggcccagtatccggccgaggccgccgaattcacgcgccgcatgaagggcgagctgcccgaaggcttcgccgcccggttcgaggctttcctgcaggccaccgtggccaagggcgagacggtcgccacccgcaaggcgtcgcagttcgccatcgccgagctggccggcctgctgccggagatgctgggcggctcggccgacctgaccggttcgaacttcaccgactggaagggcgtggcgccgctgcgcgccggccaccacggcgtgcatttcggccgccatatcaactacggcgtgcgcgagttcggcatggccgccatcatgaacggcatcgcgctgcatggcggctacctgccgttcggcggcaccttcctgacgttctcggactactcgcgcaacgccatccgcatggcggcgctgatgaagcagcgcgtggtgcacgtgttcacgcacgattccatcggcctgggcgaggacggtccgacccaccagtcgatcgaacacgccgccagcctgcgcctgattcccaacctgtcggtgtggcggccctgcgacaccgtcgagacggccgccgcctggggcgcggccgtgacgcggccggccagcatcggcatggacttgcacgacggcggtccgaccgcgctgctgctgtcgcgccagaacctgccgttcgtggcgcgcgacgaggccacgcagaaagcgattgttcgcggtggttacgtcttgcgcgacgcacacgacgcgcgtgcggctatcatcgccacgggctcggaagtcgccatcgcgctggccgcgcaggaattgctggccgccgacggcatcgccgtgcgggtggtttccatgcccagcaccgacgtgttcgaccgccaggacgccgaatggaagcgcgaagtgctgccggccggcatgccgcgcgtggccgtcgaggcgggcgtgaccgcgttctggcacaagtacgtgggcctggaaggcgccgtggtgggtatcgaccgctatggcgagtcggcgcccgccggggctttgttcaaattcttcggactgaccgctgaaaaggtggccgaggccgtcaagcaggttttg

SEQ ID NO: 14803 - DNA, 1008 bp, Bordetella pertussis
atgaccattcgcgtcgtcatcaacggctacggccgcatcggccgcaacatcctgcgcgcccactacgaaaacggcaagaagcacgatatcgagatcgtcgccatcaacgacctgggcgatcccaagaccaacgcgcacctgacgcgtttcgacacggcgcacggcaagttccccggcaccgtgacggtcgacggcgactacatggtcgtcaacggcgacaagatccgcgtgctggccaaccgcaacccggccgaactgccgtggggcgagctgggcgtggacgtggtgctggagtgcacgggctttttcacctccaaggaaaaggccggcgcgcacctgaagggcggcgccaagaaggtcatcatctcggcgcccggcggcaaggacgtcgacgccaccatcgtgttcggcgtgaaccagaacgtgctcaaggccgagcacaccgtgatctccaacgcctcgtgcaccaccaactgcctggccccgctggtcaagccgctgcacgacaagctgggcgtggaaaccggcctgatgaccaccgtgcacgcctacaccaatgaccaggtgctgaccgacgtctaccacgaagacctgcgccgcgcccgctcggccaccatgagcatgatcccgaccaagaccggcgcggccgccgcggtcggcctggtgctgcccgagctcaacggcaagctggacggtttcgcgatccgcgtgccgaccatcaacgtctcgctggtcgacctgtccttcgtggccaagcgcgacaccaccgtcgaggaagtcaacagcatcctgcaggccgccgccgaaggcgagctcaaggacatcctgacctacaacaccgagccgctggtgtcgatcgacttcaaccacaacccggcctccagcaacttcgacgcgaccctgaccaaggtgtccggcaagctggtcaaggtctcgtcgtggtacgacaacgagtggggcttctcgaaccgcatgctcgacaccaccgtcgcgctgatgtcggccaag

SEQ ID NO: 14804 - DNA, 1191 bp, Bordetella pertussis
atgtccaacgtcaatacgctttccgcgctggccaagagcggcgctctgtccggcaagcgcgttttcatccgcgccgacctcaacgtgccgttcgacgacgccggccgcatcagcgaagacacccgcatccgcgcctcggtgcccggcatccgcctggcgttagacgccggcgcggcggtcatggtcacctcgcacctgggccgccccaaggagggcgcgctgaccgaggcggactcgctggccccggtcgcgcagcgcctgtccgaactgctgggcatgcaggtgcgcctggtgcccgactgggtcgacggcgtttccgtcgagccgggcgaagtcgtgctgctggagaactgccgcggcaacgtgggcgagaaaaaggacgacgaaggcttgtcgcgcaagatggcggcgctgtgcgatgtgtacgtcaacgacgccttcggcaccgcgcaccgcgccgaggccaccacgcacggcatcgcgcgcttcgcgccggtggcctgcgccggcccgctgctggaggccgagctcgacgcgctggggcgcgcgctgcatgatcccaagcggccgctggtggcgatcgtgggcggctccaaggtgtcgaccaagctgtccatcctgcaatcgctggccgacaaggtcgaccagctggtggtcggcggcggcatcgccaacaccttcatgctggccgccggcctgcccatcggcaagtcgctggccgagcccgagcaggtcgagcaggcgcgcgccgtgatcgaaatcatgaagcgccgcggcgccgaggtgccgattcccaccgacgtggtttgcgccaagtcgttcggcgcggacgccgcggccaccgtcaaggcggccgccgacgtggccgaggacgacatgatcctcgacatcggaccgcagaccgcgcagcgcctggccgatatcctcaagacggccggcaccatcgtctggaacggtccggtcggcgtgttcgagttcgaccagttcgcccacggcaccgaggtggtggcgcgcgccatcgccgactcggcgggcttttcgattgccggcggcggcgatacgctggcggccatcgccaagtacggcatcgccgaccagaccggctatatctcgaccggcggcggcgctttcctggagttcctggaaggcaaggcgctgccggccgtggccgtgctgcaggcgcgcgccgcg

SEQ ID NO: 14805 - DNA, 1014 bp, Bordetella pertussis
atgaaaccgcagatcatttccgccgcattcccggtatcccgcccccgccgcctgcgccgcgacgatttcacgcgccgcctggtacgcgagaacacgctcaccgccaacgatctgatttacccggtcttcgtgaccgaaggcaaaggcatacagcaggccgtgccctcgctgcccggcgtggtgcgctactcgctcgacacgctgctgcccgtggccgagcaatgcgtcaagctgggcatcccggtgctgtcgctgtttccggccatcgagccggccctcaagacgcccgacggcatcgaggcggccaatcccgaaggcctgatcccgcgcgtggtgggcgagctgaaaaagcgctttcccgaactcggcgtgctcaccgacgtcgccctcgacccgtataccagccacgggcaggatggcgtgatcgaccccgccggctacgtgctgaacgagcccaccgtcgaaatcctcatcaagcaggccctggtgcaggccgccgccggtgtggacatcgtcgcgcccagcgacatgatggacggccgcatcggcgcgatacgccaggcgctggaagaccagcagcatatccacacccgcatcatggcctattcggccaagtacgccagcgccttctacggcccgttccgcgacgcggtcggctcggccagcaacctgggcaagtccgacaaaatggcttaccagatggacccgggcaacatcgacgaagcgctgcgcgaagtcgccgccgacctgcaggaaggcgcggacatggtgatggtcaagcccggcatgccctacctggacgtggtgcgccgggtcaaggacgcgttccgcgtgccgaccttcgcctaccaggtcagcggcgaatacgccatgatcaaggccgccgccgccaatggctggctcgaccacgacaaggtcatgatggaggccttgctcggcttcaagcgtgccggcgccgacggcgtgctgacctacttcgccctcgaggccgccacgctgctgcagcagcagcgc

SEQ ID NO: 14806 - DNA, 699 bp, Bordetella pertussis
atgaagcgtgtgctgtcccggatgttggtagcaagcggactggtgctgggtgcatcggttcactccatgagtttcgccgccgatggcgctgcgggcccggccaagccggacgccgccaagggcgcccagctgtacgatcagggcgatgcgtcgcgtggcgtcatcgcctgtgcgtcctgtcacggcgcggcaggtagcagcaccataccggccaacccgaacctggcggcccagccgcacgaatacctggtcaagcaactgacggaattcaaggtcaaggaaggcgagaagctgccgctgcgcatggggccgggaggcaatcccacgcccatgaccgccatggcccagcccctgacggcgcaggacatgcagaacgtcgccctgtatctgtcgcagcagccgctcaaggagccggctaccgctggccacgaaaacctggtcgaattgggccagaagatctggcgcggcggtctggccgatcgcaacgtgccggcctgtgcggcctgtcacggcgccaccggcgcgggcattccgggccagtatccccgcctgtcgggacagttttcgtcgtacatcgaagaacagctcaagctgttccgcagcggcgagcgtggcaatagcgtgcccatgcacgacatcgcggaccgtatgtccgacgccgatatcaaggctgtcgccgattacgccgcgggcttgcgc

SEQ ID NO: 14807 - DNA, 1332 bp, Bordetella pertussis
atgtctaccaccaccagcaattccgccgcggcctggacgagcggtttttccccgacgggcgacgggcgcgcgcagcgcggccggcccgactggaccgatatcgcgttcttcctgctgctggcggcgggggcgggctttgccctgacccgcttcagcggcgccatggattactacgagaagctgatcctctgtggcaccgtgccggcgctggcctggctggggtggctgtggcggccgctgcgccacctgatgatcgcctgtgcgctggccgccgggctggcgctcctgctgtaccagaacgacctggcgcgcgccgagcaggtgttcttcctcaaatacctgctgtcgtcgcaatcggccattctgtggatgagcgcgctgttcgtgctggcgatgctgtgctactggatcgggatcctgagcccgacggcagcctggctgggtacggcactgacgtggggcgcggtcttcgccggcacgaccggcctgctggtgcgctggcgcgaaggccacctgatggggcccgacctgggccatatcccggtcagcaacctgtatgaagtgttcgtgctgttcgcgctgatcacggcgcttttctacctttactacgagcgcaagtacgccacgcgggcgctgggcgggttcgtcctgctggtcatcacgtcggccacgatcttcctgctgtggtactcgttcacgcgcgacgccggccagatccagcccttggtgccggcgctcaagagctggtggatgaagctgcacgtgcctgccaacttcatcggctacggcacgttctcgctggcggccatggtgggcttcgcctacctcgtcaagcagtatggccagaccacgtcgtggctgaagctggcgccgctgttcgtgctgggcgtggccctgtgcgtcgagcccatcgtcttccgcaccgagggcctgtccgccacctggatgatctattgcggcgcgggcgtggtgatcgtgggcggcattctgctggcccgcgcgcgcatcgcgcaggcattgccgtcgctcgaagtgctcgacgacatcatgtatcgggccatcgcgatcgggttcgcgttcttcaccgtggcaaccgtgctgggggcgctgtgggccgccgacgcctggggcgcctactggcagtgggaccccaaggaaacctgggcgctgatcgtgtggctgaactacgccgcctggctccatatgcgcctgatcaagggcctgcgcggcaccatggcggcgtattggtccctggtgggcctgctgatcaccggtttcgccttcctgggcgtgaacatgttcctgtcgggcctgcactcgtacggcaagctc

SEQ ID NO: 14808 - DNA, 2469 bp, Bordetella pertussis
atgggagataaccgtacaatcgccgcgatgagcaagcgccagaattcaaccaagcaggacaagcccgccaagagcggttcagcgattttgcggttcttcctgaaggccggcatcttctttggcggcctggccctgtgcggcgtactgctggccggcatggccctggcgctggcctggcccaacctgcccgatctgcacgccatgaccgactatcggccgcgcgtgccgctgcgcgtctatacggccgaccgggtgctgatcggcgaattcggcgaagagcgccgcaacgtgctgcgcttcaacgaaatccccgatgtcatgaagtcggcggtgctggccgccgaggacgatcgtttctaccagcacggcgggatcgactggatgggcgtcatccgcgccggcctgaccaacctgatcagcatgtcgaagtcgcaaggcgcgagcaccatcaccatgcaggtggcgcgcaacttctacctgtcgtccgagaagacctattcgcgcaagttctacgaactgctgctcaccttcaagatcgaatcgcagctcaccaaggaccagatcctcgagctgtacatgaaccagatctacctgggccatcgcgcctacggcttcgccgccgcctcgcgcacctatttcggcaagccgctgtcgcaggtcacgccgtccgaggccgccatgctggccggcattcccaaggcgccgtcgcgcttcaacccgatttccaaccgcccgcgcgccgaactgcgccagcgctatgtgctgggccgcatgtattcgctgggctacctgaccgagcccgaatacaaggaagcgatggcgcagcccatcgtgatcaagtcggccgaaggcacgccggccggcggctacgccatccatggcgaatacgtcgccgaactggcgcgccagctgctctacaacgtgtaccaggacaacctgtattcgcgcggcatcaacatctacaccaccgtccagtcgaaggaccaggaatcggcctatcgcgcggtgcgcgacggcgtgctcgaatacacgcggcgcgcgccctaccccggccccgaggaacagctggacatgccggccggcgtcgagaacgacccgcaggcgctggacgaattcctcgatggcgtgttcgacaagttctccgacagcggcgacctgctgaccgccgtcgtgctgtcggccagccccaccgagatcaagctggtgcgcagctcgcgcgaagtcatctccatcaccgacaagaaggcgctgggcgtggtggcgcgggcgctgacggacaaggccaagcccgagatgcgcctgaagcgcggctcggtcgtctacatccacaaatacaacgacaactgggaagtcatcaacatgccggcggtgcaggccgcgttcgtggcgctgtcgccgcaggacggcgccatccgcgccatggtcggcggcttcgacttctaccgcggcaacttcaaccgcgtgacgcaggcatggcgccagcccggctcgaacatcaagccgttcatctatgccgcctcgctcgagcgcggcctgacgccggccacccagatctccgaccagccgttcgaactgtccgcggcgcagaccggctccaaggcctggcatccgaagaactacggcaaccagtacgagcccatgctgaccatgcgccagggcctgtacaagtcgaagaacatggtgtccatccgcatcctgcaggccatcgggccgcagtacgcccaggactacctcacccgcttcggtttcgacaaggcgcgccagcccgccgtgctgccgctggcgctgggcgccggctcggtcacgcccttgcagctggccggcgcctatgcggtgttcgccaacggcggctaccgcatcacgccctacctgatcgatcgcgtcaccgacagctccggcaaggtcctgatgcaatcgcgtccggtcatcgccggcgatgcggccgcgcgcgccatcgacgcgcgcaccgccttcgtcatggacgatatgctgcgtggcgtggccaccagcggcaccgccgcccgcgcccgcgccacgctcaagcgcagcgacgtcgccggcaagaccggcaccaccaacgaatcggtcgacgcctggttctcgggctatacgcccagcctggtggccaccgcatggctgggcttcgaccagcccaaatcgctgggctcgcgcgagaccggcggcggcgtggccatgccgatctggctcgactacatgaaggatgcgctcaagggcgtgcccgaagagaagcagcggccgcgtcccgatggcctgctggtggagaacggcgagctctatttcagcgagttcccgcccggccaggcggtggcgcgcctgggcttgccccaggccggcgacgcgctgggcgacttcctgaacgggctgaccggcggcaacgacaattcgatccgcgtggcgcccggcgtgggcacgcaagggtcgcagccctggagccagaacatcccgttc

SEQ ID NO: 14809 - DNA, 705 bp, Bordetella pertussis
ttgcgctacgctgtagcgatcggccgccgcggcacgcgcggggcctgccgtcccaggagcccgccgttgcccgcccccctgaccctgtacgtcgacgcccgttttcgcagcccctacgccatgtcggcccatgtcgccctggccgaaaagcagctggagttcgaagtccgcctggtggacctggctgccggcgagcaacgcatgcagccctaccagagccgcgccctgaccgcccgggtgccggccctggcgcatgccggcttccatctcaccgagtccagcgccatccaggaatacctggaagacgccttcgcgccgccggcgcatcccgcgctgtatccggccggcgcccaggcgcgcgcccgcgcccgccaggtgcaggcctggctgcgcaccgacctggcggcgctgcggcgggcgcgcccgatcgactccgtcttcgatgccccggccaccacgccgctggacgacgccgcgcactgcgacgccgccaagctgatccgcgtggccgaggcgctgctgccgcccggccaggcgcacctgttcggggcctggagcatcgtcgacaccgaactggccctgatgctcaaccgcctggcccatagcggcgacgacctgcccgcgccgctgcgcgactacgcggcggcccaatggcaacgcgcctcggtgcaggcatggctgcgccattacgaagcggcgcgcggc

SEQ ID NO: 14810 - DNA, 483 bp, Bordetella pertussis
gtgctggaaatcatcgaagccgatttcaacgacgccgcccatgcccgggccatcatcgccctgctcgacgagtacgcccgcggccccatgggcggcggcgaaccgctgtcggcccatgcgcgcgccaacctggtggccgagctggcgcgccggccccatgcccgcgcgctgctggcctggcaggacggcgagccggccgggctggccatctgcatcgaaggcttttccacctttgcctgccgccccctgctcaacctgcacgacctggcggtggccgaacgcttccgcggccagggcgtgggcacgcgcctgctggaggcgctcgaagccctggcggcgcggctggactgctgcaaggtgacactggaggtgctggaaggcaatacgcgcgcccaggcgctgtaccgccgcctcggctacgccggctacgaactggcggccgataccggccgcgccatgttctggcagaagaagctgagcgcc

SEQ ID NO: 14811 - DNA, 936 bp, Bordetella pertussis
atggagttcaaggactactacaagattctcggcgtgcagagcgacgcccccgaagacgagatccggcgcgcctatcgcaagctggcgcgcaaataccatccggacgtcagcaaggaaagcgacgcggaaacgcgcatgcgcgacgtcaacgaagcctacgacgtgctgggcaaccaggagaagcggcaggcctacgacaacctggccgccggcgtggcgcccgacggcggattccagccgccgccaggctgggaccagggcttcgagttccactacgcgcgcgatggcgagggcgaccagcagttcagcgatttcttctcgtcgctgttcggcggccaggcgcgccgccgcgccgcgcagcaggatttccgcgcgcgcggcgaagaccaccacgccgccatcgaggtcgatctcgaagacgcgctgcgcggcgccacgcgcgacatcagcctgcgttccatgcagcccgacgagcacggccagccgcaggtgcgcacgcgcacgctgagcgtgcgcatcccggccggcgtgcgcgagggccagtacatccgcctggccgggcagggcatgcccggctacggcggcgccgagaacggcgacctgtacctggaggtgcgcttcaagccgcatccgcgctaccgcgccgagggccgcgatctctacatgaacctgccggtggcgccctgggaggcggcgctgggcgcgcaggtcgaggcccccacgccgggcggcgcggtcgaggtcgcggtgccgcccggttcgcgcaatggccgcaagctgcggctgcgcggccgcggcattccgggcgacccgcccggcgatctgtacctggtgctggacctggtgctgccgccggccgattccgaggccgcgcgcgaggcgtaccgcaagatggcgcaagacctggcgttcgatccgcgccgcaatttgggagtc

SEQ ID NO: 14812 - DNA, 1473 bp, Bordetella pertussis
atgctccaccttttctccggcctagacctctgggtaggtctcagcctcgtcctggcgttgacattcgttctcgccttcgaattcatcaacggctttcacgacaccgccaatgcggtggccacggtcatctacaccaaggccatgccgccgcacctggccgtcattctctccggcatcttcaacttcctcggcgtgctgctgggcggggtgggcgtggcctacgccatcgtgcacctgctgccggtcgaactgctgatcaacgtcgataccgggcgcggcctggccatggtcttcgccatgctgtcggcggccatcgcctggaacctgggcacctggtatttcggcatcccggcctccagctcgcacaccctgatcggctcgatcctgggcgtgggcatggccaacgccttgctgaccgacatctcgctggccgaaggcgtgaactggggcaaggcgatcgatatcggcctgtcgctggtggtctcgccggtggccgggttcatggtggccggcggcatcctgctgctgctcaagcgctggctgccgctgtcgaaaatgcacaagacgcccgagcagcgccgcgccatcgacgccaagaaacacccgcccttctggaaccgcctggtgctggtcctgtcggccatgggcgtcagcttcgtgcacggttccaacgacggccagaaaggcatcgggctgatcatgctggtgctgatcggcatcgtgcccgccaagttcgtgctcgacgtcaacagcaccacctaccagatcgaccgcacccgcgatgccgccagccacctgagcgcgttctaccaccgcaacgaagccacgctgggcgagttcctggccctgtcgcgcggcggcaacggcgccgacctgcccaagacgttccgctgcgatcccaagctaaccatgcccaccatcgccgccctgcaggacgacctgcgcggcgtgaccaactacgccgatctctcggccgacaagcgcatcgatgtgcggcgctacctgctgtgcctggacgacacggccaagaaggtcgcgcggctggaaggcctgccggcgcgcgagcgcgccgacttgcagcgattgcgcggcgatctcaccaccaccaccgaatacgcgccgctgtgggtcatcgtggcggtggcgctggcgctgggcatcggcaccatggtgggctggcgccgcgtggtgctgaccgtgggcgagaaaatcggcaagcagggcatgacctacgcccagggcatggcggcccaggtcaccgcggtcggcgccatcggcctggccaacgtgttcagcctgccggtctcgaccacccacgtgctgtcgtccggcgtggccggcaccatggtcgccaacaacagcggcctgcagggcggcaccgtgcgcaccatcctgatggcctgggtgctgacgctgccggcctcgatgctgctgtcggccggcctgttctgggtgggcacgctgctcgccgcg

SEQ ID NO: 14813 - DNA, 2856 bp, Bordetella pertussis
atggacgcgattcgcattcggggtgcgcgcacccacaatctcaagaacgtctcgctggacctgccgcgccaccagttggtcgtggtgacgggcctgtccggttcgggcaagtcgtcgctggcgttcgacacgctgtatgcggaaggccagcgtcgctacgtggaaagcctgtcggcatacgcgcgccagttcctccagctgatggacaagcccgatgtcgatctgatcgaaggcctgtcgccggcgatctccatcgaacagaagtcggcgggccacaatccgcgctcgaccgtgggcaccatcaccgagatccacgactacctgcgcctgctgtacgcacgggtgggcacgccctactgccccgaccacgggctgccgctgcaggcgcaaagcgtcggccagatggtcgacgccgtgctggcctggccggccgaggcgcgcctggccgtgctggcgcccattgcgcgggcccgcaagggcagcttcgaggacgaactggccagcctgcaggcgcagggcttcgtgcggctgcgggtcgatggccagctgcaggaaatcgagcagctgcccgcgctgaagaaaaccgagaaacacgacctggacgtggtcatcgaccgcctgcgcatccgccccgaaagccagcagcgcctggccgagagtttcgagaccgcgctgcagctggccgaaggccgcgccatcgcgctggacatggacagcggccgcgaacaggtgttctccagccgttacgcctgcccgatctgcagccacagcctggccgagctggagccgcggctgttcagcttcaacaatcccatgggcgcctgtcccggttgcgacggcatcggccaggtaggctttttcgaccccaagcgcgtggtggccttcccggagctgagcctggccgccggcgcgatccgcggctgggaccgccgcaactccttcacccactccctgctgaccagcctggccacccattacgaattcgacatcgataccccgttcgaggagctgccggccgaagtgcgcgagaaggtactgcacggctcgggcgaggaagagatcgccttcttctatgtcaatgaaaagggccgcagcacggtcaagcgccacccgttcgaaggcgtgatcccgaacctggagcgccgctggcgcgaaaccgactcggccacggtgcgcgaggagctgggcaagtaccgcaacatcaagacctgcccggactgcggcggctcgcgcctgcgtcccgaggcgcgcaacgtgctgatcggcagcgagccgcgcgagggcgaacgccatggccaggcgatcttcgaggtcgagagcatgccgctgtcggtgtgcctggactggttccgccagctgcagctgaccggcgccaagcaggagatcgcgcagcgcatcgtgcgcgagatcgaggcccgtctcagcttcctgaacaatgtcggcctgaactacctgtcgctggatcgcagcgccgatacgatctcgggcggcgaagcccagcgcatccggctggccagccagatcggctcgggcctgaccggcgtcatgtatgtgctggacgagccatccatcggcctgcaccagcgcgacaacgaccggctgatcggcaccctgcagcacctgcgcgacctgggcaacagcgtcatcgtggtcgagcacgacgaggacatgatccgctgcgccgattgggtggtcgacatgggcccgggcgccggcgagcacggcggccaggtggtggcgcagggcacgccggaggcggtgcagaccgacccgcaatcgctcaccggccagtacctgagcggcgcgcgcgccatcgagatcccggcgcgccggccggtcgccgacgaccagccctggctgcacctgtccggggccaccggcaacaacctcaaatcggtcgatctgcgcatcccggcggcgcgcctggtgtgcgtcaccggcgtctcgggctcgggcaaatccaccctggtcaacgatacgctggcggtggcgctggcgcgccagctcaaccatgcgcaaggcgagccggcgccctatgccggcctggccgggctggagcacttcgacaagaccatcagcgtggaccaaagcccgatcggacgcacgccgcgcagcaaccccgccacgtacaccgggctgttcacgcccatccgggaactgttcgccggcgtgcccgaagcgcgcgcgcgcggctacgacccgggccgtttcagcttcaacgtcaagggcggacgctgcgaagcctgccagggcgatggcgtggtcaaggtcgagatgcatttcctgccggacatgtacgtgccgtgcgacgtctgccacggcaagcgctacaaccgcgagacgctggaaatccgctaccgcggccgcaacatcagcgaagtgctggacctgacggtcgaacaggcgctggaatatttcgaatcggtgcccgccattgcgcgcaagctgcacacgctgatcgatgtgggcctgtcgtacatccggctggggcaaagcgctaccacgctgtccggcggcgaggcgcaacgggtcaagctgtcgctggaactgtcgcgccgcagcacgggccgcaccctgtacatcctggacgagccgaccaccggcctgcacttccatgacatcgagctcttgctcaaggtcctcaaccaactggtcgacagcggcaatacggtactgatcatcgagcacaacctcgacgtcatcaagaccgccgactggctggtggatatggggccggaaggcggcgacggcggcggacgcgtggtcgcgcagggcacgcccgagcaggtggcggccagccccgacagccacaccggccactacctggggcgggtattgcgcaacggcaaacggcgc

SEQ ID NO: 14814 - DNA, 539 bp, Bordetella pertussis
gtcaacaaagtcattctcgtcggcaatctgggtcgcgacccggaagtgcgttacagcccggatggggcggccatctgcaacgtgtcgatcgccacgacctcgcaatggaaggacaaggccagcggcgagcgccgcgaggaaaccgaatggcaccgcgtggtcatgtacaaccgcctggccgaaatcgcgggcgaatacctgaagaaggggcgttcggtctacatcgagggccgcctgaagacccgcaaatggcaagacaaggacaccggcgccgaccgctacagcaccgaaatcgtggccgaccagatgcagatgctgggcgggcgcgatagcggcggcgacagcggcggcggttacggcggtggctacgacgacgcaccgcgccagcagcgcgccccggcccagcgcccggcggccgccccgcagcgccccgcgccgcaggccgcgccggccgccaacctggccgacatggacgacgatattccgttctgaggcgcttgcagccaatcgctggatgcgaaagccctgcccaggcaggg

SEQ ID NO: 14815 - DNA, 446 bp, Bordetella pertussis
ttgaaagcgcgcctgcgccagggacaggcaatcaccatgatcggcaacagcctgccggatacctatgcggccgagatggtggccagcgcgggattcgacgcggtgatgatagatctgcagcattccgccatcgggctgcacgaagtcaacgacctggcgcgcgcggtgcgcgcccagggatgcgcgccggtggtgcgcgtggcggccaatgatccggcggcgatcaccaaggtgctcgatggcggcgtggatgccgtggtggcgcccatgatcaacagcgccagagcatccaggactattacgcgcagacccgcgaccgcctgctgcccatcgcgatgatagagaacgaggagggcgtgcgccaggccgagcagatcatgcgtacggaggggctgggcgcgatctacgtgggcgcgagcgacctttccatcgccatggggatggat

SEQ ID NO: 14816 - DNA, 648 bp, Bordetella pertussis
atgtccacgtctacctccccttcggccccgcttgtccgcagccatcccgacgaactgctcatcggcctggtgtcgatttccgatcgcgcttccaccggggtctaccaggaccagggcctgccgtcgctgcgcgactggctgggcacggccctgacttcgccctggcaggccgtcgagcgcctgattcccgacgaacccgccgccatttcggccgcgatggtcgacctggtggacggctgcggctgcgacctggtgctgaccaccggcggcaccggcccggcgcggcgcgactgcacgccggaagcgaccctggccgtggccaccaaggagatgcccgggttcggcgagcagatgcgccagatcagcctgcgcttcgtgcccaccgccatcctgtcgcgccaggtggcggtgatccgcgagacggccggtcatgccgcgctgatcatcaatctgcccggccagcccaaggcgatccgcgaaacgctggagggcttgaaggacgccgacggcgccgtgctggcggcgggcgtgttcgccgccgtgccctattgcatcgacctgatcggcgggccgtacgccgaaaccgatccggccgtgatcaaggcgttccggcccaagtcggcgctgcgccagcccgccgcccggcaa

SEQ ID NO: 14817 - DNA, 864 bp, Bordetella pertussis
gtgcctgtgagcgcggccgcccgcctgtggcgcggcgcctggctggcgctggccctgctggccgcccagggcgcgcaggcacagggctacatcagccgcaagctgagcgcgccggtgcccggcggggtggccgtggtggacctggggcaggccgcccaggcgccggaggtcacgtaccgcggccgtcccgtcatggtgctgcgcgaagccgacggcccgtggatcgccgtggtcggcattccgctggcggccaggcccggcagcgaggcgatctcggtgcggggttccggcggcgcggtgcgcagcattgcattcgatatcggcgccaaaaagtacacggcccagcacatcaagctgaagaaccagcggcaggtcacgcccaatccggacgacctcaagcgcatcgagcgcgaactggccgagcagacggacgcctatcgcatcttccgggccggcgtcacgcccagcaacgtgctgctggaccgcccggtgccgggccggctgtccagcccgttcggcctgcggcgctttttcaacggccaggagcgcaacccgcattccgggctggatttcgccgccgccgcgggcacgccgatcaaggcgccggcggccgggcgcgtcgtgctggtgggcgattacttcttcaacggcaggacggtgttcgtcgaccacgggcagggcttcatcagcatgttctgccacatgtcggagatcgacgtgaaggtgggcgacgaagtgccgcgcggcggggtggtgggcaaggtgggcgccaccgggcgcgccaccgggccgcatctgcactggaacatcagcctgaacgacgcgcgcgtcgatccggccatcttcatcggggcgttcaagccc

SEQ ID NO: 14818 - DNA, 543 bp, Bordetella pertussis
gtggtcccagcccgaagccattctgaattgacggagagacatatcatggcagccaaaccgcacacccaggccacgcgcgccgaagacgtgggcaacgagttcctggtcttcacgctgggcgaggaagaatacggcatcgacatcctgaaagtgcaggaaatccgcggctacgacgcggccacggtcacgcgcatcgcgaacgtgccgtccttcatcaagggcgtgaccaacctgcgcggcatcatcgtgcccatcgtggacctgcgcatcaagttcaacctgggcagcgtcgaatacaacgagcagaccgtcgtcatcatcctcaacctggaccgccgcgtggtcggcatcgtggtcgacggggtgtcggacgtgctgatgctcaacgcggcccaggtgcgtccggcgcccgagttcggcgccaccctgtccaccgagtacctgaccggcctgggcacggtggacgaacgcatgctcatcctggtcgacatcgagaagctgatgaccagcgacgagatggcgctggtggagaaagtggcgtcc

SEQ ID NO: 14819 - DNA, 387 bp, Bordetella pertussis
atggtagataagggaatgaagatactggtggtggatgatttccccaccatgcggcgcatcatacgcaacctgctcaaggagctgggtttcgagaacgtcgacgaggccgaggacggcgccatcgggctggagaaactacgcaacggcgccttccagttcgtggtgtcggactggaacatgccgaacctcgacggcctggaaatgctcaagcagatccgcgccgacgcggcgctgaagtcgttgccggtgctgatggtgacggccgaggccaagaaggagaacatcgtggcggcggcccaggccggcgccaacggctacgtggtcaagccgttcacggccgcgacgctggaagagaagctgaacaagatcttcgagaaactcgccggc

SEQ ID NO: 14820 - DNA, 630 bp, Bordetella pertussis
atgaatgcgacggacactggcatgcaggcagacccgaccgacctgatccagcggatcgcctcgttgacgcgcatgctgcgcgacagcatgcgcgagctcgggctggaccaggccatcaaggatgccgccgaggcgattcccgatgcgcgcgaccgcctgcgctacgtggcgcagatgaccgagcaggccgccaatcgggtattgaacgccaccgaggccgccggccccatccaggacggcatggcgcgcggcgcccaggcgctggacgagcgctggcagcaatggtacgaccagccgctcgagttgccgcaggcgcgcgccctggtgcaggacacgcgggccttcctggccgccgtgccgcagcacacgcagcagacccaggccaagctgatggaaatcgtcatggcgcaggatttccaggacctgaccggccaggtcatcatgcgcatgatggacgtggtgggcgcgatcgagcgtgaactgctgcaggtgctgctggacaacgtgccgcaggagcgccgcgacgaagccaattcgctgctcaacggcccgcaggtcaaccccggcggcaaggccgacgtcgtcaccagccaggaccaggtcgacgacctgctggccagcctgggcttc

SEQ ID NO: 14821 - DNA, 1074 bp, Bordetella pertussis
atgcctatcacgcaggagcacgccatcatgagcacttcgtttcccacccagaggctgggcgccaccgatatgcggatcacgcgcgtgggtttcggcgcctgggcgataggcgggccgggctggtccgtgggctggggagcgcaggacgacggcgagtccatccgcgccatccgccacgcggtgaaccgcggcatcaactggatcgacaccgcggccgtctacgggctgggccattccgaaagcctggtgggccgcgcgctggccggcatgccgccttcggagcggccctatgtcttcaccaagggcggcctggtgggctcgcccgccgaccccatggccaagccgcgccgtatcggcgccccggacagcctgcggcgcgaggtcgaggcgtcgttgcgcaggctcggcgtcgaagccatcgatctgtaccagatgcactggccggccggcgacggcacgcccctcgaagtgtattggcaagcgctgctcgacctgcgccaggccggcaaggtgcgccacgtcggcctgtccaaccacaatctggcgcaggtgcaggcggccgagcagctgggccacgtcgaaacgctgcaaccgccgttctcggccatccgccgcgaaagcgccgcggacctgctgccctggtgcgcaagccacgacaccggcgtcatcgtctacagccccatgcagtcgggcctgctgtcgggcgccttcagcgccgagcgcgccgcggccttgccggaaggcgactggcgcgcccgcaacgccgagttcatggcgccgcggctggcggccaatctcgagtttgccgatgcgctcaagccgatcgcgcagcaccacggcgccagcgtgggcgcgattgccgtcgcctgggcgctggcctggcccggtgtcaccggcgccattgcgggcgcacgcagcgccgagcaggtcgatggctggctgggcgcggcgacgctggagctggattccgatgacatgcgccagattgccgatgcgctggcgcgcaccggcgtgggcggcgggcccttgctgccgccgcccgacgaggcggcgcttgcgctgacggcccggccc

SEQ ID NO: 14822 - DNA, 1588 bp, Bordetella pertussis
tggcgccaacccgccatcctggccgccgcgggcgccgcgcacgcactgagcttcgcccccgatcccctgcccgcctggtcgctggcgccggtgcaggtcatcgcgctggcggtggccgcgcatgccagcttgcaggcgccttcggcgcggcgggcgctggcgcgcggctggctgttcgccatgttcagcttcagcctgggcctgtactggatgtacgtcagcatgcacgactacggcggactggccgcgccgctggcggccgcgggcgtgctggcactgtcggcgttcctggcgctgtttccgggcctggcctgcgccgccgcgcgctggctgtgcccgccccattgggacgccagcccgccggcgcgcgcgcgccgcacgctctacacggccgccacctgggccgcctgctgggccgcgctcgaatggctgcgcgccgtggtgctgaccggcttcccgtggctgaacatcagctacgcgcacgtcgacagcccgctggccggctgggcgccgctgctgggcgtgcacggcatggcgctgctggccgccttcgcggccgccgcgctggccggcctgtggcaatcggcctcgggacgcatcgacagccgccaggcgctggccgccggggtggcgctgctgctggcgggcgccggctggctgctcggccagttcagctggtcgcggcccgaaggcaagccgctgcacctgcgcctggtgcagggcaacgtcgagcagtcgcagaagttcgatccggcgctgctggaaaccgggctgcggcggcacctcgaactggcctcgctgccgccgcgccccggcgaacccaagcccgatatgatcatcctgcccgaaaccgtcctgcccgttttccaggaccagttgcccgccagcgtctgggacgcctggatcgaggtggcgcggcgcgccgacacccgcatcgccatgggcgtgccgctgcacacgcagcccgacggcgccacgggacaccgctacaccaacagcgtgatcggtttcgacgccagcacgcccgtcgaacaattgcagcaccggcaccaccgccatgcgctacgacaagcagcacctggtgccctggggcgaatacgtaccgccgggattccgctggttcgtcgacatgctggacatcccgctgggcgacttcgaccgcggcgccgcgcgccagcccagtttcgacatcgcgggccagcgcatcgccttcaacatctgctacgaagacctgttcggccccgaactgctgccggcgctgcaggatggccccgacggccgccctggcgccaccatcatggccaatgtcagcaacctcggctggttcggcaacacctgggcgctgcgccagcacctgcagatcggccggctgcgcaccatggaaacggcgcgccccatggtggccgccaccaacaccggcatcaccgccgccatcgatgcgcgcggacgcgttgccgccgccttgccggccgaccgcgccggcgtgctgccggtcgccgtacagggcatgaccggcctgacgccgtacgcccgcttcggcgacaagcccgcgctggcgctgatcggcctgctgctgatcgccgcggcg

SEQ ID NO: 14823 - DNA, 885 bp, Bordetella pertussis
atgtccgacccttaccctgctaccgaggcgcacgctcagcgcgccgccaaatcccctcccaaatccctgctggaccgcctgctttccctggtgcggcgcgagcctgaagaccgcgaaggcatcaaggccatcctcgaagccgcgcacgagcgcgagctgctcgacgcagagtcctacgccatgatcaagggcgcgctggccgtgtccgagcgcaccgtcgccgacatcatggtgccgcgctcgcgcatggatctgctcgatatctcccagccgctgccgcagttgctcgccaccatcatcgagaccgcgcactcgcgctttccggtctacgaagacgaccgcgacaacatcatcggcatcctgctcgccaaggacctgctgcgctacatgctcgagccggcgctggatatccgctcgctggtccggccggccgtgttcatccccgaggtcaagcgcctgaacgtgctgctgcgcgagttccgcgccagccgcaaccacctggcgatcgtcatcgacgagcatggcggcatttccggcctggtcaccatggaagacgtgctggaacagatcgtcggcgacatcgaggacgaattcgacgaggacgaggaagaatcgatcttccccgaaggcgagaaccaatggcgcctgactgcctcgacggacatcagccatttcaacgccaccttcgccaccgacctgcccgacgacgagtacgacagcgtgggcggctggctgggcggccagctggggcgcattccgcgccgcggcgacagcgccgaccacgacggcctgcatatcgaagtggtgcgcgccgacgcgcggcgcgccctgtggctgcgcgtgcgccgcaacgcgggcgcacagcctccggcgagcgccgctgaa

SEQ ID NO: 14824 - DNA, 1134 bp, Bordetella pertussis
atgaccggactgcaattcgaactgctggccaccgacggcggcgcccgccgcggccgcctgacgctcaaccacggcgtggtcgagacccccattttcatgtcggtcggcacctacggcagcgtcaaggccatgctgccgcacgagctcgaggacatcggcgcgcagatcgtgctgggcaacaccttccacctgtggctgcgccccggcaccgccatcatggaaaagcacggcggcctgcacggcttcatgcaatgggacaagcccatcctgaccgactccggcggcttccaggtcttcagcctgcaaggcatgcgcaagatcaccgaggaaggcgtgaaattcgcctcgcccatcgacggggcgcgcctgttcctgacgcccgaggagtcgatgcgcatccagcgctcgctgaattccgatatcgtcatggtgttcgacgagtgcacgccgtacgaaatcgatgggcgccccgccagcatcgacgaagacgcccgctcgatgcgcatgtcgctgcgctgggcgcgccgctcgcgcgacgagttcgaccggctgggcaaccccaacgcgctgttcggcatcgtgcagggcggcatgtacgaggcgctgcgcgacgagtcgctggccgggctggccgaaatcggctttcatggctacgccatcggcgggctgtcggtgggcgagcccaaggaagacatgatgcgcatcctggcgcatgtcacgccgcgcctgccggcgcaggcaccgcgctacctgatgggcgtgggcacccccgaggacctggtcgagggggtggcgcgcggcgtggacatgttcgactgcgtcatgccgacccgcaacgcgcgcaacggctggctgttcacccgttacggcgacgtcaagatccgcaacgccaggtaccgcgacgacacgcgcccgctcgaccccagctgcgcctgccacacctgcggccacttctcgcgcgcctacctgcaccacctgcagcgcgccaacgaaatcaccggcgcgcgcctgaacaccttgcacaacctgcacttctacctggccatcatgggagaaatgcgcgaggcgatcgccgccggccgcttcgaggcctggcgcgcccagttcgccgccgatcgcgcgcgcggggtcgac

SEQ ID NO: 14825 - DNA, 1041 bp, Bordetella pertussis
gtgcccacccctcttacgcttgccgatttcgactatcacctgccgcccgagctgatcgcccagagcccggccgccgagcgcggcggcagccgcctgctgcacctggacgcggccagccggctgcacgatcgccgctttcccgacctggccgggctgctgcgcccgcacgacctgctggtgttcaacgacacgcgcgtgatcaaggcgcgcctgacgggccagaaggccaccggcggcaaggtcgaggtgctggtcgaacgcatcacggcgccggaccgcgcgctggcgcacgtgcgcgccagcaagtcgccggggccgggcatgcgcctgcgcctggccgaggccttcgaggccgaagtgctgggccgcgagggggagctgttcgacctgcgctttcccgcgccggtgctggacctgctcgacgcccacggcgccacgccgctgcccccctacatcacgcatgcggccgacgcgaccgacgaacggcgctaccagacggtctatgcgcgcgagccgggcgcggtcgccgcgcccaccgcgggcctgcacttcgaccagcccatgctggagcaactggccgcccagggcgtgcaacgggccttcgtgacgctgcacgtgggcgccggcaccttccagccggtgcgggtgcagaacctcgccgagcacatcatgcacgccgagtggtacacggtgcccgaagccacggtggccgccatcgcccgggcacgggcgcacggcggacgcatcgtggcggtgggcaccaccagcgtgcgcgcgctggaatcggccgccgcccaggcgcaggacgggccgctggccgccgcgcagggcgatacgcggctgttcatcacgcccggctaccgctaccgggccgtcgacgccctgctcaccaatttccacctgccgcaatccacgctgctgatgctggtgtcggcgctggccggcgtggagccgatccgccgcgcctacgcccacgcggtcgccgaacgctaccgcttcttcagctacggcgacgccatgttcatcgagacccccgcccca

SEQ ID NO: 14826 - DNA, 1515 bp, Bordetella pertussis
atgtgtccgcgtgcgccgctgcgcgccagcttaggtatgcttgcattcttgaacgaaagaacatgtaacaggcagggagcgatgcggcgggcaggcaaacaaggcaagtggcaacaatggctggccggcgtcatgctggcgctgggcgccgccggcgcggcggcgcagggcctgccgtccagtctggtggcggcctggaaggcgaccaagctgcccgaccagtccctttcgctggtggtgcaggagatcaacggcccgcggctggcgacgctcaacgccaaggagccgcgcaatccggcttccgtcatgaagctggtgacgacctgggccgcgctgtccgagctggggcccagctacgcgtggcgcaccgaattcctgaccgagcccggcaatcgtccggatgcccacggcgtgctgcgcgggccgctgtacctgcgcgccggcggcgatccgcagctgctgctgcaggatttgtgggccctgctgcgcgagctgcggctgcgcggcgtcaagcagatcggcgacctggtggtggaccgcagcattttcgggcaggtggccatcgatcccggcgccttcgacggcgcctccgaccgggcctacaacgccagcccggacgccctgatggtgggcttcggcgcgcaacgcctgctgttcacgcccgacgccgcggcgcgcaaatgggtgccgatgatcgatccgccgctgccgggcctgcgcctggaaggcgcggtcgagtggagcgacgtgcgttgtccggggccgccggtggtcggcaccgagccggtggtgacccagcagggcgtgtccatccgcctgagcggcaaggtggccggctcgtgcggcgagttcagcctgtaccggctggcgctgtcgcagcccgagtacgccagcgcggtgttccgcctgctctggcgcgaactgggcggcaccctcaagggccagatccgcagcggcgtcgtgccgccggacgctgtggtgctggccagccacgactcgcccaccctgggcgaggcgatccgcaccatcaacaagcgcagcaacaatgtgatggcgcgcaccctgctgctgaccctgggcgccgagcgcggccgccggccggccaccgtcgagagcagcggcgtggtcgcccgcaccgtgctgggcgcgcaagggctggaaatgcccgaactggtgatcgacaacggctccgggctgtcgcgcgagggcagggtgtcggccgacagcctggcttccatgctcacggtggcctggaattcgcccctgatgccggaattcatctcgtcgctggccatcgccggcgtggacgggacggtgcggcggcgcctcaagggcaacggcgcgcagggcatggcccacctgaagaccggctcgctgcgcgatgtacgggcggtggccggctatgtgctgggagccagcggcaagcgttacgtggtggtcagcatggtcaaccacgagaacgcggccgccgtgcggtcgttcgacgacgcgctggtcgcctggctggccgaacag

SEQ ID NO: 14827 - DNA, 729 bp, Bordetella pertussis
ttgcccgccaaccggcttaaaatccgcatgttcccgtcggcggccctgcgccgccggccattcgagagccatttactggagattccgcacatgcctgtgcatgaaatccgccatccgctgattcgccacaagctgggcatcatgcgccgcgccgacctcagcaccaagagctttcgcgagctgtcgcaggaagtcgcggccctgctgacctacgaggcgaccaaggacatgccgctggcgcccgccagcgtcgaaggctggtgcggcaccgtcgaggtcgacaagatcaccggcaagaaagtgaccgtggtgcccatcctgcgcgcgggcatcggcatgctcgacggcgtgctgagcctgattccgggcgccaaggtcagcgtggtcggcgtggcccgcaacgaagaaaccctgcaggcgcatacctacctggaacgcctggtgggcgagctggaccagcgcctggccctgatcgtcgacccgatgctggccaccggcggttccatggtcgccgccatcgacatgctcaagcgggccggctgtcgcgaaatccgggcgctgaccctggtctcggcgcccgaaggcatcgacgccgtgctcaaggcgcatccggacgtgcagatctacacggcctcgatcgaccagggcctgaacgagaacggctacatcatgcccggcctgggcgatgccggcgaccgcatcttcggcaccacgcagaagcacgccgaa

SEQ ID NO: 14828 - DNA, 2310 bp, Bordetella pertussis
gtggccggcgaacaggcccaggccagcatcgccgacagcaccctgcagggcgctggcggcgtgcagatcgagcgcggcgccaatgtcacggtccaacgcagcgccatcgtcgacgggggcttgcatatcggcgccctgcagtcattgcagccggaagaccttccgcccagccgggtggtgctgcgcgacaccaacgtgaccgccgtgcccgccagcggcgcgcccgcggcggtgtctgtgttgggggccagtgagcttacgctcgacggcgggcacatcaccggcgggcgggcagcgggggtggcggccatgcaaggggcggtcgtgcatctgcagcgcgcgacgatacggcgcggggacgcgcctgccggcggtgcggttcccggcggtgcggttcccggtggtgcggttcccggcggcttcggtcccggcggcttcggtcccgtcctcgacggctggtatggcgtggacgtatcgggctccagcgtggagctcgcccagtcgatcgtcgaggcgccggagctgggcgccgcaatccgggtgggccgcggcgccagggtgacggtgtcgggcggcagcttgtccgcaccgcacggcaatgtcatcgagaccggcggcgcgcgtcgctttgcgcctcaagccgcgcccctgtcgatcaccttgcaggccggcgcgcatgcccaggggaaagcgctgctgtaccgggtcctgccggagcccgtgaagctgacgctgaccgggggcgccgatgcgcagggcgacatcgtcgcgacggagctgccctccattcccggcacgtcgatcgggccgctcgacgtggcgctggccagccaggcccgatggacgggcgctacccgcgcggtcgactcgctgtccatcgacaacgccacctgggtcatgacggacaactcgaacgtcggtgcgctacggctggccagcgacggcagcgtcgatttccagcagccggccgaagctgggcggttcaaggtcctgacggtcaatacgctggcgggttcggggctgttccgcatgaatgtcttcgcggacctggggctgagcgacaagctggtcgtcatgcaggacgccagcggccagcacaggctgtgggtccgcaacagcggcagcgagccggccagcgccaacaccctgctgctggtgcagacgccactaggcagcgcggcgacctttacccttgccaacaaggacggcaaggtcgatatcggtacctatcgctatcgattggccgccaacggcaatgggcagtggagcctggtgggcgcgaaggcgccgccggcgcccaagcccgcgccgcagccgggtccccagccgccgcagccgccgcagccgcagccggaagcgccggcgccgcaaccgccggcgggcagggagttgtccgccgccgccaacgcggcggtcaacacgggtggggtgggcctggccagcacgctctggtacgccgaaagcaatgcgttgtccaagcgcctgggcgagttgcgcctgaatccggacgccggcggcgcctggggccgcggcttcgcgcaacgccagcagctggacaaccgcgccgggcggcgcttcgaccagaaggtggccggcttcgagctgggcgccgaccacgcggtggcggtggccggcggacgctggcacctgggcgggctggccggctatacgcgcggcgaccgcggcttcaccggcgacggcggcggccacaccgacagcgtgcatgtcgggggctatgccacatatatcgccgacagcggtttctacctggacgcgacgctgcgcgccagccgcctggagaatgacttcaaggtggcgggcagcgacgggtacgcggtcaagggcaagtaccgcacccatggggtgggcgcctcgctcgaggcgggccggcgctttacccatgccgacggctggttcctcgagccgcaggccgagctggcggtattccgggccggcggcggtgcgtaccgcgcggccaacggcctgcgggtgcgcgacgaaggcggcagctcggtgctgggtcgcctgggcctggaggtcggcaagcgcatcgaactggcaggcggcaggcaggtgcagccatacatcaaggccagcgtgctgcaggagttcgacggcgcgggtacggtacacaccaacggcatcgcgcaccgcaccgaactgcgcggcacgcgcgccgaactgggcctgggcatggccgccgcgctgggccgcggccacagcctgtatgcctcgtacgagtactccaagggcccgaagctggccatgccgtggaccttccacgcgggctaccggtacagctggtaaagc

SEQ ID NO: 14829 - DNA, 1479 bp, Bordetella pertussis
atgaaccccggtccctatgatcggctgacattcgcgggccttcccgcgtggctgatttccatgacgctgttcccgattttcgccgacctgacggggcggcgcgtactggtggtgggcggcggcgccgtcgccgtccgcaagacacaggccctgctgcaagccggcgccgaggtcgtcgtgggcgcgccgcgcctggatccggcgctcgccgccctggccgagcagggcggcatcgcccgcctggacggcggcttcgaacccgcctggctggccggcgcctggctggtggtggccgccaccgacgaccgcgccgtcaacgcggcggtcagcgaggccgcgcgggcgcgccgggtattctgcaacgtggtcgacgatgccgaactgtcgtccttccaggtgccgtccgtcgtcgaccggtcgccgctgatcgtggccatctcctcctcgggcgtggcgcccgtgctggcgcggcgcctgcgcgagcgcatcgagtcgctgttcgaccattcgctcggccagctggcagccctggcggcgcgctatcggccgcgcatccgcgccgcccgccccgacctcggccagcggcggcgtttctacgactggctgctcgacggcccggtcgcggcgcgcctgcgccagcaacagcccgggctggccgaacaggaactggaacaggcgctgcgcgcgccgcaggccgccccccggggcagcgtcgtgctggtgggcgcgggcccgggcgaccccggcctgctgacgctcaaggcgctgcgcgcgctcaatgaagccgacatcatcctgtacgaccgcctggtcagcgagggcgtgctggcgctggcgcgccgcgacgctgaacgcgtgcccgtgggcaagctgcccggcaaaggccacgacgccacccaggcgcgcatccacgccctcatgctggcccaggcgcgcgccggccggcgcgtggtgcgcctgaaaggcggcgatgccttcatcttcggacgcggcggcgaagaactggaatacctgcgcgcgcacggcgtgccgtacgaggtcgtgcccggcatcaccgcggcgctggcctgcgccgcctatgccggcatgcccctgacgcatcgcgaccatgcgcagtcggtgcgcatggtcaccgcccactgccgcgccgaccaggacaccctggactgggccggcctggcccgcgaccagcagaccctggcgttctacatgggcgtgggccagctcgattacgtcaccgcgcgcctgctcgaacacggccgcgcgccggccaccccgttcgccctgatcgaaaacggcagccggcccgaacaacgcgtcgtcaccggcacgctggccgacctgcccgagatcgcgcgccggcgcggcgtgcgccccccggcgctgctggtcatcggcgaagtcgccgccctggccgacaccctgcaatggttcggccagcaccagcgcggcctgcccggcccgcaggccctggccgcc

SEQ ID NO: 14830 - DNA, 315 bp, Bordetella pertussis
atggccgcgagaagatccgacgaagcaacgaaagagaaactcatcgacagcgtcaagaccagcctcaatgatgccgagaccttgctgcgcgaagccgccagcaccacgggcgacaaggcgaccgaattgcgcgagcgcgcgctggcatcggtgcgccgcacccgcgaggcgctgtacgacgcgcaggacgcggtgctcgaacgcggccgccgagcggcccgcgccaccgacgattacgtgcacgacaatccctggcaggccatcagcatcgcaggcgtgaccggcctgctgctcggcctgctgatcagccgccgc

SEQ ID NO: 14831 - DNA, 909 bp, Bordetella pertussis
atgattccggaccccgccacggccccctccatgaaccctacgcaaaccacgaaccccatgcgccccttccgctcggtgctttatacccccggcgccaacgcgcgcgcgctggcgcgcgcccgcgaactcgacgccgatgcgctgattctcgacctggaagacgcggtcgcggtgtcggccaaggaagaggcgcgcgtgcaggtgacgcacgccttgcgcgagggcggcttcggacgacgcagcgtcatcgtgcgcgtcaatggcctggacacgccctggggcgaggacgatgtgcgggcgctggcgccgctgggtccgcatgcgatgctgctgcccaaggtcgaacatcccgcgcagctggcgcgcgccgccgcgctggcggccgaggccggcgcgccgggcctggcatggtgggccatgatcgaaacgccgctggccatcctcaatatcggcgccatcgccgccgcgggcgcgccgctgcgggccctggtggccggcacgtcggacctggtcaaggcgctgcatgcgcgccacacgccggcgcgcgccgaagtccaggcggcgctgtcgatgacggtgctggccgcgcgcgcgcatggactgctggcgctcgacggcgtgcacctggacctggccgacgccgaaggcctgcgccacgcctgccggcaaggccgcgacctgggcttcgacggcaagacgctgatccatccgcgccagatcgacagcgccaacgccgccttcggaccgtcggaagccgaggtcgtgcgcgcgcacgccatcatggcggcctggcaggacgcgcaggcgcacggcgcgggcgtgaccgtggtcgacggcatgctggtggaagcgctgcacgtcgaggacgcgcagcgcgtgctggcgctggcccaggccatcgccgcggac

SEQ ID NO: 14832 - DNA, 822 bp, Bordetella pertussis
gtgatcgccgccgccggcgcccgcggggcgccggccataggaagcaaaatggaaaacaccgcaaccgctgccaaagccaagctggaagtcaagaacctgaatttctactacggcaagttccatgcgatccgcaatgtgaacatgtcgatccgcgagaacaaggtcaccgccttcatcggcccgtcgggctgcggcaagtcgacgctgctgcgcaccttcaaccgcatgttcgagctgtaccccggccagcgcgccgaaggcgagatcctgctcgacggcgaaaacctgttgacgtccaagaccgatatttcgctgattcgcgccaaggtcggcatggtgttccagaagcccacgccgtttcccatgagcatctacgacaacatcgccttcggcgtgcgcctgttcgagcggctcagcaagggcgagatggacgagcgggtcgagtgggcgctgagcaaggcggcgctgtggaacgaggtgaaggacaagctgcaccaaagcggcaacagcctgtcgggcggccagcaacagcgcctgtgcatcgcgcgcggcgtggccatcaagcccgaagtgctgctgctcgacgagccctgctcggcgctggacccgatctccaccgccaagatcgaggaactgatcgccgaactcaagcacgagtacacggtggtgatcgtcacgcacaacatgcagcaggcggcgcgctgctccgactacaccgcctacatgtacctgggcgagctgatggagtacggcgccaccgaccagatcttcgtcaagccggcgcgcaaagagacggaagactacatcaccggccgcttcggc

SEQ ID NO: 14833 - DNA, 1014 bp, Bordetella pertussis
atgagcgcggtaatggataatagtgtgccgctgccgtcctccacggccgattcgaccactaccggcacgccttcgcctatgaagcaaaacaataacgcgctgatggatgcgctgttcaagaacctcacccggaccttcgccttcctggtgttcatcctgctggccgccatcatgatctcgctgatctatggcagccgcgaatcgctggccaagtatggcctgtcgttcctgtggctgaacgactgggatccggtccagcagaactacggcgcggtcgtgcccatcatcggcacgctgctgacctcgttcatcgccttgctgatcgccgtgccggtgtcgttcggcatcgccatcttcctgatcgagctggcgcccacctggctgcgccgcccgctgggcaccgccgtcgagatgctggcggccatcccgtccatcatctacggtatgtggggcctgttcgtcttcgtgccggtgttccagcaatacgtgcagcctgcgctgatcgccacgctgggcagcgtgcccatcatcggcggcctgttcgccggcccgccgttcggcatcggcatcttcaccgccggcctgatcctgtcgatcatgatcattccgttcatcgccgccgtcatgcgcgacgtgttcgagctggtgccccccatgctcaaggagtccgcctacggcctgggcagtaccacctgggaagtcatgtggcgcgtcgtgctgcccttcaccaagtcgggcgtcatcggcggcatcatgctggggctgggccgcgcgctgggcgagaccatggcggtgaccttcgtgatcggcaacgccttccgctggtcgggctcgctgttctcgccgggcaactcgatcgcctcggcgctggccaacgaattcaacgaggcaggcggcatccagaaatcggcgctgctcgaactgggcctgatcctgttcctgatcaccaccgtcgtgctggctttctcgaaaatgctgctggtgcgcctgtccagggccgagggccgccaggcc

SEQ ID NO: 14834 - DNA, 1356 bp, Bordetella pertussis
atgagtcaacgcaaatattttggtaccgacggcgtgcgcggcgaagtcggcggcccggtgatcaacgccgccttcgcgctgcgtctgggctatgccgccggccgggtgctggcgcgcgaacatcgcgagcacgccagcgggcgcggccgcaaccggccccaggtcgtgatcggcaaggacacccgcatttccggctacatgctggaatccgccctggaagccggcctgtcggccgccggtatcgacgtgctgctggccgggcccgtcccgacgccggccgtggcctacctgacgcgcacgctgcgcctggccgccggtatcgtgatcagcgcctcgcacaatccgtaccaggacaacggcatcaagttcttctccgcccatggcatgaagctgcccgacgacatcgaggccgccatcgagcaggcggtggacgagccgctgggctgcgtcggctcggaagaactgggccgcgcgcgccgcatggccgacgcccagggccgctacatcgaattctgcaagagcaccttcccgcacgacctggatctcaacgggctgaagctggtggtcgacgccgcccacggcgccgcctacaacgtcgctccgcatgtgttccgcgaactgggcgccgaggtgcatgccatcggcgtctcgcccgacggcttcaacatcaacaagggcgtgggcgcgctgcatccggaatcgctggccgaggaagtgcgcgcgcgcggcgccgacctgggcatcgcgctggacggcgacgccgaccgcctgcagatggtcgacggcaccggccgcatctacaacggcgacgaactgctctacgccatcgtgcgcgagcgcatgcagcgcggtccggtggccggggtggtcggcaccctgatgaccaactacggcctggagcgccagctgcagcagatcggcgtgggtttcgagcgggccaacgtcggcgaccgctacgtgctggagcagatgcaggcgcgcggctggctgtacggcggcgaaagctcgggccacctgctgtgcctggattgccataccacgggcgacggcacgatcgccgcgctgcaggtgctgacggcgctgcgtcgcgccgacgccacactggctgaatgggtggccgacctgcgcatgtatccgcagaggatgatcaacgtgccgctggctcccggcctggactggaaaacccacgacggcctggcgcgcgcgcgcggcgccgtcgaggccgagctggccggccggggccgggtgctgatccgcgcctcgggtaccgagcccaagctgcgcctgatggtcgaggccgaggacgaagcgctggcgcaggccagcgcccagaagctggccgacagcctgggcgcc

SEQ ID NO: 14835 - DNA, 840 bp, Bordetella pertussis
atggcaaataacttccagtgcgggcgctttgagttcgatctcgagcgcccgcttgtcatgggcatcgtcaacgtcacgcccgactcgttttccgatggcggcgagcacgccgataccgacagcgcgatcgcccacgcgcgccaattgatcgacgaaggggcccatatcctggacctgggcggcgaatcgacgcggccgggcgcgcagccggtcagcgcggccgacgagctggcgcgcatcctgccgctgatcgaagggctgcgcgactgcggcgtgccgttgtcgatcgacaccttcaagcccgaggtcatgcgcgccgtgcttgacgccggcgccgacatgatcaacgacatctacggtttccggcagcccggcgccatcgacgcggtggcgcgctcgcgctgcggcctgtgcgtcatgcacatgaagggcgagccgcgcaccatgcaggaggcgcccgagtacgccgacctgatgggcgaaatcggggtcttcctgggcgcgcgcgcccagcggctgcgcgccgcgtgggtcgacccccggcgcatcgtgctggacccgggcttcgggttcggcaagaccatggatcagaattatcagttgctgcgccgcctggccagcttgcgcgtctccagctaccccctgctggtgggcgtctcgcgcaaatccatgataggcgcggccaccggcaagccggtgggcgaccgcctggccggcagcgttgccgccgcgctggcatgcgtggcgcgcggcgccgccatcgtgcgtgtgcacgatgtcgccgcgaccgtggatgcgctaaaagtgtggcaggcggccgaacaaggagcagtccctaca

SEQ ID NO: 14836 - DNA, 1851 bp, Bordetella pertussis
atggtgatcgcgctggtgctgttcacggtgtttaagcagttcgacggacgtgcacagacccaggacggcgtcagctacacccagttcatggacgacgccaaggcgggccgcatccgcaaggtcgacgtgcagggcgacgtgctgtatgtcacgccggacgccggccgtccctattcgctgacgtcgccgggcgacctgtggatggtgtcggacctgctcaagtacggcgtgcaggtttcgggcaaggcccgcgaagagccgtcgctgctgatgagcatcttcgtgtcgtggttcccgatgctgctgctgatcggcgtatggatcttcttcatgcgccagatgcagggcggcgggcgcggcggcgcgttcagcttcggcaagtcgcgcgcgcgcatgctcgacgagaacaccaaccaggtgactttcgccgacgtcgccggctgcgacgaagccaaggaagacgtccaggaattggtcgatttcctgcgcgaccccagcaagttccagaagctgggcggccgcatcccgcgcggcgtgctgatggtcggctcgcccggcaccggcaagacgctgctggccaaggccatcgccggcgaggccaaggtgccgttcttcagcatctcgggctccgatttcgtggaaatgttcgtcggcgtgggcgcggcccgcgtgcgcgacatgttcgagaacgccaagaagcacgccccgtgcatcatcttcatcgatgaaatcgacgctgtcggccgccagcgtggcgccggcctgggcggcggcaacgacgagcgcgaacagaccctgaaccagatgctggtcgagatggacggcttcgagtcgggccagggcgtgatcgtcatcgccgcgaccaaccgccccgacgtgctcgatccggcgctgctgcgtccgggccgcttcgaccgccaggtggtggtgccgctgcccgacatccgcggccgcgagcagatcctcaaggtgcacatgcgcaaggtgccgctgtcgcccaacgtcgacgccaccatcctggcgcgcggcacgcccggcttctccggcgccgacctggccaacctggtcaacgaggcggccctgttcgccgcgcgccgcaacggccgcacagtggacatgtccgacttcgagaaggccaaggacaagatcatcatgggcgccgagcgccgctccatcgtcatgcccgaggaagagcgcaagaatacggcctaccacgagtccggccacgccatcgtggcgcgcatgctgcccaagaccgacccggtccacaaggtcaccatcatcccgcgcggccgtgcgctgggcgtgacgatgcagttgcccgaaaccgaccgctacagcatggacaaggagcgcctgctcaacaccatcgcggtgctgttcggcgggcgcatcgccgaagaaatcttcatgaaccagatgaccaccggcgcttcgaacgacttcgagcgcgccacggccatcgcccgcgacatcgtcacccgctacggcatgaccgacgagctgggccccatggtgtatgccgagaacgaaggcgaggtcttcctgggccgcagcgtcaccaagaccacgcatgtctcggaagcgaccatgcagaaggtcgacagcgagatccgccgcatcatcgacgagcagtacggcgtggcgcgcaagatcctggaagacaaccgtgcccgggtcgaagtgatgacctcggcgctgctcgaatgggaaaccatcgacgccgaccagatcgacgacatcgtcaacgaccgtccgccgcgtccgcccaagacgccgcaaggtccgtccgatacgttcgacaccccgcccaccgggctggctgccggcggcaatacggcggccgcggtc

SEQ ID NO: 14837 - DNA, 1152 bp, Bordetella pertussis
atggccgaagaaagcgatcttgaaaagtccgaagccgcctctcccaggcgcctggaaaaggcgcgcgaggaggggcagattgcgcgttcgcgcgagctgggcacgttcatgatgctggccgccggcgtggcgggcgtatggctgagcggttcgatgctgtaccagggcctgaccggcgtgctgcggcgtggcctggggttcgagccgcgggtggcgcaggacccgggcgtgatggtcgagcaggcggtgcatggcgccgggcgggcgctgctgacggtgctgcccatgttcggcatgctggccgtggtggcggtgctgtcggcggtgctgctgggcggctttgtcttctcgaccaagccgctggagccgaatttctcgaaattgagcctttggtcgggcatcaagcgcatgttttcggcccagaccgtggtcgaactggtcaaggcgctggccaaggccgcgctggtgggcggggtggcggtctgggtgatctggcactaccacgacgacatgctgggcctgatgcacgtggcgcccagcgccgcgctgaccagcgccatgtcgctggtggcgctgtgcagcgccctgatcgtgggctcgctgctgttcgtggtgctgctggatgtgccctggcagatctggaaccatctgaagaagctgcgcatgaccaaggaagatgtgcggcaggaacacaaggaaggcgagggcgacccccatgtgaagggccgcatccgccagcagcagcgcgccatggcgcgccggcgcatgatgtcggaggtgcccggcgccgacgtggtggtgaccaacccgacccattacgcggtggcgctgaaatatgcggacggcgcggccggcgcgccgcgcgtggtcgccaagggcaccgggctgatcgccgcccgcatccgcgagctcgccgccgagcatcgcatcccgacgctcgaggcgccgccgctggcgcgcgccctgcatcaacacgtcgaactgggacaggaaatcccgacggcgctttataccgcggtggccgaggtgctggcgtgggtgttccagctgcgcagctggcgtcccggactgggacgcgagccgcaggcgccgacggcgctggtcgtaccggccgaactggacccgcacagcccgaccgccgcccaaggagcc

SEQ ID NO: 14838 - DNA, 1011 bp, Bordetella pertussis
ttgagctctcccgactggcgactgtgcgtcgccccgatgatagacgtgaccgaccgccattgccgctatttccaccggctgctggcgccgcgcgcgcgtctgtacaccgagatgatcacgaccggcgcgctgctgcatggcgatgtggcgcggcacctggatttcgatgccgccgagcatccggtggccctgcagctgggcggcagcgagcccgatgcgctggcgcaggccgcgcggctgggccgccagtggggctacgacgaaatcaatctgaactgcggctgtccgtccgaacgggtccagcgcggcgccttcggcgcctgcctgatggccgagccggcgctggtcgccgattgcatgaaagccatgcaggacgccgtcgacatcccggtcacggtcaagcaccggctgggcctggactatgacgagtcatatggcttcgtgcgcgatttcgtgggccagatctacgataccggctgccgggtgttcgtggtgcacgcgcgcaacgcggtgctcaagggcctgtcccccaaggacaaccgcgagattccgccgctgcgctacgacgtggcgcgccagctcaagcgcgattttcccgattgcgtgatcgtgctcaatggcgggctggccgatgcgcaggccgcgcaggcggtggccggcgagtttgacggcgtgatgctcggtcgcgcggcctggcatacgccgcgggtcctgtccgaggtgtccttgcaatggtggccggccatacggctgcccagcgacgcgcaggtggtcgatgcaatgatgcaatacgccgcgacgcagattgcgcgcggcgtgccgctgcgcgtgatgacgcggcccttgctgggcctggtgaacggacaggcgggggcgcggcgctggcgccgcctgttgtcggacccggtgcggctggcggccaatgacccgtcgttgttgtacgaggcatggcgcagcctgcagggcgcgccgcgcgagcgcgacgcttgcgccgatccgctgccggcggtc

SEQ ID NO: 14839 - DNA, 702 bp, Bordetella pertussis
atgaccacagtcaacgaaaccacttcccaggccggcctggccctggcgcaggccggctccaacagcgccgcccagggcatccaggatcaattcctgacgctgctggtgacgcagctgcgcaaccaggacccgctcaacccgatggagaacgccgaactgacttctcagctggcgcagatctccacggtggaaggcatcaacaacctcaagaacaccatgctcgccatcagcgggcagatcgacgtgtcgcagtcgatggacgcggtgtcgatgataggcaagggcgtgctgatgccgggcgacaaggtgtcgctgggcgccgaccccaacgaccccgcccagcgcggcgccacgccgttcggcatcgatctgcagggcgacgcgaccaaggtgacggtcaaggtgctggatccctcgggcgccgtggtgcgcaccatggagctgggcgacctcaagaccggcgtgcacacgctgcaatgggacggcaacaacgacggcggccagccgctggccgacggcaagtattcgatcacggtgagcgccagcgacgccgacgcgaatccggtcaagaccgaggcgctgacctacggccaggtcaagagcgtggcgtattccaccaacggcctgcgcctggatctgggcctggccggccagatcagcatgctggatgtgcgcaaggtcatcggggcttccgggtcggca

SEQ ID NO: 14840 - DNA, 1908 bp, Bordetella pertussis
atgtccatttcccggcggcttttcctcagcgtcgtcctgctggcgggcctgctggtcatcggcacccaggctgccgggctggcggcgaactaccgggcgtcggtggaacgccagaagcgccatgtcgaaacagcggctgcttcgctggcctgggtgctgtcgcaatcgcatacgacgcccgcgcaatggcagaccctggcgaccgacctgcagcggcatggcggctatgcactggtgcgcatacaggagcactacaccgggcggatgatcgaggcgggccagctcagcgaggcgccggcgcgcgccgacggctcgctgcagcagggccgcgcctcgcagatcgtggccacgcgcaccttccgctcggccgacgggacctatgtcggctcggtcgccgtctacaacccggtcatcccgatcctggaagcccccttcctcaccgagagcgtggcgcagctggtgctgatcgtcgccggcctgctgatctggtacagctatatgtcgcgcctgcacgacaggctgcaacgcggtccgctgaaacggctggcccacaacctcgcccatatcggacaggccggcgtcgatccgaaactggccgaaggcctgccgcgcgaactgcagccgctgggcacggccctggtccagtcgcaccagcgcgtccatgaccaattgaggcagcagcgcgcccgcatcgacgcgctggagaacgagacgtaccacgacccggtcacgcggctgccgaaccgcaagttcttcaacgaaagcctgcggcgcgcggtgcaacgcgacggcggcgtcgatggccacctgctgattttccggcagcgcgacatggcggagatcaaccgccagatgaaacgcgaggcgaccgatcaatggctgcgcctggcctgcgcgcaactgagcaaaaccatcaaggagcaggccggcgccggcgcggtgctcgtacgcatcaacggttcggacttcgccgccctgctgcccggcctgccctcgccgcgcgcggccgtgctggccgaaaggctgcggcgcgaactgcgcgtgctgcgcctgcccctgcgcacgcacgggtggtgccgctgggccatggtgctcacgccctatacggtgggcgaacaagtcagcgacatcctggctcggctggaccatgcgctgatgcgcgcggaaatcgccgagagcgacgaagtcgagcccgcgttcagccagaccggcaatcgtatcgatggcgagtacggctggcaggacatcctgacgcgcgcgctcgaacaacaccgcttcttcctgacgctgtacccgcgccaggatgccgaaggccaggtgctgcataccgaagcgcaactgacgctgcgcgaccaggattcgcccgaacccctgcacgcgcagctgttcatgccgccggctgcgcgcctggggctatcggccgattgcgacatccaggcgatccgcatgagcatggaccagctggtcgcgcgcgacggcgacatggtcgtgcgggtgtcgctgccttcgctcgagcaggcgcatttcctcaagcggctggaggacgtgctgcgcgatcgtccggaacaggccgggcacctgatcatagaaatcgacgcacacggcctggtcgactacttccacaacgtacaggcgctgtgcgagatcgccgcgcgcaccggcgtgcgggtcggcgtacgccggctgtccgaacagttcgcggcgctggagcgcttgcaccagctgccgctggcgtacctgaagatcggcggatcgttcgtccagggcatcacccgcagccccggcaaccaacagctggccgacaccgtcatccaggtggcccgcaccctggacataccagcctatgccgaagacgccgaagagccggtggcgcgcgagctgctgcaggcgatcggctttcgtctcatg

SEQ ID NO: 14841 - DNA, 1617 bp, Bordetella pertussis
atgttcgcgaatctgaaagtgcgtaccgggctgttgttggcgctagtggcgctggcattggcggcattggtttccatcgcgttggggtgggaaagcgtccgggagggctcgcgctccctgcatgcgctcgatagcgtgagcgtgcagcagggcagcctgctcaaggacgcctatgcgcagatgttgcgggccacgattcgcgcggacatcgcggcggtgcagcggcgcggcgacgccgccggcacgctggagaacgagcgcaccgtcaagcaattgatgggcgaagccaaggccaggatcgaagcgtttcgcaaagttcccaagctgtccgagctgggccgttccatggaaaccggcctgaccagcagcttcggcagcttcgccgcctccctggatgaaatgatggcggcgctggagcgcaacgacgacgcggcctacctgcagctgaagaatgtgaaggcagggcaggccagcgccgccttcgccgcccggctgggcgaattctcgaccaacctggacaagctgagcagcgagacgctggccgcgcacgagacgcgcgaaaccatcatgctttatgtgtacgcggccttgctgctgttgatcgtgggcgtgatcgcgggcagctatctgtacatgacgcgcgcggtggtgcgtccgctgcaacgcgccagccagcaattcgagcgcatggccgccggcgacttgagcgcgcgcatcgaaggcaactcccgcaatgagatcggagccttgctgacggcgctgcgccatatgcaggagagcctgacgcgtaccgtcgcggcggtgcgccgcggggtggacgagatcaacgtgggttcgcgcgagatttcggccggcaacacggacctgtccagccgcaccgaagagcaggcggcctcgctggaagagaccgcggcctcgatggagcagctggcctcgacggtcaagcagaacgccgacaacgcgcgccaggccaatcagctggcggccagcgcctcggacgtggccgagagcggcggttcggcggtgtccgaagtcgtcagcacgatggacgggatttcggccagttcgcgcaagatctccgagatcgtgtcggtgatcgacgggatcgcgttccagaccaacatcctggcgctgaacgcggcggtggaagcggcgcgcgcgggcgagcagggcaagggtttcgcggtggtggcgggcgaggtgcgctcgctggcgcagcgcagcgcccaggcagccaaggagatcaaggtgttgatcgaggactcggtcgacaaggtgggcacgggctcgcagcaggtcgagcgcgccggggcgacgatgcaggagatcgtggcctcggtcaagcgggtgacggacatcatgggcgagatctcggcggcctcggaagagcagtccagcgggatcgagcaggtcaaccgcgcggtgtcgcagatggacgaggtgacgcagcagaacgcggcgctggtggaagaggcggccgcggcggccggttcgctgcaggagcaggcgcagcgcctggccgaggcggtctcggtgttcaagatcaataccggcgaagtgatcgaagtgccggcgcaccaattgtccggctacgcggcgcccctggtcgcgcagtcc

SEQ ID NO: 14842 - DNA, 927 bp, Bordetella pertussis
atggcaagcactccgtcaccgctggaccgctttctctcccgtctgctgaaaaacgatccgccccgcgccaaatcgctgtgcgtcagcctgctgggcgacgcgctggcgccgcacggcggcgccatctggctgggcgacctgatcgagctgctggcccctatcggcatcaacgaacgcctgctacgcaccagcgtgttcaggctggtcgcgcagggctggctgcaatccgagcgccatggacggcgcagcctgtatctgttgtcggaacacggcctgcgccacaccgcgcacgcctcgcagcgcatctatgacgggccggcgcgcgcctggaacggcgaatggacactggtggcgctgccgcgcgccggcaacaatggcctggccgagcggggcgagctgcgccgcgaactgctctgggaagggttcggcatggtggccccgggcctgttcgcccacccgcagaccgaagcgcgcgccgcgcacgatatcctcgaaaagctgggtatccccgacaaggccctggtgctgtcggcgcgcgaccaggccggcgccggcggcctgccgatcgccagcctggcgggacaatgctggaatctcgatgaggtggcggaccaataccgcctgttctcgcgcaatttcggcccggtggaaaaactgctggatccgccccccacccccgcgcaggccttcgcggtgcgggtgctgttgctgcacaactggcagcgcatcgtgctgcacgatccgcagctgcccacccccatggaaccggacggctggcccggcaacgcggcccgcgcactgtgccggcgcatctactggcaagtcttcgacgcctcggaacgccacctggatgccgtggccggccgcgagaacgcgcgctatcggccggcccaggccgacatcatgggccgcttcggcgggcggccg

SEQ ID NO: 14843 - DNA, 1008 bp, Bordetella pertussis
atgaaaaatgacggaaagccgctggacggcatgacgcgcagcgcggtcctgatgatgtcgctgggcgaggacgccgccgccgaggtcttcaagtacctgagcgcgcgcgaagtccagcaggtgggcgcggcgatggccagcctcaagcaggtcacgcgcggcgacgtggcggtggtgctggaggaattccgccaggaggccgaccagttcatggccgtgacgctgggctcggacgactacatccgcacggtgctgaccaaggcgctgggcagcgaccgggccgccggcctgatcgaggacatcctggaggccggcgaaggcggcagcggcatcgacgcgctgaactggctggacccgcataccgtggccgagctgatcggcgacgagcatccgcagatcatcgccaccatcctggtgcacctggagcgcgaccgcgccgccagcgtgctggccatgctcagcgagcgcatgcgcaacgacgtgatgctgcgcatcgccaccttcggcggcgtgcagccggccgccctctcggagctgaccgacgtgctgaactcggtgctggccggccagggcgccaagcgcagcaagatgggcggcgtgcgcaccgccgccgagatcctgaacatgatgaactcgtcgcaggaagaggccgtggtcgaaagcctgcgcgagcgcgactccgacctggcccagaagatcatcgacgagatgttcgtcttcgacaacctgctcgacgtcgaggaccgcgccatccagctcatcctcaaggaaatcgacaacgataccctcatggtcgccctcaagggcgccggcgacgaactgcgcaacaagttcctgcgcaacatgtccagccgcgcggccgagatgctgcgcgaagacctggaggcgcaagggccgatccgcatgtccaaggtggaaggcgagcagaagaagatcctgcagattgcccgccgcctggccgaaagcggccagatcgtgctgggcacgcaaggggacgacgcctatgtc

SEQ ID NO: 14844 - DNA, 2595 bp, Bordetella pertussis
atgccccatgtcgatctgaatccgctgaagcagcgcatgcaggccgcccgggcggcagccgtcgcgcagtttcgccagcatccccgaccggacatgctgctgaccgaattgcggcgcatcgtcgaccaggcgctgcgcgagctggtcaagctgtgtccgctgccggccggcgccaccctggcggcggtcggcagctatggccgcggcgaactgtatccgcattccgacgtcgacctgctgatcctgctgccgcagcccccgtcggcggccgatgcgcgcgcggtcgaggcattggtggccgccctgtgggacctgggcctggaacccggccatagcgtgcgcacgctggaagactgcgagcgcgaggcgcgcggcgacatcaccgtcgagacggcgctgctggaatcgcgctggctggccggcagccgcacgctcatgaagcgcctggacagcgccatgcaggcacggctggacgcggcggtgttcttccaggccaagcgggtggagatgcagcagcgccacgcccactaccaggacacgccctacgcgctggaacccaattgcaaggagtcgcctggcggcctgcgcgacctgcaggtcatcctgtggatggcccgcgccgccggcttcggccacagctggcgcgaggtggcccaggccggcttgctcacctcgtccgaagcgcgcgatctgcggcgcgccgaacaggccttcaagcgcctgcgcatcgagctgcacctgctgacgggccggcgcgaagaccgcgtcctgttcgacctgcaaccgggcctggccgcggtctatggcattgcgtcgacggcgacgcggcgcgccagcgaactgctgatgcagcgttattactgggccgcgcgcctggtgacccagctcaatgtcatcctggtacagaacatcgaggaacggctgttcccgcgcccggacagcgacgcgcgcctgatcgacgacgatttccgcaacctgcgcgagcggctggacatcgtgcgcgaggatggcttcgagcgcaatccgacgctgctgctgcgcgccttcctggtgatgcagcagcatccggaactgatcggcatgtcggcccgcacgctgcgcgccatctggcattcgcgccaccgcatcgacgcgcagttccgccgcaatccggtcaaccgcaagctgttcctgcagatcctgcagcagccgcgcggcatcgtccacgagttgcgccgcatgaccatgctcaacatcctgccgcgctacctgccggtgttccggcgcatcgtcggccagatgcagcacgacctgttccatgtctatacggtcgaccagcacaccctggcggtcgtgcgcaacctgcgccgcttcaccatgcccgagcacgcccaggaatacccgctggccagccagctgatcgccggcctggaccgccactggctgctgtatgtcgcggcgctgttccacgatatcgccaagggccgcggcggcgatcattccgaactgggcgcgcgcgaggtgcgccgcttcgcgcaggaccacggcctggatccgaccgatgccgagctggtcgagttcctggtgcgccatcacctgctgatgtcggcggtcgcccagaagcgcgacctgtccgacccgcaggtggtgcgcgacttcgccgcccaggtgggcgacgaacgccgcctggccgccctctacctgctgaccgtggccgacatccgcggcaccagcccgcgcgtctggaacgcctggaagggcaagctgctggaagaccttttccgcctgaccctggcggcgctgggcggcgcgcacgccgacgcgcacaccgtgctgaccgagcgcaaggacgaggcggcccgcctgacccgcctggcgggcctgcgcgacgacgcccgcgaagccttctggaaccagctggacatcgcctacttcctgcgccacgacgcctccgagatcgcctggcacacgcgccacctgtattaccaggtggcgcccgacgagccggtggtgcgggtccgccccaccgagcacggcgaggggctgcaggtcatggtctacacgcgcgacgcgccggatctgttcgtgacgacctgcggctacttcgacgccaagtcgctcagcgtgcaggatgcgcgcgtgcacaccacccgccacggctgggcgctggacagcttcatcgtgctggcgcccgagggcttcgccgacctgcgcgcccaggccaccctggtggagcacgagctggccgaacgcctgcgcgatccgcacgccgcccggcacgcacatgcgccacggcgcctgccgcacagccacgcccggcgctcgcgggtgtttccggtcatgccgcaggccgagctctcgcccgacgaacgcagccagtcctggcgcctgtcggtcaccgcgaccgaccggcccggcctgctgtacgcgctggcgcgcgtattcgccgaacacggcgtggacctgatcatggccaagatcatgacgctgggcgaacgcgtcgaggacgtgttcatcgtgtcgggctcggcgctggagcgcccgcgcagccagatgcagttcgaacgcgccatcctggacgcgctggccggcgacgagccgcgccagcaggccgcc

SEQ ID NO: 14845 - DNA, 1632 bp, Bordetella pertussis
atgagccttgcccgggttggaatcgcgcaaatcaacgcctgcgtcggcgatctcgccggcaacgcggcccgggtgctgcaagcggcgcggcaggcggccgggcagggcgccgacgtgctggtcacccccgagctggttctgaccggctatccgccggaagacctgctgctgcgtccccggttcatccaggagcagcaggccgtgttcgagcggctttgccaggacctggccggcctggccggcctgcatgtggtgatcggccatgtgctggcgcgccaggaccgcctgtacaacgccgccacggtggtgtgcgaagggcgcgtgctgggcagctactgcaagcgcgaactgcccaattattcggtcttcgacgagcagcgctatttctccgcccatggcgaagccttcggctttaccgtcaagggcgtgcgcttcggcctgaacatctgcgaggacatctggttcgagcgcgcgccgcgcgcggcggcggccgacggggcgcaggtgctgctggtgcccaacgcgtcgccctacaacaccggcaagcaggaagagcgcctgtcggtggcgcggcgcagcgtgcaggacaccggttgcgccctgatctacgccaacctggtcggcggccaggacgaactggtgttcgacggcgcgtcgttcgcgctggacgcgcaaggccgcatgagcgcccgcctgccggatttcaccgaaggcgtgaatgtgctcgaggtcgatgcgcgcagcacggtgcgcccggtgaccgaacaggccgccgtgcagccctacggcctcgaagagcaggtctggaacgcgctggtgctgggcgtgcgcgactacctgggcaagaacggctttcccggcgccatcatcggcctgtcgggcggcatcgattcggccgtggtgctggcggtggcggtcgacgccgtgggcgcggacaacgtgcgcgcggtcatgatgccctcgcgctataccgccgacatctccctgaccgacgccgccgacatggcccggcgcctgggcgtgcaatacgacgtgatcgccatcggcgaggtggtcgaccgcttcgaggcggcgctggcgccgcagttcgccggcctgccggtcgacgccaccgaggagaacatccaggcgcgcgcgcgcggcaccttgctgatggcgctgtccaacaagaccggccggctggtgctgaccaccggcaacaaatccgaaatgaccaccggctattgcacgctgtatggcgacatggcggggggcttcgccgtcatcaaggacgtgcccaagaccctggtctaccgcctggcgaactggcgcaaccagcgccagcccatcattcccgagcgcatcatcacccgcccgccgtcggccgagctgcggcccgaccagaccgaccaggacagcctgccgccctacgacatcctcgacggcatcatcgagcgctacatggaacacaacgcctcggcggccgatatcgtggccgccggctttccgcgcgaggcggtcgggcaggtcgtgcggctgatccgcatcaacgaatacaagcggcgccaggccccgcccgggccccgcatcacgccgcgcgcgttcggccgtgattggcggtatcctgtgaccaacggattccgcgagacggtt

SEQ ID NO: 14846 - DNA, 747 bp, Bordetella pertussis
atgtccctcatgcgtgaaatgctggaagctggcgtccacttcggccaccagacccgttactggaaccccaagatggccccgtacatcttcggtcaccgtaacaagattcacatcatcaacctcgagcagacggtcgccaagtaccaggaagcctcgaagttcgtcaagcaactggtcgcccgtggcggcaacatcctgttcgtcggcaccaagcgcgccgcgcgcgaactggtggcaaccgaagccgcccgctgcggcatgccctacgtcgacgcccgctggctcggcggcatgctgaccaacttcaagacggtcaagagctcgatcaagcgcctgaaggacatggaagccatggtcgccgacggcggcttcgagcgcatgaccaagaaggaaggcctgctgttccagcgcgaactggacaagctgaacaagtcgatcggcggcatcaaggacatgaacggcctgcccgacgcgctgttcgtcatcgacgtcggctaccacaagatcgcggtcgccgaagccaaggtgctgggcatcccggtcgtggccgtggttgataccaaccactcgcccgacggcatcgaccatgtcattcccggcaacgacgactcggcccgcgccatcgcgctgtacgccaagggcatggccgacgccgtgctggaaggccgcgagcagaacatcaatggcctggtcgaggaaatcggcgaaggccaggaagagttcgtcgaagtgcaggacaaccaggcc

SEQ ID NO: 14847 - DNA, 876 bp, Bordetella pertussis
atggctgaaattaccgccgccctggtcaaggaactgcgcgagaagaccgatgcgcccatgatggagtgcaagaaggctctgaccgaagccgaaggtgatctggcccgcgccgaggaaatcctgcgcgtcaagctgggcaacaaggccagcaaggccgccgcccgcgtgaccgccgaaggcctgatcggcctgtacatcgccgccgacggcaagcagggcgccgtcatcgaagtcaactgcgagaccgacttcgtcgccaagaacaccgatttcatcgatttcatcaacaagctggccgagctggtcgccacgcagaatccggccgacgtggccgcgctgtcggcgctgccgttcggcgaaggcacggtcgagaccacccgcaccgcgctggtgggcaagatcggcgaaaacatctcggtgcgccgcttcgagcgcatccagaccccgaactcgctggccagctacgtgcacggcggcaagatcggcgtactggtcgagttctcgggcgccgaggaagtgggcaaggacctggccatgcacatcgccgcgaccaagcccaaggccctcaatgccgacggcgtcaacgccgaagacatcgccgccgagcgctcggtagccgaacagaaggccgccgaatcgggcaagcccgccgaaatcgtcgccaagatggtcgaaggttccgtgcagaaattcctgaaggaagttactctgctgtcgcaacccttcgtcaagaacgacaagcaaacgatcgaacagatgctcaaggaaaagggcgcttcgatcaccaagttcgttctgttcgtcgttggtgaagggatcgagaagaagaccgccgatttcgcttccgaggtcgccgccgccgccgctggccgcgcc

SEQ ID NO: 14848 - DNA, 714 bp, Bordetella pertussis
atgagcagcagatcatataaacgggttcttctcaaactttccggcgaggcgctgatgggcgaagatgcctttggcatcaatcgctccaccatcgtccgcatgaccgatgagatcgccgaagtcgccgcactgggcgtcgaactggccatcgtcatcggcggaggcaatattttccgtggcgtcgccccgggcgcgcagggcatggaccgcgcgaccgccgactacatgggcatgatggcaaccatcatgaacgcgctggcgctgcaggacgcgctcaagcacaagggcgtcgacacgcgggtgcagtcggcgctgaacatcgaccaggtggtcgagccctacatccggcccaaggccctgcgctacctcgaagagggcaaggtcgtgatcttcgcggccggcaccggcaacccgttcttcaccaccgataccgcggccgcgctgcgcggtgcggagatcggcgccgaaatcgtgctcaaggcaaccaaggtcgacggcatctacagcgccgatcccaacaaggatccgaccgcgacccgctacgcgcgcatcagcttcgacgaagtcatcgtgcgccggctcgaggtcatggacgccacggcgttcgcgttgtgccgtgaccaaaagctgcccatcaaagtgttttcgatcaacaagtccggcgccctcaagcgggccgtcagcggcgaagacgaaggcacgctggtacacgtt

SEQ ID NO: 14849 - DNA, 558 bp, Bordetella pertussis
atgagcgtcgcagatattcgtaagtccgctgaaaccaggatggccaaatcgcttgaaacgctcaaggcgagcctggccaagatccgcacgggccgcgcccataccggcatcctggatcacgtgcaggtcgagtactacggctcgccggtgccgatcagccaggtcgccaacgtgaatctcgtcgatgcccgcaccatcagcgtgcagccgtacgagaagagcatggcgggcccgatcgaaaaggcgattcgcgagtcggacctgggactgaatccggtctcgatgggcgaaaccatccgcgtgccgatgccggccctgaccgaggagcgccgccgcgacctgaccaaagtggtcaagagcgaaggcgaggacgccaaggtggcggtgcgcaacctgcgccgcgaagccaacgaggcgctcaagaagctggtcaaggacaaggaaatctccgaggatgacgagcgtcgcgcccaggatgatgtccagaaactgactgaccgtgccgtcggcgacatcgacaagatgatcgtccagaaagaagcggaaatcatgaccgta

SEQ ID NO: 14850 - DNA, 1506 bp, Bordetella pertussis
atggtgcagattatccgacaagtcggccggcgcgccgttccgtggcgccgccgcggcgcgcgccggccctatataattgcccgcatcatggcaaatacttcccactccagccaggaccagttcgccaacaaggcgcaggcgtggtccgcccgtttctcggaacccgtttccgacctcgtcaaacgctacacggcctcggtcgatttcgacaagcgcatggcgcgccacgacatccgcggctcgctggcgcacgccgacatgctggccgcgcaaggcatcatctcggcccaggacctggccgacatccagcgcggcatgcagcagatcctctcggagatcgacgccggctcgttccagtggctgctggacctggaagacgtgcacctgaacatcgagaagcgcctggtggagctcgtgggcgacgccggcaagcgcctgcacaccggccgctcgcgcaacgaccaggtcgccaccgacatccgcctgtggctgcgcgacgaaatcgacaccctggtcgacctgctgcgccagctgcgccacgcgctggccacggtcgcgctggagaacgccgccaccatcatgccgggcttcacccacctgcaggtggcccagcccgtcacgttcggccaccacctgctggcctatgccgagatgttcggccgcgacgccgagcgcctggccgactgccgccgccgcgtcaaccgcctgccgctgggcgcggccgcgctggccggcaccagctatcccatcgaccgcgagcgcgtggcccgcacgctgggcttcgacggcgtctgccgcaactcgctcgacgccgtctccgaccgcgacttcggcatcgaattctgcgccgccggcgccctgatcatgacgcacatctcgcgtctttccgaggaactggtgctgtggatgagcccgcgcgtgggcttcatcgacctggccgaccgcttctgcaccggcagctcgatcatgccgcagaagaaaaaccccgacgtccccgaactggcgcgcggcaagaccggccgcgtcaacggccacctggtggcgctgctgaccctgatgaagggccagccgctggcctacaacaaggacaaccaggaagacaaggaaggcctgttcgacacggccgacacgctgcgcgacaccctgaccatcttcgccgacatggccggcggcatcaaggtcaaggccgacaacatgcgcgccgccgccctgcagggctttgccaccgccaccgacctggccgactacctggtcaagcgcggcctgccgtttcgcgacgcgcacgaaatcgtcgcccacgcggtgcgcgactgcgagcagcgcggctgcgacctggccgacctgtcgctggccgacctgcaggcctaccatcccagcatcggcgaggacatccaccaggtgctgacgctggaaggctcggtggccgcccgcaagcacatcggcggcaccgcccccgagcgcgtgcgcgaggaagcccagcgcgtgctggccgagaccgccggcgcc

SEQ ID NO: 14851 - DNA, 582 bp, Bordetella pertussis
atgaccgtatctcccttgcacgcgctgacgtcgcgccgttcgatgaagttcctgcgcgcgcccgcgcccaagcaggacgaactggagcaaatcctgcaggccgccatgagcgcgcccgaccatggcgcgctgcgcccgtggcggttcgtgctgatccggggcgatgccatcggccggctggccgacctggcgatcgaggcggtcaagcgcagcggcgacaagcgcatgacgcccgagaaagagaagtcggtgcgcgaatgggccgccggcgtgccgctgttcatcgccgtggcgcagaagatttcgcatgacaacacccgcattcccgagcaggaacagctgctggccaccggcgcggcggtcatgaacatcctcaacgccgcgcacatgctggggtacggcgcgttctggagcacgggcctgggcacttacgtcgaggacgtgcaggacgcgctgggcctggacgcgatggactaccgcttcctgggtttcgtggccctgggcacgccgggctgcgcggtgccgccggcgcagcgcccggatttccgcgagttcgtgtccgaatggcagggcgtcaccgcc

SEQ ID NO: 14852 - DNA, 762 bp, Bordetella pertussis
atggcactcagttcgactcaggcgattccggaaacgggggacatccccaggcacgtagccatcatcatggatggcaacggccgctgggcgacgcgccgtcacctgccgcgcacggcagggcacgccaagggcgtgcacgcggtgcgccgcgtggtcgaggcctgcggccggcgcggcgtgcgctacctgactctgttcgcattcagttccgagaactggcgccgtccggccgacgaggtgtcgctgttgatgcggctgttcgtgcaggcgctcgagcgcgaagtcgacaaattgcaggaccagggcgtgcgcctgcacgtggtgggagacctgagcgcgttcgagcccaagctgcaggaactgatcgcccaggcgcaggaacgcaccgagcacaacgaccggctgcacctgacggtggcggccaattacggcggccgctgggacatcctgcaggccacgcgcgccatgctgcgcgccgatccgggcctggcccaggatcccgaccgcatcgacgaggcgcggctggccgaacatctttcgatggcctgggcgccggaaccggacctgttcatccgcaccggcggcgaacagcgcatttcgaacttcctggtctggcaactggcctacgctgaattctatttcaccgaacaattctggcccgatttcggcgccgacgagctcgatgctgccttcgagtggtatcgcacgcgcgagcggcgcttcggccgcaccagcgcgcaattgcgcggcggcgccaagcgc

SEQ ID NO: 14853 - DNA, 1095 bp, Bordetella pertussis
atgagcaaagtcattttcctgaccgatcgccgccaggccgacctggcggcgccgagcgcggatctgccgccggccggcgagcccgcgcgggacgtgcgcgcccggccgctgcgcgacctgcgcatttccgtcaccgaccgctgcaacttccgctgcacgtactgcatgccgcgcgaagtgttcgacagcagctatgcgttcatgccgcactcggcgctgctgtcgttcgaggaaatcacccggctggccgcgcagttcgcccgcctgggcgtcgagaagatccgcctgaccggcggcgagccgctgctgcgcaagaacatcgaaaccctggtcggcatgctcgccgagctgcgcacgcccgctggccgcccgctggacctcacgctgaccaccaacggcagcctgctggcgcgcaaggcggcggcgctgaagcaggccggcctgtcgcgcgtcaccgtcagcctggacgcgctggatgcggcgctgttcgcgcgcatgagcgacagcaacttcagccccgacgacgtgctgcgcggcatcgacgccgccgccgaggcggggctggcaccggtcaaggtcaacatggtggtgcggcgtggcctgaacgacggcgagatcctgcccatggcgcggcgctttcgcggcagcgggcatatcctgcgcttcatcgagtacatggacgtgggcagcaccaacgggtggaacctgtccgaagtggtgcccagcgacgaggtcctggcgcgcatcgccgagcaccatccgctggcgccgctggacacgccggtcatgggccgggtggccgaacgctggcgctacgacgatggcggcggcgaaatcggcgccatctccagcgtcacgcacgccttctgttcgggctgtacgcgggcgcgcctgtcgcccgagggcaggctgttcctgtgcctgttcgcctcgcacggccacgacctgcgcgcgccgctgcgcgaaggtgccgacgacgacagcctggcgcgcatcctgaccggcatctggggccagcgcgacgacaactactccgaacggcgcggccagggcggcggcgcggccgaccgcatcgagatgagttatatcgggggg

SEQ ID NO: 14854 - DNA, 1203 bp, Bordetella pertussis
atgcttgaattcgaccaagcccagcaattgctggcgcaggccggcgcacccgtggccggcaccgaaaacgtggcgctcgaacaggccgacggccgcgtgctggcgaccgacctggccgccaccgtggacctgcccccggccgacaacagcgccatggacggctacgccatacgcctggccgattaccaggccggcgcgcgcatgccggtccagcagcgcgcctacgcgggcgacatgccgcaagcgctgatccccggccaggccacgcgcctgttcaccggcagcctcatccccgccggcgcggacaccgtcgtcatgcaggaagacgcgcgcgaagccgacggccaggtggaaatcacccaggcgcccacgctcggccaatggatacgcaagcgcggcgacggcaccaccgccggccggccgctgctggacgccggcaccctgctgcatgccggccacgtcggcctgctgggaacccagggcctggccagcgtaccggtgcgcgccaggctgcgcatcggcgtgctgaccacgggcgacgaactggtcgcgcccggacagccgcgcgccgcgcagcagatctacaactccaacggcccgatgctggcggcgctggtgcgcggcatgggcgcgcaggtctcgcacgtgctgcatgcgcgcgacgacgaagacgcgctgcgcgcggcgctgtgcacgctgctggccgacagcgacctggtgctcagttcgggcggggtctcggtcggcgagcgcgacctggtcaagccggtgctggaagcgctgggcggcgagctggggctgtggaaagtacgcatgaagccgggcaagccggtcgcgctggcgcacatcgacggcaagccggtcgtgtgcctgccgggcaacccggtctccagctatgcggtgttcgcgctactggtatcgccgctggtgcggcgcatgcaaggccgcgccgaactctatccgaccgtcagccgcctgccgctgcgcaccgaacggccacgccaggacagccgcgaggaattcctgcgcgtgcaatggcgggccaccgaagacggcgccggcgaactgcaacccttcggcaaccaggactcggccatcatcacctccgtgccctggtccaccggcctggcccgcctgcccgccggcgtccccgtcaacgacggcgaacgcgtcggatactacgacctgaggcactggctaacc

SEQ ID NO: 14855 - DNA, 519 bp, Bordetella pertussis
atgaacgacgccaagcaggtttcgctggtctgcgccatcctcaccgtcagcgactcgcgcagcgccggcgacgacacctcgggcaacatgctggccgagagcctggcgcacgccgggcacatgtgcgtgcggcgcgacctggtcaagaaggatctctaccagatccgccgcgtcatcagcgaatggatcgccgaccccgaggtccaggtcatcctggtgtccggcggcaccggcttcacgccgcgcgactgtaccgcccagaccatcgagcccttgttcgacaagaccatcgagggtttcggcgagctgttccgccagctctcgtacgaggagatcggcagttcggccgtgcagtccagcgcgctggccggcaccgccaacgataccgtcatcttctgcatgccgggctccaaccacgcctgcaagctgggctggaaccgcatcatccgcgaacagctcgacgacgcccacaaaccctgcaatttcgccatgcactaccgcgccaagccggacgcggac

SEQ ID NO: 14856 - DNA, 1089 bp, Bordetella pertussis
atgccggttctgctggaccctgaaaacgcgctcgctctcgatgtcctgctggccggcatcgatgcccaggggctggactggcacctgagcgcccccgatgccgccgatctgcccaggatccgcggcatcggcacgctgtcttcggcgggaaacgaggaaatcagcttcctgtccaatccccgctaccagaatcagctggccaccacgcgcgccgccgcggtcatcgtgacgcccgacgtcgcgcaggcccggcaggagcagggcgcgtcgggccacgtgctggtggtgtgcaagcatccctatctgctgtatgcgcgcctggcgcagtggttcgagcgcgccagccggccggccgggcccgccggcgtgcatccgtccgcggtggtcgaccccagcgccgagatcgacgccgatgtgcgggtcggcgcgcagtgcgtcatcgaggcgggcgcccgcatcgggcgcggcgccaggctggggccgggctgtgtgatcggcgccggctccacggtaggggccgacagcctgctgcatccgcgcgtcaccctgtacgcgggcgtgcacgtgggcgagcgggccatcatccacagcggcgccgtgctgggcgccgacggtttcggtttcgcgcccgatcccacgctgggccgcggcgcctggggcaagatcccgcagttgggcgaggtgagggtgggcaacgatgtcgaaatcggcgccaacaccaccatcgaccgcggcgcgctggacgacacgatcgtgggcgacggcgtgaagctggacaaccagatcatggtggcgcacaacgtgcggatcggcgcgcataccgccattgccgcctgtgtcggcatcgccggctcgaccaccatcggcgagcgatgcaccatcggcggcgcatcgatgctgtccgggcacctggccatcgccgacgacgtcaatatctcgggcggcaccgcggtgacatcgaacatcgcgaaggccggccgctacaccggcgtgtatccttacgccgaacacagcgaatggcagcgcaatgccgcggtcattcagcaattggcgctgctgcgccggcgcttgcgggccctcgagcgggaa

SEQ ID NO: 14857 - DNA, 453 bp, Bordetella pertussis
atggaactcgacatcaaggggatcatggaccggctgccgcatcgctacccgatgctgctgatcgaccgtgtgctggagatggtgcccggcaaatccatcgttgccatcaagaacgtctcgatcaacgagccgtttttcacgggccattttccgcatcatccggtcatgccgggcgtgctgatcgtcgaggccatggcgcaggcttcggccctgttctcgttcaccgacgagaacggcgggctgaagtgcgacggcgccaagaccgcctactacctggtgggcatcgacggcgcgcggttccgtaaacccgtggtgccgggcgaccagttgcggctggaagtcgaggccgagcgcctgtcgcgtaccatctgcaagtaccagggccgggccctggtcgacggccaactggtcgccgaagccaagctgatgtgcgcgatccgtagcctggaagag

SEQ ID NO: 14858 - DNA, 1179 bp, Bordetella pertussis
atgagcctgcgcataggcatggtcgccggcgagccttcgggcgacctgctggccgggcgcatcatcgccggcctgcaggcccgggcacccggcgtgcactgcgccggcataggcgggccccagatggcggcgcgcggcttcgaggcctggcaccccatgcatgcgctcacggtgttcggctacatcgatgcgttcaagcggattcccagcctgctgtcgacctacggcgacgtcaagcggcgcctgctggccgagccgccgtcggtgttcgtgggcatcgacgcgccggatttcaacctgcgcctggagcaccagttgcgccaggccggtacccccaccgtgcatttcgtcggtccctcgatctgggcctggcgctacgaacgcatcaacaagatccgcgccgccgtctcccacatgctggtgctgtttccgttcgaggaagcgctctatcgcaaggaaggaatcccggtcacctatgtcggccatccgctggccggggtgattcccatgcagcccgatcgcgccgcggcccgcgcgcggctgggcatcgacgccgacgcgcgggtgctggccatcctgccgggcagccgctcgtccgagatccgcctgcttgcgccgcgtttcctgcaggccgcggccgagctggtccggcgcgatccacgcctgcagtgcgtggtgcccatggtcaacccgcagcggcgcgccgagttcgaggctatcgcgacccagcatccggtgccgggcctgcgttgcgtgaccgccgccgaggggcagggcgagacgccggtggcctggtccgtcatggaggcgagcaacgccgtcctggtggccagcggcacggccacgctggaaacggcgctgtacaagcggcccatggtcatttcgtacgtgctgtcgccgtggatgcggcgcatcatggcctggaaatccgggcagcaacgtccctacctgccgtgggtggggctgcccaatgtgctgctgcgcgatttcgccgtgccggagctgctgcaggacgaggccacgccggccgcgctggccgaggcgacctggcaggcgctgaccgacgaggccggcgcggcgcgcatcgaggcgcgctttaccgccttgcaccaggacttgctgcgcgatacgccggcgctggccgcccaggcgattctggaggtggccgatggagcagcc

SEQ ID NO: 14859 - DNA, 603 bp, Bordetella pertussis
atggagcagcctgacctgttcggcacgctggcgccgctgcccgccatcattgccggcgtcgacgaagccggtcgcggaccgctggccggagcggtctatgcggccgccgtcatcctggacccggaccggccggtcgacggcctggccgactccaaggtgctcaaggccgagcagcgcgaagcgctggcggtgcagatccgcgcccaggcgctggcctggttcgtggccagcgccagcgtgcaggaaatcgacagcctgaacatcctgcgcgccaccatgctggcgatgcagcgcgccgtggccggcctggccatggcgccggaactggccatggtcgacggcaaccaggcgcccaagctgcgctgcgccgtgcagaccgtgatcaagggcgatgcgctggtgccggcgatctccgccgcgtccatcctggccaagacggcgcgcgacgccgacctgctgcgcctgcatgccttgtatccccaatacggcttcgaccagcacaagggctacggcacgccgcagcacctgtccttgctgcgcgagcacggcccgtgccccgaacaccggcgcagcttcgcgccgatcaaggcgtacggcgcgcca

SEQ ID NO: 14860 - DNA, 1020 bp, Bordetella pertussis
atggagccccgccccatgcatacggcctacgttcccgtccccgctcccgtccgtccgcccagcgccgagcgctggcccctggcggcggtcgccgaattgttcgagctgccgttcctggacctgctgcatcgcgcccagcaggtgcatcgccagcacttcgacgccaacacggtgcagctgtccagcctgctgtcgatcaagaccggcggctgcccggaggattgcgcgtactgtccgcaatcggcccactacgataccggcgtggacgccgacaagctgatgccgctggacgaggtggtgcgcgcggcgcgcgcggcgcaggccaacggcgcgcaacgcttctgcatgggcgcggcctggcgcagccccaaaccgcatcacctggaagcggtggccgaaatgatcggcgcggtcaaggcgctgggcatggaaacctgcgtcacgctgggcatgctgcgcgacggccaggccgagcaattgaaagccgccgggctggattactacaaccacaacctggataccgcgcccgagttctacggcaagatcatttcgacgcgcacctaccaggaccgcctggatacgctgcaacaggtgcgcgaggccggcatcaatgtgtgctgcggcggcatcgtcggcatgggcgaatcgcgccgcgaccgcgccggcctggtcgcccagctgacgaacatggagccctatccggagtcggtgcccatcaacaacctggtgcaagtcgaaggcacgccgctggcgggcgccgaaacgctggatccgttcgagttcatccgcaccatcgccgtggcgcgcatcaccatgccgctggccaaggtgcgcctgtcggcgggccgcgagaccatgagcgacagcgagcaggcgctgtgcttcatggccggcgccaactcgatcttctatggcgatgtgctgctgaccaccggcaacccgcaggtcgaggccgaccggcgactgctgcaacgcctgggcatgcgcgccgagggcctgccctgcgcggcgggccaggca

SEQ ID NO: 14861 - DNA, 2622 bp, Bordetella pertussis
atgaaatcctctgagattcgccagaagttcctgcaattcttccagtccaagggccacacgatcgttccgtcgtcgtccctggtgccggccaacgaccccacgctgctctttaccaactcgggtatggtgcagttcaaggacgtattcaccggcaaggaagcgcgcgcctacaagcgcgccacgtcgtcgcagcgcagcgtgcgcgccggcggcaagcacaacgacctcgagaacgtgggctacaccgcccgccaccatacgttcttcgagatgctgggcaacttcagcttcggcgactacttcaagcgcgaggccatccagtacgcctgggagctgctgacccaggtctacaagctgccggccgagaagctgtgggtcacggtctaccaggaagacgacgaggcctacgacatctgggccaaggaagtcggcgtgcccgccgagcgcatcatccggatcggcgacaacaagggcgcccgctatgcgtccgacaacttctggcaaatggcggacaccggcccctgcggcccgtgttcggaaatcttctacgaccatggtccggaaatctggggcggccctccgggctcgcccgaggaagacggcgatcgctacatcgagatctggaacctggtgttcatgcagttcgagcgcgacgccgccggcaacatggaacgcctgcccaagccctgcgtggacaccggcatgggcctggagcgcatcgcggcggtgctgcagcacgtgcattccaactacgagatcgacctgttccagaagctgatcgccgccgccgcgcgcgagaccggcgtgaaggatctggccgataactccctgaaggtcatcgccgatcacatccgcgcttgcgcctttctcatcgtcgacggcatcattcccagcaacgaaggccgcggctacgtgctgcgccgcattgtgcgccgcgccctgcgccatggctacaagctgggccagaccaagtcgttcttccatcgcctggtgccggacctggtggccgagatgggcgaagcctatcccgagctggcccaggtggccgagcgcgtggcgcaggtgctgcgccaggaagaagaacgcttcggcgaaacgctcgaacacggcatgaagatcctggacggcgcgctggccaaggtcgccaagggcgacccgctcgacggcaccacgttgttcacgctgtacgacacctacggctttccggttgatctcaccgccgacatctgtcgcgagcgcgaggtcgaggtggacatggccggcttcgaggcggcgatgcaacgccagcgcgagcaggcgcgcgccgcgggcaagttcaagatggccgagggcctgagctacgaaggcgccgagacgcgcttcgaaggctacgagaacctcgaattgagcggcgtcaaggtgacggcgctgtatgtcgagggtacccaggtcgagcaggtgtcggcgggccaggacgcggtcgtggtgctcgatgccaccccgttctatgccgagtccggcggccaggtgggcgacaccggcctgctggaggctggcggcgtgcggttcgcggtggccgacaccctcaagatccagcccggcgtgttcggccatcacggcacgctcgaggccggcgcgctgaaggtcggcgataccttgctggcgcgcgtggatgcggtgcgtcgcgcccgcacggtgcgcaaccactcggccacgcacctgatgcacaaggccttgcgcgaagtgctgggcgcccacgtgcagcagcgcggctcgctggtcgaccccgacaagacccgcttcgacttcgcgcacgacgcgcccatgacggccgagcagatcgcccgcgtggaagccatcgtcaatgccgaggtactggccaaccaggccacagaggccaaggtcatggcctacgacgacgccgtcaagggcggcgcgatggcgctgttcggcgagaagtacggcgataccgtgcgcgtgctcgacatcggtttttcgcgcgaactgtgcggcggcacgcacgtgcggcgcaccggcgacatcggcctgttcaaggtggtgtccgaaggcggcgtggcggcgggcgtgcgtcgcatcgaagcgattaccggcgacaacgcgctggcctgggtgcaggaccagaacgcgctgttgcagcgcgccgccggtgtgctgcgcgccccggcgcacgagcttcccgagcgcatcgcccaggtgcaggaacagctcaaggcgctcgagaaagagctcgagcaggcgcgcaccaagctggccgccagcgccggcaacgacctggtcgccacggccacggtcgaggtcaagggcatcaaggtgctggccgccagcatcggcgatgtggatcccaaggccttgcgcggcatggtcgacaacctgaaagaccgcctcaagcccgccgtggtcctgctggccgccggctcggccgatggcaagatcagcctggtgggcggcgtgacggccgatctcaccggccgcatcaaggccggcgatctggttggcttcgtggccggccaggtgggcggcaagggcgggggccgtcccgacatggcgatgggcggcggcaccgatctggcggctctgccggctgccgtggccagcgtacagaagtgggtcgatgagcgcctc

SEQ ID NO: 14862 - DNA, 771 bp, Bordetella pertussis
atgaagcacctgagttcgcgcgacaacccggcggtcaaggcgttgcacaagctggccgccggcggcggccgccgcgacggacggatcctgctcgacggcgtgcatctgtgccaggcctggctggcgcaccaaggcacgccgctgcaggcgctgttcgatgtcgcgcggctggaccatcccgagatccgcgccctggccggccaggtgccgccgcagcattgcctggcgctggattcgcgcctgctgcaggggctggccagcgtcgagagcggccagggcgtggtgttcgtggcgcgcgcgcccgaacccgcgctgcctgaacgcatcgacgagaactgcgtgctgttcgaccggatccaggacccgggcaatgtcggcaccttgctgcggacctgcgcggcggccggcgtgcgccgggtgctgctggcggccggcacggccgcggcatggtcgcccaaggtgttgcgcagcggccagggcgcgcatttcgcgctgcatatccacgaacacctggacctggaggcagtgctgccgcggctggacgtgccgctggtggccacgaccctggcgcggtccggctcgctctacgacacggacctgccggcgcgctgcgcctgggtgttcggccacgaagggcagggcgtggccgaggcgctgctgcgggcggccgcgctgcgcgtgcacattccgcacgagtcggcggcggtcgagtcgctcaatgtgggcgccgccgccgccatctgcctgttcgagcagcgccgccagcgccgc

SEQ ID NO: 14863 - DNA, 588 bp, Bordetella pertussis
atggacacgccaagcacaaacaccacccgcgagcagctgctcgactacgcgcagaagttgatccgcacgcgcggctgcaatggcttcagctatcgcgacctggccgatcacgtgggcgtcaagacgtccagcgtgcattactacttcccgtgcaaggacgacctgctgtacgaagccgtcgagaactacaccggctccgcgctggaaaccctgcgcggcatctcgcccacgctgcccgccaaggagcggctggacgcctatatcgccatggtcgagtcgcacagttgccaggccgaccagctttgcctgggcgggatgctggctgccgaactcaacaccttgccggaacgcgtgcgcgccgcgctgcaggcctttttcacggtcgaggaaaactggctggccaaggtgctggccgacggtgcgcgcgaaggcacgctgcgctacgccagcacgccggagaaggccgcgcgcgcgctgttcgccacggtgcagggctgtctgctgggcgcgcgcctgttccagcgcccgcccgagttgcgcgaagccctcggcgcgctgtacgtccagtgcggcgcaagcccggcgcac

SEQ ID NO: 14864 - DNA, 825 bp, Bordetella pertussis
atgacttctacccctattgaacgtgcagtctacatcgtttcggacagcaccggcatcaccgccgagaccttcagccactccgtgctatcgcagttcgacgaggtcaatttcaagcccgtgcgcctgcccttcatcgatacgctggacaaggcgcgcgaggtggtggcgcgcatcaaccgcaacgcgctcgaggccggcgtgccgccgattgtcttcagcaccctggtcaaccccgagatcctggcgctggttcgccagtcgaacggcgttttcctcgatctttttggaacattcgtcagccacatcgagcaggccctgggcttgaagtccagccactccatcggacgctcgcacatggcggccaactccgagaaataccgcaaccggatcgacgccatcaacttcagcctggcgcacgacgacggccagttcgtcaaccagctggaccaggccgacgtgatcctgttgggcgtgtcgcgctgcggcaagaccccgaccagcctctatctggccatgcagtacgccgtcaaggccgccaatttcccgctcaccccggacgatttcgagcgcggcgcgctgcccaagaccatcgcgccgtaccgcggcaagctgttcggcctgtcgatccagcccgagcggctggccgaggtgcgcaacgagcgccgccccaacagccattacgcgcgcctggagcaatgccgctacgaagtggccgaggccgagcgcatgatgcgccgcgagggcatttcgtggctgtcgacgaccaccaagtcgatcgaggaaatcgccaccacggtgctgcaggaggtcggactggagcgcgtc

SEQ ID NO: 14865 - DNA, 258 bp, Bordetella pertussis
atgctggtgattcgtctggcccgcggtggctcgaagaagcgtccgttttacaacctggtagctaccgattcgcgcaatcgtcgcgatggccgtttcgtcgagcgcgttggcttttacaacccggttgccgctgaaggcaccgagaatctgcgcatcgccctggaccgcgtgcaatactggaccggcaacggcgcgctgctgtcgcccgccgtcgagcgcctggtcaaggaatactcggccaaggtttcggctgctgcc

SEQ ID NO: 14866 - DNA, 621 bp, Bordetella pertussis
atgtctgaagccgcacattccggcgcggcgcccgcggatctggtcgagctgggccgcattgcatcggcctacggtgtcaaaggctgggtaaaggtgcagccccactcggcgcaggccgaagtgttgcgcaccgtctctcactggtggctgactcgccccgcgccgcaagcggcccgggacgttgtcgcgtccgtgccgcgcgcctatcaggtgctgcaggcgcgcgtccatggcggcgcggtggtggcccagctggcaggcatcgacgaccgcgatcaggccgaggccttgcgcggttgcttcgtccaggcggcgcgcagcgcctttccggcgcccgccgacgacgaatactattgggtcgacctgatcggctgcgcgctctacagcgatgcggacggcgagccccgcttgctgggcgtggtcgacgaggtgttcgacaacggcgcgcacgcggtcctcaaggtcttgcgccagcagatccagcccggccagcccgggccggtgccgctactcgaccccaagggccggccgctcgaagagctggtgccgttcgtgcgcgcccatatccggcatgtcgacttggccgcgcgccgcatcgacagcgactggccactggactac

SEQ ID NO: 14867 - DNA, 771 bp, Bordetella pertussis
atgcgcttcgacgtcgtcacgctgtttcccgacatgttcggcctggtgcgcgaccagggcgtgacggggcgcgcccatgcgcagggcctgtgggcgctgcacgcctggaacccgcgcgatttcacccacgacgtgcatcgcacggtcgacgaccgcccctacggcggcggcccaggcatggtgatgatggccgcgccgctggaagccgcggtggcggccgcacaggccgcccgcgccgcgcagggcctgcaggccgcgccggtgatcctgctgtcgccggcaggtcggcgctacgaccaggccgaagccaccacgctggcggcgggcacgggcgcgattttcatctgcggacgctacgaaggcgtggaccagcgcttcatcgagcgctgtgtcacgcatgagctgtcattgggcgatttcgtgctgtcgggcggcgaactggccgccctggccatgatggacgctgcggtgcgcttgctgcccggcgtgctcaacgatggcgactccgcgctgcaggactccttcaacgcggcgctcgacggcctgctcgacagcccgcattacacccgtccggaagtctacgaaggcgtgccggtgccgcagccgttgctcagcggccatcatgccaacatcgcgcgctggcgccgcgagcagtccctgcggctgaccgccagccgccgccccgagctgatcgagcgcgcgcgcggcgagggccggctcagcaaggccgacgaacgcttcctggccagcctggcgggcgagcgcgaaagc

SEQ ID NO: 14868 - DNA, 465 bp, Bordetella pertussis
atgagtattatcgataaccgcaaggccacgcacgactatttcatcgaggaccgctacgaagctggcatggtcctggaaggatgggaagtgaaggctatccgcgacggccgcgtgcaattgaaggaaagctacgtcatcgtgcgcgatggcgaaatctacctgctgggcatgcacgtcagcccgctgcctaccgcgtccacccacatccgccccgacgccacgcgcacccgcaagctgctgctcaaggccgaggaaatccgcaagctgatcggcaaggtcgaacagcgcggctacacactggttccgctcaacctgcactacaagaacggccgcatcaagctggacttcgcgctgggccggggcaagaagctgtacgacaagcgcgacaccgcccgcgaaaaggactggcagcgcgaaaaggaacgtgtcctgaagcacgacacgcgcgtcaaccagcgcgattcc

SEQ ID NO: 14869 - DNA, 4242 bp, Bordetella pertussis
atgaaagcgctactcgacctcttcaagcaagtctcgcaagacgagcagttcgatgccatcaagatcggcatcgcctcgcccgagaagatccgttcgtggtctttcggcgaagttcgcaagcccgagacgatcaactaccgtacgttcaagcccgagcgtgacggcctgttctgcgccaagatcttcggtcccatcaaggactacgaatgcttgtgcggcaagtacaagcgcctgaagcatcgtggcgtgatctgcgaaaagtgcggcgtggaagtcaccgtcgccaaggtgcgccgcgagcgcatgggccatatcgaactggccagcccggttgcgcacatctggttcctcaagagcctgccgtcgcgcctgggcatggtgctcgacatgacgctgcgcgacatcgagcgcgtgctgtacttcgaagcctggtgcgtgatcgagcccggcatgacgccgctcaagcgcggccagatcatgtccgatgacgacttcctggccaagaccgaagagtacggcgacgacttccgtgccctgatgggcgccgaggccgtgcgcgaactgctgcgcaccatcgacatcgatcgcgaagtcgagacgctgcgcggcgagctcaaggccaccagctcggaagccaagatcaagaagatctccaagcgtctgaaggtgctggaaggcttccagaagtccggcatcaaggccgaatggatggtcatggaagtgctgcccgtgttgccgccggacctgcgtccgctggtgccgctggacggcggccgcttcgcgacctccgacctgaacgacctgtaccgccgcgtcatcaaccgcaacaaccgcctcaagcgcctgctcgaactgaaggcgcccgagatcattctgcgcaacgaaaagcgcatgctgcaggaagccgtcgactcgctgctcgacaacggccgccgcggcaaggccatgaccggcgccaacaagcgccagctcaagtcgctggccgacatgatcaagggcaagagcggtcgtttccgccagaacctgctgggcaagcgcgtcgactactcgggccgttcggtcatcgtggtgggcccgcagctcaagctgcaccagtgcggcctgcccaagctgatggcgctcgagctgttcaagccgttcatcttcaatcgcctggagatgatgggcctggccacgaccatcaaggctgccaagaagctggtcgagagccaggagccggtggtgtgggacatcctcgaagaggtgatccgcgagcacccggtcatgctcaaccgtgcgccgacgctgcaccgcctgggcatccaggcgttcgagccggtgctgatcgaaggcaaggccatccagctgcacccgctggtctgcgccgccttcaacgccgacttcgacggcgaccagatggccgtgcacgtgccgctgtcgctcgaagcgcagctcgaagcgcgtacgctgatgctggcctcgaacaacgtattgttcccggccaacggcgagccgtccatcgtgccgtcgcaggatatcgtgctgggcctgtactacacgacccgcgaacgcatcaacggcaagggcgaaggcattttctttgccgacgtgtcggaagtgcagcgcgcctatgacaacggcgaagtcgaactgcagacccgcatcaccgtacgcctgaccgagtacgagcgcgacgagcagggcgagtggcagccggtcaagcaccgccatgaaacgacggtcggccgtgcgctgctgtccgagatcctgcccaagggcctgcccttcacggtgctgaacaaggccctgaagaagaaagagatctcgcgcctgatcaaccagtcgttccgccgttgcggcctgcgcgacacggtgatctttgccgacaagctgatgcagtcgggcttccgcctggccacgcgcggcggcatctcgatcgccatggaagacatgctgatcccgaaggccaaggaaggcatcctggccgaggccagccgcgaggtcaaggaaatcgacaagcagtactcgtcgggtctggtgacctcgcaagagcgctacaacaacgtggtcgatatctggggcaaggccggcgacaaggtcggcaaggcgatgatggagcaactggccaccgagccggtcgtcaaccgtcatggcgaggaagtgcgccaggaatcgttcaactcgatctacatgatggccgactcgggcgcccgtggttcggccgcccagattcgccagctggccggcatgcgcggcctgatggccaagccggacggctcgatcatcgagaccccgattaccgccaacttccgcgaaggcctgaacgtactgcagtacttcatctcgacgcacggcgcgcgcaagggcttggccgataccgcgctgaagacggcgaactcgggctacctgacgcgccgcctggtcgacgtgacccaggatctggtgatcaccgaagacgattgcggcaccagccatggctacgcgatgaaggccctggtcgagggcggtgaagtcatcgaaccgctgcgcgaccgtatcctcggccgcgtggccgcgatcgacgtcgtcaaccccgacacgcaggaaacggccatcgcggctggcaccctgctcgacgaagacctggtcgacctgatcgaccgcctgggcgtggacgaagtcaaggtccgcacgccgctgacgtgcgaaacgcgtcacggcctgtgcgcgcattgctatggccgcgatctgggccgcggttcgcacgtcaacgtgggcgaggccgtcggcgtcatcgccgcgcaatcgatcggcgaaccgggcacgcagctcaccatgcggacgttccacatcggtggcgccgcttcgcgttcggccctggccagcgccgtggaaaccaagtccaacggcacggtcggcttcgccagcacgatgcgctatgtcaccaacgccaagggcgagcgtgtggcgatttcgcgttccggcgaactggccatcttcgacgacaacggccgcgagcgcgagcgccacaagatcccttatggcgccaccgtcctggttggcgacggcgaagcggtcaaggccggcacccgtctggccagctgggatccgctgacccgtccgatcgtgtccgagtacagcggcgcggtgcgcttcgagaacatcgaagaaggcgttaccgttgccaagcaggtcgacgaagtcaccggcctgtcgacgctggtcgtgatcacgcccaagacgcgcggcggcaagatcgtcatgcgtccgcagatcaagctggtcaacgagaacggcgaagacgtcaagatcgccggcaccgatcactcggtgaacatctcgttcccggtgggtgcgctgatcaccgtgcgcgacggccagcaggttgccgtgggcgaggtcctggcgcgtattccgcaggaatcgcagaagacccgcgacatcaccggcggtctgccgcgcgtggccgagctgttcgaagcccgttcgcccaaggatgccggcatgctggccgaagtcacgggtacggtatcgttcggcaaggacaccaagggcaagcagcgcctggtcatcaccgacctggaaggcgtcagccacgagttcctgatcctgaaggaaaagcaggttctggtgcacgacggccaggtggtgaacaagggcgaaatgatcgtcgacggcccggccgatccgcacgacatcctgcgcctgcagggcatcgagaagctggcgacctacatcgtcgacgaagtgcaggacgtctaccgtctgcagggcgtgaagatcaacgacaagcacattgaagtgatcgtccgccagatgctgcgccgcgtgaacatcgtcgatccgggtgacaccgagttcatcccgggcgagcaggtcgagcgttcggaactgctcaacgagaacgatcgcgtggtcgccgaggacaagcgtccggcttcgtacgacaacgtgctgctgggtattaccaaggcctcgctgtcgaccgattcgttcatctcggcggcgtcgttccaggaaacgacccgcgtgctgaccgaagcggcgatcatgggcaagcgcgacgacctgcgcgggctgaaggaaaacgtgatcgtcggccgtctcatcccggctggtactggcctggcgtatcacattgcccgcaaggacaaggaagcgctggaagctgccgagcgcgaagccgcccggcagctggccaacccgttcgaggatgcgccggttacggtcggcggcgaaccggaggctccggccgccgatacgccgtcggacgactcggccgag

SEQ ID NO: 14870 - DNA, 1014 bp, Bordetella pertussis
atgcacgctttctacgattcgattcccgcgcgcgccgatggttcggcgcaatgcgcgccgctggccagcctgcgcgtcatcggcgcggccggcgccgacgcgctggctttcctgcatgggcaactgacccaggacgtcaccggccagcccgccgaccacgcccgcctggccggctactgcaccgccaagggccgcctgctggccacgctggtcatgtggctggccgccgcggccgacgaaagcgccccggtatggcaggcgctggtgcgcgccgacgtcgccgaggcggtgctcaagcgcctgtccatgttcgtattgcgcgccaaggcgcggctggctccggtgccggcgtgggcggcgggcgtgcaatgcgcccccgccgcgctggccgcgctgcaggacgccgccggcggcgccctgcccgccgcgccctggcagcgcgccgaattgcccaccggcacctggatcggcgcgccctcggccgatgcgcagccgcgctggtggtggatcgccaccgaagcgcagctggagcgggccggcgcgctggccgcgcacctgggccgcgcgtccgagtccgcctggcaggccgccgacctggccgccggcctgccctggatcggcgcggccacgcaggacgtcttcattccgcagaccgtcaatctcgacctcatcggcggcgtcagcttcaccaagggctgctatccgggccaggaggtggtggcgcgcagccattaccgcggcacggtcaagcgccgcatggcccatggcgtgatcgccgaggccccggccgacctgcccgaccccttggccggccaggacatctacgacagcgcgcggccggacgaaccctgcggacgcgtggtcgacgccgcgcgcagcgacgggcagctcgcgctgctgttcgaaaccaccctggccagcctgcccgacggcgacctgcggctgctcagcgcgcagggcccgcgcatcgccctggcgcccctgccctacgaactggccggcaacgccgccggc

SEQ ID NO: 14871 - DNA, 624 bp, Bordetella pertussis
atgaccccgcgtggacgtttcattacgctggagggcgtcgatggcgccggcaagagcacccataccgcatggatggtgcaggcgctgcgcgacctgggcctgacggtgctggccacccgggagcccggcgggacgccggtgggcgagaagctgcgcgagctgctgctgtccgaacccatggccctggaaaccgagaccttgctcatgttcgcggcgcgctgcgagcacgtgcgcgaagtgatcgcgccggcgctggcgcgcggcgagtgggtggtgtgcgaccgcttcaccgatgcgtcctatgcctatcagggcggcggacgccaattgggcgcggcgcgcgtggcggcgctggagcagtgggtgcatcccgatctgcagcccgaccgcacctggctgttcgacgtgccgctggacgtggcgcgcgcccggctggcgcgctcgcgccagctcgaccgcttcgagcgcgaggaggatgccttcttcgaacgcacccgcgccgcctaccacgagcgggcgcgcagctcggatggacgtatccgcatcatcgattcgagccggccgctcgaggtcgtgcgcgcgcagctcgacagcgaggtgcgcgagctggtggcgcaagcggca

SEQ ID NO: 14872 - DNA, 1050 bp, Bordetella pertussis
atgagcctcggtcgcttcctgccctggcagacggagatcgcccgctcctggctgagcgggcgcgaccgcttcgcgcatgcctggctgatccatggcaatggcggcatcggcaagctggactttacggcggccgcggcggccagcctgctgtgcgagtcgccgcgccagggcctggcgtgcggcgagtgcgcggcctgcgcctgggtggccagcggcaaccatccggatctgcggcgcatccgtccggaggcggtcgcgctggaagagggcgccgaccagaccgaaggcgccgaggaggccgaggccggttccggtggcgcggcggccaagcgcgcgccgtccaaggacatccgcatcgaccagatccgcgcgctcgaaccgtggttcaacaccgccacgcaccggggcggctggcgcgtggcgctgctgtatccggcgcatgcgctgaacgtgatatcggccaacgccttgctgaaggtgctggaggagccgcccgcgcatacggtgttcctgctggtggccgatgcgcccgaccgcctgctgcccacgctggtgtcgcgctgccggcgcctgccgctgcccacgccgtcggccgggcaggcgctgcaatggctgggcgagcagggcgtggagccggcggccgactggctggctgccgccggcggcgcgccgctggcggcgcagcgcctggcggcccggggcgatgcgccgtgcccggcctggctggcgcaactggtgcagcccttggccgcgggcaaggcgcccgatgtgggcacgctgaccgaaaacctggaaaaggtggcggcggccgagtggatcgacgccctgcagcgcctgttcaccgacctgacgctggccgcccatggcgcggccagccgctactatcccttgctggccgagccggtgcggcaagccgccgcgcgcgcgcagcccgcgcaactggccgagaccgcgcgctggctgagccgccagcgcgggctggccacgcatccgctcaacgccaagctgttcgtgcacgcggccctgcagcgcgtggtgctatcctgccag

SEQ ID NO: 14873 - DNA, 777 bp, Bordetella pertussis
gtggtccgtatgtacgtagactcccattgtcatctgaattttcccgaattggcgcaagacctgccggccgtgctggatcgcatggccgccaaccaggtcacccatgcgctggtcgtcagcgtcaacatgcccgactggccgggcctgatgcaattggtcgagccgcacggcaatctctgggcgtcggtgggggtgcaccccgactatgaagacacgcccgatcccgagcccgccgaactcgagcgcctggccgcgcaccccaaggtggtggccatcggcgagaccgggctggactactaccgcctgagcgagccgctggactggcagcgcgagcgctttcgccgccatatccgcgcggcgcgctcgaccggcctgccgctgatcgtgcatacgcgcgcctcggcgcaggacacggtgcgcctgctgcgcgaagagggcgccgacgaggtcggcggcgtgatgcactgttttaccgagtcctgggagatcgcccagcaggccgtggcgctgaatttccatatctcgctttcgggcatcgtgacgttcaagaacgcgcagctcgtgcacgaggtggccgccaatatgccgctggaccggctgctgatcgagaccgactcgccctacctggcgccggtgccataccgcggcaagctgaacgatccgtccaaggtgatccacgtggccgagaagatcgccgagctcaagggtattccggtggccgaggtggcgcatgcctctaccgagaatttcttcaaacttttcaataagataaaacga

SEQ ID NO: 14874 - DNA, 960 bp, Bordetella pertussis
atgcccagccaactcgaagcgttgcgccgccataccgttgtcgttgccgataccggcgatttcgaagcgatgcgtgcgctgcgccccaccgacgccaccaccaacccctcgctgatcctcaaggccgtgcagcaagaggcgtaccggccgctgctggtccagacggcgcgcgcgcaccagggcgcctcgccggccgagatcaccgaccgcctgctggtcgcgttcggccgccagatcctcgatatcgtgccgggccgggtctccaccgaggtggatgcgcgcctgtccttcgacacgcgcgccacggtcgagcgcgcccgcggcctgatcgccctgtaccaggcggccggcgtgccgcgcgaacgggtgctgatcaagatcgcctccacctgggagggcatccaggccgcgcgcgtgctgcaggccgagggcatccgctgcaacctgacgctgctgttctgcctgccgcaggcggcggcctgcgccgacgccggcgtgcagctgatctcgccgttcgtcggccgcatctacgactggcacaagaagaacgccggcgccgagtgggtcgaggatgcgcgccgcggcgccaacgatccgggcgtgcaatcggtcagccgcatctatcgctattacaagcgcttcggcatcgagaccgagatcatgggcgccagcttccgcaacgtggaccagatcctggcgctggccggctgcgacctgctgacgatcagcccggaactgctgacccggctggcgcagaccgagggcgaggtgcccgccgcgctgtcgccgcaggccggccatgacgacgccgacgcggtccgcctggatggcggcgaggtggcgttccgtacgcagctcaacgaagacgcgatggccagcgagaaactgtccgagggcatccgcctgttcgtggccgatgcgcgcaagctggatgcgctgatcgaatcgcacggcgcggcc

SEQ ID NO: 14875 - DNA, 4255 bp, Bordetella pertussis
gcaattctggctttggcggacggtaccatttttcggggcgtatcgataggcgtgcctgggcataccgtggccgaagtggtgttcaacacttcgatgaccggataccaggaaatcctgacagacccgagctacgccgggcagaccgtcatgctgacctatccccacattggcaataccggcgtcaatcctgaagacgtcgaggccaatcgtgtgtacgccgccggtctggtggtgcgcgactgcccggcgcgcgtgtccaatttccgcgccacgcaatcgctgcccgagtacctgaacgcgcaaggcatcgtcgccattgcgggcatcgacacgcgcaagctgacccgcatcctgcgcgagtccggcgcccagggctcgtgcatcctggtcggcgaggacgccgagcgcgcggtcgagctggcccgcggctttccgggcatgagcggccaggacctggccaaggtcgtctccatcaaggagcgcgccgactggacccagggcacctgggaactgggctcgggctacacgcagccggcccaggaccgcttccacgtcgtggcctatgactatggcgtcaagagcaacatcctgcgcctgctggccgatcgcggctgccgtgtcacgctggtgccggcgcagactaccgccgaggaagcgttcaagctgcaacccgacggcgtgttcctgtccaacggcccgggcgatcccgagccgtgcgactacgcggtggacgccacgcgcgccttcctggagcgcaagctgccggtgttcggcatctgcctgggccaccagctgatgggcctggcgctgggcggcaagaccgtcaagatgaagaccggccaccacggggccaaccacccggtgcaggacgtgcagtccgggcgcgtcttcatcaccagccagaaccacggtttcgcggtcgacgccgcgaccctgccggccaatacgcgcgtcacgcacatctcgctgttcgacggcacgctgcagggtttcgagctgaccgaccggccggcgttctgcttccagggccaccccgaagccagccccgggccgcacgacatcatcgtgctgttcgacaagttcatcagcctgatggccggccagaaataaagattccaccatgcccaagcgtacagatctaaaaagcatcctcatcatcggcgccggcccgatcatcatcggccaggcctgcgagttcgactattcgggcgcccaggcgtgcaaggcgctcaaggccgagggttaccggaccatcctggtcaacagcaaccccgccaccatcatgaccgaccccgaaacggcggacgtcacctatatcgagcccatcacgtggcaagcggtcgagaagatcatcgagcgcgagaagcccgatgcgctgctgcccaccatgggtggccagaccgcgctgaactgcgcgctcgacctggcccaccacggcgtgctgaaaaagcacaacgtcgagctgatcggcgccaacgagcacgccatcgagaaggccgaagaccgccagaagttcaagcaggccatgaccgacatcggcctggaatcggccaagtcgggcgtggcccactcgatggacgaggcctgggaagtgcagcgccgcatcgcggccgacatcggcacggcgggctttcccgtcgtcatccgccccagcttcacgctgggcggctcgggcggcggcatcgcctataacgccgaggaattcgaagtcatctgccgccgcgggctggaagcctcgccgaccaaggagctgctgatcgaggagtcgctgctcggctggaaagagttcgagatggaagtggtgcgcgacaaggcggacaactgcatcatcgtctgctcgatcgagaacctggacccgatgggcgtgcacaccggcgattcgatcaccgtggcgccggcccagacgctgaccgacaaggaataccagatcatgcgcaacgcgtcgatcgcggtattgcgcgagatcggcgtggacaccggcggttcgaacgtgcagttcgcggtcaatccgcagaacggccgcatgatcgtcatcgagatgaacccgcgcgtgtcgcgttcgtcggcgctggcctccaaggccaccggctttcccatcgccaaggtcgccgcgcgcctggccgtgggctacacgctggacgagctgcgcaacgagatcaccggcggcgccaccccggcctcgttcgagccgaccatcgactacgtggtcaccaaggtgccgcgcttcgcgttcgagaaattcccgcaggccgatgcgcgcctgaccacccagatgaagtcggtgggcgaagtcatggccatgggccgtactttccaggagtcgttccagaaagccctgcgcggcctggaagtcggcgtggacggcctgaaccagaagaccaccgaccgcgagaagctgcagatcgagctgggcgagcccggccccgagcgcatctggtacgtgggcgatgccttcgcccagggcttcacgctggacgaggtgcacggcctgacgcgcatcgatccgtggttcctggcgcagatcaaggaaatcgtcgacatcgagctcgcgctcgagcagaagacgctggccgatctcgactacgccaccctgtgggagctgaagcggcgcggtttttccgaccgccgcctggcgttcctgctggattcgtccgagtccgaagtgcgcaagctgcgccaccagctcaacgtgcgtccggtctacaagcgcgtggacacctgcgccgccgaattcgccaccaacaccgcgtacatgtattccacgtacgaggaagagtgcgagtcccagccgaccgaccgcaagaagatcatcgtgctcggcggcggtccgaaccgcatcggccagggcatcgagttcgactattgctgcgtgcacgccgcgctggcgctgcgcgaagacggctacgagaccatcatggtcaactgcaacccggaaaccgtctcgaccgactacgacacctccgatcgcctgtacttcgagccgctgacgctggaagacgtgctggaaatcgtccacaaggaaaatccggttggcatgatcgtccagtacggcggccagaccccgctgaaactggcgcgcgcgctcgaggccaacggcgtgtccatcatcggcaccagccccgagtcgatcgacgtggccgaggatcgcgagcgcttccagaagctgctgaacaagctgggcctgcgccagccgcccaaccgcaccgcgcgcaccgaggccgaggccctggcgcacgccagcgagatcggctacccgctggtggtgcgccccagctacgtgctgggcgggcgcgcgatggaaatcgtgcacgagcagcaggacctcgagcgctacatgcgcgaggccgtcaaggtcagcaatgactcgccggtgctgctggaccgcttcctgaacgacgccaccgaagtcgacgtggactgcctggccgacggtcagaccgtgttcatcggcggcgtcatggagcacatcgagcaggccggcgtgcactcgggcgactcggcgtgcagcctgccgccgtactcgctgtcggccgaggtgatcgccgagatcaagcgccagaccaccatgatggccaaggcgctcaacgtctcgggcctgatgaacgtgcaattcgccatccagggcggcgacgtctacgtgctggaagtgaatccgcgcgcctcgcgcaccgtgccgtacgtgtccaaggccaccggcctgcagctggccaagatcgccgcgcgcgccatggccggccgcacgctggccgaccagggcatcacgcgcgaagtcgtgccgccgtacttcagcgtcaaggaagccgtcttcccgttcgtcaagttcccgggcgtggacaccatcctcggcccggaaatgaagtcgaccggcgaagtcatgggcgtgggcaacagcttcggcgaggccttcgtcaagtcgcagctggccgccggcgtgcgcctgcccgactcgggcacggtcttcatcagcgtgcggaaccaggacaagccgcgcgccgtcgaggtcgcccgcggcctgcacaacctgggcttcaagctggtggccacgcgcggcaccgccgccgagatcgaggccgccggcattccggtgcaggtggtcaacaaggtcaccgagggccgtccgcacatcgtcgacatggtcaagaacggcgaagtctcgctggtgatcaacaccgtcgaagagcgccgcaacgccatcgccgactcgcgcaccatccgcacccaggcgctggccaaccgcatcacgttcttcaccacc

SEQ ID NO: 14876 - DNA, 3040 bp, Bordetella pertussis
accttccagcaaatcatcctcacgctccaggactattgggacaagcaaggctgcgccctgctgcagccgtacgacatggaagtcggcgccggcacctcgcacacggccaccttcctgcgcgccatcggccccgagccgtggcgcgccgcctacgtgcagccttcgcgccgccccaaggacggccgctacggcgaaaacccgaaccgcctgcagcactactaccagtaccaggtcgtgctcaagcccgcgccgcccgaaatcctcgacctctacatcggctcgctcaaggcgctgggcatcgaccccacgcaacacgacatccgcttcgtggaggacgactgggaaaaccccacgctgggcgcctggggcctaggctgggaagtctggctcaacggcatggaagtcacccagttcacctacttccagcaagtcggcggcctggactgcacgcccacgaccggcgagatcacctacggcctggaacgcctggcgatgtacctgcaggacgtcgaaagcgtctacgacctggtctggaccgaaggcgccaacggcaaccgcgtctactaccgcgacgtgttccaccagaacgaggtcgagcaatcgacctacaacttcgagcacgcgtcggccgacatgctgtttgcgcacttcaacgattacgaagccgaggccaagcgcctgatggacgtgccgctggccctgccggcctacgaggcggcgctgaaggctgcccacactttcaacatgctggatgcgcgcggcgcgatcagcgtgaccgagcgcgccgcctacatcggccgcatccgcaacctgtcgcgcgccgtcgcgcaggcctactacgactcccgcgaacgactgggcttccccatgcttgccggccgcaaggccgccggggaggcagcctgacatgaccaccgatatccgccccctgctgattgaactgtttaccgaagaactgccgcccaaggccttgcagaagctgggccaggcgttcgccgaaggcgtgcgcgccaccctggcgcgccaccatctgctggccgacggctgcgcggtcgagcctttcgccacgccgcgccggctggcggtgcgcctgtcggccgtgctggcccaggcccccgagcaggcctacgccgagaaactgatgccggtgaaggtcggcctggacgccaacggccagcccaccgccgcgctggccaagaagctggccgccaagggcctggaaggcctggatccggccacgctggaacgcgagtccgatggcaagcaggaatacctggtggcgcgcggcacggccgccggcgcgcaactggccgtcgggctgcaggaggggctggacgccgccatcgacggcctgcccattcccaaggtgatgcgctaccagttggccgacggccagaccaccgtcaagttcgtgcgcccggcgcacgggctggtggccctgttcggcgccgacatcgtgccgatcgcggcgctgggcctgcaggccggccgcgccacgcaggggcaccgcttccagagcaacggcgccatcgagctcgccacggcccaaggctacgaggccgacctggccgagcgcggccgcgtcattgcctcgttcgaggcgcgccgcgccgagatttcgcgcctgctcgacgagcacgcgcaacggctgggcgccacgctgggcgacgaccccgaagtcacggccctgctggacgaagtgaccgccctggtcgaacaccccacggtctatgtcgggcagttcgaggaacagttcctgcaagtgccgcaggagtgcctgatcctgaccatgcggctgaaccagaagtacttcccgctgttcgacccggccagcggcaagctgacgcaccgcttcctgatcgtcagcaacatgcaggtggccgacccggccaacatcgtcgaaggcaaccagcgcgtggtgcgtccgcgcctggccgacgcccagttcttcttcgagaccgaccgcaagaccccgctggccgcgcgcgtcgagcagctgggcagcatcgtctaccacaacaagctgggcacccagctcgaacgcgtcgagcgcgtgcgcgccatcgcgcgcggcatcgccacggcgctgggcggcgacgccgcccattgcgaccgcgccgcgctgctggccaaggccgacctgggctcgaacatggtgggcgagttccccgagctgcagggcatcatgggcgcctactacgcccagggcgacggcgagcccgccgacgtggtcaccgccctgcgcacgcaataccgcaaccgctatgacgcgccggtcgacgccgccacgctgaccgcggccacgctgttcatcgccgagcgcatcgaaaccctggtcggcatctggagcatcggcctggcgcccaccggcgagcgcgacccgttcggcctgcgccgcgccgcgctgggcctgatcagcgccttcgagcaactggccgccggcggctggctgaaggtcagcgaagacggcccgctgtcgctggacggcctgctggcgctggccgcgcaggccttcccggacggcaagatcggcgccgacaccctggccgaggtgcgcgccttcatctacgaacgctaccgcaaccagctgatcggcgaacacgaccgcaacgcggtcgaggccgtcatcgcgctggcgccgccgctgcaccaggtggccgcacgcgtacgcgcggtggccgccttcgcgcaactgccggcggcggccagtctggccgcggccaacaagcgcatcggcaacctgctcaagaaggccgaaggggaaatcggcgcggtcgatgccgcgctgctgcaggacccggccgaaaaggcactggccgaggccgtggcgcaactgcggccgcaagcccgggcccagctgcaggcgggcgatttcgccgccagcctggccacgctggcgcaagcgcgcgagccggtggacgccttcttcgccgatgtcatggtgatggccgacgacgcggcgctgcgcgccaaccgcctggcgctgctgggccaactgcacggcctcatgaaccaggtggccgacatttccaggctggcc

SEQ ID NO: 14877 - DNA, 726 bp, Bordetella pertussis
atggcctggctgcgttcggcgctgtatgcactgttcctgatcgtcaccgtcattccctatgcgttcgcctgcatcctgtgggcgccgctgccgctgcactggcgctatcgcctgaccgtgggctggccgcgcctggccatctggggcgcgcgcgtgatctgcggcatccgctggcgcatcaagggcgccgagaacctgcccgacggtcccgccatcctgctctccaagcaccagtccgcctgggagacgctgttcttcccggcccacatgccgcgcgaagtgtgcttcgtctacaagaaagaactgcacatggtgccgttcttcggctggggcctggcgctgctgcgcatgatccccatcgatcgcgccaagggccgtgacgccttcgagcaggtcgtgcgccagggccaggtgcgcctggacgaaggccgctggccgctgctgtttcccgagggcacgcgcgtgccgcccggaaagaccggccgcttcaagatgggcggcgcgctgctggcttcgcgcaccggcgcgcgcatcatcccggtggcgcacaacgccggcgaatgctggcgccgcaatgccttcgtcaagcgccccggcctgattaccgtctcgatcggccccgcgatagaatcgcaggacgtcgcccctgaagtcctcaacgccaaagtacaggcctggatcgaaggcgagatgcgtgttctcaatcccgaaaggtatggccaagcc

SEQ ID NO: 14878 - DNA, 2166 bp, Bordetella pertussis
atgaccttccggcgcctggccggctggcgccggccggcgctggccgcggcggtgctggccggcggcgtcgtcatggccttgctggcgctggaccgcctgttcccgctgccgcgcttcggctccgacggcgcccaggtcgtcgtggcagccgacggcacgccgctgcgcacctatcccagccgcgatggggtctggcgctacccggtcgggcccggccaggtatcgccgcactatctcgaaaccctgctcacgtacgaggaccgctggttctattggcaccccggcgtcaatcccttcgccctggcgcgggcgggctggcaatgggctgcgcacggccgcatcgtctccggcggctcgacgctgaccatgcaggtcgcgcgcctgctcgatcccgagctggccggccagccgtccaagaccctgtcggccaagttgcgccaggcctggcgcgccatccagctggaaatgcactacagcaaggacgagatcctggggctgtacctcagccacgcgccgatgggcggcatcgtcgagggcgtggaaatgggagcgcgcatgtggctgggcaaatcggccgccgacctgagccacgccgaggcggcgctgctgaccgccttgccgcaggcgccgtcgcgcctgcgccccgaccgccatccgcaggccgcccagctggcccgggacaaggtgttgcagcgcatggcgcagcgcggcgtgtgggacgcggcgctggtggccgacgcgcgtatcgagaatgtggtcgccccgccgttgcgcgcgcgctggctggcgccgctggccgcccagcggctgctgggcgaagcggggccggccgccggcgtggtccgatccaccctggatcccgatatccagtccacggtggaagccatgctgctggaccgcgtcgacgccttgccgcccaaggtgtccatggccgtgctggtcatggacaacgacagcctggaggtcaaggcgtacgccggctccgcggatttcaccgacgacagccgctacgcgcacgtggacatggtgcgcggcgtgcgctcgccgggctcgacgctcaagccgttcctgtatgcgctggcgctggacgagggactgatccattcggaaagcctgctgctggacgcgccgctgtcgttcggcggctacgcgccgggcaatttccaggcggcgttcgccgggccggtcagcgtggcccaggcgctgcagcggtcgctgaacgtgccggcggtggacctgctggaccgggtcggtccggccagattcgcatcggttatgctggcggggggcgtgcatttgcgcatgccggccggcgcggtgccgaacctcagcttgattttgggcgggggcggcaccacattggaagaactggtcggtgcttaccgcgcgctggctcgcggcggcctgtcgggccggccccggctgcgcgccagccagccgcgcatcgaggctcgcctgatgagccccggggcggcctggatcgtgcgcgatatcctcgagttgggcggccatccggatcgtcccctgtttcagggcgccgccgcgggccgccagctggcctggaaaaccgggaccagtttcggctttcgcgatgcctgggcggtgggcgtgaccgaccgctataccatcggcgcgtgggtgggccggcccgacggcacgcccaacccgggatttttcggggccaacgtggcggcgccgctgctgcaggacatcgtggccgcgttgccggcgggcgcgcccgtgccgcgcacccgtccgccgcaggtgcaggccgtggtgacgtgctggccgctgggctggcggctgggcagcgcgccagcgggcatttgtccggagcgccgcatggcctgggcgctggacgatacggtgccgccgtcgttcgtcggctatgccgatacggcgacagggcctttgcgcatcgagggcgtggccgatggcaccattctgcgtccggtgcccggaaagcgggcagtcacgctggaagtcggcgcgcagggcgccagtggtgaggtatggtggatgctggacggtaaggtgtaccgtagtggcgcggctggacaggcgcagacactgacgttgtcgcgcaatgggcggtacgcgttgacagtgatggacggccagggcaggtatgctggtctggaatttgaaatctctggcgttacgcca

SEQ ID NO: 14879 - DNA, 732 bp, Bordetella pertussis
atgcctagcgacgacgacaagcaattcgagggccgcttcctgggcgtgctgggcggcatggggccgatggccggcgccagtttcatgcaacggctggtggcgctgaccgaagccgcctgcgaccagcagcatgtaccggccatcctgtggaacgacccgcgcgtgccggaccggcccgctgggcaatccggacagggcgccgatccgctgccgtggatgcgccacggcatacggcggctggagcaggccggcgccaccgcgatcgccatcccctgcaataccgctcacgtctggtatccgcaactggcgcaatcggcgagcgtgcccgtcctgcatatcgtggaggcggtgctggacgacctgcggcgccagggcatccatgcgggccgcgtcggcctgctggccaccgccacgacgctgcggctgggcctgtaccagcatgaaatgctggcgcaaggctacgaaccggtcgtgccgcccgtcgacctgatagatggcctgtgcgcgcaatcgatacgcctggtcaagcagaacctgctgccgcaggcactgccgccggcgctggcgtgcatcgacagcctgcgcgccatgggcgtggacgccatcgtgctggggtgtacggagttgccgctggcgctgccgcacgcgttgcgcgcggagctgggcgtcgcgatgaccgactcgatcgacgcgctggcgctggccgggctgggctggtatcgccgcggcggc

SEQ ID NO: 14880 - DNA, 3714 bp, Bordetella pertussis
atgcccgccccgcaccgcctgtacccccgcagtctgatctgcctggctcaggcgctattggcatgggctttgctggcatgggcgcccgcgcaggcaagccaggagctgaccctggtcggcaaggctgccgttcccgacgtcgaggtcgcgctcgacggcgacgactggcgttggctggcccgcaagcgggtactgacgctgggtgtgtacgcaccggacattcctccgttcgacgtcacctatggcgaacgctacgaaggcctgacggccgactacatggcgatcatcgcgcacaacctggggatgcaggcgaaagtgctgcgataccccacgcgcgaacaagccctcagcgcgctggaaagcgggcagatcgacctcatcggcaccgtcaatggcacggacggccggcaacagagcctgcgtctgagcgttccctacgccgccgaccacccggtgatcgtcatgcccatcggcgcacgccacgttccagcctcgaacctggccggccagcggctggcggtcgacatcaactacctgcccaaggaaacgctcgcacgggcctacccgcaggctacgctgcattacttcccctcatccgagcaggcgctggccgcggtggcctatgggcaggccgacgtattcatcggcgatgccctgaccacctcgcacctcgtatcgcaaagctatttcaatgacgttcgcgtagtcgccccggcccatatcgcgacgggcggagaatccttcggcgtgcgcgccgacaacacccgcctgctgcgggtggtcaacgccgtactcgaagccattccgccttccgaacaccgcagcctgatctaccgctggggactgggcagcagcatttcgctcgatttcgcgcaccccgcgtattccgcgcgcgagcagcaatggatggcagaccaccccgtcgtcaaggtggcggtcctgaatctgttcgcgcccttcaccctgttccgcaccgacgaacagttcggcgggatcagcgccgccgtgctgcagctgctgcaattgcgcaccggcctggacttcgagatcatcggcgtcgacacggtcgaggaactgatagccaagctgcgttcgggcgaagccgacatggccggcgccctgttcgtcaacagcgcgcgggagtccttcctcagtttcagccggccgtatgtgcgcaatggcatggtgatcgtcacgcgccaggaccccgacgcgcccgtcgacgccgatcatctggacggccgcacggtcgcgttggtgcgcaacagcgccgccattcccctgctgcagcggcgctatccccaggcgaaggtggtgaccgccgacaacccgagcgaggcgatgctgatggtggccaatggacaggccgacgccgtcgtgcagacgcagatcagcgccagctattacgtcaaccgctacttcgccggcaagctgcgcatcgcctcggcgctggacctgcccccggccgagatcgcgctggcgacgacgcgcggccagaccgaactgatgtccatcctgaacaaggcgctctacagcatttcgaacgacgagctcgcctccatcatcagccgctggcgcggcagcgacggcgatccgcgcacctggtacgcctaccgcaacgagatctacctgctgatcgggctgggcctgttgtcggccctgctgttcctgagctggatcgtctacctgcggcgccagatccgccagcgcaagcgggccgagcgggcgctgaacgaccagctggaattcatgcgcgtgctcatcgacggcacgcctaaccccatctatgtgcgcgataaggaaggccgcatgctgttgtgcaatgacgcctacctcgacacctttggcgtgactgccgatgcggtactgggcaagaccattccggaagccaacgtggtgggcgacccggcgctggcccgcgaaatgcacgagttcctgctcacgcgcgtggccgccgagcgcgagccgcgcttcgaggaccgcgatgtcacgctgcacggccgcacccgccatgtctaccagtggacgattccgtacggcgactcgctgggcgaactcaagggcatcatcggcggctggatcgacatcaccgaacgcgccgagctgctgcgcaagctgcacgacgccaaggaaagcgccgacgccgccaaccgggccaagaccacgttcctggcaacgatgagccacgagatccgcacgccgatgaacgcgatcatcggcatgctggagctggcgctgctccgtccgaccgaccaggagccggatcgccagtccatccaggtcgcgtacgactcggcccgcagcctgctggagctgataggcgacatcctggacattgcgaagatcgaggcgggaaaattcgacctggcgccggtgcgcacggcgctgcgcgtcctgcccgaaggggcgatccgcgtcttcgacggattggcgcgccaaaaaggcatagagctggtattgaagaccgacatcgtgggcgtcgacgatgtattgatagaccccttgcgcatgaagcaagtgctctcgaacctggtgggcaacgccatcaagttcaccaccgaaggccaggttgtccttgccgtgaccgcacgccccgacggcgacgccgcgcacgtgcagttcagcgtgagcgacaccggctgcggcatcagcgaggccgaccaacggcagctgttcaaaccgttctcgcaagtgggtggcagcgccgaggccgggccggcgccgggcaccggcctgggcctgtccatcagccggcgcctcgtcgaattgatggggggaacgctggtcatgcgcagcgcgccaggggtgggcacaacggtttcggtggacctgaggctgaccatggtcgaaaaatccgtgcaggccgcgccgcccgctgcggccactgcggccacgccgtccaagccgcaggtatcgctgcgcgtgctggtcgtcgatgaccacaaacccaacctgatgctgctgcgccagcagctggactacctgggccagcgtgtcatcgccgccgactccggcgaagccgccctggccctgtggcgcgagcatgcgttcgacgtcgtgatcaccgattgcaacatgcccggtatcagcggctacgaattggcgcgccgcatacgcgccgccgaggccgcgcccggttacggacgtacgcggtgcattctgttcggcttcacggcttcggcgcagatggacgaagcgcagcgctgccgcgccgccggcatggacgactgcctgttcaagccgatcggcgtggacgccttgcggcaacgcttgaacgaagccgtggcacgggccgcgctccccacgcccccctcgccccaggctgccgcgccggccacggacgacgccaccccgacggcgttctcggccgagtcgattcttgccttgacgcagaacgatgaggcgctgatccggcaattgctcgaagaagtgattcgcaccaaccgggcggacgtcgaccaattgcaaaagctgcaccagcaggccgattggccgaaggtctcggacatggcgcacaggctggccggcggcgcgcgcgtggtcgatgccaaggccatgatagacactgtgctggcgctggagaaaaaagcgcaaggccaggctggcccctcacccgaaatcgacggcctggtacgtacgcttgcggcgcagtccgccgcgctggagacgcaactgcgcgcctggctggagcaacggccgcatcaagatcagccc

SEQ ID NO: 14881 - DNA, 654 bp, Bordetella pertussis
atgcgtctcattctgctcggaccgcccggagccggcaaaggcacccaagccgcctttctcacccaacactacggcatcccgcagatatccaccggtgacatgctgcgcgccgccgtcaaggccggcacgccgctgggcctggaagccaagaaggtcatggacgcgggcggcctggtctcggacgacctgatcatcggcctggtgcgcgatcgcctgacccagcccgattgcgccaacggctacctgttcgacggtttcccgcgcaccatcccgcaggccgacgcgctcaagagcgccggcatcgcgctggattacgtggtcgagatcgaagtgccggaaagcgacatcatcgaacgcatgagcgaacgccgcgtgcacccggccagcggccgcagctaccacgtacgcttcaatccgcccaaggccgaaggcgtggacgacgtcacgggcgaaccgctggtgcagcgcgacgacgaccgcgaggaaaccgtgcgccatcgtctcaacgtctaccagaaccagacccgcccgctggtcgactactactcgtcctgggcccagtccgatgccgccgcggcgcccaagtaccgcaagatctccggcgtcggctcggtcgacgaaatcaagagccgcctgtcgcaggctctgcagagc

SEQ ID NO: 14882 - DNA, 822 bp, Bordetella pertussis
atgaatacatacgcttgtgacggggcgctcgcgcagagccggccccagggatggtttacgcctgcatttacggtaaagcggcaaggcggcatggcgcgctggcgccggcggctgggcgtcgcggcgctgggcgccgccatgctggcgagcctggcgccggccgcccgggccagcctcgtcatcacgggtacgcgcgtgatctacaacgcgggctcgcccgagaccacggtgaagatgagcaacgaggggcaggcccccgcgctgatgcaggcatggatcgatgacggcaatgccgaggcgaagccggacgaagtccaggtgccgttcttcctgacgcctccgctggcgcgggtggacccgggcaaggggcagaccttgcgcattttcttcaatggctacccggatggcaagacgctgccgtccgaccgcgaatcggtcttctggctgaacgttctcgaagtgccgcccaaggcgacgcccgaggaaggccacggggtcctgcagctgaccatccgctcgcgcctgaagctgttctatcggcccaagggcctgtccggcaacccgctgacggccgccgccgacctgaccttcaagcgcaagcccaacggcgtgctggaggtgcacaacccgacgccgtactacgtgaacctgcaaaagctggaggtgggcgagaacggcgcgcacggcagcaagacgccgtggatgctggcgccgctttcctcggacgagctgcgcctgaaagggacgggggccaagtcggtgcagtactgggccatcgacgacttcggcggcgtgacgccatatcaggcggccatagcggac

SEQ ID NO: 14883 - DNA, 1566 bp, Bordetella pertussis
atggcattgctacgctcggcggctaccgtcagcagtttcaccctgctgtcgcgcatcaccggcctggtgcgcgacatcctggtggcgcgcgcgttcggcgcgggccccctgaccgatgcgttctgggtcgccttccgtattcccaacctgctgcgccgcctgtttgccgaaggcgcgttcgcgcaggccttcgtgcccatcctgggcgcggcccgcaccgaacgcagcgacgcggaggtacgcacgctgctcgaccgggtggccgtgctgctgaccgccgcgctgatgctggtcaccctggccggcgtcgtggcggcgccctgggtggtgaccgccatggccagcggactgcgcagcgccgaacgcggcgccgagttcggcgccgcggtatggatgacgcgggtgatgttcccgtacatcctgtgcatgtccctcatcgccttcgcatccggcgtgctcaacacgtggcgccgctttgccgtgccggcgttcacgccggtgctgctcaaccttgccatgatcgcggcctgcctgtggctggcgccgcgcatggacgtgccgatctacgccctggccctgggcgtgatggccggcggcgtcgcgcaactggccgtgcaatggctggcgctggcccgcctgggcctgacgccgcgctggtcgctcgatttgcggcaggcctggcgcgacccgacggtgcagcggatcctgaaacagatggcgcccgccacgctcggggtatcggtggcgcagatttccctgctgatcaacaccaatatcgccacctggctgcagccgggcagcgtgacctggctgtcgtttgccgaccggctgatggagtttcccaccgccctgctgggcgtggcgctgggcacggtgctgctgcccagcctgtcggcggcgcacgcgcgcgccgaccaggacggctacagcggcctgctggactggggactgcgcctggtactgatgctgggcctgccggccgccctgggcctggcgctgctgtcggacgggctggtggcgaccctgttccactacggcgcgttccaggcgcaggacgtgcagcagacgcggctggccgtcatcgcctattcggccggcctgatcggcctgctggcgatcaagatcctggcgcccggcttctacgccaagcaggacatccgcaccccggtcaagatcgccatcatggtgctggtgctgacccagctgctcaacgccatcctggttccgtggctggcgcatgccggactggcgctggccatcggcctgggcgcctgcatcaacgccctcgcgctgctgaccgggctgcgccggcgcggcgtctaccggcccggcgccggctgggggcgtttcatgctgcggctggtcccggccctggcggccctggcggccgtattgctggccgccgaccgccatatcgactggatcgcgctgcagccgtggccggggctgcgcgccctgtggctgggcggcgtgctgctggcctgcatgctggcctacttcgggctgctgctggccgccggcatgcggccacgcgatttcacccgccgcggcgcccgttggcgcatg

SEQ ID NO: 14884 - DNA, 2619 bp, Bordetella pertussis
atgaaacagataccactgattctcgcgatgagccttgccttcgccgccgcggcgaagggcgaatccgcgccggatatgcaggcggcggtcaacttcgactcggccatgctgtggggcggcgccaatggcgcggatctgagccgattcaactacagcaacgcgctgcggccgggcaactacatcgtcgacatttacgccaacaactatccgctgatccggcagcaggttcgattcgtcgcggcgcagacgtccgggcagggcttgaagacggcgccggcggtggcgtgtttcacctatggccagctggaagcgatgcaggtccggctgcgcgcgctcgatccggccttggtcgccgacctcaaatccagcgggcgctgcgaggtgctgggcaagctgttcccggatagccgcgagtcgttcgatttcggcgagaaccgcctggaagtcagcattccgcaagcctatacgatcaaccgcttccggcgcgacatctcgcccgatgagtgggatagcggcattactgcgttccgcctgggataccagtacaactatgccgattacatcggcggcttgcgcgcggggcggcggctggacctgaacctctacagcgggttcaatttcaagggctggtacctgcgcaacagctcgacgctgggatggggccagggccgcttcacgcgccgcagccagcgcaccagcctgcagacggatatcccgtcctggcgggcgcgcctggtgttcggcgacgtgttctccagcggcgagtacttcgcgccgtactcgatgcgcggcatgctggtcggcagcgataccgccatgctgccgtactcggagcgcctgtaccggccgaccatacgcggcgttgcgcgcactcgggccaacgtcaaggtgtatcaggccggcgtgctggttttccaggacgccgtgcctcccgggccgttcgcgatcgacgattacagtccggcctcgtatggcggcgacctgcgggtggtggtgaccgaggcgaatggcgcggtccagacgttcaccgtgccgtacgccagcgcggtgcgcctgatcctgccgggccagacgcagtggtcgttcagcgccgggcgctatcgcaactatcgcaacgatgggcaggaccgtccctgggtgacccagctgacgggccgccatggcgtggccgacggcgtcaacctgtacggcggcctgctgatcgcccaggcgtaccaggccggcctggccggcctgagctggaacacgccctggggggcaatggcggcggacgccacgctgtcgcgcagccagctgtccaccaccggcaatgccaacgggtcgagcctgcggttctcctacagcaagaccttgtccggcaccaacacggcgatccggctggctacgctgcgctactcgtcgagcgggttctggaatttcgccgatgcggtcaatgccggcccggtcgagacgaacgggcgcaacgggcggttcggactctattcgctgctgggccgcgagcggccgcgcggcgatttcagcgtcacgctgagccaaccgctgggtggatacggcagcctgtacgtgtcggcgctgcggcggacctactggggttcgtcgcgggtcgaccagcagacccagctgggctattcgacccaggtcggccgcgtaggcgtgaacctggatgtctcgcgtacggagaatcgtcgcagcaccgagcatcaggtcatgctgaatctgtccattccgctttatggcgcgacctccagcggcgtggtgacgggatcgctggcgcgtaccggctcggcgcccgtacagcaaagcgtcaactacagcggcatgtcgggcgagcgcgatcagtacacctatggcctgggcgtgcagcgcgccggcacgagcgcgcagtacgcgttgaacggctcctggtcaggcacgtacggggaggtaagcggacagctcacccatgggcgcagctacagccagtaccagatcaacggcagcggcggcttggtggcgcacgcgggcggcgtgaccttcggccagtaccaggcgggcaccatcggcctgatccaggccgaggcggcggcaggcgcaaaggtcgtcaatacgcgcaacgccgccgtggaccgcagcggctatgggctggtgtcgctgacgccgtattccctcaacgaggtcgaactgtctccgcaggacctgcccctggacgttcagctggagtccacggtggagcaagtcatcccgcgggcgggcgccgtcgtggcgctgcgctttccgacgcgccatgacgtcgccgccatgctggttgccgaacccggcagcgaaggcgcgctggtattcggcaccgaagtgcgcgacggcgccggcaaggtggtgggcgtggccggccagggcgcaagcgcgctggtcagaggcgtgtcggcatcgggcacgctggaggtgacgcgcgcagacggttcgatatgccgcgccacgtacgacttgaaatcggccgggcaagccgtgcatggcctgccgcgcattgcgctggcgtgcgcgccgcaaggcggcggcgaacgtggtgcgcgggcggcgggccaggccgtggcgcagccatcagctatctccatttcgggtaaagatcatgagccagatattcgc

SEQ ID NO: 14885 - DNA, 261 bp, Bordetella pertussis
atggccaataccgcccaagcccgcaagcgcgctcgccaatcggtccagcgcaacaagcacaactccagcctgcgctcgatgctgcgcaccgccatcaagcgcgttcgccaatccatcgccactggcgataaggctgctgctggcgaaacgctgcgtaaagccacgagcgtgattgacagcgtggctgacaagaacatcatccacaagaacaaggctgctcgccacaagagccgcctggctgccgccgtcaaggcgctggcc

SEQ ID NO: 14886 - DNA, 582 bp, Bordetella pertussis
ttggtgcacgacgaggccagcaccctggcgtggatagaaagccagctcgtcacggtgatggcgcgcgccgaggcgccgctgtggtgcctgctgttcgaggcctggcgcgccggcgacgacgcggcggcgcatggctggaaccagtggttccacgcttcgcgcgagacccgcgagctgcgccaggaaaccgagcagatggggcgctcgctggccagactggcccaggagctcggctggggcacggcggcgacgagggcggccgtggcggcgctgcggccggccacgctgcccgccgtgcatgcctgcgcctgcgcgatgtgggcgctgccgcgcgaggccgggctgggcgcctatgtattttcgtggctggagaaccaggtggccgcggccatcaagggcgtgccgctcggacagatggcgggccagcgcatgctcgagcggctgcgcgcggggctgccggccgtgctggccgacgcccgggcgcgcgccggcgcaacgccgccgcggctcgatacgttcgcgccgcagtacgccatggtctcggcgcgccatgaaacccagttctcccgtcttttccgttcc

SEQ ID NO: 14887 - DNA, 999 bp, Bordetella pertussis
gtgatcgagatgatccgccagggactgcaagccgacggcatcaccgtctcgatcgtcaagctgtgccgctggttcggcgtgccgcgccgcacggtgtactacaagccggtgaaggtcccgcccaaggttgatccgaagttcgcgacgccgatcaaggcgatgatcgaagagtcgccgtcatttggctaccgtacggtcgcgcacctgttgggattcaacaagaacaccgtgcagcgcgtgttccagttgatgggctggcaggttcgtaaacgtccaatcggcttcaggcctcgcatccaggcgctgccatcagtggcaacgatgcccaatgagcgctggtccacggatttgtgccgggtgtgggcgggtcggaacggctgggcgacgctggcgctggtgatcgactgccacacccgtgaactgctgggctggcacctgtcgcgtagcggtaaagcttgcactgcgggcagtgccctcgagcatgccctgatagcgcgcttcgggacgttgggccgcgtgccggcgccgttcctgctgcgatcggacaacggcttggtcttcacctcgcgcagctataccgcgctggtgcggggatatggtctgcgccaggagttcatcacgccgcactgcccacagcaaaacggcatggtcgaacgcgtcatccggacgctgaaagagcagtgcgtacatcggcatcgcttcgagaccatccaacatgccagccgcgtgatcggcgactggatacgcttttataacgaccggcgcccgcatcaggcgctgggcatgaagactccggccgaggcatacgctttagccgaacctgagcaggtttcgctgggtcaatacacggcaggagtcacccacacgaaccgtagacccatggcgaagacgcgaccatggcccggcaagggcaagaccggctcgaacgaaatacaggggaattttgcagatggtgcccggggccggaatcgaaccggcacgccttgcggcgggggattt

SEQ ID NO: 14888 - DNA, 1713 bp, Bordetella pertussis
atgaccaggatttcgcgttcggcatatgccgagatttacgggccgaccgtggtcggcggcgtcggcgaccgggtgcgcctggccgacacgctgctgctggccgaggtcgagaaggaccacaccatcttcggcgaggaggtgaagttcggcggcggcaaggtcatccgcgacggcatggggcagagccagcgcctggccaccgattgcgtcgacacggtgatcaccaacgcgctgatcatcgacgcggtgaccggcatcgtcaaggccgacatcggcatcaaggacgggctgatcagcggcatcggcaaggcgggcaacccggacacccagccgggcgtgaccatcatcatcggcgcttcgaccgaggtggtggccggcgaggggctgatcgtgacggccggcgccatcgatacgcatatccacttcatctgtccgcagcagatcgaggaggccctggccaccggcacgaccaccatgataggcggcggcaccgggccggccaccggatcgctggccaccaccagcacctcgggcccctggcacatggccgccatgctgcaggcgctggacgcctttccggtgaacgtgggcctgttcggcaagggcagttcgagctcgcacggcgcgctgctggagcaggtgcgggccggcgccatgggcctgaagatccacgaggactgggccagcacgccggcttccatcgatacctgcctgaacgtggccgaggaaaccgacatccaggtcgcgatccacagcgacacgctcaacgagtcgggcttcgtggaggacacgttcgccgcgttcaagggccgcaccatccattccttccatacggaaggcgccggcggcggccacgcgccggacatcatccgggccgccggcatgcccaacgtgctgccggcctcgaccaacccgaccatgccgttcacgcgcaacacgatcgacgagcacctggacatggtcatggtgtgccatcacctggatccatccatcgccgaggacctggctttcgccgaaagccggatccggcgcgagaccatcgcggccgaggacatcctgcacgacctgggggcgttctccatcatgagctcggactcgcaggccatggggcgcgtgggcgagatcgtcctgcgcacctggcagaccgcgcacaagatgaagctgcagcgcggcccgctgcaaggcgacagcgagcgctcggacaatgagcgcatcaagcgctacatcgccaagtacaccatcaacccggccgtggcgcatggcatcgcgcacctggtgggctcggtggaagtgggcaagctggccgacctggtgctgtggaagcccgcctttttcggcgtcaaggtcaacatggtgctcaagagcggcatggccgtcagcgccagcatcggcgacatgggcgcctcgatctcgacgccgcagccggtgcagatccgccccatgtggggcagccacggcaaggcgctgcgcacctcggtggccttcgtctcgcaggtcagcctgagcaatccggcggtcagcgaactggggctgaacaagcgcctggaggcggtgcgcggatgccgcggcgtgaccaagcacgacatggtgcgcaacaactggctgccggcgatctcggtcgacccgcagacctaccaagtctatgccgatgggcaattgctcagatgcgaggcgcttgccgagctgcccatggcgcaacgctatttcctgttc

SEQ ID NO: 14889 - DNA, 1905 bp, Bordetella pertussis
atgagccagaccaccacgacttccgcatccgaaaccctggggttccaggccgaggtgaagcagctgctgcacctgatgattcactctctctacagcaacaaggagatcttcctgcgcgagctggtgtcgaacgcgtcggacgcgtgcgacaagctgcgcttcgaggcgatcgaccagccgggcttgctggaaggcgacggggagctggcgatccgggtgggttacgacaaggccgcccgcacgatcacgatttccgataacggtatcggcctgtcgcgcgacgaggcggtggccaatctgggcacgattgcccgctcgggcacgcgcgagtttttctcgcagctgacgggcgacaagcagaaggacgcgcagctgatcggccagttcggggtggggttctattcctcgttcatcgtggccgacaaggtgacggtgctgagccgccgcgccggcctggcggccaatgaggcgatccgctgggagtcggacgggcagggcgagttcagcatcgcgccggccgagaaggccgggcgcggtacggatgtggtgctgcacttgcgcgccgacgaggacgagttgctcaatggttggaagctgcgcgagatcctgcgccgctattcggaccatatttcgctgccgatccgcatggccaaggaggattgggacgcggagaagggcgagcaggtcaagggcgatgagctggagacggtgaaccaggcgaatgcgctgtggacgcgcaacaaatcggatattaccgacgagcagtatcgcgagttctacaaaacggtgtcgcacgattatgacgatccgctggcgtggacgcataaccgggtggagggccgcagcgagtatacgcagctgctgtatgtgcccaagcatgcgccgttcgatctgtgggaccgcgatgcgcgccgcggggtgaagctgtatgtgaagcgggtgttcatcatggacgacgcggagcagttgctgccgtcgtatctgcgtttcgtgcgcggggtgatcgattcggcggatttgccgctgaacgtgtcgcgcgagatcctgcaggagagccgcgatgtgcgggcgatccgcgagggttcggccaagcgggtgctgtcgctgctggaggacatggcggagaacaaggcggaggattacgcgacgttctggacggagttcggccaggtgctgaaggaaggcacgggcgaggacgcggccaaccgcgagcgcatcgccaggctgctgcgctttgcgtcgacgcacgatggcgagcaggcgcagacggtgtcgttcgcggattatgtgggccgcatgaaggatggccaggacaagatttactacgtgacggcggatacgttcacggcggcggcgaacagtccgcacctggagattttccggaagaagggcatcgaggtgctgctgctgtcggatcgggtggacgagtggatgctgtcctatctgcgcgagttcgacggcaagtcgctggtgtcggtggccaagggcggcctggatctggcggagttggcggacgaagaagagaagaagcgtcagtccgaggtggccgagacgttcaagccgctggtcgagcgcctgcagcaggcgctggccgagcaggtgaaggaggtgcgggtgacgcagcgcctggtggattctccggcctgcgtggtggtgggccagaacgagctcagcccgcatctgctgcgcatgctgaaggcggccggccaggaggcgccggaggtcaagccggtgctggagatcaacccggaccacgcgctggtcgcgcggatccgcgatgccagcgatgcggagttcggcgattgggccgcgctgctgctggaccaggcgctgctggccgaaggcgcgcagatcgccgacccggcggccttcgtgaagcgcttgaatgggttgctgttgaaggct

SEQ ID NO: 14890 - DNA, 300 bp, Bordetella pertussis
atggaactgactccacgggaaaaagacaagctgctcattttcaccgcggccctgctggccgagcgccggcgcgcgcgcggcctgaagctgaactatccggagacggtggcgctgatcacggccgcgttgatggaaggcgcgcgcgacggcaagacggtcgccgagctcatgagcgaaggcacgcggatcctggggcgcgatgagatcatggaaggggtgccggagatgatttccaacatccaggtggaagtcacgtttcccgatggcaccaagctgattaccgtccacaacccggttgtc

SEQ ID NO: 14891 - DNA, 1407 bp, Bordetella pertussis
atgctcgataacctgactcaacggctgtcgcgcgtcgtcaagacgctgcgcggcgaagcccgcctgaccgaggccaacacccaggagatgctgcgcgaagtgcgcatggcgctgctggaggccgacgtggcgctgcccgtggtgcgcgatttcgtggcgcgcgtcaaggaaaaggccctgggcgaagaagtggccggcagcctcagccccggccaggccctggtgggcgtggttcacaaggagctgaccagcctgatgggcggcgacctgggcgagcacgccggcgagctgtcgctggccacccagccgcccgcggtcatcctgatggccggcctgcagggcgcgggcaagaccaccaccaccggcaagctggcgcgctggctgtccgaggggcagcacgtccagggcggccgcaagacgggcaagaagaaggtgctggtggtcagcgccgacgtgtatcgcccggccgccatcgagcagctgaagaccgtggccgcccaggtcggggtggattttctgccgtcggacgttagccagaagccggaagacatcgcccgcaacgcgatcgaccatgcgcgccgccaccactacgacgtgctgatcgtcgacacggcgggccggctgggcatcgacgaggccatgatgcgcgagatccgcgcgctgcacgacctggtcaagccgatcgagacgctgttcgtggtcgacgcgatgcagggccaggacgcggtcaataccgcgcgggcctttggcgacgcgctgccgctgaccggcgtggtgctgaccaagctggacggcgacgcgcgcggcggcgcggcgctgtcggtgcgccacgtcaccggcaagccgctgaagttcgtcggcgtctccgaaaagctggacggcctcgagccgttccaccccgagcgcatggcgcagcgcgtgctgggcatgggcgacatcgtgtcgctggtcgagcaggcgcagaagaacatcgacatcgccgaggcgcagaagctggcctcgaagatcaagtccggcaacaagttcgacttgaacgacttccgcgaccaactcgaccaggtcaagaagctgggcgacatgggctcgctgctggaaaagctgcccgcgcagctccagcaggcagccggccagctgcagggcggccaggccgagaagcagctgcgccgcaccgagggcatcctgaactccatgacgccgggcgagcgcgccaagcccgagttgatcaaggcctcgcgcaagcgccgcatcgccgccggcgccggcgtgccggtgcaggaagtcaaccgcctgctgtctcagttcgagcagatgcagggcatgatgaagcagatgaaaaaaggcggcatggccaagatgatgcgcgccatgggcggcatgaagggcctgggccgctttggcggcatgcgc

SEQ ID NO: 14892 - DNA, 1404 bp, Bordetella pertussis
atgaagtacatctcgacccgcggcggcatggccccgcagagtttctccgacatcctgctcgaaggcctggcgcccgacggcgggctggccatccccgagcagctgccgcaagtcgacgcggccacgctggagtcctggcgcgggctctcgtacgccgacctggccttcgaagtgctgtcgctgttcgccaccgacatcccggccgaggacctgcgcgggctgacgcgcgcagcctaccggcagggcgtgttcaagagcgaagacatcgtcccggtgcgcgagctggggcaggggttgcagctgctgggcctgtccgaggggcccacgctggccttcaaggacatggcgatgcagtttctcggccaggtcttcgagtacgtcctgacgcggcgcggcaccacgctgaacatcgtcggcgccacctccggcgataccgggtcggcggccgagtacgcgctgcgcggcaagcagggcgtggccgtgttcatgctgtcgccgcacggccgcatgagcgcattccagcgcgcccagatgtactcgctgcaggatgagaacattcacaatatcgcggtgcggggcgtgttcgaccaggcgcaggacatcgtcaagcagctggccggcgacctggcgttcaagacgcgctatcgcctgggcgcggtcaactcgatcaactgggcgcgcatcgccgcccaggtggtgtactacttccacggctggctgcgtgccgcgcccaagggtggcgaggtgtcgttcgcggtgccttcgggcaacttcggcaacatcctgtccgggcacatcgcgcgcggcatgggcgtgccgatccgccgcctggtgctggccaccaacgagaacaacgttctcgaggagttcttccgcaccggcggttaccgcccgcgcggtcccgagcacacctacgccacctccagcccgtcgatggacatctcgcgcgcctcgaacttcgagcgcttcgtgttcgacctggtcgggcgcgaccccggccgcgtggcgtcgctgtgggccgacctggcgcgcgacggcagcttcgacctgtcggcgctcaagccgcagttcgaaacccgctacgggttcgtggccggcgccagctcgcacgccgaccgcctgcagaccatacgcaataccttcgacgaaaccggcgtgctggtcgacccgcacacggccgatggcatcaaggtggcgcgccagttcgtcgagccgggcgtgcccatgctggtgctcgagacggccctgccggccaagttcgcggaaaccatcgaggcggcgctcgggcgcaccgtgccgccgccggctgacctggccgacctcgaatcgctgccccagcgcgtgacgctcatggactgcgacgcgcaggcggtgcgggccttcatcgaggcccacgccaaagtg

SEQ ID NO: 14893 - DNA, 1185 bp, Bordetella pertussis
atgaggaagttctcccgcatcgagcgtttgccgccgtacgtgttcaatattaccggcgagctcaagatggcggcacgacggcgcggcgaggacatcatcgacatgtcgatgggcaaccccgatggcgcgacgccgcagcacatcgtcgacaagctggtcgaggcctcgacccggcccgatacgcatggctattcggtctccaagggcatcccgcgcctgcgcaaggcgatttgcgactggtacatgcgccgctacgcggtggagttcgacccggattcggaagccatcgtcaccatcggctcgaaggagggcctggcgcacctgatgctggcgacgctggatcgcggcgatacggtgctggtgcccaacccgagctacccgatccacatctacggggcggtgatcgcgggcgccaacatccgttcggtgcgcatgacgcccggcatcgacttcttcgaggaactcgaacgcgccgtgcgcgagtcgattcccaagcccaagatgatgatcctgggctttcccagcaacccgaccgcgcagtgcgtcgacctgtcgttcttcgagcgcgtggtcgcgctggccaaggagcacgacatcctggtggtgcacgacctggcctacgccgacgtctgtttcgacggctatgtcgcgccgtccatcatgcaggtgcccggcgcgcgcgacgtggcggtcgagttcttcaccatgagcaagagctacaacatggccggctggcgcatcggctacatggtcggcaaccgcgagctggtcggcgcgctggcgcgcatcaagagctaccatgactacggcacgttcacgccgatccaggtggcctcgatcgcggcgctggacggcccgcaggattgcgtcaacgagatcgtggcgcaataccagcgccgccgcgacgtgctggcgcgcggcctgcacgaggcaggttggaatgtggagatcccgaaggcgtccatgtatatctgggcgcagatccccgagccctacagggcgatgggttctttggagttcgccaagcgtgtcctgtcggatgcgaaggtggccgtgtcccccgggatcggcttcggcgagtatggcgacgagtacgtacgcttcgctcttatcgaaaacgagcagcgcacccggcaggcggtgcgcggcatcaaggatatgttccgcaaggacggtttgcttaaa

SEQ ID NO: 14894 - DNA, 897 bp, Bordetella pertussis
gtgtctgatagagtctgcgctattggcgccgcgccgccgcgcgcgcgaatcttgacaggagcccgcatgaaagaaaccctgaacgaaatctccaccctgatgccgcagctcgtcgacctgggaatcaacctgggcgtggcattgctgatcctcatcctgggctggtgggcctcgtcgctcctgggcggctgggtgcgccgcgccgcgcagcgctcgccgcgcatcgatcccaccatcgtgccgatgttccagagcacggtgatctggacggtgcgcattttcacgctgatcgcggtgttggcccgtttcggcgtgcagaccgccagcctgatcgcggtgctgggcgccgccggcctggccgtgggcctggccctgcagggcacgctgcagaacatcgcggcgggcatcatgttgctgatcctgcgcccgatccgcgccggcgagtacgtggccctgagttcgggttcggacggcaccgtggaggaggtggggctgttcctgacgcgcctggtccaggtcgatggcatccacatcaccctgcccaacagcacggtctggaacgccaccatcatcaattacagccgcaacgccaaccggcgcctggatatcccggtgacggtgcattatggcgacgacctgggcgaggccatcgccaggctggaggcgctggtgcgcggccacgagatggtgctgcaggatcccgcgcccatcgtcaaggccagcgaataccgcgacaacggcacggtggtcaatgtgcgcgtctggacccaggcggcgcaatactgggacctgcgctgggacctgttccaccagatccggcgcgccctgggcgaggcggggttccgcgcgcccatcccggtgcgcgagatccagggcggcggcaaggacgcggccgcc

SEQ ID NO: 14895 - DNA, 754 bp, Bordetella pertussis
cccgccatcgacctgaattgcgacatgggcgaaagctacggcgcctggcgcatgggcaacgacgaagccgtgctgcagttcgtcacgtcggccaatatcgcctgtggctttcacggcggcgacccatccaccatgcgccagaccgtcgccgcggcgctggcccatggggtggcgctgggcgctcaccccagcctgccggacctggccggcttcgggcgccgcgccatgcagatcaccccgcaggaagcctacgacctggtggtctaccaggtcggcgcgctggccggcgtggccgcctcgcaaggcgcgcgcctgcatcacgtcaaggcgcacggcgcgctctacaacatggcggccaaggatgcggcgctggcgcgcgcgatctgccaggcggtgcgcgatgtcgacagcgacctggtgctgtacgggctggccggcagcgccttgatcgacgctgcccgcgccatcggcctgcgcgcggcgcaggaagtcttcgccgaccggacctaccaggccgacggccaattgacgccgcgcagccagcccgacgccatgatcaccgacctggaccaggccatcgcccaggtgctgggcatggtgcgcgacggcagcgtgcgcacgcccgacggacagaccgtggccttgcaggccgatacgctgtgcatcccacggcgaccagcccgatgcgctggtattcgcccgcggcatccgcctggcgctcgaacgcgacggcatcgccatccaggcggcgtag

SEQ ID NO: 14896 - DNA, 1872 bp, Bordetella pertussis
atgactctcccctatgccatccggcgcctcttcgtcgacttgccgcgaccgttcaagcagatgctggcgatcgtgctggatgccgtaatcctgctgggcgctttccacctggcgctatggctgcgtttcgagctgttcttcctgaccgaccagtatctgttcctgtccctgcttgcctgcgcgggcggcattgcggccctggcggcgttcggcgtctacctctatatcctgcgctacatgagcgagcgggtgctggccgccatcctggggggaatagtggtatcggtcatggtcgtgaccgccgggaacaccttcctgcagctggccaccatctcgcgcggcgtactggtcctgtatgccgcgctcgccctggtgggcctgatcggcgtgcggctgattgcccgcaaactgctgttccccgccgaccatcacatggccgatccgcgcacgccggtactgatctacggcgcgggcggggccgggtcgcaactggccatggcgctgcgcacggggccgcattaccgtcccgtcgccatgctcgacgacgacaagcgtaaacaccgcctggtcgtcaacggcctgcgggtctacccgcccgagcaactgcccaagctgatcgaccgccacaacatccggcagctgctgatcgcgatgccttcggcgccgcccaagcagatccgcagcatcgtcgaagccgccgaaccataccgcctgcgcatccggctggtgccgagcatgcgcgaactcatcgaccccaccaatggcgtgcgcctgcgcgacgtacaggtggaggatctgctcggacgcgatccggtcgcgcccatcgacacgctgttgggccgctgcgtcacggaccgggtcgtcatggtcacgggcgccggcggctccatcggttccgaactgtgccgccagatcctggccttgcgcccccgcaagctggtgctcttcgagatcgccgaaccggcgctctacgccatcgagcaggatctgcgccagcgcatcggcgagcgcaacatcgaaattgccggcgtgctggggtcggtgcgcgacgccgcccactgcctggcccagttgcaggagcacggcgtacagaccatttatcacgccgccgcgtacaagcacgtgcccatcgtcgagcacaatgtctccgagggcatacgcaccaatgccttcggcacgctcaacatggccgagaccgccatccaggcgggcgtgctcgatttcgtcctgatctccaccgataaggccgtgcgccccaccaatgtcatgggcgcctccaagcgcctggccgagctgatcctgcaggcgcacgcgcagatccaggacaagacccgcttctcgatggtgcgctttggcaacgtgctgggcagctccggcagcgtcgtgccgctgttccggcgccagatcctggaaggcgggccgatcacgctcacgcaccccgagatcacgcgctacttcatgaccatacccgaagccgcgcaactggtactgcaggccggcgccatgggcgaatccggctcggtcttcgtgctggacatgggcgaaccggtattgatccgcgaactggccgagcgcatggtgcgcctgtacggactgacagtaaagaactcggaccaaccggatggcgatatcgaaattcgcatcacgggactgcggcccggggaaaagctgtacgaagaactgctgatcggggaagactcccgtgaaaccctgcatccccgcatcatgcgcgccacggaatacagccttccgtacgaaaccctcatggggcaattgcgcatgctcgatcgttcgctgcaaatgtgcagcccgcggcaagcggcggaattgctgggccagatcgtacgggaatatgcgtcggtgacgtacgcc

SEQ ID NO: 14897 - DNA, 1536 bp, Bordetella pertussis
atgaatgcgatcaccggtggcggcgaactgcatgcggtcggccgcgcgcaacccatttcggaaggctcggaatggaccttcgagctgatccagcgctacgacgaggcgatctcggagatcgcccgcgagtaccgcctggacacctatcccaaccagatcgaagtcatcacctccgagcagatgctcgacgcctatgcctcggccgggctgcccatcggctatccgcactggtcgtacggcaaggagttcatccgcaacgagcagtactaccgcaagggcatgcagggcctggcgtacgagatcgtcatcaattccagcccatgtattgcctacctgatggaggagaactccatggcgatgcaggcgctggtgatcgcgcacgcctgctacggccacaattccttcttcaagggcaattacctgttccggcaatggaccgacgccgacagcatcctcgactacctggtcttcgcgcgcaagtacgtgatggactgcgaagaccgctacggcatcgaggccgtcgaggcgatcctggattcctgccatgcgctggcggcgcatggcgtggaccgctacaagcggcccacccccatctcgtaccgtgaggaggcgcagcgccaggccgagcgcgaggagcacgcgcgccggcagtacaacgacctgtggcgcaccgtgccgcgccaggagtccccggccggcgccggcgagcggcgcgccgtgttcccgcccgaacccgaggaaaacctgctgtacttcatcgagaagtacgcgcccaagctggagccctggcagaaggagctggtgcgcatcgtgcgcaagatcgcccagtacttctacccgcagggccagaccaaggtcatgaacgaaggctgggccacgttctggcactacaccttgctcaaccggctgcaccagaaagggcgggtgaccgacggtttcatgatcgaggtgctgcagagccacaccaacgtggtcagccagcgcggtttcgacgagcgcggctatggcggcgtcaacccgtacgcgctggggttttcgatgatgcaggacatccggcgcatctgcgagcggccggacgaggaagaccgccgctggttcccggacatcgccggcagcgactggctgacgacgctggacttcgccatgcgcaacttcaaggacgagtccttcatttcgcagtacctgtcgccgcggctgatccgcgagttccgcttcttcgcgatcgccgaccaccaggccaaccccaagctggaggtcgccgccattcacgacgacgagggctaccggcagatccgcaagctgctggctgcccagcacaatcgcgacaaccaggtgcccgatatccaggtggtgcgctatttccgcgagtccgaccgcgcgctggtgctgcgccaccagcaaagccgcggccgcccgctggcgggcgaggacgccgacaaggtcatgaagcacctggccaggctatggggctttcgcgtgcgcctggaagaggcggcgcccgacggcacggtgctgtcgtaccgccagatcgagcct

SEQ ID NO: 14898 - DNA, 1257 bp, Bordetella pertussis
atgaattcgctcattgatcggcggctcaacggccgcaacaaaagcgctgtcaaccgtgagcgctttctaaggcggtacaaggatcagatccgcaaggcagtacaggacctgatccgcgagcggtccatctcggacatggaccagggcggggaaatcaaccttcccgcgcgcgatatctccgagccgagtttccggcacggggaggggggcgatcgcgagatcgtccaccccggcaaccgcgagttcgccaagggcgatacgttcgatcgcccgcaaggcggcgacgatggttccggctcgcagcccggcgagggcgaatcggtggatcagttcaccttcagcctgtcgcgcgccgagttcctgaacctgttcttcgaggacctggagctgtcgcacctggcgcgcacgcagctgggcgacgtcaagcagcagcgctggcatcgcgccggctacaccaccaccggctcgcccagcatgctgagcgtcaaccgcacgctgaaggcgtcgctgtcgcggcgcgtggcgctgggggtgggcgcgcgcgcggcgctggacgcggccgaacaggaactggacgcggcgcgcgaagccggcgcgccgcaggccgaactggaccggctgctggccgaagtcgagaagtgcgccgcgcgagtggcgcgcgtgcccttcctggacgacctcgacctgcgctatcgcaaccgcgtggcggtggcggtgcccatggcgcgcgccgtcatgttctgcctgatggacgtgtccgggtcgatggacgaaatgaagaaggacctggccaagcgcttcttcacgctgctgtacatgttcctgtcgcgcaagtacgagcatgtggacgtgatcttcatccgccataccgacaacgccgaggaggtggacgagcagacgttcttctacgatcccaagagcggcggcaccatcgtgctgtccgccctggagctgatgcacgagatcgtgcagaagcgctattcgccggcgacgtggaacatctacgcggcgcaggccagcgacggcgactcgtttggcgccgatgcgggcaagagcgcgcgctttctggccgagaacctgctgccggccacgcgctatttcgcctatatcgaggttcccgactcgcaggaggcgcgcaagagcagcctgtgggccgaatacgaacaagagtcggcgtcgcatttcgtgatgcggcgcatatgcgaacgcggggagatcttcccggtgttccatgacctgttcaagaaggaaaccgta

SEQ ID NO: 14899 - DNA, 1371 bp, Bordetella pertussis
atgaatacccctgccgatccccagctcgaatacctgcgcgtgccgccgcactcgatcgaggccgagcagtcggtgctgggcggcctgttgctggacaacgccgcctgggaccgcatcgccgacgtcctggtcgaggaagacttctatcgccacgaccaccgcctcatctggcaccatatcgcccggctgatcggcctggcccgcccggccgacgtcatcaccgtcaatgaatcgctggccagcgccggcaagtccgaggaggtgggcgggctggcctatctcaacgcgctggcgcacaacaccccgtcggcggccaacatccgccgctatgccgagatcgtgcgcgagcgcgccatgctgcgcaagctggtgtcgatcgccgacgagatctcggcggccgcgctcaatccgcaaggcaaggaggcccgccagttgctggacgaggccgaatccaaggtgttcaagatcgcccaggaaggcgaacgcggctcggcgggtttccaggaaatccagccgctgctgacccaggtggtagaacggatcgacgagctgtatcaccgcgaaagcgagtccgatgtcaccggcgtgccgaccggcttcgctgatctggacaagatgacttccgggctgcaggccggcgacctggtcatcgtggccggccgtccgtccatgggcaagacctcgttctcgatgaacatcggcgagcacgtcgccatcgagcaggggctgccggtggcggtcttctcgatggaaatgggcgcggtgcagctggccatgcgtatgctgggctcggtgggcatgctcgaccagcatcgcatgcgtaccggcaagctggtcgccgacgattggccgcgcgtcacccacgcggtgcaactgatgcaggacgcgcaggtctacatcgacgaaacgcccgcgctcagctcgatggaagtgcgcgcccgcgcgcggcgcctggcgcgccagtgcgggcagctgggcctgatcatcatcgactacctgcagctgatgtcggccaacagcgcgggcgaaaaccgcgcgaccgaaatctcggaaatcagccgctcgctcaagggcctggccaaggagctcaactgtccgctgatcgcgctgtcgcagctcaaccgcagcctggagcagcgccccaacaagcggccggtaatgagcgacctgcgcgaatccggcgccatcgagcaggacgccgacgtgatcctgttcatctatcgcgacgaggtctacaacccggactcgcccgacaagggctcggccgagatcatcatcggcaagcagcgtaacggtccgatcggcaccgtgcgcctgaccttccaggggtcgagcacgcgctttctcaatttcgcgcccggcacccagtac

SEQ ID NO: 14900 - DNA, 453 bp, Bordetella pertussis
atgcaaatcatcctgctcgaaaaagtcgccaacctgggcaatctgggcgaagtcgtgcgcgtgcgcgacggctatgcccgcaacttcctgattccccagaagaaggcccgtcgcgcgaccgacgccgccctgaaggaattcgaagcccgccgcgccgagctcgaaaaggtccaggccgagaagctggccgccgcccaggccctggccgagcgtctgaacggcttccagctgaagatctcgcagaaggctggcgtggacggccgtctgttcggctcggtcaccaacgccgacgtcgccgaaggcctgcgcaaggccggcttcgaagccgtcgagaagtcgcaggtgcgcatgcccaatggccagatcaaggccgtgggcgagtaccttgtgcaagcggtgctgcacgccgacgtcgttgccgacgtggtggtgctggtcgaaggcgaaatggcc

SEQ ID NO: 14901 - DNA, 270 bp, Bordetella pertussis
atggctttcttcggaaaacgcaaggaaaaacgcaaattcacgcagcagaacccgctgttcaagcgccgcaagttctgccgcttcaccgctgccggcgttgaagagatcgactacaaggatctcgacacgctgcgtgacttcgtgcaagaaaacggcaagatcatcccggcccgcctgaccggcacccgtgcgatctatcaacgccagctggacaccgccatcaagcgcgcgcgcttcctggccctgctgccgtacaccgacaaccacaaa

SEQ ID NO: 14902 - DNA, 378 bp, Bordetella pertussis
atgcgtcactacgaagtagtgttcatcgttcaccccgaccaaagcgagcaggtgcccgccatggtcgagcgctatcaagcgcttgtcaccggccagagcggcacggtgcatcgcctggaagactggggtcgccgtcaactggcctatcccatccagaagctggtcaaggcccactatgtctgcatgaacatcgagtgcggccaggccacgctggatgagctcgagcattcgttccgctacaacgatgcggtgctgcgccacctcgtcatcaagaccaagaaggcgcccgccgctccttcgatcatgatgaagtcggtcgagcgcgaagaagcccgcaaggcgtcggctgaagccgccgcgaccgcgaccgcggccgag

SEQ ID NO: 14903 - DNA, 795 bp, Bordetella pertussis
atgaattctcctattgatcccgcgatcgtgatgcccgatgtgcaaagctcgacggatacgcggcacatcccgatccagcgggtcggcatccgtggcgtgcgccaccccatgctggtgctggccggcgatggcgcggcccagccgacggtggccaattggacgctgacggtagcgctgccggcggaagagaagggcacgcacatgtcccgcttcgtggcgctgctggaaaagtaccgcgccacccccatgacgccggcgctgtttgccgccatggcgcgcgagatgctgccgctgctgcatgccgagcgcggcgacatcacggcctcgttcccgtacttcatcaacaagtcggccccggtctccggcgtgcagagcctgctcgactacgaaatgcagtggatcgcgcgcgcggtgggcgagcaggtcgagttcgagctggtggcgcaggtgccggtcaccagcctgtgcccgtgttcgaaggccatctccgaatacggggcgcacaaccagcgttcgcacgtgacggtgtcggcgatcgtggatggcgacttccgcatggacgagctgatccgcctggtcgaggacgaggcgtcgtgtgagctgtggggcctgctcaagcggcctgacgagaagtacgtcaccgagcgcgcctatgacaaccccaagttcgtcgaggacctggtgcgcgacgtcgccgcccgcctgaaggcgcacccgggcatcggccgcttccgcgtcgaggccgagaacttcgaatccatccacaaccactccgcctacgccgtcgtggaaggc

SEQ ID NO: 14904 - DNA, 1458 bp, Bordetella pertussis
atgctgcacatctacaacacgttgtcgcgtaccaaagaaccgttcaagccggcccatgccggccaggtgcgcatgtacgtgtgtggcatgaccgtctacgactattgccacctcgggcacgcccgcatgctggtggccttcgacgtggtgcagcgctggctgcgcgccagcgggctggcggtcgactacgtgcgcaacatcaccgacatcgacgacaagatcatccgccgcgcggtcgagaccggccggcgcatcggcgaggtcaccgaatactacatcgccgccatgcacgcggacgaacgcgccctgggcgtgcagccgcccgaccgcgagccgcgcgccacgcagtacgtgggcgagatgctggacatcatcggccgcctggagagcaagggcctggcctaccgggccgaggacggcgatgtcaattacgcggtgcgcgggttcgccgactacggcaagctgtcgggcaagtcgctcgacgacctgcgcgccggcgagcgcgtcgcggtgggttcggccaagcgggatccgctggatttcgtgctgtggaagtcggccaagccgcaggagccggacgacaccaaatgggagtcgccctatgggctgggccgcccgggctggcatatcgaatgctcggccatgagcaagaccctgctcggcctgccgctggatatccacggcggcggcccggacctgaagtttccccaccacgagaacgagatcgcccagaccgaaggggcgttcggcggcgcgctggccaatgtctggatgcattgcggccccttgatggtcgacgccgacaagatgtcgaagtcgctgggcaacttccgcaccatccgccagaccatcgcgcagggtccgctgtcggacacgcaggccgagtacgcggtcaatccgcgcgaggccgagatgctgcgctttttcatcgtgcgcaaccactatcgcagcccgcagaactacgcgccggacaacctggtcgacgcgcagaacgcgctcgatcggctgtaccaggcgctgcagaacaccgcggccgacggccagggcgtggactggagcgaggagccgcaggcgcaggccttcaaggccgccatggacgacgatttcaacagctccggggcggtcgccgccctgttcgagctggcttccgaggccaaccggaccggcagcgcgcgcgccgtcggccagctcaaggcgctgggggcggtgctgggcctgctgcagcaggatccgccggcctatttccagtcgcccacgcgctattcggccgccgcccgcgggcagggcgcgcccgccgcggcgctggacgccgccgccatcgaggcgcgcatcgccgagcgcgcggccgccaaggcggcgcgcgacttcgcccgcgccgacgcgatccgcgccgagctgcgcgcggccggcatcgagctcgacgacaagcccggcggcctgacgcaatggcgtcgcgcc

SEQ ID NO: 14905 - DNA, 909 bp, Bordetella pertussis
atgaagcaaagtcatctcgcctgcgccgactggctgcgggaacgcgcgcagcatgtcgagcacgtgctcgacgaattgctgcctggcgccgatatcgctcccacgcggctgcacgaagccatgcgctatgcggtgctgggcggcggcaagcgggtgcgcgcggccctggtctacgcggccgggcaggcctgccccgtcaacggcagcacgctggccgtcggggcgtcgatggaccgcgccgccgcggccgtcgagctgatccacgcctattcgctggtgcacgacgacctgccgtgcatggacgacgacacgctgcgccgcggccggcccacggtgcatgtgcaattcgacgaggccacggccatgctggccggcgatgccctgcagcctctggccttcgaactgctggccggcatgccgatcgcgcccgcgctggtggtgcaggccgcccaggtcctggcgcgcgccgccggcagccagggcatggccggcgggcaggccatcgacctgcacagcgtgggccgcatgctcacgcgcgacgaactgcagaccatgcacagcatgaagaccggcgccatgctggcgtgcagcgtgacgctgggaggcatcgtggccggcgccagctcgaccgcgcgccaggcgctcgacagctacgcgcaggcgatcggcctggcgttccaggtcgtcgacgatatcctcgatgtgacggccgacaccgccagcctgggcaagacggccggcaaggatgcggccgacaacaagccgacctatgtatccttgctgggcctggagcaggcccgcgcgctggcgcaggagttgcgccaggcggcccaccaggctctggcgccgctgggcgagtccggcgcgcggctgggccaactggcagatttcatcgtactcagagaccgc

SEQ ID NO: 14906 - DNA, 963 bp, Bordetella pertussis
atgcgcaatactttcctggaattcgaacaaccgctcgccgagcttgagaacaagatcgagcagctgcgctacgtgcaggccgactccgcggtggacatctccgacgaaatcggccgcctgcagcaaaagagccagaacctggccaaggaaatctacggcaagctgacgccatggcagaccgcgctggtggcgcgccatccgcagcgcccgtacacgctggactacgtgcgcgaaatcttcaccgacttccatgagctgcacggcgaccgcatgtacgccgacgaccagtccatcgtcggcgggctggcccgcttcaacggctcggcctgcatggtcatcggccaccagaagggccgcgacaccaaggagcgcgccgcgcgcaacttcggcatgccgcgccccgagggctaccgcaaggcgctgcgcctgatgcgcctggccgagaagttccgcctgcccatcttcaccttcatcgacacgccgggcgcctatcccggcatcggcgccgaagagcgcggccagtccgaggcgatcggccgcaacctgtacgccatggccgagctaaaggtgccggtcatctgcaccgtgatcggcgagggcggttcgggcggcgcgctggccatcgcggtcggcaacgccgtgctgatgctgcagtacgcaacctattcggtgatttcgcccgaaggctgcgcgtccatcctgtggcgcagcgccgacaaggcgcccgaggcggccgaggcgctggccatcaccgcgccgcgcctgaaggacctgggcctggtcgaccgcgtggtcaacgagccggtcggcggcgcccaccgcgacccgcgcgtgatggcgcgcctgctgcgccgggccctgggcgacgccctgcgccagctgcagggcctggggcccgagcaattggtcgaccagcgcctgcagcgcctgatgtcgtacggacgcttccaggaagtccgcgcc

SEQ ID NO: 14907 - DNA, 1256 bp, Bordetella pertussis
tgcttgcccaatggctgatcggcgacccggccggctggctgctgttcggcgcggccacggcggccatgctgctgtggcgcagctggcgcctgcacctggtgtcgcgctgggcccatgaccccgaatcggcgccgccggcggccgtcggcccctgggacgacatcctggcgccgctgtatcgctacacgcgggcgcgcgcacgcgaactggccgaaacgcgcgaaaccatgcaaagcatgctggccgccgcccaggcgctgcccgacggcgtggtcacgctcaacgaagatttccagatcgactgggccaaccgcatggcgcggcgccacctgggcctgcgcctgccggccgaccgcggccacaacctgctgaacctgctgcgcgcccccgaattcgtcgcctatgcgcatcgcgggcactggcccgaacccatcctggtgcgcctgagcctgaacggccaggagcgggtcatgatgatccacctggccggctacgccagcaaccagcgcctgctgatttcccgcgatgtcacccagatcgagcgcctggaaaccacccggcgcgatttcgtcgccaacgtctcgcacgagctgcgcacgccgctgacagtgctcgccggcttcctggagacgctgcgcgagctgccggccgaggcgctgcccgccgaacagcgcgaccagtacatggccatgatgcacgagcaggcgcggcgcatgcaggccatcgtggaagacctgctgaccctgtccacgctcgaatcctcgcccgaggccgacccgctggccgtcgatgtcggcgcgctgctgcgcactgcccgccagcaggtcgaggcgctgtcgaacggccggcatgtgttcgagtggcagatcgaggaggggctggatgtgctgggcagcggcaccgagctggcttcggccctgtccaacctgctgaccaacgcggtgcgctacacccccgacggcgggcgcatcatcgtgcgctggcggcgcggcgccgacggcgaggcgctctacagcgtgcaggacaccggcatcggcattccggcgcgccacctgccgcgcctgaccgagcgcttctaccgggtcgaccggggccgctcgcgcgcggccggcggcaccggcctgggcctggccatcaccaagcacatcgccatgcgccacgacgccgacctgctgatcgacagcgagctcggcaagggcagcaccttcacgctgcgctttcccgccgagcgcgtgaccggcgaagatccggaccgc

SEQ ID NO: 14908 - DNA, 696 bp, Bordetella pertussis
atgtccagcaccattcttgtcgttgaagacgaacccgccatccaggaactgatcgccgtgaacctttcgttcgcgggccacaaggtcctgcgcgcgttcgatgccgaacaggcccagaccctgatccgcgccgagctgcccgacctcatcctgctcgactggatgctgccgggggcctccggcctgtcgctggcccgcaagctgcgcgacgaagagcgcacccgcgccgtcccggtcatcatgctgacggccaagggcgccgaacaggacaaggtcgacggcctggaggcgggcgccgacgactacatcaccaagcccttctcgcccaaggagctgatggcgcgcatcaaggccgtgctgcgccgccgcgccccgcagctgaccgacgacatcatcgacgtcgccgggctgaagctggacccggtcacccaccgcctgtcgggccacagccagtcgctgtccatcgggcccaccgagttccgcctgctgcacttcttcatgacccacccggagcgggtgttttcccgctcgcagctgctcgaccaggtgtggggcgaccacgtcttcgtggaagagcgcacggtggacgtacatatccgccgcctgcgcaaggcgctggaacccagcggccatgacgcgcacgtcgagacggtgcgcggcagcggctaccggtttacagcacaggtgccggcgcgc

SEQ ID NO: 14909 - DNA, 774 bp, Bordetella pertussis
atgcaaactcctcattcccagcccgaatcggcgccgcagggcgagcaatccacgcatttcggcttccagtccgtgcccgaagccgacaaggcccgcaaggtcgccgaggtcttccattcggtcgcctcgcgctacgacgtcatgaacgatctcatgtcggccggcctgcaccgcgtctggaaggctttcacgatcgggcgcgccgcggtccggccgggcatgaaggtgctggacatcgccggcggcacgggcgacctggcgcgcgccttcgccaagcgcgccggccccagcggcgaagtgtggctgaccgatatcaacgaatccatgctgcgcgtcggccgcgatcgcctgaccgacagcggcctgctggtgcccaccgcggtctgcgacgccgagcgcctgccgttcccgtcgcagtatttcgaccgcgtcagcgtggccttcggcctgcgcaacatgacccacaaggaccgcgccctggccgaaatgacccgcgtgctcaagccgggcggcaagctgctggtgctggaattctcgcgcgtggccaagccgctggcgccggcctacgactggtattccttcaatgtgctgccctggatgggcaagaaggtcgccaacgacgaggccagctaccgttacctggccgaatcgatccgcatgcaccccgaccaggaaaccctggccggcatgttgcgcgacgccggcctggaccgcgtccagtacttcaatctgaccgccggcgtggcggccctgcacgaaggcgtgcggctgggc

SEQ ID NO: 14910 - DNA, 1257 bp, Bordetella pertussis
atgaacatcctgctgatcaaccattacgcaggctcgccccgctatggcatggagttccggccgtattacttcggccgcgaatggatcgggcatgggcatcaggtaaaagtggcggccagcacgatctcgcacatccgggcgcgcgccccccaggcaggcggccggctgacgcgcgagaacgtcgatggcatcgagtatctctggtatgccacgttgccgtaccaaggcaacggcgcgcgccgcctgctcaatatgctgcagttcagcgcgcgcctgtatgggctgcgccgcgaccttggcggctggcggccggatatcgtcattgcctcgtccacgcatccctacgacgtcctgcccgcggcacgcctggcccgccagaccggcgcccgcctggtgttcgaagtgcacgacctgtggccgctgacgcccaggctgctgggcggcttcaaggcctggcatccgatgatcgcgtcgatgcaatacgcggaagactacgcgtaccggcacgccgacctgaccgtttccatgctgccatgcgccctgccctacatgcgcgagcgcgggctggacccgcggcggtatgcgcacgtgcccaacggcgtgccggtgacggaatacagttcgcccgacttcgataaccccgactatctgcgggtacgcgcgcagatccgccaattgcgcgaacaatgcgatttcgtgcttgcctacgccggcacgcacggccacgccaatgcgctggacatgctgttgcaggcgatggcgcggctgcgcgaccaacccatcggcctcttgctgctgggcgatggccccgacaaaccggagctcaagcgcctggccggccagctcggcctgcgccacatcgccttcgccgatccggtgcctcgccccgccgtgcaggccgtgatggccgacatcgacgcggcctatatcggcctgaggcgcagcccgctgttccagttcggcgtcagccccaacaagctgttcgactacatgctgtcggcctgcccggtagtgcaatcgatcgaaagcggcaacgatatcgtggccgacgcccgttgcggcctgtccgtgccggcggaagatccggccgccctggccgcggccctgcacggcctgcgcaccctgcccgccgccgagcgccaggccatgggccggcgcggccgtgactacgtgctcgcccgccacgactacccggtgctggcgcagcaattcctcgacgccgtgcaatctgtcacgccacggcgcgcagcctcgcgc

SEQ ID NO: 14911 - DNA, 1086 bp, Bordetella pertussis
atgccgaagaagatactgaccgtactgggcgctcgcccgcaattcatcaaggcgagcgtcgtctccgccgccattgcccagcacccggaactgacggaagtcgtggtccacacgggccagcatttcgacgccaacatgtccgacgtcttcttcgacgaactgggcatgcagacgcccgcccaccagctcgacatccacggcggcggccacggcgacatgaccggccgcatgctggtcgcgctcgaacaggtgatgcaggcggaaaagccggacgtggtgctggtctacggcgacaccaattcgaccctggccggcgcgctggcggcggtcaagctgcatattccggtcgcccacgtggaggccggcctgcgttcgttcaacctgcgcatgcccgaggaagtgaaccgcatcctgaccgaccgcatttcgcgctggctgttcacgcctaccgacagcgccacgcgccacctggccgccgaaggccagtcgggcgagaaggtcgtgcaggtcggcgatgtcatgtacgacgtcgcgctgcaccacggcgcgcgggtcaccgccgaaggccgggccctggcggcccatggcctgaagccgggcggctatgtgctggccacgatccatcgcgcggaaaataccgacgacgcgcaacgcctgacgaccatcgtgcgcgcgctgcaggcgttggccgccgagcgccaggtcgtctggccgctgcacccgcgcacgtggggcatcctggcccgcctgggactgctcgacgagctggcgtccaccgtcaccttgctcgaaccggtcggctacctggacatggtgcagctggagaaatacgccgccctcatcgccaccgactccggcggcgtgcagaaggaagcgtttttccatcgcatcccctgcgtcacgctgcgcgacgaaaccgaatggaccgagctggtcgacgccggctggaatcgcctggcgccgccggtgtccagcgccgttgtcgcgcaagccgtccaggacgcgttgcgcgaacagccgcgcgacgtgcagccctacggcgacggccaggccgcacggcgcatcgtggacgccctggccgcccac

SEQ ID NO: 14912 - DNA, 1050 bp, Bordetella pertussis
atgagctcacttcccatcaccgatcgaaaaatccgtttcggcttagttggttgcggccgcatttccaagaaccatatcggcgcgatcgcgcagcacggcgaccgcgccgagctggtcgaaatctgcgataccaaccccgaggcgctgcaggctgccgaggcggccaccggggcgcggccgttctcctcgctcagcgacatgctggcgcaaggcaatgccgacgcgctggtgctggccaccccgtccggcctgcacccctggcaagccatcgaagtggcccaggccggtcgccacgtggtcagcgagaagcccatggctacccgctgggaagacggcaagcgcatggtcaaggcctgtgacgaagccggggtgcgcctgttcgtggtcaagcagaaccgccgcaacgccaccctgcaactggtcaagaaggccatcgagcagggccgcttcggccgtatctacatggtgacggtcaacgtcttctggacccggccgcaggagtattacgacgccgcccgctggcgcggcaagtgggaatgggacggcggcgcattcatgaaccaggccagccactacgtggacctgctggactggctggtcggcccggtcgaaagcgtctacgcctacacggccacgctggcgcgccgcatcgaagccgaggacaccggcgtggcggcgctgcgctggcgccacggcgcgatgggctcgatcaacgtcaccatgctgacctatccgcagaacctggaaggctccatcaccattctcggtgaaaaggggacggttcgcgtgggcggcgttgcggtcaaccgcatcgacgaatggaagtttgccgaaccgcatccggatgacgacaagatccgcgaagccaattacgaaaccacgtcggtctacggtttcgggcacccgctgtactacgacaatgtcatcaattgcctgcgcggcgactgcgaacccgaaaccgacggccgcgaaggcctgcaatcgctggccctgctgaccgccatctaccgctccgcgcgcgacggcgtgcgcatccccctgccgctggac

SEQ ID NO: 14913 - DNA, 1005 bp, Bordetella pertussis
atgccaaatcgtattctcatcgttcgcacctcgtcgcttggcgatttggtgcatatgctgcctgctatttccgatatcgcccgatacgttcccgatacccagattgactgggttgcggaagaggcttttgccgatatcccgaaatggcatccggcggtcaatgaggtgatcaaggtggcacaccggcgctggcgcaaggcctggtggtccgagccggtgcgccaggaacgccgcgcgctggccgagcgcctgcgctcggtgtcctacgatgtcgtgctggatatgcaggggctgctgaaatcggcctggctggtgcggcagacccgcggggtgcgccacggcctggactggcgctccgcgcgcgagccgttggtgtcgctgttttacaacgtccggcaccgggtggagttctggcagccggccgtggtacgccagcgcaagctggccgcgttgacctttggctacaactacgcgggatcgcccgatttcggattgcaggcattcggccgggccgcgcaggccgacgatgcgccggccgatccgggccgccgcatgctgcacctggcggccgaccggggttatgcggtgatcatgccgtcggccagccgcgacgacaaactgtggcccgaggacgattggcgcgccgtattccggcggctgcaggatgccggctgcgccctgcgcctgctggccggcaacgagcaggaggccgagcgcgcccgcgtgctggttgccggcatggagggcgtggaagtgctgccgcgcatggatttgacgtcggtggcgcaggtgctggccggcgcccgcctgatggtggggctggacagcggcctgacgcatctgtcggcggcgctgggccgtccgaccatcggcatctatcgtgcctcgacgccggtgcgtacgccgctggtggggcccagctatacggccagcctgggcgaccgtggcgcctcgccatcgcgcgaggccgtgctggcctcggtcgagcaggccctggcggcggcc

SEQ ID NO: 14914 - DNA, 893 bp, Bordetella pertussis
cggctggccgtggccgtcagcggcggcgccgattcggccatgctggccgtggcggcggccgcggccttgccgcccggctgcacgctgcgcctgttccatgtccaccacgggctgcaggcggcggccgaccaatgggccgcgcaggtgcgcggcctgggcgcgctgctgggcgtgccggtggacgaggcgcgcgtcaccgtgccgccgggccaggggctgggcatggaggccgccgcccgcctggcgcgctaccaggccttggccgggctggcccgccagcatggcgtgcggcatatcctgctggcgcatcaccgcaacgaccaggcggagaccgtcctgctgcgcttgctgcgtggcaccggcctgcagggcatggcggccatggcgccgttcagcgagcgcgatggcgtggcctacctgcgaccctggctggacgtcgaccacgcagccatcctggcgctggccggcgcggtgcgcgcgcagtgcggctggcaggcggtgcaggaccccaccaataccgacccgcgctatgcgcgcgccgccgtgcgcacgcagctcgccccggcgctggacgcgcgctggcccggctggcaggccatcgtggcgcgccatgcgcgccaaatggccgaggcggccgagatcgtggccgaggtggcgcaggccgatttcgctacgctggagccggccgatgccggccgcagtttttcgctggcggcctggcgcggcctgtcggcggcgcgccaggcgcaggcgttgcggcactggctggccagccaggacgcgccgatgccgaccgaggcgcggctggcggaactgcagcgccagttgcgccaattgcacgcgctgggccacgaccgccacttgcgctggcaacacgcggggcgcgtcgtgcg

SEQ ID NO: 14915 - DNA, 1263 bp, Bordetella pertussis
atgtccctgatcgttcaaaagtatggcggtacttcgatgggctcggtcgagcgcattaagaacgtggcgcgccgcgtcgcgaagtggcatgctgccggccacaaggtcgtggtggtgccgtcggccatggcgggcgagaccaatcgcctgctgagcctggcgcgcgaaatcagcccgcagcccgacggccgcgagctcgacatgatcgccgccaccggcgagcaggccagcagcggcatgctcgccatcgccctgcaggccgagggcgtgcccgcgcgcagctacgcgggctggcaggtgccggtgcgcaccgactcgtcctataccaaggcccgcatcaagtcgatcgacgacaagcgcgtgctggccgatctggacgccggccgcgtggtcatcgtgacggggttccagggcgtggacgacgacgggcacatcaccacgttgggccgcggcggttcggatacctcggcggtggccgtggcggccgccatcaaggccgacgagtgcctgatcttcaccgacgtcgacggcgtatacaccaccgatccgcgcgtggtgccggaagcgcgccgcatggcggtggtgtcgttcgaggaaatgctcgaaatggcctcgctcggctccaaggtgctgcagatccgctcggtcgagttcgccggcaagtaccatgttccgacccgcgtgctgtcctcgctgaccgacccgcttatcccgctcgaagaagaaatgcgttcgggcacgctgattacttttgaggaagacgaaaaaatggaagccgccgttgtctccggcatcgccttcagccgcgacgaagccaaaatcaccctgctggccgtgccggacaagccgggcatcgcctattcgatcctgggcccggtggctgcggccaatatcgatgtcgacatgatcgtgcagaaccagtcggtggccggtaccaccgacttctcgttcaccgtcaatcgcaacgaataccagcgcacgctggacctgctcaagcgcgaggtcatccccgcagtgagcgcgcgcgaactggtcaccgacgagaaggtcgccaaggtgtcgatcgtcggcatcggcatgcgttcgcacgtgggcgtggccagcctgatgttccagacgctgtcgcaggaaggcatcaacatccagatgatcagcaccagcgagatcaagacctcggtgatcatcgacgacaagtacatggaactggccgtgcgttcgctgcacaaggcattcggcctggaccaggtcccgggcgatcaggtc

SEQ ID NO: 14916 - DNA, 1266 bp, Bordetella pertussis
atgctttcagccgttgttctgctgttgctgctgttcgccgccagcatccccgtggccctgagcctgggcatcgcgccgctgccggcgctgctggcgcgcgacgtgccgttgctggccgtgccccagaccatgttcgagtcgatggactcgttcgcgctgatggccgtgccgttcttcgtgctggccgggcgcctgatgcagaccggcggcatcgccgggcggctgatggacctgggcctggcgctgatcggctgggtcaagggcggcctgggcggcgccgcggtgctgaccaccatgttcttctcgactatctgcggctcgtcctcggccaccaccgcggccatcggctcggtgatgattcccgagatggagcggcgcggctatccgcgtccgttcgccgcgtcggtggtggcctccagcggcgagctgggcgtgatcctgccgccgtcggtgccgatgatcatctacgccatgctgaccggcacgtcggtggcgcagatgttcgtggccggcatcctgcccggcctgctgatcggcctgtcgctgatcatcaccattctcatcatgtcgcgcctgggcgattacggcggttcgcagcgcgtgagcgtgggcgaatgggcgctcaacgtctggcgcgcgctgcgccgggccagcctgtcgctgctgatgccggtgatcatcctgggcggcatctacggcgggctgttcaccgccaccgaggccgcggtcgtggcggtggcctataccttcgtggtcagcgtgttcatctaccgcgaaatcaagtggaaggacctgcccgagatcttctggtcgtcggcggtgacctccggcatcgtcctgttgatcgtgggcttcgcgtcggtgttcgcctatgtgctgtcgctctaccaggcgccgcagcaggtggccgcgctgttgctgggcgtgtccgacaacccgctggtgttcctgctgctggtcaacatcgcgctgctggtggtgggcctgttcatggagaccttcgcggcgatcctgatcctggccccggtgctggcgccggtggccgtcagcctgggcatcgacccggtgcatttcgggctgatcgtgatcgtcaacctggcggtgggcatggtcacgccgccggtcggggtgaacctgttcctggtatgcggcatagcccgcgtgtcgatggagcgcctgatgcgcccgctgtcggtattcctgggcgtgctgctgctggacctgatcatcattacctacgggccggtgctgtacgcccgctttttc

SEQ ID NO: 14917 - DNA, 765 bp, Bordetella pertussis
atgacgcaacgcttatccggcaggatcgccatcgtgaccggcgcgggctcgggaatcggcgaggccacggcccgcctgatggcgcgcgagggcgcggtcgtggtggtggccgacaaggccatcgaagtggccgagcgcgtcgcgcaggccatcgtggccgagggcggacgcgccgaggcgcgccaggccgacgtgggcgaggcgcaatcggtgcgcgccctggtcgacgccgtggcggcgcgctgggagcgcatcgacgtgctggtcaacaatgccggctacggtatcgccgccaccgtggtcgataccgacgaggccgactggtcggcgctgatgcgcgtcaacgtcgacggcgtgttcctgggctgcaagtacgtcatcccgatcatgcagcgccagggggccggcgtgatcgtcaatacggcgtcggcgggcgcgctggtgggcttgcgccagcgcgccgcgtattgcgcctccaagggcgcggtggcggcgctgacgcgcgccatggcgctggaccacgccaccgaggggatccgcatcaactgcgtggcgccgggcacgatcgagtcgccgtacttccgcgagatctacgcgcgcagcgacgatcccgaagccttgcgcgccagcctggcggcgcgccagcccatgaaccgcctcggccagcccgaggaagtggcgcgcgccatcgttttcctggccagcgacgacgcctcgttcgccaccggcagcacgctggtgctcgacggcggcctgacggcggcg

SEQ ID NO: 14918 - DNA, 627 bp, Bordetella pertussis
atgacgctctcgacgtggttgacctttttcgtcgcatcatgggcgatctcattctcgcccggggcgggcgccatttcggccatgtcctcgggcctgaagtacgggttcgcgcgcggctactggaacacggccgggctgatcctcggcatcctgttccagttcctgatcgtcgccgtcgggctgggcgcggtgctggccacctccgagctggccttcaccctcgtcaagtacgccggcgtggtctacctgatctacctgggcatgcgccagatccgcaccgacgccgcgccggtgacggtcgatgccggcgatccgcatcgcgcctcgattcgcgaactggtgggccgcggcttcctgatcaacaccatgaaccccaagggcacggtgttcctgctggcggtcgtgccgcagttcgtcgaccccgcgcagccgctgacccagcaatacctggcgctggccggcacgctggccttcaccgacctggtggccatggacgtgtatacgctgctggccgccaaggtgctgcggatgttgcgcaaggcgcaccacatccgctggatgaaccgcgtcttcggttcgctgttcatcctggccggcgtattcctggctacattccgtcgccactcg

SEQ ID NO: 14919 - DNA, 1629 bp, Bordetella pertussis
gtgcgccagtacaatccacccgccatgaacattccccaagaagtcgcgcggcgacgcaccttcgccatcatttcccacccggacgccggtaaaacgacgctgaccgaaaaactgctgctgttcgcaggagcgatccagatcgccggcagcgtgaaggcgcgcaaggcctcgcgccatgcgtcgtcggactggatggaaatcgaaaagcagcgcggcatctcggtggcatcgtcggtcatgcagatggagtaccgcgactgcgtcatcaacctgcttgacaccccgggccaccaggacttctcggaagacacctaccgggtgctgacggcggtggacgccgcgctgatggtcatcgacgccgccaatggcgtcgaaccgcagacgatccgcctgctgcaggtctgccgcgcgcgcaacacgcccatcatcaccttcatcaacaaactcgaccgcgaagtccgcgagccgctcgagctgctgtcggaaatcgaaggccacctcggcatggacaccgtgccgttctcgtggccggtgggcatgggcaaggcgtttggcggcgtgttcgacatccggcgcaaccgcatgcgcattttccgcgccgggcaggagcgccgcggcgaggacgacgaattcatcgacggcctggacaaccccgagatcccgcgccgcttcggcgccgccttcgcgcaggccagcggcgagatcgagctgatcaacgaagccgcgccggcgttcgaccgcgaggccttcctggccggcaagcaaacgcccgtgttcttcggttcggccatcaacaacttcggcgtgcaggaagtcctggacgcgctggtcgaccaggcgccggcccccggcccgcgccaggcgctggagcgcgaagtccgccccgacgaacccaagttcaccggcgtggtcttcaaggtgcaggccaacatggatccggcgcaccgcgaccgggtcgccttcgtgcgcgtgagctcgggccgcttcgaacgcggcatgcgcctgaaggtcgcgcgcaccggcaaggaaatgcggcccaacaacgtggtgtcgttcctgtcacagcgccgcgagctgctcgacgaagcctatgccggcgacgtcatcggcattcccaaccacggcgtgctgcagctgggcgacgtgctgaccgaaggcgagagcctgcgctttaccggactgccgttcttcgccccggaactgttccaggcggtggaagtcaaagatccattgcgtaccaagcaattgcgcgtgggcctgacgcagctgggcgaggagggcgccatccaggtgttccgccccgaggccgccggcggcgcgctgctgctgggcgcggtgggccagctgcagttcgaagtggtcgcgcaccggctcaagaccgagtacggcgtggacgcccggatgatgccttcgcgctacaccagcgcgcgctggatcacctccgacgacccgcgcgcgctgcgcaagttcatggatgccaatgcagcccatatcgcctatgatgtggtcgatgcggcggcgttccttatcacttcgcccgcgcaattgcgcgtggccgaagacctgtatccgaatgtgaaattccacgccttgcgcgagcatggcggcaaagtcttcggagacaaggcg

SEQ ID NO: 14920 - DNA, 732 bp, Bordetella pertussis
atgaccgccgtcgtcaatatcgccgcctataaattcgtcagcatcgccaacccggccgacctgcgcgagcccatgctcgaacaggccggccagcgccagctcaagggcacggtgctgctggcgccggagggcatcaacctgttcctggccggggcggccgacgctatcgaaggctttctgcgctggctgcgcgccgacgcgcgctttgccgacctgcaggccaagtacagcgaatccgcgcgcatgccgtttcgcaagctgctggtcaaggtaaagcgcgagatcattcgcatggaccacccggccatccggcccgaagcggggcgcgcgcccgcggtcgacgccgcgacgctgcggcgctggctggcccagggccgcgacgaccagggccgcgagctggtgatgctggatacgcgcaatgcgttcgaggtggaggtggggacgtttcgcggcgcgctggactggcgcatcgagcgtttcacgcagttcccgcaggcggtgcgcgacaaccaagccgcgctggcgggcaagacggtggtcagcttctgcacgggcggcatccgctgcgaaaaggcggccatctacatggccgaggccggcatcgagcatgtctaccagctcgaaggcggcatcctgaaatacttcgaagagaccgatggcgccggcttcgacggcgcctgtttcgtattcgacgagcgcgtcgcgctcgacgcggcgctggcgccgcaggcc

SEQ ID NO: 14921 - DNA, 2104 bp, Bordetella pertussis
tccttccccctgagcctcctacgacatgtcacgcacgctcttcgtcaccactgccctgccctacgccaacggatcgttccacatcggccacatcatggagtacatccaggccgacatctgggtccgttcgatgcgcatggcgggccacacggtgcatttcgtgggtgccgacgacgcgcacggcgcgccgatcatgctcaaggccgaaaaggaaggcatcacgccgcaggcgctggtggcccgctacgccgccgagcggccgcgctacctggacggcttccatatccgcttcgaccactggcacagcaccgatacgcccgagaacgtggcgctctcgcaggaaatctatcgcgcgctcaagagcgagggactgatcgagacacgctcgatcgagcagttctacgacccggtcaagggcatgttcctggccgaccgctacatcaagggcgaatgcccgcgctgccacgccaaggaccagtacggcgattcgtgtgaagtgtgcggcgccgtgtatgcgcccaccgagctgatcaacccctattcggccctgaccggcgccgcgccggtactgaagtcgtccgatcacttcttcttcaagctgtccgatccgcgctgcgtcgagttcctgcagcaatggaccaccggcgccaaccgccagggcgtcaagcacctgcaggccgaagtgcaggccaagacgcgcgaatggctggtcggcgacgacggcgaggccaagctgggcgactgggatatctcgcgcgacgccccctatttcggcatcgagattcccgacgcgccgggcaagtatttctatgtctggctggacgcgccggtgggctacctggcctcgctgaaatcctattgcgcggccaagggcctggacttcgacgcgctgctcgacccggccggcccgaccgagcaggtgcacttcatcggcaaggacatcatttacttccacgcgctgttctggccggcgatgctgaagttcgccgggcgcaagacgcccgaccagctgaatgtgcacggtttcatcaccgtcagcggcgagaagatgtccaagagccgcggcaccggcatctcgccgctgcgctacctggaaatcggcatggacgccgaatggctgcgctactacatggcggccaagctgaacgcgcgcgtcgaggacatggacttcaaccccgaagacttcgtggcgcgtgtcaacagcgacctggtgggcaagtacgtcaacatcgccagccgcgccgccgccttcattacccgccacttcgacggcgaactggcgtacgacggcgacacggacgcgctggcggccgagttcgcgcagcaggccgaatcgatccgcgccgccttcgaggcgcgcgagtacaaccgcgcggtgcgcgaaatcatggcccatgccgaccgcatcaaccaggcgttcgacgcggcgcagccctgggtgatggccaagggcatcggcgccgccgacgcggccacgcgcgcccgcctgcaggacatctgctcgcgcgcgctggccggcttcaaggccctgtcggtgatgctggcgccggtgctgcccgcgctggccagccgcgtggcgcgcgagctgttcggcgcgaacgccgacttcgcctggggcgacgcgcaacagctgccgcagcgggtggcgccgttcaagcacctgatgcagcgcgtcgatcccaagctgctggacgacctgttcgagccgcccgccgccgaagccagcgcgccggccgccctgccgggcggcgaggccctggccgacaccatcaccatcgacgacttcgccaagatcgacctgcgcatcgcgcgcatcgtcaattgcgaagaagtggaaggctcgaccaagctgctgcgcctgaccctggacgtgggcgagggacgccatcgcaatgtgttctcgggcatcaagtcggcctaccagccgcaggacctggtcggcaagctgacggtgctggtggccaacctggcgccgcgcaagatgaaattcggcgtgtccgagggcatggtgctggccgccagccacgccgacgagaaggccgaacccgggatctacgtgctcgaaccctggccgggcgcccagcccggcatgcgggtgcgctga

SEQ ID NO: 14922 - DNA, 3622 bp, Bordetella pertussis
ctggcgtgcgggttcgtgttctggaccgtggcgtcgcaaaacggcacgcgcctgctgctcgacaccgtggcccggcagctcgacggcgagatcgcgggcgtgcgcggcagcgtgctgcgcggcctgcgggtcgaccgtatccgcctgtcggtggccgacgtggatgtggccgtcgacgacctgcggctggacgtggcgtggcgggcgctgggccagcggctgctgcatgtgcgcgagctggcggccacgcgcgtcgaggtcggcctgcatacgccggccacgccgccgcccgacagcgacgagccgttcgccctgcgcctgccggtggagctggcgctggaccgtctcagcctgggcgaattcgtcctgcgccaggatggcgagccgctgcccgtgagcgcgggcgagctgcaggccagcctggcggcgggccgccacggcgcgcgcctgaccctggacagcctgcgcgtgacccatgccgtgggcacgctgcgcgcgcaaggccgcctcgatgtggcgagcctcgcccagccgtggccgctgacggccagcctggatttgcaggcgcagggcagcggccccgaatcgccgctgtgcctggcgccgctgctcgacgccagggacaaaacggccaaggacaaggccgccaaggacaagggcaaggacaagggcaaggacaagggcaaggacaagggcaaggacaagggcaaggacaagggcaaggacaagggcaaggacaagggcaaggacaagggtaaggacgacgccggggaaaagccggacgagccggccgacccgtgcggcctcgcgctgcaggtccaggcgcagggcacgctcgaacagctggaggccgaactgaccggcgccggccaggggctggccctggaggcgcgcgccggcctgttgccgcaggcgccctttccgctgcgcacggccagcctgaaactgacgcgggaggacaagtccagcctggccgccacgctggattggcagccgcagcccggccagcccggccgcgaccgcgtcgtcgccacgttcgaggccgagcggctggacctgcagcgcctggccggcgaggccatcccgccggcgatgctgagcgcgcgcggcggcctggacgccgaagtcgacgatctcagcagcctgcaccgcgccacgctgacgctggacgtgaccaagggcagcagctggaaccgccaccccctggccggcaaggtcgccgccagcgtgagcgcgctgggcgatcccccgggggctttcgccacggccgcgccggcgcagccgcacgcgctgccgggcgggctgtgggtcgaccagctcgacgtcgacctgcaactgggcccgaaccgggtgcgcgcccagggcaagctggacgaacgcgccggcgcgctcaagctggacgcgcaggcgccgcgcctggacgcgttctggcccggcattccgggcgcggccagcgtcaaggccgcgctcgatggcgccctggcccgtcatcgcggccgcatcgaggccgcctatacgccggccgacgcccgcgcgcgtgctgggccgcgcgcgtggcaggcgcagctggagttcagcggcggctggggggcggggccggccgccgagggcggccgccgccggctggcgcggctcggtatcgcgcctgacggccgacagcgccggcttcgcgctggccctcgagcgtcccgtcacgctggcctacgtgcccgaggcgcttgccccgcaatggcagtggcaggtcggcgccaccaccctggcgctgaccttccccgacaagcagcgcgtcgcgctggcgcatgccgcctcgcgcggcggcgccgggcgctgggaaaccgcgggccgcgccgacgcgctggtgatcaccgcggccatggtgcgccagatactggtggcgctggatcccgaggccgtggcgcgcgccgagcgcgacagcggcagtccggtcaacgccccggtgccggcggcgcagcgccgcatttcgctcgacgcctcgtgggacctcaaattcgccggcgcgctggccggcaaggtccgggtggcgcggcgcgacggcgacctgcgcattccgggcgatccgccgatcccgctgggcctgcgcacgctggtgctcgaggccaacgccacgcccaccggcgggcaggccagccgcctcgacgcgcggctggacatggcgaccgccaggatgggcgccatcaacggcaccgccagcgccacgctgggcggcctggcgctggacccgcgccagccgatccgcgtcgccctcgatgccgacgtgaccgacctggcctggctgggtctgttcgtcggcgacacgctggaggtcggcggcatgctcaaggccaatgtgcgcgcgcagggctcgctcgacggcaaatggaacgccagcggcacggtcaacggcgacaagctgcgcgtggtgcgcatcgacgacggcgtgcggctgatcgacggcatgctgcgcgcgcgcctgcaggacgatcgcgtcatcctggattccctgcgttttccggcctcgctgcgcgtcatgccggccgaatggcgcacgcgcgagtgggtcagcaccaatcccgacgccaagggcggctacctggaggccaccggccaatgggagctgtcggccgcgcgcggccaggtgcggctgcaactgcatcgcttcccggcgctgcagcgctcggaccgctacggcatggtgtccggcgtggtgacgctggatgccgcgctgccgcgcatctccatcaatggcgacatcaccgccgacgccggctgggtcagcctggagatcctgcagggcgtgccgaccctggacgacgacgtcaaggtggtgcgggccggccagaagaacgcccaaggcgacggtccgccgctgcagatcgacatgaacctcaaggtcgacatggggccgcgcttctacatcaccggcatgggcctggatgccggcctgctgggctcgatccagatccgccttcaggagggaaggctgaccggctatggcgcgctgcgcacgcgcggcgggggcatcgaggcctacggccagaagctgcgcctgcggcgcggcacgctgaccttccagggccggctggacaacccgctgctcgacatcgaggccttgcgcaccggcgaacaggtcgaggcgggcgtgcgggtggccggcacggcgcagcggccgcgcatcgacctggtgtcctatccggatgtcagcgacgtcgagaagctgtcgtggctggtgctgggccgcggcccggacgccagcggcggcgacacggcgctgctgctgtcggtcggcacggcgctgctgggcggcgggcagccgttctacaagcagttcggcctggacgacgtcagtgtgcggtccggcgcgatcggcagctccggcagcctgctgcccgaccgcaccgtggccgccggcgtcaaccgcgacagcgacgccgacctggcgacgcagttcctggtggccagcaagcgcttcgccaacggtatcacgctcagcgtcgagcaggcgctggccggcagcgaaacggtcgggcgcgccagctaccgcctggcgcgcggcctgtcgctggacctgaaggccggctcggtcaacggaatcgcgctggtatatcggatcttgctggatgac

SEQ ID NO: 14923 - DNA, 399 bp, Bordetella pertussis
aggagacagtgtggccatcgttacgccattcgtgcaggtcggaacttacccgacaaggaatttcgctaccttaggaccgttatagttacggccgccgtttaccggggcttcgatcaagagcttgcaccccatcacttaaccttccggcaccgggcaggcgtcacaccctatacgtcgactttcgtctttgcagagtgctgtgtttttaataaacagtcgcagccaccgattctctgcgaccccttcatgctcagcgcgcaggcgcttcacactaccagggtataccttctcccgaagttacggtatcaatttgccgagttccttctcctgagttctctcaagcgccttggaatattcatcccgtccacctgtgtcggtttgcggtacggtctcgtacag

SEQ ID NO: 14924 - DNA, 410 bp, Bordetella pertussis
ggtgctggaatattaaccagcttcccatcagctacgcatctctgcctcgccttaggggccgactcaccctgcgccgatgaacgttgcgcaggaaaccttggacttacggcgagggggcttttcaccccctttatcgctactcatgtcagcattcgcacttctgatacctccagcagcctttacaagccaccttcgcaggcttacagaacgctctcctaccgcgcgcactaaaagtgcacacccgcagcttcggtttatcgcttagccccgttacatcttccgcgcaggacgactcgatcagtgagctattacgctttctttaaagggtggctgcttctaagccaacctcctgactgtctatgccttcccacttcgtttcccacttagcgataattcgggaccttagctgg

SEQ ID NO: 14925 - DNA, 999 bp, Bordetella pertussis
atgtccacgctcgtcgagtcccccgttccctcgaacgactcgcaggccgccgcgccggccgcctacgatcccacccagaagcagaaatcgcaggccaagaccgcgcgcattccgatcaaggtggtcgcggccgagaagctgaagaagccggaatggatccgcgtgcgcgccgccgccccggggtcgcgcttctacgacatcaagcgcatcctgcgcgagcacaacctgcatacggtgtgcgaagaggcatcctgcccgaacatcggcgaatgcttcggcaagggcacggccaccttcatgatcatgggcgacaagtgcacgcgccgttgcccgttctgtgatgtgggccacggccgtcccgatccgctggacacgcaagagcccgaaaacctggcgcgcaccatcgccgcgctcaagctgtcctacgtggtcatcacctcggtcgaccgcgacgacctgcgcgacggtggcgccgcccacttcgtcgaatgcatcgccaaggtgcgcgagtattcgcccgatacccgcatcgaagtgctggtgcccgacttccgcggccgcctggaccgtgcgctgcacatcctcaacagcggcccgccggacgtcatgaaccacaacctggaaaccgtgccgcgcctgtacaagcaggcacgcccgggctcggactacgcgcattcgctcaagctgctggccgagttcaagaagctgcaccccgaggtgcccaccaagtcgggcctgatgctgggcctgggcgagacggacgaggaaatcctgcaggtcatgcgggacatgcgcgagcataacgtcgacatgctgaccatcggccagtatctccagccgtcggagcaccatctgccggtgctgcgctacgtgcatccggacaccttcgcgatgttcgagcgcgaggcctacgccatgggcttcacgcatgcggccgtgggcgccatggtgcgctcgtcgtaccacgccgaccagcaggcgcacgccgccggcgtcaac

SEQ ID NO: 14926 - DNA, 1773 bp, Bordetella pertussis
ttgaattctgccgcacgcaatgcgcccgccggctcccagccggtcaaggccgaactctggaagcgggtctacagccgcgtaggctcttactggaaggggctggtgctggccgtcctgctgatggccggcgccgccgcgacccagcccacgctggcagtcatcatgaagccgctgctcgacgatggcttctcgggcgccaagccgcattatgtctggttcctgccgctggcggtggtggggctgatcctgctgcgcggaatctgcaatttcttcagcgactacctgctggcctgggtggccaacaacgtgctgcgcggcatccggggcgagatgttcgagcggctgctgggcctgcccgatgccgacttcaagcgcggcgacaccggccgcctgctcaaccgcttcaccatcgacgcgggcaacgtcaccggctacgccaccgacgtcatcacggtgctggtgcgcgaaaccctggtcgtcatcgccctgatcggcgtgctgctgtacatgtcgtgggcgctgacgctgatcatcctcgtcatgctgccggtgtcggtgggcatcgcccgcgccttcacgcgccggctgcgccgcatcaaccgcgaaaccgtcaacatgaacgccgagctcacccgcgtggtcagcgagggcatcgacgggcagcgtgtcatcaagctgttcgacggctatgacgccgagcgccgccgtttcgacttcgtcaactcgcgcctgcgccgcttcgcgatgcgcagcgccaccgccgacgcggcgctcacgccgctcacgcaggtgtgcatctcggtcgccgtgggcgcggtcatcgccgtggccctcagccaggccaacagcggcgcgctcaccgtcggcagcttcgcctcgttcatggccgcgctggcgcagatcttcgatccgatcaagcgcctgaccaacctggccggcaaaatgcagaaaatgctggtggccgccgaaagcgtgttcaccctggtggaccagacgcccgaggccgacgccggcacgcgcgccttgcccgaaccggtgcgcggcaaggtcgaattccgtgcggtcagccatcgcttcccggacgccgatcgcgataccgtcagcgccgtgtcgttcctggtcgagccgggccagaccgtggccctggtcggacgctcgggcagcggcaagaccactctggtcaacatgctgccgcgctttgtcctgcccgatggcggcgacatcctgttcgacgatgtgcccatccaggatctcaccttgcgcagcctgcgctcgcatctgtcgctggtcagccaggacgtggtgctgttcgacgacaccattgccgccaacgtgggttatggcgccggcggcaccgtcgacgacgcgcgcgttcgcgacgcgctggccgcggccaacctgctggagttcgtcgacggcttgccgctgggcatccacacgccggtgggccagaatgccgcccgcctgtcgggcggccagcgccagcgcctggcgatcgcccgcgccctgatcaagaacgcgccggtcctgatcctcgacgaggcgacctcggcgctggacaacgaatccgagcgccaggtgcaggcatcgctggagcggctgatgcgcgggcgcaccacgctggtcatcgcccaccggctgtccaccgtgcagaacgccgaccgcatcatcgtgctggacgccggcaagatcgtcgagcacgggccgcacagcgagctgttggccgccaacggcctgtacgcctcgctctacaacatgcagttccgcgaggac

SEQ ID NO: 14927 - DNA, 1257 bp, Bordetella pertussis
atgaacgactccgtcaagagcgtgctgtccagtttcgttttctattacccgttcttcatgtcgtatttctggatcgtgggcgggctgctgcatttcttcctgttcgagcagggacgcaagcaccgcgccacgctgctgccgcgggtgccgcgcgtggccatcgtggtgccctgctacaacgagggcgagaacgtggccgaggtgatcgcgcacctggaccgcatgcactacccgaactatcgcatcatcgccgtcaacgacggcagccgcgacaataccggcgcgctgctcaacgagctggccgagcagtatccgcgcctgctggtggtgcaccagagccgcaacgagggcaaggccatcggcctgaacacggccgcgcagctcagcgacgccgagttcctgctgtgcatcgacggggactcgctgccccaccccgactcgatcacctacatgctgacgcatttcctgcacgccgggcacgtcggcgcggtcaccggcaacccgcgcatccgcaaccgctcgacggtgctgggccgcatgcaggtgggcgaattctcgtccatcgtggggctgatcaagcgcacccagcagctctacggcaagctgatgaccgtctccggcgtcatgaccatgttccgcaagcaggcgctgcaccaggtcggctactggagccccgacatgcagaccgaggacatcgatatcagctggaagctgcagctggccggctggaccctgcgctacgaaccgcgcgcgctgacctggatcctgatgcccgagacgttccgcgggctgttcaagcagcgctaccgctgggcgcgcggcggcatcgagaccgcgctgaagtacgccccgcgcatgctcaacccgcgccagatcctgatgtggccgatcttcctggagttcagcctgagcgtgctatgggcctacgccatgctgttcctgatctgcatggctgtgctgggccagttcgtcgcgctgccgcccgcctggcagttcgagatattcccgcgctggcacggcacgctgctgttcctgacctgcctggcgcagctgttcgccggctgcatcgtcgaccgcgcctacgattaccgcatcttccgctacttcgccgacgccgtctggtatccgatcgcgttctggatcatcggcatgatcaccaccgtcttcgcgctgccgcgcgtcctgtttcgccgagcccaaagccgggcgcggtgggtaagccccgaccgaggaatcaaacatgaaagcgttgatcat

SEQ ID NO: 14928 - DNA, 2103 bp, Bordetella pertussis
atgaccgccatgcatcggaccctgctgaaatggtttgcctgctgcgcgctggggctgctgatgctgcccgcgcgcgcttacaaggtggacatgctcccgccccccgatcccgacgacggcctgacattccgggtgctgtgcatgcacgacgtgcgcgacaacctgcgcgcctcgtttgccgacatgcccgatcagttcgccatcgagacgcgcacgctgaccgatctgttcgagtggatacgcgtgaagggattcaacctcatcagcatgcaacagatcatcgattcgcgcgccggcgtgcgcccgctgccgccgcgccccatcctgctgaccttcgacgacggctacgccagcacctacaccaaggtgtttcccttgctgaagaaattcaactatcccgcggtggtcgccgtcgtcaccagctggaccgacgcgccggccggcaccaagatccgcctcagccccaagatcgaagtgccgcacgacttcttcatgacctgggcgcagctgcgcgaaatggcgcagtccggcctggtcgagctggcctcccactcgcacaacctgcaccgcggcgtgctggccaacccgcagggcaacgaacagcccgcggcgtcctcgcgccagtacctgccggccagcgggcgctacgagaacgacgccgaatatcgcgcccgcgtgcgccaggatctcaagaccagcgccgacctgatccgcgaacacaccggcgtgaccatccgctccatcgtctggccctacggcgcgcacaatcgcgacaccgaccaggtggccgccgaggtgggcctgaacatcggcctgacgctgcagcccggccccaacacccccgacgtttcgctgacgcagatccgccgcagcctggtggactacgaggtcaacgtcgccacggtcgcccgcgccatgcgcgagccggtcagctaccacggccaggtccgcccgatcgagcgcatcgtgcaggtcgacctggactacatctacgaccccgaccccgagcagcagaaccgcaacctcggccagctgatcgaccgcatgaaggacctggcgcccagcgccgtctacctgcaggccttcgcctatcccaagggcgacggcgacatcaccgaggtgtacttccccaaccgccatctgccgatgcgcgccgatctgttcaaccgcgtggcctggcagctgaagacccgcgccggcgtgatggtgtacgcctggctgcccgtgctgaccttctcggtgccgcccggcaacccggcctatggcaaggtggtgcagtcgacgacccgcaagcccggcgagcgcggcctgggcagcccgacccggctcagccctttccatcccgacgcccaccgcgtcatcagcgagatctacgaagacctggccaaggcggcccacttcgacggcctgctgttccacgacgacgccgtgctcgacgacaccgaggacagcagccccgaggcgctggccacctaccagggctggggcctgccgcccgatatcgcggcgatacgcgccgaccccaagctggcccagcaatggtccaagggcaagatccgctacctgatcgacttcacgatgcacctgcgccatatcgtgtccggctaccagaacgaccgcgacatggtggtggcgcgcaatctctacgcccagccggtgctcgatcccgtgtcggaggcctggtacggccagagcctgccggaattcctcaagagctacgatttcgtggcgctgatggccatgcccaacatggagggcgccgcgcggcccgagcaatggatgcgccagctggtggccgccgtggcgcgccagaagggcctggaccgcaccatcttcgagctgcaggcgcgcgactggcgcgtgggcaagccgatcgacaccgagatactgcgcaagcagatggtgcaattgcgcagcctgggcgccatcaactatggctactacccggacgatttcatcgccaaccaccctgacgccgaagtgctgcgcgacgtgatgtcgctgaagtcgacgctggaaaagcgccgcctgaccaaggcccaggaactatcgcgccagaccacgctgtacggcagtgcgtcgcaggccgagccgacgcagagg

SEQ ID NO: 14929 - DNA, 1203 bp, Bordetella pertussis
atgttcgatgtcgccgtcatcggcgccggggccgccggcatgatgtgcgccgccgtggcgggccagcgcggcctgcgcatggtgctgatcgatcatgccgccaagctggccgagaaaatccgcatctccggcggagggcgctgcaacttcaccaacctgggcgccggcccggccaatttcctgtccgacaacccgcatttctgccgctcggcgctggccggctacaccccgcaggatttcctcggcctgttgcgccgccatcgggtgcattggcatgaaaagcatcgcgggcaactgttctgcgacgacagcagcgaaaccatcatcgaggtgttgcgcgccgagtgcgggcagggcggggtggcctggcgcatgccgtgccgcgtggacgagatcgcccgccgcgagggcggcggcttcacgctgcgtaccagcaccggcgcgatcgacgcgcgcgcggtcgtggtagccaccggcggcatggcgatcccgcaactgggcgcgaccgactacgcgctcaaggtggcgcgccagttcggcctgaaggtcgtcgagccgcggccggccctggtgccgctgaccttcgatcccgcgcaatggcagccgttcgccgcgctgtcgggcgtcgccctggaagtcacgctgtcgaccgggcagggcaaggggcgcgcggcgttcctggaagacctgctgtttacccaccggggcctgtccggccccgccatcctgcagatatcgagctactggaagccgggcgagcccatcgtgctggacctggcgcccggccgcgacctggccgccgaactgataggcgccaagccgggcaaccggcagcagctgcataccgtgctggccggcctgtggccccggcggctggccgatacctggctggacgtggccgggcgcgccgtcggcgcggacctggccgccgcgcgcctggccgacgtgccggaccgcacgctgcgggcgctggcggcgctgatccatgactggcgcctggtgcccagcggcacggccggctacaagaaggccgaagtgatgcgcggtggcgtcgacacgcgcgccctggaccagaagtccatgcaggcgcgcggcgtgccagggctgtacttcatcggcgaggcggtcgacgtgacgggctggctgggcggctacaacttccagtgggcctgggcgtcggggtacgcctgcggcaacgccctc

SEQ ID NO: 14930 - DNA, 1098 bp, Bordetella pertussis
atgtccgcaccgctcaaacgcacccccttggccgaagaacatcttgccgccggcgcctgtatggtcgacttcggcggctgggacatgccgctggcctatggctcgcaactggaagagcaccacgcggtgcgccaggacgccggcatgttcgacgtctcgcacatgctcaacgtcgatgtcggcggcgccgacgccaccgccttcctgcgccgcctggtggccaacgacgtggcccgcctggccacgccgggtaaggccctgtacagctgcatgctgaacccgcagggcggcatcatcgacgacctcatcatctactacttcgcgcccgaccaatggcgcgtggtggtcaacgccggcacggccgacaaggacatcgcctggatgcagcgcgtggccgccgccgacggcttcgatgtcgtgatcgcgccgcgccgcgacctggccatggtggcggtgcagggccccaacgcccgcgccaaggtgtgggcggcccgtcccgcgtggcaggcggcgtccgagccgctggcgccgttctcggccgcggccgtcgaggctggcacgctggtggcgcgtaccggctataccggcgaggacgggttcgaaatcgtgctgcccgccgacgcggtggtccagctgtggcgcgacctgctggcgcagggcgtgcggccctgcggcctgggcgcgcgcgacacgctgcgcctggaggcgggcatgaatctctacggccaggacatggacgaactcgtccatcccgaccaggccggcctgagctggaccgttgcgctcaaggacgaggcgcgccgcttcgtggggcgcgatgccatcgagcagttcgccgtgccgcgcgccttcgtcggcctgaagctgcaggagcgcggcgtgatgcgcgcccacatgccggtgcgctgcgcgcagggcatgggcgagctcaccagcggcaccatgtcgcccaccctgggcgtgtcggtgggctttgcccgcatgccggtgggcgtgcagcccggcgacgccgtcgaggtggaaatccgcggcaagtgggtgcccgccctggtatgcaaattgccgttcgtgcgtcacggcaaagccgtcgaacactcg

SEQ ID NO: 14931 - DNA, 2862 bp, Bordetella pertussis
atgtcgcgcgcccctgacacccattccgatttcattccccgccatatcggcccctccgacgaggaccaggccacgatgctggtcgccatcggcgcagccagcctggatgccctgatcgacgaagtcgtgccgccccgcatccgcagccgcgcgccactggcgctgcccgccgcgcgcagcgaaaccgatgtgctgcaggacctgaagcggattgccgcgcgcaaccagatctatcgcaactacatcggccagggttactacggcacgcacacgcccaacgtggtgttgcgcaatgtgctcgagaacccggcctggtacaccgcctacacgccgtatcagcccgaaatctcgcagggccgcctggaggcgctgctcaattaccagaccatggtcgccgacctgaccggcctggacatctccaacgcctcgctgctggatgaaggcaccgccgcggccgaggccatgacgctggcgcgccgcggcagccgttcgtccagtccggtgttcttcgtgtcgcagcactgccacccgcagacgctcgaagtggtgcgcacgcgcgccgagggcctgggcatcgaactggtgatcggcgacgagtcgcgcgggctgcccgaatgcttcggcgtgctgctgcagtatccgcacagcctgggcggcgtggccgattaccgcgaactggcgcaagccgcgcacgcgcagggcgccgtggtcgcctgcgtgacggacctgctggcgctggcgctgatcgagccgccgggacaatggggcgccgacatcgccgtgggttcggcgcagcgcttcggcgtgccgttcggcttcggcggcccgcacgccggcttcatggcctgccgcgatgcgtacaagcgcaacatgcccggccgcctggtcggcgtctcgaaggacgcccagggcaacccggcgctgcgcctggccctgcagacgcgcgagcagcacatccgccgcgagaaggcgacctccaacatctgcaccgcccaggtgctgctggccgtgatggccggcctgtacgccgtgtggcatggcccgcgcggcgtgcgccgcatcgccgagcgcgtgcaaagcctcaccggcgcgctgcgcgccgcgctggccgggctgggcgtgaaagtcgccaacgacacctggttcgacacgctgtcgctggaaaccggcgcggccaccccggccatcctggccgccgcggattgcgcccggatcaacctgcgccaggtcgatggcgcgcgcctggcggtgtcgctggacgaaaccgtgaccctcgccgacctgcaggccttggtcaatgtgttcgcggccggcctgggcaaggacgaggtggcgctggcgccgccgcaggcgtcgctggacggcatccccgcggcggtacgccgccaggggcccatcctgtcgcatccggtgttctccagcgtgcagtccgagaccgacatgctgcgctacctgcgcaagctggccgacaaggacctggcgctggaccgcaccatgatcccgctgggctcgtgcaccatgaagctgaacgccacggccgagatgatccccatcacctggcccgagttcgcgctgatccacccgttcgcgccggcctcgcagacgccgggctatcgcgagctgatcgagggcctgtcggcgcagctgtgcgagatcaccggttacgacggcatcagcctgcagcccaactcgggcgcgcagggcgagtacgccggcctgctggcgatccgcgcctaccaccaggccaatggccagccccagcgcaatgtctgcctgatcccggcctcggcgcacggcaccaacccggcgtcggcccagctggccggcatggacgtggtggtggtggcgtccgacgccaacggcaacgtcgacctggccgacctgcgcgccaggatcgcgcaagtgggcgaacgcctggcggcgctgatgatcacctatccctcgacgcacggcgtgttcgaggaagccgtgaccgaaatctgcgatgcggtgcacgaggccggcgggcaggtctacctggacggcgccaacatgaacgccatggtcggcgtggcgcagcccggcaagttcggctccgacgtctcgcacctgaacctgcacaagaccttctgcattccgcacggcggcggcgggccgggcgtgggcccggtggcggtgcgcgcgcacctggcgccctacctgccgggcgtgctcgacgcccggggccgcctggaccccgaggccaaggtcggcccggtctcggccgcgccgtacggctcggccggcatcctgccgattccctacgtgtacatcgcgttgatgggcgccgagggcctgcgccgcgccaccgaggtggccatcctcaacgccaactacatcgccacgcgcctgcgcggccactacccggtgctgtatgcgggccgcaacggccgcgtggcgcacgagtgcatcctggacgtgcggcccctgaaggaaaccagcggcatcagcgccgaggacatcgccaagcgcctgatggactacgggttccatgcgccgaccatgagcttcccggtggccggcacgctgatggtcgagcccaccgaatccgaaggcctggccgagctggagcgcttcatcgaggccatgatcgccatccgcgccgagatcgcacaggtcgaaagcggcgaacgcgaccgcgacgacaacgtgctgcgcaatgcgccccatacggcccagatgctgctggccgaggaatggcaccacgactatccgcgccagcaggccgcctatccggtggcgtcgctgcgcgagaacaagtattggccgccggtggcgcgggtggacaacgcctatggcgaccgcaacctggtgtgcgcctgcctgccggtggaagcctacgcg

SEQ ID NO: 14932 - DNA, 1680 bp, Bordetella pertussis
atgctcctcgagcaacaaaaacaactgatttccctgatccaggccgccgtcgcgcaatgcctgcccgaggcgcaagcccaagtccagctcgagcgccccaaggtcgcggcgcacggcgatatcgccaccaacgtggccatgcagctggccaagccggcgcgccgcaacccgcgcgagctggcccagggcatcgtcgatgcgctgatggcgcagccgcaggcgcgcgaactgatccaggatgccgagatcgccggcccgggcttcatcaatttccgcctcaccccagctgcccggcaggcggtggtacaggcagtggccagccaggccgacgcctacggccgcgcgccgcgcaatggcgagaaagtactggtcgagttcgtctcggccaacccgaccggcccgctgcacgtcggccatgcccgccaggcagcgctgggcgatgccatctgccgcctgtatgacgccagcggctgggacgtcactcgcgagttctactacaacgatgccggcaaccagatcgacaacctggccatcagcgtgcaggcgcgcggccgcggcatcgcgccggacgcgccggactaccccgccgacggctacaagggcgactacatcgtcgaaatcgcgcgcgatttcgcggcgcgcaagtcggtgcaggcctccgacggacagccggtcacggccaccggcgatctcgacagcctggacgatatccgcgccttcgccgtcgcttacctgcgccgcgagcaggacctggacctgcaggctttcggcctggccttcgacaactacttcctggaaagcagcctgtacgcctcgggccgcgtccaggaaacggtcgacacgctggtcgccaagggccacacctacgaggaaggcggcgcgctgtggctgcgcaccaccgagctgggcaccggcgacgacaaagaccgcgtgatgcgcaagagcgagggcggctatacctacttcgtgcccgacgtggcctatcacaaggtcaagtgggagcgcggctttcaccacgcggtcaatatccagggcagcgaccaccacggcaccgtggcgcgcgtgcgcgccggcctgcaggggctggccggcatccccaaggatttcccggcctacgtgctgcacaagatggtcaaggtgatgcgcggcggcgaggaggtcaagatttccaagcgcgccggcagctacgtcaccatgcgcgacctgatcgactgggtcggccgcgacgcggtgcgctatttcctgatccagcgccgcgccgatacggagttcgtgttcgacatcgacctggccctgtccaagagcgacgagaatccggtctactacatccagtacgcgcacgcccgcatctgcaccatgatcggcaattcgggcgcgagcgccgcagagatcgcgcaggccgacacggcgctgctgaccgcgccgtccgaatacgcgctgctgcagcgcctggccgagtttccccaggtggtggcgctggccgcgcaagagctggcgccgcaccacgtggcgttctggctgcgcgattgcgcctccgacttccacgcctggtacaacgccgaacgggtgctggtcgacgaaccagccctgaagctggcgcgcctgcggctggccgcgaccacgcgccaggtgctggccaacggcctggccctgctgggcgtctcggccccggaccggatg

SEQ ID NO: 14933 - DNA, 783 bp, Bordetella pertussis
atgggctttctcgccggcaagcgcatcctcatgaccggggtgctttccaaccgatccatcgcctacggcatcgcgcgcgcctgccgcgaccagggcgccgacctggcgttcacctacgtgggcgaccgcttcaaggaacgcatcaccgaattcgccgcctcgttcggcagcgacatcgtgctgccctgcgacgtggccgaggacagccagatcgacgccgccttcgccgaactgggcaagcgctgggacggcctggacggcctggtgcacgccatcggcttcgcgccgcgcgaagcgatcgccggcgacttcctcgacggcctgtcgcgcgagaactttcgtatcgcgcacgatatctcggcctacagcttcccagccatggccaaggcggcgctgccgctgatggaaggccgcaagggctcggtcctgaccctgagctacctgggctccgagcgcgtggtcgccaactacaacaccatgggcctggccaaggcctcgctggaagccagcgtgcgctacctggccaccgccctcggcccgcgcggcatccgcgccaacgccatctcggccggccccatcaagacgctggccgccagcggcatcaaggacttctcgtcgatcctgaagttcgtcgaagccaacgccccgctgcgccgcaacgtcaccatcgaagacgtcggcaacgtcgccgccttcatgctgtccgacctcgccgccggcatcaccggcgaaatcacccacgtcgacgccggcttctcgaccgtcgtcccgggaatggaaaac

SEQ ID NO: 14934 - DNA, 1390 bp, Bordetella pertussis
gcggcgaacctggggctggcgcagttctgctaccaagcctatggccagcgcttcaacttcggttttgcctacagcatcctgacgacgaactacgacgagaccgtccagctgctcacccagcactggcgctcggccgcgctgaccctggcggtgctggcgctgctgctgtgggtggtgcggcgcgccgcgcacgaattgcccacgcgctggctggccttgggcgcggccgccaccgcgctggtctttttcggctcgtggctgcgctatgagctggcgatgcgcggcgcggcggacgagtactacccatcgatcgaacgcacggtttcgcgttcgccgatgttcaacatgcgctatttcatccaggccagctacgaccagtcgctgctcgacacggcgggcaggcaccgcgtcacccacgcgctgacccggcgcgacaccggcatcgacacctatgtcgtcgtggtgggcgaatcggcgcggcgcgccaactgggggctgtacggctacgcgcgcgacaccacgccgcgggcggcggccgaacgcgaccgcatgacgctgtacacccaggccgccgcgcccgcgccgctgaccatcatggcggtgccgctgaccctgagcgcggccacggtggacagctacgacccgcggctattcggcgacaacgtggtggcgctggccggcgacgcagggttccgcacttactggctgagcaaccaggccaggctgggccgctacgacacgtccgtcacggccatggccaacatggcccatttcaagacctgggccgacgcgccgtacgacgaggccctgttgccgctgctggacgcggcgctggccgagccgggcaggaaagtggtcttcctgcatatcaatggcaatcacgacaactactgcacgcgctacccggaaacggccacggtgtaccagggcggcgcgccctacgaggactgctacgacaattcgatccgctatgtggacgcgctgctgggcgcggtgatggaccggctgcgcgagcggcgcgcctccttgctgttctaccccgaccacggcctggagcgccacgagagcgtgctgggcacgttctatcacggcggcgtgcggccctcgcgcgaggcattcgatattcctatgttcatctggaacagtcccgccgcgccggccccggcacggcgcgaatacgacgcgccctattccaccgaggacaactatgggttgatcctggactggctgggcgtggcgaccggcgtggacgattgcaagcaccgtcccgccgccccggcttgcgcgggccggccggtacgggtgatcgacgccaagcgcgacgtttatgcatacgccgacctggcgccgcacccggacggccgccgcccggccacgcccccgcgggtgg

SEQ ID NO: 14935 - DNA, 3489 bp, Bordetella pertussis
atgtccgaagccgtaacaaacccgcccccatttgtacatttgcgcgtccattccgagttctccgtctcggatggcatcgtgcgcatctccgatctgatcaagcgcgtggccaagctgggccagccggccgtggcgctgacagacctgtcgaacatcttcggcctgatcaagttctacaagggcgcgcgcggcgccggggtcaagccggtggccggcagcgatgtctggctgaccaacgacgatgaccgcgaaaagccgttccgtctcctgctgctggtgcgcaaccaccagggctacctcaacctgtgcgagctgctgacgcgctcgttcctggagaatcagtacaaggggcgcgccgaggtgcgccgcgaatggctgcagggccaggaagggctgatcgtgctgtcgggcgcgcgcggcggcgacgtcggccaggcgctggaagccggcaatgccgtcacggcgctgtcgctggcgcgccagtggggccagctgtttccgggttcgtactacatcgaattgcagcgcgccggcttcgacggcgacgaaacctatacccaggccgccatgcggctggccgccgaggcggggctgccggtggtggccacccatccggtgcagttcctggaccgcgacgagttccaggcgcacgaggcgcgcgtgtgcatcgccgaaggcgagatcctcgccaatccgcggcgggtgcggcgctacacgcaggaccaatacctgctcagttccgaggaaatggcgcgccgcttcgccgacgtgccctcggcgctggccaatacggtcgagatcgcgcggcgctgcaacctgaccctggtgctgggcaagccgcgcctgccgaacttccccacgccggacggcgtgacgctggacgactacctggtccagctgtccgaggaaggcctggaaaagcgcctgcagttcctgttccccgacgaggccgagcgcaacgccaagcgcgaccagtactacgaacgcctgcgctgggagtgcaagaccatcatccagatgggctttcccggctacttcctgatcgtgcaggacttcatcaactggggcaagaacaacggcgttccggtcgggccggggcggggctcgggcgccggctcgctggtggcctacgcgctgggcattaccgacctggatccgatccgctacgacttgctgttcgagcgcttcctgaatccggagcgggtgtcgatgcctgacttcgatatcgacttctgccaggacaaccgcgaacgggtcatcgactacgtcaagatgaagtacgggcgcgaggcggtcagccagatcgccaccttcggcaccctgggcgccaaggcggtggtgcgcgacgccggccgcgtgctggacatgccctacctgttctgcgatgccctgtccaagctgatcccgttcaacccggccgacccgtggacgctggagcgcacgctcaaggacgagccggccttcaaggaccgctacgagcaggaagaggaagtgcgcgccctggtcgacctggcgcgcccgctcgaaggcctgacgcgcagcatcggtatgcacgccggcggggtgctcatcgcgccgggcaagctgaccgatttctgcccgctgtattgccagcccggccaggagaacagcgcggtctcccagttcgacaaggacgacgtcgaggcggccggcctggtgaagttcgacttcctgggcctgcgcaacctgaccatcctggactgggcggtgcgcttcgtgcgccagttcaatgccgacaagcgcgacttcgacgtcatggccctgtcgctggacgaccaggccgcgtacaaggtgctgtgcgacgccaacacgaccgcggtgttccagcttgaatcgcgcggcatgaaagagctgctcaagaagctgcgccccagcactttcgaagacatcatcgccatgctggccctgtaccggccggggccgctcgaatccggcatggtggacgatttcgtcaaccgcaagcacggccgcgccgcggtcgattatttccacccggacctggaaggcaccctgcgcagcacgtacggggtcatcgtctaccaggaacaggtgatgttgatctcgcagatcatcggcggctactcgctgggcggcgccgacctgctgcggcgcgccatgggcaagaaaaagcccgaggaaatggccaagcaccgcgaactgttcgagcagggcgcgcgcgagaaggggcatgatcccgacctggcggtcaagctgttcgacctgatggagaagttcgcgggctacggcttcaacaagtcgcactcggccgcctatgcgctgatcgcctaccagaccgcatggctgaaggcctaccatcccaccgagttcctggccgccacgctgtcgtccgacatggacgataccgacaaggtgcagatcttcgtgcgcgacgcccaggacaacggcgtcgaggtgctgccgcccgatgtcaacgcctcgggctatcgcttcgaaccggtggcggacaagcacaccgagcagggcaaaccgccgcgcaccatgcgctacggcctgggcgcggtcaaaggcaccgggcagggcgcggtcgaggaaatcctgcgcgcgcgccaggagggcggcccgttcgccaatctgttcgacttctgccgccgcgtcagcaagcacgcggtcaaccggcgcaccatcgaggccctgatcaaggccggcgcgttcgataccatcgaacccaaccgcgccgccatgctggtctcggtcggtacggcgatggaggcggccgagcaggccgcgcgcagcgccaaccagtcgtcgctgttcggcgacgacagcggcgacgtggtcgccggcgagctgaccaaggtcgcgccctggaacctgcacaccacgctaaccgaggaaaagacggcgctgggctattacttcagcggccacctgttcgacgcctggcgcgacgaggtgcgccgcatcgtgcccatgcagctggcgcgcctggagccgcagcgcgacctgcaatggatgtgcggggtgctggccggcgtgcgcaccatgatgacgcggcgcggcaagatggtgttcgccgtgctcgacgacggcacggcgcagatcgagatctcggtgttcaacgagctgtacgagaagcaccgcggccgcctgcgcgaagaccagttgctggtggtgcagggcaaggtcagcaacgacgagtactccggcggcatgcgcatcgtggccgagcagctgtacgacctgcagctggcgcgcgaggcgcgcgccaagtcgctgcgcatccggctcaacggccaggccgacgcggcgcgcctgcgccagctgctcaacccgttccgggccgagcccgagaacggcgtgcccggcgtgccggtcgacgtggtctaccgcaggaacaatttcctgtgcacggtgcggctgggcgaagactggcgcgtgcgcatggccgacacgctgctcgagaacctgaacgactgggccaagcccgacggcgtcgaggtcacctac

SEQ ID NO: 14936 - DNA, 1065 bp, Bordetella pertussis
atgggggcgggtttgttacggcttcggacatgtccggaattgtacccagtcggggcagccgccggcacgatttcgccccccttccgggcccgctgggcagccgcctgtgtaacaatacctgattaccgatttatcccacggatgccgcaacgacgtcctctgcgcaccatgaaatggctgatcccgggcctatggctggcctctatcctgtttgcccacttccgcggccgcgtgcggctgtcgctgtcgcgccagatgctggaccactccgtgctgctggcgccggtcaatgccttcatggtgctgacctcgcgcgtgcccaccaccccgtacctgaccaccagcgaaatccccgagctgaaggtgctggacgacaactgggaaaccattcgcgatgaagccctgaaaatggccgagctgcgccgcatcaaggccgccgagcgccatgacgacatcggcttcaactcgttcttcaaatatggctggaaacgcttctacctgaagtggtacgacgcccgccacccctccgccgaggagctctgccccaagaccgtggccatcctcaagagcctgcccaaggtcaaggcggccatgttcgccgagctgccgccgggcggcaagctgaacccgcaccgcgaccctttctcgggatcgctgcgctaccacctgggcctggccacgcccaacgacgatcgctgctacatcgccgtcgacggcgaaagctacagctggcgcgatggcgaaagcgtggtgttcgacgaaacctatgtgcacgaagcgcacaacaagagcgaaggcaaccgcatcatcctgttctgcgacgtcgagcgtccgctcaaatggcgctgggccgaggccttcaaccgctggttcggccgcgtggtcatgtcggccgccagctcgcccaacgacgccggcgaccagaccggcgccatcaacaagctgacccacgcgcactgggtcatcgaccagaagcgcaagcagttcaaggcctggaaccgcaccgtctacaaagccaccaagtggggcctgatcgccctggtggccatcggcttcctggcactc

SEQ ID NO: 14937 - DNA, 1761 bp, Bordetella pertussis
atgacccacgccccgacgccgcctgccgccagcaatttcctgcgcccgatcatcgaagacgacctgcaagcgaaccgcttccagggcaaactgtgggccggcaaacccggcccggccgcgctgcaggcacagggacagcccgacccggcgcgcatccgcacccgctttccgccggagcccaacggctacctgcacatcggccacgccaagagcatctgcgtgaacttcgggctggcgcgcgactacggcggcgtctgccacctgcgcttcgacgacaccaaccccgagaaggaagagcaggagtacgtcgacgccatcatcgaggccgtgcattggctgggcttcgattggcaggccgatggcaatgacaacctgtatttcgccagcgactacttcgaattcatgtacgagttcgccgaggcgctggtgcaggccggccacgcctacgtcgacgagcaaagcgccgaagagatccgcgccagccgcggcacgctgaccgagccgggcaccgactcgccatggcgcgaccgcccggccgacgagtcgctgctgcgcctgcgcgagatgcgcgacggcaagcatcccgacggcagcctggtgctgcgcgcccggatcgacatggcctcgcccaacatcaacctgcgcgacccggtcatgtaccgcgtgcgccatgccacccaccaccgcaccggcaacgcatggtgcatctacccgatgtacagctgggcccatccggtggaagacgccctggaaggcatcacccacagcatctgcacgctggaattcgaagaccagcggccgttctatgactggatcctggcgcgcctggccgagctgggcaagctggcgcgcccgctgccgcaccagtacgagttcgcccggctgaacctgacctacgtggtcaccagcaagcgcaagctgctgcaactggtgcgcgaaggctacgtggatggctgggacgacccgcgcatgccgacgctgttcggcctgcgccggcgcggctacacgccgtcctcgatccggctgttctgcgaccgcaccgcggtatcgaagtcggattcgcgcatcgactacagcctgctcgagcaggcggtgcgcgacgacctcgacccggtggcgccgcgctcggtcgcggtgctggacccgctcaagctggtgatcaccaattacccggaaggccgcagcgagacctgctcggccccgcgcaacccgcacgatccgcaggccggcgtgcgcgaattcccgttcacgcgtgagctgtggatcgagcaggacgacttccgcgaagagccgcccaagaagtacttccgcctgtttcccggcaacacggtgcggctgaagtacggctacgtggtgcgctgcaccggctttaccaaggacgaatcaggcaaggtcgtggaagtgcaggccgaatacctgccggacaccaagagcggcacgccgggcgccgacagcgtcaaggtcaagggcaatatcacctgggtgagcgcggcccacgccgtaccggcccaggtacacctgtacgaccggctgttcgccgacgcgcatcccgacggcggcgacaaggacttcctggcctgcctgaaccccaattccaagcagaccgtgcaggcctggctggagccgggcatcgaggccgtccctggcgccacgtggcagttcgagcggctgggctatttcacggtggacagcaaggactcccgccccgaggcgccggtcctgaaccgcatcgtgaccctgcgcgactcctggcaggcggcc

SEQ ID NO: 14938 - DNA, 1618 bp, Bordetella pertussis
atggcccaatacgtctacacgatgaaccgtgtcggcaagatcgtgccgcccaagcggcagatcctgcgcgacatctccctttccttttttcctggcgccaagatcggcgtgctgggcctgaacggctcggggaaatccacgctgctcaagatcatggccggcgtggacaaggaaatcgaaggcgaagccatccccatgccggggctgaacatcggctacctgccgcaggagcccgaactcaaccccgaacatacggtgcgccagtcggtggaagagggcctgggcgccgtcttcaacgccaagcagcgccttgacgaggtctacgccgcctacgccgagccggatgcggatttcgatgccctggcggccgagcaggccgagctggaggccgtcatcgccgccgccgcgtccagcggcgccgacgatatcgagcaccagatggaaatcgccgccgacgccctgcgcctgccgccctgggacgcgatggtggtcaagctgtcgggggggcgaaaaacgccgcgtggcgctgtgccgcctgctgctgtccaagcccgatatgctgctgctggacgagcccaccaaccacctcgacgcggaaagcgtggagtggctggagcagttcctgcacaagttccctggcaccgtggtggccgtgacccacgaccgctacttcctcgacaacgcggcggagtggatcctcgaactggaccgcggctacggcatcccctggaaaggcaactacagttcctggctggagcagaaggaagaccgcctcaagcaggaagaggccaccgagtccgcgcgccagaagaccatcaagaaggaactggagtgggtgcgccagaaccccaagggccgccaggccaaggccaaggcgcgtatcgcccgcttcgaggagctgtcctcgtacgaataccagaagcgcaacgaaacccaggaaatcttcattccggtgggcgaccgcctgctgatcgacgacctcagcttcaaggtgccggccggcgccatcgtcggcatcatcggccccaacggcgcgggcaagtccacgctgtttcgcatgctggccggccgcgagcagcccgattcgggcgaagtgaagctgggccagacggtcaagctggcctacgtggaccagtcgcgcgattcgctcgagggcaacaagactgtgttcgacgcggtggccgacggcgccgacctgctgaccgtgggcaagttcgaaatgccctcgcgcgcctacctgggccgcttcaacttcaagggcggcgaccagaacaagatcgtcgggcaattgtccggcggcgagcgcggccgcctgcacctggccaagaccctcatcgccggcggcaacgtgctgctgctggacgaaccgtccaacgacctggacgtcgaaacgctgcgcgcgctggaagacgcgctgctcgagttcccgggcagcgtcatggtgatcagccacgatcgctggttcctggaccggatcgccacccacatcctggcgttcgagggcgattcgcaagtggtgttcttcgacggcaactaccaggagtacgaagccgacaagaagcaccgcctgggcgaggagggcgccaagcccaagcgcctgcgctacaaggccctcaag

SEQ ID NO: 14939 - DNA, 822 bp, Bordetella pertussis
atggtggtaaccaaaatggcggccgacgtgatcgcgccagcctccatcggtttctaccgctgggtgctggccggcctgctgctggcgccgttcgccctgcccggagtgctgcggcaatggccgcagatccggcccaacctcggcaggttggcggtcctgggcggcctcggcatggccttgtaccagggcctgatgtacgtggcggcgggcacgaccaccgccaccaacatgggcatcatcaccgccatggttcccttgctgacggtcgtggtcggctcgctggtgctgcgcgaacggccggcgctcaccgccatcctcggcgccgtggtctcgctcgcggggctgggcatcctgctgggcgagggcaatccgctgcgcctgctggcgctgggcggcagccgcggcgacgcgctgatggggctggcggcgctggcgtatgcgctctacggcgtgctgttgcgcaagtggccgatgtcggtcgggccgtggcagtcgctgttcgtgcaggtgctgttcggcattgtgttccagttgccggcattcctgctgacgccggcctcgtccctgaatgcgcagaacatcccgctggtcctgtatgcaggcattttcccgtcgctgttcgcgccatttctgtggatgcagggggtgcgctacctgggacccaaccgggccagcatcttcctcaacctgatgccggtcgtcacggtcgccatcgccgccgccttcctgggcgaaacgccgcacctgtatcacattgccggcggcctgatggcgctggccggcgtcagcctggcccagtggcgccccgcgcggcgccgcgcc

SEQ ID NO: 14940 - DNA, 1062 bp, Bordetella pertussis
atgttcgtatgtaaaacacaaagatttttctggctgcgacacaggaaggcaccctacggaagagacgcccggcctgccggacgccgccgggcagcccgagacacgccgcggcttcatccgagtgagcatgcaatggataaccccatccagaatctggcggtcgtcggcgcgggcgccatgggcagcggcatcgctgccctgttcgcctccaagggcttcgacgtggtgctgatcgacccgatggaaggcgcactgacgcgcgccgcccaggtcatcgaacggcaactgggcgtgtacgcgccggacgccatcgcgccggccatgcagcgcatccgcatggacgccggcctggaagcggcctgttcggcgcagctggtgatcgaggcggtgccggaaaaactggcgctcaagcgcgacatcttcgcccggctcgacaccctgtgcgatccgcaggccatcttcgccaccaacacttccggcctgtcgatcaacgacatcgcccaggccgtcacgcgccgcgaccgcttcgtcggcacccacttcttcacgccggccgatgtgatcccgctggtggaggtggtgcgcaacgacgatacgtccgagcagaccgtggcgcgggtcatggacatgctgcgcgccggcggcaagcggccggtgctggtacgcaaggatattcccggcttcatcgccaaccgcatccagcacgccctggcgcgcgaagccatctccctgctggaaaaaggcgtggcgagcgccgaggacatcgacgaagtcgtcaagtggagcctgggcatccgcctggcgctgtccggcccgctggagcagcgcgacatgaatggcatcgacgtgcactacgcgatcgccagctatctctaccaggatctcgaaaaccgcaccacgccgtccgaactgctcgagaacaaggtgcaggcaggcgaactgggcgccaagagcggccagggcttctatgcctggccgcccgagcgccgcgagcgcgtgctgcgcgacaagagcgccgcgctggccgaactggccgcctggctcgagaacagaaagccggtt

SEQ ID NO: 14941 - DNA, 807 bp, Bordetella pertussis
atgaaggggcccaacaagtcgttgcggatgctggtgctgggcctcgggtacttcttcctgtacgtgcccatcatcagcctgatggttttctcgttcaacgattcgccggtggtgacatcctggaccggattctcgctgcgctggtatggctcgctgctcgaggacagcgccttgctgcgcgccgcctggctgtcgttcaagatcgccgtcctgacggccaccgccgccaccatcatcggcacctgggccggctacgtgctggggcgcatgggccgctttcgcggcttcacgctgtacgtgggcatgctcagcgcgccgctggtcattcccgaggtcgtgctgggcatctcgctcttgctgatgttcgtcgagatgcgtggccacctgggctggccggagcagaacggcgtgttcaccatctgggtgggccacgtcacgctgtgcatggcgttcgtggcggtcgtggtccagtcgcgcatccgcgacatggaccgctcgctcgaagaggccgcgctcgatctgggcgccacgcccatcaaggtatttttcgcgatcacgctgccgctgatcgccccggcgctggtgtcggcctggctgctggcattcacgctttcgctggacgatgtggtgatcgcgtcgttcctgtcggggccggggtcgtcgaccctgccgatggaggtgttctcgcgcgttcgcctggggctcaagcccgagatcaacgcgctggccaccctgttcatcctggcggtcggcacctgcgtgatcatcgccaaccggttgcagtggcgcaaggaggccgataaccga

SEQ ID NO: 14942 - DNA, 423 bp, Bordetella pertussis
atgacgacgacccgcgtccagccgatttccgagccgctggacacctccaagaccgttttcgacatgctcggcggcgagcccggcgtgcgcgagctggtcgaccggttctacgacctgatggacatggagtccgactttaaggcgctgcgcgatgcccatggccccagcctggagcaggcgcgcgacaagctgttctggttcctgtgcggctacttcggcggtccggaccactatatcgagcgcttcggccatccgcgcctgcgcgcgcggcacctgccgttctcgatcggggagatcgagcgcgaccagtgggtggcgtgcatgggccgcgccatgcaggaccagcaattgcccgcggccctggtcgatcgcctgctgcaggccttctacggcacggccgactggatgcgcaaccgtgccggc

SEQ ID NO: 14943 - DNA, 972 bp, Bordetella pertussis
atggccgaactccgatttgcccacgccatcaaccgcgcgctggccgagtgcatggaagaggatcccatggtcttcctgttcggcgaggacatcgccgaggccggcggcccgttcggcgtgacgcgcgggctgcacgacaggttcggttccgaccgcatccgcgacacgccgatctccgaggccaccatggccaacgccgcggtcggcgccgcgctgtcgggcctgaagccggtgctggaaatcatgttcatggacttcatgacgctgaccatggacgcgctggtcaaccaggccgccaaggcgcgcttcatgttcggcgggcaggcttcggtgccgatggtggtgcgcaccccgcacggcggcggcatcagcgccgggccccagcactcgcagtgcctggaggcgtggttcgcgcacatcccgggcctgaaggtggtctgcccgagcaatccggccgacgcctatggcttgctgaagtccgccatccgcgatcccgatcccgtggtgttcgtggaaaacaaggcgttgtacgccgccaagggcgaggtgcccgacgacgtcgggccgatcccgctgggccaggcgcgcatcgcgcgcgccggccgcgacctcaccgtggtgagctacggcgccatggtgcacaaggtggagcgcgccgccgaggcgctggcgcgcgacgggatcgaggccgaggtgctggacctgcgcagcatccagccctgggacgaggcggccgtgctggcttcgctgcggcgcacgcaccgcctgctgatcgtgcacgaggccgtggaggccttcggcgtgggggcggagatcgccgcgcgcatggccgacatcggtttcgacgaactggatgcacccatcgtccgcgtggccgcgcctttcgtgccggtgcccttcgcgccgtcgctggaagcgcaataccagccgcaggaggccgacatcatcgccgcagcccgcaagctgtgcgcc

SEQ ID NO: 14944 - DNA, 969 bp, Bordetella pertussis
gtggcacgcgccaataaagaacagttgctcgatgcgtaccagcgcatgctgggcatccggctggtggagctgcggctcggacgcttgttcgccgacggcgaagtgcccggcttcatccacctcagcgtcggccaggaggccgtggcggccgcgatgggcatggtgctgcggccggacgatacggtcgcctcgacccaccgcggccacggtcacgcgctggccaagggcatcgacatggacgatttcttcctcgagctgatggcgcgcgaagagggcatctgcaaggggcggggcggctcgatgcacgtggccaacatgtcgatcggcatgctgggcgccaacgccatcgtcggcgccagcattcccatcgcgctgggcagcgcgctggcgcaccaggtgcgcaagaccgatgcgctggcggtggccttcttcggcgacggcgcgatggccgagggggggctgcacgaaagcctgaacctggccgcgctgtggcagctgccgctgctcttcctgtgcgagaacaacggctgggccgagttttcgcccacccacaagcaattcgtcgcgccgctggacaagctgtcggcggccttttcgattccgcacgccaaggtcgacggcaacgatgtgctggcggtcatggacgcggcgcaggccgccgtggccgacatccgcgccggcaaggggccgcgcgtgctcgagtgcatcacccaccgctggcgcggccactacgagggcgacccgcagaagtaccgcgacagcgacgagatctccggcctggacgaacacgacccggtggcccgcttcgaggcggtgctcgacagcaagggcgtgagccaggcgcaacgccagaaagtgcgcgacgcggtccaggcgcaggtcgaccaggcggtcgagcgggcccgcaagggccgcccgccggtgtgggaaactgcccgcaccgatgtctacacccaagccgaggctcgc

SEQ ID NO: 14945 - DNA, 1308 bp, Bordetella pertussis
atgaacctgtctgacaaaaaagccacgctatccttttcggacggcagcgctcctatcgaattcccagtctacaagggtacggtcggcccggacgtgatcgacatccgcaagctgtatggccagacgggtatgttcacgttcgaccccggcttcatgtccaccgccgcctgcgcctcgggcattacctacatcgacggcgacaagggcgaactgctgtaccgcggctatcccatcgagcagctggccgtcaattgcgacttcctcgacatctgctacctgatcctcaacggcgagctgcccaacggcggccagaagcaggatttcgactcgcaggtgacccatcacacgatggtcaacgagcagctgcatttcttcctgcgcggcttccgccgcgacgcgcacccgatggcggtgctgacgggcctggtgggcgcgctgtcggccttctaccacgactcgaccgacatcaccaacccgcaccatcgccacgtctcggccatccgcctgatcgccaagatgccgacgctggtcgccatggcgtacaagtattcgcaaggccagccgttcatctatccgcagaatgacctgtcgtacaccggcaacttcctgcgcatgatgtgcgcgaccccgtgtgaagagtacaaggtcaatgacgtcgtcgagcgcgcgctcgatcgcatcttcatcctgcatgcggaccacgagcagaacgcttcgacctcgacggtgcgcctgtgcggttcgtcgggcaccaatccgttcgccgccatcgccgccggcgtggcgtgcctgtggggcccggctcacggcggcgccaacgaagcctgcctgcagatgctcgaagaactgcaggccaacggcggtgtggccaaggtcggcgagttcatggaaaaggtcaaggacaagaactcgggcgtgcgcctgatgggctttggccaccgcgtctacaagaactacgatccgcgcgccaagctgatgcaggaaacgtgcaaggaagtcctggtggcgctgggcctggagaacgacccgctgttcaagctggccatggaactggagcgcatcgccctggaagacgactacttcgtgcagcgcaagctgtacccgaacgtcgacttctactcgggtatcgtgcaacgcgccatcggcatcccgacctcgctgttcacggccatcttcgcgctggcccgcacggtgggctggatcgcccagtggaacgaaatgctgtccgaccccgactacaagatcggccgtccgcgccagctgttcaccggttcggtcacgcgcgacgtgcccggcatggacaagcgc

SEQ ID NO: 14946 - DNA, 1764 bp, Bordetella pertussis
atgaattccttgccgcgccgccagtttgatgtggtggtggtcggcgccggcggagccggcatgcgctgttcgctgcaactggcccaggcgggcctgtcggttgcggtgctgtccaaagtgttcccgacccgttcgcacacggttgccgcgcaaggcggcgtgagcgcgtcgctgggcaacatgagcgaagacaactggtactggcatatgtacgacaccgtcaaggggtcggactggctgggcgaccaggatgccatcgagttcatgtgccgcgaggcgcccaatgccgtgtatgagctcgagcacttcggcatgccgttcgaccgcaacgccgacggcaccatctaccagcgtccgttcggcggccatacggccaatttcggcgagaagccggtgcagcgcgcctgtgccgccgccgaccgtaccggccacgcgctgctgcacacgctctaccagcgcaacgtcgccgcccgtacccagttcttcgtcgagtggatggcgctggacctgctgcgcaacgaagccggcgacgtgctgggcgtgaccgcgctcgaaatggaaaccggcgagatctacgtcctggaagccaagaccacggtgctggccaccggcggcgccggccgtatctgggccgcttccacgaacgccttcatcaacaccggcgacggcctgggcatggcggcgcgcgcgggcatcccgctgcaggacatggagttctggcagttccacccgaccggcgtggccggcgcgggcgtgctgatcaccgaaggcgtgcgcggcgaaggcggcatcctgctcaacaaggatggcgagcgcttcatggagcgctacgcgcccacgctgaaggacctggcgccgcgcgacttcgtgtcgcgctcgatggaccaggaaatcaaggaaggccgcggctgcggtcccgacggcagctacgtggtgctgaagctggatcacctcggcgccgacgtgatcaacaagcgcctgccgtcgatccgtgagatcgccatcaagttcggcaacgtcgacccgatcaaggaaccgatccccgtcgtgccgaccatccactaccagatgggcggcattcccgccaactaccacggccaggtgctcgagcgcgccaacggcgagaacaagatcgtcaacggcctgtacgccatcggcgaatgcgccgcggtgtcggtgcacggcgccaaccgcctgggcaccaattcgctgctggacctgatcgtcttcggccgtgccaccggcaaccatatcgtcgactcgcatcccgagcgccagcacgcccaccagccgctgcccaaggaagccgtcgaccggtcgctggcgcgcgtcgacgagctggagtcgcgcacttcgggcgagaagacccaggacgtcgccaacgccatccgcatgtcgatgcagcgccattgcggcgtgttccgcacgctggagctgctcaacgagggcgtgggccagatcgaagacctggcgcagacggcccagcacatctacttcaaggacaagtcgaaggtgttcaacaccgcgcgcgtcgaggcgctggaactggccaacatgaccgaggtggcgcgcgccaccatcaagtcggccgccaaccgcaccgaaagccgcggcgcgcatgcgctgaacgaccatcccgagcgcgacgacgtgaactggctcaagcatacgctgtggtattcggaaggcagccgcctcgactacaagcccgttcagatgaagccgctgacagtggaatccttcccgcccaaggctcgtactttc

SEQ ID NO: 14947 - DNA, 855 bp, Bordetella pertussis
atgtttgcccggacggccatcgcgccgcccttcgccgcgatggcggccgggcggataccgaacacacacgactccgacatggcagaagcacggcccgattccctcacgcgttcgcgtgccgcaaaaccggcaggcgagggggccgctttcagtccgctttaccgccagatcaaggaactgctggtccagagcctggaccgcggcgaatggaaacccggcgaactcattcccagcgagatcgacctggcggcccgtttccaggtcagccagggcaccgtgcgcaaggcggtcgacgaactggccgccgagcatctgctgctgcgccgccagggcaagggcacctttgtcgccacccatcacgaagcgcgcgtgcgctatcggttcctgcgcctggcgcccgacgaagagggcgagggcgggcgggccgaaagccgcatcctcgaatgccgccgcctgcgcgcgccggccgagatcgcccgcgccctcgagctgcgggccggcgagaccgtggtgaccatacggcgccagttgtccatgaaccacatgccgacggtcatcgacgatctctggttgcccggcacgcattttcgcgggctcaccctcgaactgctgaccgccagcaaggcgcccctgtatggattgttcgagtccgaattcggggtcagtatggtccgagccgacgaaaaactgcgcgccgtcgccgcctcgcctgaaatcgctccgctcctgggtgtcgagcccggccggcccttgctgcaggtcgatcgcatttcatatacctatggcgatcggcccatggaagtgcgccgcggcttataccttaccgatcattaccactaccgcaatagcctgaat

SEQ ID NO: 14948 - DNA, 852 bp, Bordetella pertussis
atgcagcacaacgactacatcctgaccctgtcctgccccgaccgcaccggcatcgtgttccgcgtcagcggcctgctgttcgaactggggtgcaacatccgggattcgcagcagttcggcgacgaagagacggggcgcttcttcctgcgcgtgcacttcgacctgccgcgcgcagcggccgaaagcgcgctgcgcgagcagttcgcggcgctggccaacggctacgacatgcaatggcagatccacgacgcgcatcgcaaggcgcgcctgctcatcatggtgagcaagcagggccactgcctgaacgacctgctgtttcgcgtcagcagcggccagctgcgcgccgaagtggccgccatcgtgtccaaccacaacgactatgccagcctggcggcgtcatacggcatcccgttccaccatatgcccgtcacgcccgacaccaaggccgcgcaggagcgccaggtgctggagctggtggaacgcgagcagatcgacctggtggtgctggcgcgctacatgcagatcctgtcggccgacatgtgccaggcgctggccgggcgcgccatcaacatccaccacagcttcctgcccagcttcaagggcgcgcgcccctatcaccaggcgcacgcgcgcggcgtcaagatcatcggcgccaccgcgcactacgtgacctccgacctggacgaaggccccatcatcgagcaggacatcgagcgcgtggaccacaccatgacggccgccgacctgacccaggtgggcagcgacatcgaatcgctggtgctgtcgcgcgcggtacgcagccacgtcgagcaccgcatcctgctcaaccgcagcaagaccgtcgtgttccgc

SEQ ID NO: 14949 - DNA, 1200 bp, Bordetella pertussis
atgagcacctcgcagaaaaagcccaccgtccaacagaagaaacccgccgcccagcccgcggagaaggctgcgttcaaacccaagaaatcggttgcgctgtcgggcgtggtcgccggcaacaccgcgctgtgcaccgtcggccgtaccggcaacgacctgcactaccgcggctatgacatcctggacttcgccggcagcgcggaattcgaggaaatcgctcacctgctggtgcacggaaagttgccgaacaaggccgaactgaaggcctacaaggaaaagctgcgcgcgctgcgcggcctgccggcgcaattgcagaacgtgctggaatgcctgccggcctccagccaccccatggacgtcatgcgcaccgccgtctcggtgctgggctgcgtgctgcccgagaaggacgaccacaacaccccgggcgcgcgcgacatcgccgaccggctgatggccaacctgggctcggccctgctgtactggtaccactacagccacaatggccgcatcatcgatgtccagaccgacgacgacagcatcggcggccacttcctgcacctgctgcatggcgccaagccgtcggacgagtgggtgcgcgccatgcacacctcgctgatcctgtacgccgagcacgaattcaacgcctcgaccttcaccggccgcgtcatcgccggcacgggctcggacatgtattcgtccatcaccggcgccatcggcgcgctgcgcggccccaagcacggcggcgccaacgaggtcgcgttcgaagtccagaagcgctacgagacgcccgacgaagccgaggccgacatccgccagcgcgtcgagaacaaggaagtcatcatcggcttcggccacccggtctacacggtttccgacccgcgcaacaaggtgatcaaggacgtcgccaagaagctgtccaggaaggcgggcagcaccaagatgttcgatatcgccgagcgcctggaaacggtcatgtgggacatcaagaagatgttccccaacctggactggttctccgccgtgagctaccacatgatgggcgtgccgacggccatgttcacgccgctgttcgtcatcgcgcgcacggccggctggtcggcccacatcatcgagcagcgcatcgacaacaagatcatccgcccgacggccaactacgtcggaccggaagaccagacctacgtccccatcagcaagcgcgcc

SEQ ID NO: 14950 - DNA, 489 bp, Bordetella pertussis
atgaacggcagcccggcttccaccctggcatacgtcggcctgggagccagcctgggcgacgcggccgccacgctgcgcagcgtgcttgccgaactggccgccgcgccaggcatcctcgcctgcaaggcttcgcgcctgtaccggacggcgcccgtcgaggcccagggccccgacttcgtcaacgcggtcgccgcgctcgacaccacgctggcgccgctggacctgctggacctgttgcaggcgctggaacagcgccatggccgcgagcggccctaccgcaatgcgccgcgcaccctggacctggacctgctgctgtatggcgaacaggccatcgaccatccccgcctgagcgtgccgcatccgcgcatgcatgaacgcgccttcgtgctggcgccgctgtgcgaactggtccccgccctgcgcctggcgcaaggcgactgcgcggcgctgctggccgcgctggaagaccaggccatcgagccgctgcgc

SEQ ID NO: 14951 - DNA, 1353 bp, Bordetella pertussis
atgattaccgaaaccataagaaaatttgtcggccggctgttcgcgccggccctgcgcggcccacagcgcatcggcgcggaacgccatggcatcgatcgccgcaatgtctcgcgccacgccatcaaagtctgcgacgtcctgcgccagcatggctacgaagcctatatcgtcggcggcgcggtgcgcgacctgatcgtgggcctggagcccaaggatttcgacgtggccaccaatgccacgcccgagcagatccggccgctgtttcgccgcgcccgcatcatcggccggcgcttccagctggtgcacgtggtgttcggccaggaaatcatcgaaacctcgaccttccgcgcgccggcctcggacgaccaggaaaccgacgagcacggccgcatcctgcgcgacaacgtattcggcagccaggaagaagacgcggcgcgccgcgacttcaccatgaacgcgctgtactacgacccgcacaccgaggaagtcatcgactaccaccagggcgtgcaggacctgaaaaagcgccaggtgcgcatcatcggcgatccggtcaagcgctatcgcgaagaccccgtgcgcatgctgcgggcggtgcgcttcgccgccaagctgaacggcagcatcgataccgccacgcggcagccgatccgcaccatggccagcctgatcgagaacgtgccggcctcgcgcctgttcgacgaaatgctcaagctgctgacctgcggccacgccatggactgcctgcggcagttgcgcaacgacggcctgcaccacggcctgctgcccttgctcgacgtcgtgctcgagcagcccggcggcgagaatttcgtcgaactggcgctggagcgcaccgatgcgcgcgtgcgcgccggcaagaccatcagccccagcttcctgttcgcggcgctgctgtggcaactggtcgacgtgcgctggaaacagctgcgggcccagggcgagcacaacatccccgcgctggtgcaggccgccgactcggtgctggacgaacagaccgagaaactggccatccagcgccgcttctcgtccgatatgcgcgagatctggttcatgcagccgcgcttcgagcgccgcgccggcaagaccatctaccgcatgctggagcagccgcgctttcgcgccgcctgcgacttcctgcagctgcgcgccgccgccggcgagttcgacagcgtgctggcccagtggtggatggacctggccaatggcgacgatgccacgcgcgccgaaatgatcgaggaaaccgcccacctgccgcgcgaaacgggcgacgcgccggcgcaaaagcgccgccgtccgcgccgccgcccgtccaaccgcccgcgcgaaccgcaa

SEQ ID NO: 14952 - DNA, 786 bp, Bordetella pertussis
atgaacgatattcttgcgaaaatcctcgccgtcaaggccgaggaagtggctaccgcacggcagatgcgcagcgaggccgaattgctgcgcgaagcccaggcgcgccaggatgtacgcggcttcgcccaggccatcgaggacaagatcagccagggcaaggcgggcgtcatcgcggaaatcaagaaagcctcgccttccaagggcgtgctgcgcgaaaacttcgacccggccgagatcgcggcgtcctatgccatgcatggcgcggcctgcctgtcggtgctgaccgacgtgcagttcttccagggctcgcacgacaacctgcgccgtgcgcgcgcggcctgctcgctgcccgtgctgcgcaaggacttcatcatcgatccctaccagatcatttcggcgcgcgccatgggcgcggactgcgtcctgctcatcgtcgcgacgctggcgccggcgcagttgcgcgacctggaaaccctggccatcgacctgggcatggacgtgctggtggaagtacacgacgccaaggaactggacgccgcgctggcgctgcgcaccccgctcatcggcatcaacaaccgcaacctgcgcaccttcgagaccacgctgcagacgacgctggacctgctgccgatgattccggccggcaagcgcgtggtcaccgaaagcggcatcctcaagcccgaggatgtcaggctgatgcgcgagcacgacgtacaggccttcctcgtcggcgaggccttcatgcgcgccaacgacccgggcgtcgaactggcgcggctggtggcc

SEQ ID NO: 14953 - DNA, 1029 bp, Bordetella pertussis
atgaccattgccgccaccgaagcactgacccgctgcatcgaacaccgcgagatcttccacgacgaaatgctgcatctaatgcgcctgctgatgcgcggcgagctgtcgccgcagatcgccagcgcgctgctgatgggactgcgcgtcaagaaggaaaccgtgggcgagatcaccgccgccgcgcaagtgatgcgcgaattcgccacccccgtcgtcacgcccaacccgcaggacctgctggacatgtgcggcacgggcggcgacggcagccataccttcaacatctccaccaccgccatgttcgtggccgccgcggccggcgtgccgatcgccaagcatggcaaccgcagcgcatcctcgtcgtcgggcagcgccgacgtgctggaagccctgggcgcgaacctgcagctcacgcccgaggaagtggccgagtgcgtggccgccaccggcatcggcttcatgttcgcgccggcccaccatggggccatgaagaacgttgccgcggtgcgcaaggagttgggggtgcgcaccatcttcaacatcctggggccgctgaccaaccccgccggcgccgccaaccagctgatgggcgtgttccacccggacctggtgggcatccaggtgcgcgtgctggagcgcctgggctcgcgccacgtgctggtggtgcacggcaaggacggcatggacgaagcctcgctcggcgcggcgaccatggtgggcgaactcaaagatggggtcgtacgcgagtatgagatccatccagaggattacgggctatccatgatgtccaaccgcggcatcaaggtgtccaatcgcgaggagtctcgcgcacttgtcatcgaagcgttggataatgtcgatggcgtggcccgcgacatcgtggccctgaatgcgggcctggccatctacgccggcaacaaggcggattccatccccgaagcgttggccctggcatttgaaacgatttctaacggctcggcccgtgccaagctggaagaattctgcgcatatacccggaaattccagaaa

SEQ ID NO: 14954 - DNA, 912 bp, Bordetella pertussis
atgaccgatctgctcaagaaatacctgttcgaagaccgctccgtccgcatccaggcggttcggctgcatgagacctggctgcaagcccaggtcaaccaccagcacccgcccgccgtcacccgcctgctgggcgagctggtggccgcctcgacgctgctggccgccaacatcaagttcgacggctcgctggtgctgcaaatccagggcgatggcccgctggccctgctggtggtcgagtgtcgctccgacctgagcctgcgcgccaccgtcaaggtccgcgaagggcaatccatccccgataacgggacgatgcaaagcctgctcaatgccaacggcaacggccgcttcatggtggtgctggatccgcaacgcaaggtgcccggccagcaggcttaccagggcatcgtgccgctggaaggcgaaaccgtcgccgaggcgctgggccactacatgaaggcgtccgagcaactggacacgcagctgtggcttgccgccgacgagcagcatgccgccggcctgctggtccagcgcctgcccgaccatggcggcaccacccagggcgacgcggccgaaagctggagccgcgccacacacctggccgccacgctgcagccggccgaactgctggcgaccgacaccgacacgctcatccaccgactgtactgggaagagcccctgatggcgttcgagccgcacgccgtgcgctggttctgcccctgcacgcgcgagcgggtatcgagcatgctgcgctcgctcggccaggccgaagtcgaatcgattcttgccgaacagggccgggtcgaagtgtcgtgcgacttctgcggcaagccctacgaattcgacaaggtggattgcgccggcctgttcgcgcccaattcccccatgccggaacaggacccgcccacggtgcac

SEQ ID NO: 14955 - DNA, 1167 bp, Bordetella pertussis
atgaaaccccagatcgtgatttgcggcgccggcatcgtcggcctggccagcgccctggcgctggcgcgccgcgggcaacgggtggcggtgctggcgccgcgcgcgccggtgccggcggccgagcccgatcgctatcatccgcgcgtctacgcgatttcgcccgccagccagcaattcctggccgggctgggcgtgtgggacgccatgccggcggcccgcctgacgccggtgcaggccatggaaatccatggcgacggcgacggcctggtacgcctgaacgcctggcaggcggcgcagccgcaattggcctggatcgtcgaatccggcgagatcgaacgggtgctgatgcaggcggtgcagatgttcggcatcccctggatcgccgagcgctgcgtcggctggcgtgccggcgaggtcgagaccgatggcggccagcgcctgcgcgccgagctgttcgtcggcgccgacggcgccgcctcgccgctgcgaaaggccgccggcctgcgccacgacgccaccccgtatgacgacaccggcctggtgacgcacctggacgccgagcgcgcccaccacggcacggcgttccaatggtttcgcgacgacggcgtgctggccttgctgcccatgccggataccgccgacgggccgcaggttttcatggtgtggtcgatgcgcaccccgcaggcgcaggccttgcaggccatggagccggccgtccgcgcggccgagctggagcgcctgctggcttgcgcctcgcaggggcggctggggcggttgcgcgtacgcagcccggtgctgggtttcccgcttacgctggagcgcgcccagatggtggcgccgggcatcgcgctggccggcgacgccgcgcaccggctgcacccgctggccggccaggggctgaacctgggcctgggcgacgtcgaggcgctggcctgcgcggtcggcgaccgggaaccctttcgcggtcccggcgatctacgggtattgcggcgctaccagcgcgcccgcgccgagcccgtgctggccatgcgcatggccaccgacggcctgcatcgcctgttcggggcgcgcggcgcgccgctggcctggctgcgcaacgcgggcatgcaatgggtggatgccgtgccgttcatcaagcggcaactcatcgaaggggcctcgcgcaat

SEQ ID NO: 14956 - DNA, 894 bp, Bordetella pertussis
atgggtggatgccgtgccgttcatcaagcggcaactcatcgaaggggcctcgcgcaattgagcgggccgtcgttttcaggagcaggtatgaatttccggatcacagtctggtgcgccgccgccgcggtgtggagctcgggcgccctggcgcaggatggtgccggccaggccgccccgggcacgccggacaaggtctactcgaccaccgggagcgcgcccgccaagccgggcgacaaggtgtattccacccgttcggcgcaggcgcccgatccgcaggccgatgccgtcaaggagcggttcgcgcagcgtttcgaggggttcgacgtgacggcggtgcgacgcaccccgtacgggctgttcgaggtgcagatcggaacggatttgctgtacaccgatgaaaaggtcacctgggtcatggaggggccgctcatcgacgccctgacccggcgcgatgtcacccgcgaacgccaggaaaaactgtccagcgtcccgttcgaggagctgccgctggacctggcggtcaagcaggtcaagggcgacggttcgcgcgtcatggccgtattcgaggatccgaactgcggctattgcaagcaactgcaccgcacgctggaggacatggacaacatcacggtctacaccttcctgtatccgatcctctcgccggactcgacgaccaaggtgcgcgacatctggtgcgcttcggatcctgccaaggtctggaaagactggatggtgcgcggccagcgtccgcccaccgccgagtgcgatgcgccggtcgaccaatggctggcgctgggccgccagctgatggtgcgcggcacgcccgcgattttcttcaagagcggcggccgcgtcagcggcgcgctgccgcgcgacgaactcgaagcgcgtctg

SEQ ID NO: 14957 - DNA, 1284 bp, Bordetella pertussis
atgagtgcaatcgtcgatatcatcggccgcgaaatcctcgattcgcgcggcaaccctactgtcgagtgcgatgtgctgctggagtcgggcgcgatgggtcgcgcctccgtgccttcgggcgcctccaccggctcgcgcgaggccatcgaactgcgcgacggcgacaagggccgttatctgggcaagggcgtgctgcgggcggtggagaatctcaacaccgagatctccgaagccctgatgggcctggatgcgcaggagcagaccttcgttgatcgtaccctgatcgaactcgacggcaccgacagcaaggagcgcctgggcgccaatgccatgctggccgccagcatggcggtcgcgcgcgccgcggccgacgagtcgggcctgtcgctgtaccgctacttcggcggcagcggccccatgagcatgcccgtgccgatgatgaacgtcatcaacggcggcgcgcacgccaacaatacgctggacctgcaggagctgatgatcctgccggtgggcgcggccagcttccgcgaagcgctgcgctggggcgccgaagtgttccacatgctcaagaagctgatccacgaccagggcatgtcgaccgccgtgggcgacgagggcggtttcgcgcccaacgtggccagccacgaggccgccatccagctgatcctcaaggccatcaccgaagccggctacgagccgggtacgcagatcgccctgggcctggattgcgccagctcggagttctaccgtgacggcaagtacacgctggctggcgaaggcggcgtatcgctgtcctcgcaggagtttgccaacctgctggcgacctggtgcgacaagtaccccatcatctcgatcgaagacggcatggccgaaaacgactgggacggctggaagctgctgaccgaccagctgggcaagaaggtgcagctggtgggcgacgacctgttcgtcaccaacacgcgcatcctgcgcgaaggcatccagaagggcgtggccaactcgatcctcatcaagatcaaccagatcggcaccctgaccgagaccttcgccgccatcgaaatggccaagcgcgccggctacaccgccgttgtctcgcaccgttccggtgaaaccgaagactccaccattgccgacatcgcggtggctaccaacgccatgcagatcaagaccggttcgctgtcgcgttccgaccgcatggcgaagtacaaccagttgctgcgcatcgaggaagaactggccgaagtggcttcctatccgggcctcgaggcgttctacaacctgcgt

SEQ ID NO: 14958 - DNA, 852 bp, Bordetella pertussis
atgaaagcctgcggtttcgatatcggcctggatcatccctttttcctgatcgccggcccgtgcgtcatcgagtcgcgcgagctggccttcgaaaccgccggccgtctcaaggagatcaccggcaagctgggcgtgcccttcatctacaagagctcgttcgacaaggccaaccgcagttcgggcaagtcgtttcgcgggccgggcatggacgaaggcctgaagatcctggccgacgtgcgcgcccagctggatgtgccggttctcaccgacgtccacgatatcgaccaggtcgcgcccgtggccgcggtggtcgacatgctgcagacgccggccttcctgtgccggcagaccgacttcatccgcgcctgtgcggccacgctcaagccggtgaacatcaaaaagggccagttcctggcgccgcacgacatgctccaggtggcccggaaggcccgcgacgcggcgctcgaagccggcggcgacggcaataacatcctggtttgcgagcgtggcgcttctttcggatacaacaacttagtgtccgacatgcgttcgctcgctatcatgcgggaaaccgactgtcccgtcgtgttcgatgccacgcactcggtgcaattgccgggcgggcagggggcctcgtcgggcggtcagcgcgaattcgtgccggtgctggcgcgtgccgccgttgcggtcggcgtggccgggctgttcatggaaacccatcccaatcccgcctgcgccatgtccgacggccccaacgccgtgccgctggaccgcatggcggagttgcttgaatcgctggtggcgctggaccgcgtcaccaaacgcagtggctttctcgaaaaccagtttgtc

SEQ ID NO: 14959 - DNA, 1650 bp, Bordetella pertussis
atgaccaaatacgtatttgtcaccggcggtgtggtgtcttccctgggcaaagggatcgccgccgcgtccctcgccgcgattctcgagtcgcgcggcctgcaagtcaccctgctcaagctggacccctatatcaacgttgatcccggcaccatgagcccgttccagcacggcgaggtgttcgtgaccgaggatggggccgaaaccgacctggacctgggccactacgagcgcttcatttcggcccggatgcgcaaggtgaacaacttcaccaccggccagatctacgaatccgtcctgcgcaaggaacgccgcggcgactacctcggcaagaccgtccaggtcattccgcacatcaccaacgaaatccaggacttcgtcgcgcgtggcgccgaggccgcctggaatggcgccaccgacgtggccatcgtcgagatcggcggcaccgtgggcgacatcgagtcgctgcccttcctggaggccgctcgccagatgagcctgcgcatggggcgcaacaacgccgccttcgtgcacctgacgctggtgccctacatcgcgtcggccggcgagctcaagaccaagcccacccagcattcggtacagaagctgcgcgagatcggcatctacccgaacgtgctgctgtgccgcgccgatcgccgcattcccgacgacgagcgcgccaagatctcgatgttctcgaacgtaccgctcgatgccgtgatttcggtctgggacgtcgattccatctacaagattcccgccatgctgcacaagcagggcgtggacaacatcgtgtgcgaggccctgggcctgactccgccgccggccgacctgtccatgtgggacaacctggtcgacgcgcttgagcacccgcaggattccgtcaccatcggcatggtcggcaagtacgtcgacctgaccgagtcgtacaagtcgctcagcgaagcgttggtgcacgccggcatccacacgcgctccaaggtcaatatcgagtacatcgactccgaggatatcgagacccgcggcaccgaccagctcaagcacctggacgccatcctggtgcccggcggcttcggcaagcgcggcaccgagggcaagatcgccgccatccgctatgcgcgcgagaacggcgtgccgtacctgggcatctgcctgggcatgcagctggccgtgatcgagttcgcgcgccacgtggccggcctgggcggcgccaacagtaccgagttcgatccggccgcgccgcatccggtggtggccctgatcaccgagtggatggaccgcgaaggccgcgtcgagcgccgcgacaacagctcggatctcggcggcaccatgcgcaagggcgcgcagcgctgtccgatccgcccgggcacgcgggcgcagtccatctacggcgacgacgtcaacgagcgccatcgccatcgctacgaagtcaacaacgtgtatgtcccccggctcgaagatgccggcatggtgatcagcgcgcgcacgcccaccgagaacctgcccgagatgatggagctgcccagccatccgtggttcgtgggcgtgcagttccaccccgagttcacttcgacgccgcgcgacgggcaccccctgttctccagctatatccgggcggcgctcgagcacaaagcgcagcgcgccaaggaggcg

SEQ ID NO: 14960 - DNA, 1353 bp, Bordetella pertussis
atgccgatggcgacgttgcgcggtctcccattcgccgcgcgcccacggcatgaaacccttgacgtcgattacggagaagacgtgactgttgatagccccattttgaccgacaccctcgtcgtcggcggtggccaggcgggcatcgcgatgagcgagcacctgactgggcagggagtgcctcacatcgtgctggagcgtgaccgcatcgcgcagcgctggcgaaccgggaggtgggactccctggtggcgaacggccccgcctggcacgatcgcttccccggcctggaattcgaagggctcgatccggacggtttcgcgtccaaggacgccgtggccgactacctggaggcttatgcgcgcaagttcaatgcgcccatccgtaccggcgtggaagtggtgcgcgccgagcgcaatggcggcaggtacggctttacggtggagacgtcggccggcacctacgaggcgcagcgcatcgttgtcgcgaccgggccgttccagcggccggtgatcccggccatcgcgccgcgggaccccgcgctcacgcagatccattcggccgattaccgcaaccccgggcaactgcccgagggcgccgtcctggtgatcggcgcggggtcgtccggggtgcagatcgccgatgaactccagcgcgccggccgcgaggtctatctttccgtcgggccgcacgaccgtccgccccggcgctaccgcggccgcgatttctgctggtggctgggcgtgctcggcctgtgggaccaggagacggtccagcccggccgcgagcacgtgaccattgcggtcagcggcacggatggcggacgcaccatcgagtttcgggcgctcgcgcaccagggaatcacgctggtgggcgtgacgaagtcgtttcgcgatggcgtcgtggcgttcgagaacgatctggccgagaacgtggcgcgcggcgacgccaatcactttgccttgctggacgccgccgacgcctacatcgcgcgcaacggcctgtcgctgccggacgagccgcaagcccgccgggtgccgcccgaccccgcatgcatgaccgagcccattctgcagctcgacctggccgcggccaacgtgacgtcgatcatctgggcaaccggatatgccgccgagtacggctggttgaacgtcgacgcgttcgatgccaacggcaagccccgccaccagcgcggcgtctccagcgagccgggggtgtattttcttggcctgccctggctgtcgcggcgtggctcggccttcctctggggcgtctggcacgacgcgaagcacattgccggccacattgcgatgcagcgcaactacctgtcgtatcccgatttcggccagtcccagcag

SEQ ID NO: 14961 - DNA, 1830 bp, Bordetella pertussis
atgtgcggcattgttggcgccgtcgcccagcgcgacatcaccccgatcctgattgaaggcctcaagcgcctcgagtaccgcggctacgattcgtgcggcgtcgccctgtatatggacggccacctgcgtcgcacgcgcagcaccaagcgcgtggcggaactgtccgagcaggtcgccgaagacaagctgggcggcttcaccggcatcgcccacacgcgctgggccacgcacggcattcccgccacctacaacgcccacccgcatttctcggcgcagggcaaggacgagccgcgcatcgcgctggtgcacaacggcatcatcgagaaccacgaagagctgcgccaggagctgcagggcgtgggctacgtgttcgaaagccagaccgacaccgaggtcatcgcgcacctggtcaaccacctgtatgcgggcgatctgttcgaggcggtgcagcaggccgtgcgccgcctgcagggcgcctacgccatcgccgtgttctgccgcgacgagccgcaccgcgtggtcggggcccgccagggttcgccgctggtggtcgggctgggccagaacgagaacttcctggcctccgacgcgctggccctggccggcacgaccgaccagatcatctacctggaagacggcgacgtagtcgacctgcagctggcccgcgtgtggatcgtcgaccaggccggcaagcaggtcgagcgcaaggcgcacacggtgcaggtgcacaccggcgcggccgagctgggcccgtaccgccacttcatgcagaaagagatcttcgagcagccgcgcgccgtgggcgacacgctgcaggacatcgagtcgatcacgcccgagctgttcggcgacggcgcgtacaaggtcttcaaggagatcgattcgctgctgatcctggcctgcggcaccagctactacgccggcctgaccgccaagtactggatcgagtccatcgcccgcatcccggtggcggtggaaatcgccagcgagtatcgctatcgcgacagcgtgcccaaccccaatgcgctggtggtcaccatctcgcagtcgggcgaaaccgccgacaccctggccgcgctcaagcatgtgcgttcgctgggcatgcagcacacgctgacggtgtgcaacgtggtcaccagcgccatggtgcgcgagtgcgagctggcgtacatcacccgcgcgggcgtcgagatcggcgtggcgtcgaccaaggccttcaccacgcagctgaccgcgctgttcctgctgacgctggccctggcgcagacgcgcggccgcctcaccgaggagcaggaggccgagcacctgaaggccttgcgccacctgcccgcggccatcggcgcggtgctggcgctggagccgcagatcatggcctgggccgaccgcttcgcgtccaaggaaaacgcgctgttcctggggcgcggcatgcactatccgatcgcgctggaaggcgcgctcaagctgaaggaaatcagctatatccacgccgaggcctatccggccggcgaactcaagcacggcccgctggcgctggtgaccgagcacatgccggtggtcacgatcgcgcccaaggacgcgttgctggagaagctgaaatccaacatgcaggaagtgcgcgcgcgcggcggcgagctgtatgtgtttgccgatgccgacagcaagatcgccaacgccgagggcatgcatgtgatccgcatgcccgagtactacggcgcgctctcgcccatcgtgcatacgatcccgctgcagctgctgtcgtaccacacggcgtgcgtgcgcggcaccgacgtggacaagccgcgcaacctggccaagagcgtgacggtggag

SEQ ID NO: 14962 - DNA, 897 bp, Bordetella pertussis
atgagccacaccaataccgccgccgtggccgcgcaggccgccaaggaggacgtgcgcacgcccgcctccgagttctggcgcaagttcaagaagcagaagctggccgtcggcgccggcctgttcgtcctgctgctggcgctcatcgccatcctcgcgccctggatcgtgccgttcgatccggagaatttcttcgactacgacgccctgaacgccgggccgtcggccactcactggctgggcgtggactcgctgggccgcgacatcttcagccgcatcgtcatgggcgcgcgaatttcgctggccgccggcttcctgtcggtggccatgggcgccgtggtcggcacgttcatgggcctgatggcgggctactaccagggctggtgggaacgcatcaccatgcgcatttccgacgtgctgctggcgttcccgggcatgctgctggccatcggcgtggtggcgatcctggggtcgagcatggtcaacgtcattgtcgcggtggcggtgttcagcgtgccggcctttgcccgcctggtgcgcggcaatacgctggcgatcaagcagatgacctatgtcgaggcggtgcgcagcgtcggcgcttccgattggactatcatcatgcggcatatcctgccgggcacgatatcccccatcgtcgtgtacggcaccatgcgcatcgccacctccatcatcacggcggccagcctgtccttcctgggcatgggggcgcagccgcccacgcccgagtggggggcgatgctgagcgaggcccgcgccgacatggtcatcgccccgcatgtggcgatcttcccggcgctggcgattttctttaccgtgctggcgttcaatctgctgggcgatggcttgcgcgacgcgctggatccccggatagaccgcaag

SEQ ID NO: 14963 - DNA, 1782 bp, Bordetella pertussis
gtgcgcacagcgtgctcgtcgcggttcacttaccgtactcctgataatcgaccatgcgcagccggcgcggcgccggctgcaatacaatcgccgataatacttccagccatatcagggttaacagaggggaactgtgtaatgtccgaacgtgagtcaatggaatatgacgtggtcgtggtcggtggcgggccggctgggctggccgcggccatccgcctcaagcagcttgccgcggaaaagaaccacgaagtcagcgtctgtgtcctggagaagggctccgagctcggcgcgcatattctgtcgggcgccgtcatggacccgcaggccctgaccgaactgatccccgactggaaggaaaagggcgcgccgctgaacgtgcccgtgacgcaggacaaattcctcttcctgagcgccaccggcgcgcgctccacgcccaactggctgctgccggcctgtttccacaacgaaggcaactacatcgtgcgcctgggcgacgtggtgaagtggctgggcgaacaggccgaagcgctcggcgtggacattttccccggtttcgcggcggccgaagtgctgtacgacgaaaacggcgcggtgcacggcgtagccaccggcgacatgggcgtggcgcgcgacggcacgcacaccgaccactaccagcccggcatggaactgctggcgcgctacacgctatttgccgaagggtcgcgcggccagctgggccgccagctgatcggccgctacaagctggacgagggccgcaacccgcaatcgtacggcatcggcatcaaggaaatgtgggaggtcgacccggcccagtcgcgtccgggcctggtggtgcataccgccggctggccgctggactccgacacctacggcggctcgttcctctatcacctggacaacaacgtggtggtggtcggcctgatcgtgggcctggactacgccaatccgtggctgtcgccgttcgaggaattccagcgctacaagacccaccctgccatccgcggcaccttcgaaggcggcaagcgcatcgcctatggcgcgcgggccatcaccgcgggcggactgctgtcgctgcccaagctggccttcccgggcggcgcgctgatcggctgcgaagccgggttcctgaatgcatcgcgcatcaagggcagccacgccgccatcaagagcggcaagatggcggccgaggcggccttcgacgccgtggcgagcgatcgcagccacgacgagctggccagctacgccagcgccttcgagtcttcgtggctgcacgccgagctgaacaaggcgcgcaacttcaagcagtggttcaagaagggccgcaccgtcggcaccttcatgaccggtatcgagcagtggctgctcaagggcaagttcccctggaccctgcgccacaacaagcctgaccatgcctgcctgcagccggcatcgcagtgcgcccgcatcgactaccccaagcccgacggcaagctgaccttcgacaagctgagctcggtgttcatctccaacaccaaccacgaagagaaccagccggtgcacttgacgctgaaggacgacagcgtaccggtggcggtcaatctggccaagtatggcggccccgagtcgcgctactgtccggccggcgtgtacgagttcatcaaggacgaccacggcgccgaccgcttgcagatcaacgcgcagaactgcgtgcactgcaagacctgcgacatcaaggaccccacccagaacatcgtctgggtcgcgccgcaaggcggcgagggaccggtctacagcggcatg

SEQ ID NO: 14964 - DNA, 2115 bp, Bordetella pertussis
atgacgaacccggacttcgaacacatcaagccggtggtgagcgttgcccggcatcggaacgtagccgtcctgagcgtcgacaatccgccgatcaacgcactgtcggatacggtacgtgccggcctgtgctcggcgctgcgcgaggcggaagcggaccccgcagtgcgggcggtggtgctggcgtgcgagggcaacacgttcgtcgccggcgcggatatccgggagtttgcgcgtgcgaagggcgctgccgaggcaatcgatgtgcccgccgtgatcgaatcgtgccgcaagcctgtcgtggcggcgctgcatggccaggcgctcggtggcggactggaactcgcgcttgcatgccatggccgcgtcgcgctggcgggatgccggctcggactgccggagatcaccctggggctgattcctggcggaggcggcacgcagcgcctgccccgtctcatcggattggaggcggccgccgaactcatcctgtccggcgcgacgatcgatgccgagacggcgcgcgagtcgggcctgctcgacgctgtctggccggacaggctgcgtgaacgggccattgaattcgcggcatccctggccgacagtcctgcaggcgtgcgccgtgccagcacgttggcgcatccgcccatgtcgccgcagaccgggcaggacctgcgcaagattgccgagtcccgtcctgccgcgttgcgcgcaccccaggcgggcgcggcggccgtggaggccttgtcggcagcggcgcagccggactttgcccgcggccgggcgctcgaacgcgagctgttcgcccgattgcgcgacggcgaagagtcgcgcgcgttgcgcgcgctgtttttcgccgagcgttcagccaggcgcgtcgggctcgatgacgccacgtccgcgccgccgatggcgcacgatgccgccgtggtcggcgcggggacgatgggccggggcatcgccatcgcgctggccgatgcgggattgcgcgtgcgatttatcgatgtcgagcaggccagcctggacagggcgcttgaagcgattcgcgcgcattaccggtcgcttgctgcgcgcggccgcatgacggaggcggcggcacgggatgccgtggcacggatctcgcctgccagcgacatgcaggcggcagccgaggccgacgtggtggtcgaggccgccttcgaggatctcgcgatcaagcaggcgattttccgccagctcgatagcattgtgcggcccggggctgtcctggcgaccaacacgtccacgctcgatgtcgacgcgatcgccgccgcgacccggcggccgcaggatgtcgtgggcacccatttcttcagcccggccaacgtgatgcgcctgctggaggtggtgcgcggcgcgcgcaccgcgccacggacgctgggagcggtgctggcattgggccgccgcatgggcaaggtatgcgtaacggttggcgtatgcgatggattcgtcgccaaccgcatgtcggcccaccgcgcccgtcagatagagttgctgctacaacacggcgcgttgccgcaggacatcgaccaggccgcgcgcgagttcgggttcagcatggggccgtgcgcggccaccgacctggcgggcctggacatcagttggcgcatccggcgtggcaagggagcacgctcccccattgccgatgccctgtgcgaacttggcaggtttggccagaaggttggccgcggatatttctcctatgcgcctggcagccgcgtcgccgtcccggaccccgaggtcgaagcgctgatccggcgcatggcggaacaactgggcatacgccgccaatcgttcgatctcgccacgattaccgaccggctgatcctgccggtgatcaacgaaggcgcgcgtgtattgcaggatggcgttgcgcggcaggcccgcgacatcgacctgatctgggtccacggcttcggctggccggcacggcgcggcgggcccatgttccatgccgaacgggtagggttggccagcgtgtgcgaccggctcgcccgcctggccgacgccctggaggacgcttcgttgcagccggcgccgctgttgcgcgatctcgctacccgcggtgccgggtttgcctcgctgcatgccgcgcgccaggca

SEQ ID NO: 14965 - DNA, 1272 bp, Bordetella pertussis
atgtcagtcgccgttcttgccttcggtctgaatcacacctccgccccggtctcggtgcgcgagcgcgtttccatgcccgtggacttggtcaagcccgcgctggaaggcctgcgcgcgacgttcggcggcgcggtgcgcgaggcggcgatcctgtcgacctgtaatcgtaccgaactctattgcgcggccgagggccaggtggccgagcatctgccagcctggctggccgagcacaaccggctggaagccgcggccttgcgcccgcacctgtaccgccaccagcacgacgatgccgtgcgccatgcgttccgcgtggccagcggcctggattccatggtgctgggcgagccgcagatcctgggccagatgaaagacgcggtgcgtgcggccaacgaggccggcgcgctgggcacgctgctgcatcaattgttccagcgcacattctcggtggccaaggaagtgcgttcgcagaccgccatcggcgcacattcggtgtcgatggccgccaccgcggtgcggttggccgagcgcgtgttcggccagctggaagacgcgcgcacgctgttcatcggcgccggcgagatgatcgaactgtgcgccacgcacttcgcggcccagcgcccgcgcagcatggtggtggccaatcgcaccatcgagcgcgccgagaccctggcgggccggttctcggcccagaccatgaagctggccgacctgaccgaacggctggccgagttcgacgtcattgtttcctgtacggccagttccctgcccatcctggggctgggcatggtcgagcgcgccacgcgccagcgccggcatcgccccatggtgatgatcgacctggcggtgccgcgcgatatcgagcccgaagtgggccgcctggacgacgtgtatctgtattcggtggacgacctgggccggctggtgcaaagcggcaccgacgcgcgccgcgcggcggtggtgcaggccgaggccatcatcgagacgcgcgtgcagggcttcatgcactggatgcagtcgcgcgaagtcgtgcccgtgatccgcgacctgcatcaggccgccgacgacgtgcgggccgccgagctcgagcgcgcgcgccgcatgctggcgcgcggcgagtcgcccgaggccgtgctggaacagctggcgcacgggctgacgcagaagtacctgcatggcccgctggccgcgctcaaccgcagcgagggcgacgaacgccgccagctgctggcctgggtgccgcgcctgtttcccggccgcgattcccgccgt

SEQ ID NO: 14966 - DNA, 1977 bp, Bordetella pertussis
atgtcgaatgccattcaatccgtcctggtcgagaatcgcgtattcccgccgccggcgagcgccgtgcaaggcgccgcgatttcgggcatggacgcctattgggccctgtgcgaggaagcggacaaggacttcaacgggttctggtcgcgcctggcgcgcgagaacctgcaatggaccaagtccttcacgcaggtcctggacgagtccgaggcgcctttctatcggtggtttggcgatggcgaactcaacgtatcggccaactgcctggacgtgcacctgcataacggcaacgccgacaagaccgccatcatcttcgaatccgacgacggcaaggtcgacaagatcagctaccgcgaactgctggcgcgcgtgtgccgcttcgccaatggcctgaaggccatggggtacaagaagggcgaccgcgccatcatctacatgcccatgtcgatcgaggcggtggtggccgtgcaggcctgcgcccgcctgggcgtgacgcactcggtggtgttcggcggcttctcggccaagagcctgcaggagcgtatcgtcgacgtcggcgccacggtggtgatcaccgccgacgagcaggtgcgaggcggcaagaccatcccgctcaagcccgccgtcgaggaagcgttcgccatgggcggttgcgaggccgtttccaaggtagtggtgtatcgccgcaccggcggcaagatcgcctggcaggaagggcgcgacgtctggatgcacgacgtggaggccggccaggccgatacctgcgagccgcaggcggtcaatgccgagcatccgttgttcatcctgtacacgtcgggctccaccggcaagcccaagggcgtgcagcatgcctccgcgggctatctgctgtgggcgctgctgaccatgaagtggaccttcgacgcccgcgccgatgatgtgtactggtgcacggccgacgtgggctgggtgaccggccatacctatatcacctacggcccgctggccgccggcgtgacgcaggtggtgttcgagggcgtgcccacgttccccaacgccggacgcttctgggacatgatcgcgcgccacaaggtgtcggtgttctataccgcgccgaccgcgatccgctcgctcatcaaggccgccgaggccaaccaggaggtgcacccgcgccaatacgacctggacagcctgcgcatcatcggttcggtgggcgagcccatcaactccgaggcctggatctggtaccacaagaatgtcggccgcgagcgctgcccggtcgtcgacacctggtggcagaccgagaccggcgggcacatgctcacgccgctgccgggcgccacgccgctcaagccgggatcgtgcacgctgccgctgccgggcattgtcgcggccatcgtcgacgagaccggcggcgatgtcgcgcagggcaatggcggcttcctggtcatcaagcgcccctggccggccatgatccgcaacatctggggcgacccggagcggttcaagaagagctacttcccgcccgagctgcgcggctactacctggccggcgacggcgcccagcgcgacgccgatggctatttctggatcatggggcgcatcgacgacgtgctcaacgtgtccggccaccgcctcggcaccatggaggtggagtcggcgctggtggcgcacgaaatggtggccgaggccgccgtggtgggccgtcccgacgacaccaccggcgaagccgtggtggccttcgtggtgctcaagcgcagccgccccgagggcgacgaagcccaggccatcgccaggcaactgcgcgactgggtgggcaaggaaatcggccccatcgccaagcccaaggacatccgtttcggcgacaacctgcccaagacccgttcgggcaagatcatgcgccgcctgctgcgcgtggtcgccaagggcgaggaaatcacccaggacgtgtccaccctggagaaccccgccatcctcgagcaactggccaagccgttg

SEQ ID NO: 14967 - DNA, 1080 bp, Bordetella pertussis
atgaaaccgtccatgcgcagccgactcgagcagttggcccaccgtctcatcgaagtcgacgccttgctggccgagccggaaacggcggccgatatggaccgttttcgcaagctgtcgcgcgagcgcgccgagctggagccggtcgtcgaggcgttcaatgcgttcctgggcgtcgaggccgatgtggccaccgcgcaggagatgctgtccgatcccgacatgaaggccatggccgaggacgagatcaagaccggccgcgcgcgcatcgaggagatggaggcggcgctgcagttgctgctgctgccgcgcgaccccgacgatggccgcagcctgttcctggaaatccgtgccggcacgggcggcgacgaaagcgcgctgttctccggcgacctgctgcgcatgtatacgcgctacgcggaaacgcggggttggcgcgtggagatcatgtcggagagcgagtcggagctgggcggctacaaggaagtgatcgcgcgcatcgatggcgacggcgcctatggccggctgaagttcgagtccggcgcgcatcgcgtgcagcgcgtgccggccaccgaggcgcagggccgcatccatacctcggcatgcacggtggcggtgatgcccgaggccgacgcgatgtccgacatcgtgatcaaccccagcgatctgcgcatcgatacgttccgcgccagcggggcgggcgggcagcacatcaacaagaccgattcggcggtgcgcatcacgcacgtgccgaccggcctggtggtggagtgccaggacgaccgctcgcagcatcgcaacaaggacaaggccatgcaggtgctggccgcgcgcctgaaggacaaggaaatgcgcgaacgccagagcaaggaggccgccgagcgcaagagcctgatcggctcgggcgaccgctccgagcgcatccgcacctataactatccgcagggccgcgtgaccgaccatcgcatcaacctgacgctgtacaagctgcagcagatcatggaaggcgacctggacgagctgaccggcgcgctgctggccgagcaccaggccgagcaactggcggcgctgggccacgatctg

SEQ ID NO: 14968 - DNA, 810 bp, Bordetella pertussis
atgaccttgctcaaggacctgctggccgacccgggcctgccccggctggaggcgcgcatgctcgccgagcacgtgctgggccgctcgcgcgcctggctgctggcgcacgataccgacccggtcgagcccgcgcacgaggcggcctggcggcagctggcggcgcgccgcctggctggcgagcccatggcctatctgctgggcgggcgcgagttcatggggcattggtacgcgctgacgccggatgtgctgattccgcgcccggataccgagctgctggtggagacggcgctgcattggctgcaaggccgcgctgcgccgcgcgtgctggacctgggcaccggcagcggcgccatcgccgtgtcggtggcgctgggttgcccgcaggccgaggtgacggccaccgacctgagcgcggccgcgctggcggtggccgagggtaacgcgcagcggctgggcgcgcgggtgcgctgcctggcgggcgactggtacgaggccttgccggcgcaggaccgctacgacctgatcgtctccaaccctccctatatcgcgcgcgaggacgcgcatctggcgcagggcgacctgcgtttcgagccgcgcggcgcgctgaccgacgaaaacgatgggctggcggcgctggcgcgcatcgccggcggggcgcccgggcgccttctgcctggcggcgccatctggatggaacacggctgggaccaggccgaggcggcacgggcgctgctgcgccaggccgggctgcgcgaggtgcacagccggcgcgatctggccgggatcgagcggatttccggtggataccta

SEQ ID NO: 14969 - DNA, 2379 bp, Bordetella pertussis
atgactgatgcgacaagccccggactgggccgcagcgcgccccgtatcgaggacgatgcgctgctgcgcggccaggcgcgcttcctggacgatatcgaggtcgagggcgtgctgcatgcctgcttcgtgcgtagcccgcatgcccatgcgcgccttgtctcgatcgacctgtcggccgcccgcgcggtgccgggcgtggccgcggtctatggggcgcgcgacctgttcggccagttgacgtcctggcgcatgccgctggggttcccgctggcggcgctgcccgatgacacgacgccgttcgtgctggccgagcgcgaggtggcgttcgtcggcgaggccatcgcggtggtggtggccgacagccgccacatcgccgaggacgcggcggcgcgggtggcgatcgaatatgaagtgctgggcgcggtggtggattgccgcgatgcgttgcggcccgatgcgccgctggtgcgcggcgagctcgcgtcgaacattctgcagcagtacacgctggcctatggcgactgcgagacggctttcgcgcaggcgcaccgggtgctggaagacgatttctgggtgcatcggggctgcgcgcatcccatggaagggcgcggcgtgctggcgcgcatggaccgcgccaccgacacgctgaccgtgtggtcctcgacccagatggcccacgaactgcattacacgctggccctgatgctgggccagcccgaggaccgcctgcgcgtggtgacgcccgacgtgggcggcgggttcggcgccaagttcatgatttatcccgaggaaatggcgattcccgccgccgcgcgcaagctgggccgcccggtcaagtgggtggaggaccggcgcgagcatttcacgacctcgatccaggagcgcgaccagtactggaaggtggcgatggccatcgacgaccagggccatgtgctcggcatacgcggcaacttcgtgcacgacaacggcgcgtatacgccgcagggcaccaatgtgccgtacaacgccgcctcgtccatgaccggcccctacgtggtgccggcgttctcgctcgatgtgagcgtggcctataccaacaaggtgccggtggccacggtgcgcggcgcgggatatccgcaggcggccttcgtcatggagcgcatgatggacagggtggcggccgagttgggcatcgacccgggcgaatgccgccgccgcaacctgatcggcccggccaagattccctacaccaagccgttgaagtcgcgcgcgggaatgccgctgaccatagacagcggcgattttcccgccctgcaggcatgcgcgctgcaggcgtccgattatgacggcttcgcggtgcggcgcgatgcggccctggcgcgcggccgctggcgcggcatcgcggtggccaacagcgtcgagcccaccgggcgcggcccgttcgaggtggcgcgcgtgcgcgtccagccgtcgggccaggtgtcgatctacaccggcgccctggccatgggccagggcatcaagacgacgctggcgcagatctgcgccgggcacctgggcgtgccggtcgcggcggtcgaggtgcaggccggcgataccgcctacgtgggctacggcatgggcggtttcgccagccgccaggccatcatggccggttcggcggtcgaccaggccgccgcccaggtgcggcggcaggcgctggagacggcggcggcggtgctcaaggccgaggccgaaacgctggaactggccgatggcgaagtgcgcgcgcccgacggacagtcggtgtcgctggcgcggcttgccatgctgcgcaaaggggtgccgggctatgcgctggtcagcccgggcgatcccgggctggacgccaccgcgtacttccactgcgacgcgcagacctacgccggcgcctcgcatgtatgcgaggtcgaggtcgaccccgccaccggggccatagagatcgtgcgctatgtggcggcgcaggacagcggccgcatcatcaatccgcagctggccgagggccaggtgcacggcggggtcgtgcacggcatcggcaatgccttgttcgagtggatgggctatgacgccgccggccagcccctgagcactacgtttgccgaatacctgctgcccaccgcgccggaagtgccgcccatcgaggtggtgttccagccctctcccacccccttgaacccgctgggcgtcaagggcgtgggagagtgcgccaccattccggtggccgtggccgtggtcggcgccgtggagcacgccgtggcccattgcggggtgcgcgtgaccgagtttccgcttacgccggtgcgactgctggagctgctgacgcaggccgaagcgcgcgccgccgcgcctactgattcaggggagtttgtcgatggagttcac

SEQ ID NO: 14970 - DNA, 1497 bp, Bordetella pertussis
atggaatttagcacacagaccactgcctccctgcatcagatcaagactgcggccctggccgtcggcgtcttcgccgacggcgtgctcagcgccgccgccgaagtcatcgaccgcgccagccacggtgccgtggccgccgtggtgaaaagcgagttccgcggccgcaccggcagcacgctggtgctgcgcagcctggccggcgtcagcgcccagcgcgtggtgctggtgggcctgggcaagcaggccgaatacaacgcccgcgcgcacgccagcgccgaacaggcgttcgccgcggcgtgcgtcgcggcccaggtgggcgaaggcgtgtcgaccctggccggcgtggccatcgagggcgtgccggtgcgcgcccgcgcgcgcagcgccgccatcgccgcgggcgcggcggcctaccattacgatgcgacgttcggcaaggccaatcgcgacgcccgccccaggttgaagaaaatcgtccaggtggtcgaccgcgcggcctccgcgcaggcgcagctgggcctgcgcgaaggcgcggccatcgcccacggcatggaattgacccgcacgctgggcaacctgcccggcaacgtgtgcacgccggcctatctcggcaataccgccaagaaactggcgcgcgaattcaagagcctcaaggtcgaggtgctcgaacgcaagcaggtcgaggcgctgggcatgggctcgttcctctcggtcgcgcgcggctcggaagaaccgctgcgcttcatcgtgctgcgccatgccggcaagcccgccaagaaggacaaggccggcccggtcgtcctggtgggcaagggcatcaccttcgatgctggcggcatctcgctcaagccggccgccacgatggacgaaatgaagtacgacatgtgcggcgcggccagcgtgctgggcacgttccgcgccctggccgagctggagctgccgctggatgtggtgggcctgatcgcggcgtgcgagaacctgcccagcggcaaggccaacaagcccggcgacgtggtcaccagcatgtcgggccagaccatcgagatcctcaacaccgacgccgaaggccgcctggtgctgtgcgatgccctgacctacgccgagcgcttcaagcccgcggccgtgatcgacatcgccacgttgaccggcgcctgcgtggtagccctgggcaacgtcaatagcggcctgttctccaaggacgacgcgctggccgacgcgctgctggccgccagccgccagtcgctcgacccggcctggcgcctgccgctggacgatgcctaccaggaccagctcaagtccaacttcgccgacatcgccaacatcggcggccccccggccggcgcggtcacggcggcctgcttcctgtcgcgcttcaccaaggcttatccgtgggcgcacctggacatcgccggcacggcctggcgcggcggcaaggacaagggcgccaccggccggccggtgccgctgctgatgcagtacctgctggaccaggcaggc

SEQ ID NO: 14971 - DNA, 870 bp, Bordetella pertussis
atgttgagagtcgtccttattaccggcatttccggctccggcaagtcggtcgccctgcgcctgctcgaagatgcgggattcacctgcatcgacaacctgccggtgcgctttctggccgaattcatcgccaatgcccgcgatgacgccatggaacgggtcgccgtcgccatcgacgtgcgctcacccggcgagctggccgaactgcccgatgtcatcaccgcctcgcgcgccatgggcaccagcctgagcgtgatcttcctcgacgccaacaccgacacgctggtgcagcgctattccgagtcgcggcgccgccacccgctgaccgaccgcctggcgcgcggcggcaagaccccgtcgctggccgagtgcatcgcgctggaacgcgagctgatggcgccgctgcgcgaccaggaacacgtcatcgacacctcggatctcacgccgggccagttgcgcgcctggatccgcgacctgatccaggccgaccggccgccgctggtgctgactttcgaatcgttcgcctacaagcgcggcgtgcccagcgacgcggacctgatgttcgacgtgcgctgcctgcccaacccctactacgaccgcaccctgcgccccctgaccggccgcgacgaaccggtggccacctggctgggcggcttcgatatcgtgacccagatgatcgacgatatcgccgcgttcatccgccgctggctgccccagtacacgcaggacacccgcaactacctcaccgtcgccatcggctgcacgggcgggcagcaccgctcggtatacgtggtcgagcaactggcgcggcgcttctccgaccacgacccgctgctggtgcgccaccgcacccaactgcccgacgaccccgca

SEQ ID NO: 14972 - DNA, 924 bp, Bordetella pertussis
atgcttacggtccaggaactggtcgacgacaacgccgacaaaatccccttcagctggatcgccggccatgacgccgccgaccgggccatctccgacgacggcatggccgccgccgacctggtaggccacctgaacctgatccacccgtcccgcatccaggtgttcggccaggaagaactggcgtactacacgcgcttcgacctgcgccgccgcatgcaccacatggacgagctgctgatcggcggcgtgccggccatcctgctggcagacggcctgacgccgccgcaagacctgatcgaccaatgcgcgcagcaccaggtgccgctgctgtccacgcccgtggcggccgcccagctgatcgacctgctgcgcatctacctgggcaagaaactggcgcccaccacgaccgtgcacggcgtcttcctcgacgtgctgggcctgggcgtgctgatcaccggcgaatcgggcctaggcaagagcgaactggcgctggaactgatctcgcgcggccacggcctggtggccgacgacgcggtcgaactctcgcgcaccgcccccggcgtgatcgagggccattgcccgcaactgctgcagaacctgctggaagtgcgcggcctgggcctgctcgatatccgcaccatcttcggcgagacctcggtgcgccgcaagatgcgcctgaagctgatcgtgcacctggtgcgggccaccgcgcaggacaagttcgagcgcctgccgctgcaggacatcacccaggacatgctcggcctgccgatccgcaaagtcatgctgcaagtggccgccggccgcaatctcgccgtcctggtcgaagccgccgtacgcaataccatcctcaagctgcgcggcatcgacacgctgggcgaattcatggaacgccaggccatggcgatcctgcaaagcagcaag

SEQ ID NO: 14973 - DNA, 462 bp, Bordetella pertussis
atgacccgcatgaatcacttgtcgcgcatcctacccgccggcaatgtcgtgctcgacatgctcgccacgagcaagaaacgggcgttcgaacaggccggcctactttttgaaaaccatcacggattggcccgctcggtcgtgttcgatagcctgttctcgcgtgagcggctgggctcgacagcgctgggccagggcgtcgccgtgccgcatggccgggtcaagggcctggaccaggcgctggccgcgttcatccgcctggcccagcccatccccttcgacgcgcccgacggccagccggtttccatgctgctctgtctgctcgttcccgaagccgccacgcagcagcacctggacatcctggccgaactggcccagctcatgtccaacaagccgctgcgcgaagcgctggccagcgaaaccgatccggccgcggtgcaccgcatgctgaccaccggccaactc

SEQ ID NO: 14974 - DNA, 1310 bp, Bordetella pertussis
gactacgacggctgggcggcgcagggcaacccgggctgggggtggacgacgtgctgccgctgttcaaggccagcgaggaccaccatggcggcgccagcgccttccacggcgcgggcggcgaatggcgggtcgagcgccagcgcctgtcctggaaattgctcgacgcgttccgtgcggcggccgcgcaggccggcatcgcctcgatcgacgacttcaaccagggcgacaacgagggttgcgactatttcgaggtcaaccagcgccgcggcgtgcgctggaacaccgccaagggttttctgcggccggccatggaccgcggcaacctgaaggtcctgaccggcgcgcgggtggcgcgcgtggtgttccagaaccgccgcgcggtaggggtgcgcttcatggcggagggcggcggcgaacagtatgcccaggcgcgcggcgaggtggtgctggccgccggcgccatcgggtcggcgcaactgctgcaggtgtccggcgtggggccggcggcgctgctacaggcgcgcggggtgcccgtgctgcatgacctgcccggcgtgggcgcaaacctgcaggaccacctgcagctgcgcctgatctaccgggtgcggggcgcccgcaccttgaacggggtggcgggcaccctgtggggcaaggcatggatgggcctgcaatacgccgtgcagcggcgcggcccgctcagcatggcgccgtcgcagctgggtgcgttcgcccgctcgggccccgagcagtcgcgcgccaatctcgagtaccacgtccagccgctgtcgctggagaagttcggcgacccgctgcatgattttcccgccttcaccgcgtcggtgtgcaatctgcgtccgaccagccggggccacgtgcgtatcgtctcgcccgatccgggcgaccatcccgagatcctctgcaactatctttccaccgaggccgaccgcaaagtcgccgccgacagcatccgcctgacccggcgcatcgtggctcagcccgcgctggcgcgctaccagccgcaggaatacaggcccggcgagcaatggcagagcgaggaagacctgcagcggctggccggcgagatcggcacgaccattttccatccggtgggaacctgcaggatgggcgacgacgcgcaggcggtggtggatgccgcgttgcgcgtgcatggcctgcagggcctgcgggtgatcgacgcatccatcatgccgaccatcacctcgggcaataccaactcgccgaccatcatgatcgcggaaaaaggcgcccaactgctgcgcgaagcccgccggcaaacatgaaggccgccg

SEQ ID NO: 14975 - DNA, 1788 bp, Bordetella pertussis
atgcgtacctgctacaccggccaggtttgccgtgaccatctcggccagactgtcaccctgtacggctgggtgaaccgccgccgcgaccacggcggggtcatcttcatcgacctgcgcgatcgcacgggcctggcgcaaatcgtgttcgaccccgacaatgccgaggctttcggcacggccgagcgcctgcgcaacgagttctgcatcagcatcaccggcctggtgcgcctgcgccccgaaggcacggccaacgccgagctggcctcgggcgaggtcgaagtgctgtgccagcaggtcgagatcctcaacgcgtcggtgacgccgccgttccagctggatgacgacaacctgtcggaaaccacccggctgacccatcgcgtgctggacctgcgccgcccgcagatgcagcacaacctgatgctgcgctaccgcgtctcgatcgaagtgcgcaagtacctcgaccagctcggcttcatcgacatcgaaacgccgatgctgaccaagagcacgcccgagggcgcgcgcgactacctggtgccgtcgcgggtcaacgccgggtatttctttgccctgccgcaatcgccgcagctgttcaagcagatgctgatggtctcgggtttcgaccgttactaccagatcaccaagtgcttccgcgacgaagacctgcgcgccgaccgccagcccgaattcacccagatcgattgcgagacttcgttcctgaacgaagtcgagatccgtgaaatcttcgaaggcatgatccgccatgtattcaaggtggtgcaggacgtggacctgcccacgccgttccccatcatgagctggacggaggccatgcagcgctatggctcggacaagcccgacctgcgcgtcaacctggaattcaccgacatgaccgacgtcatgcgcgacgtggatttcaaggtgttcgcctcggccgccaccaccgcgggcagccgcgtcgtggcgctgcgcgtgcagggcggcggcgagatgtcgcgcagcgagatcgacgcctacacgcaattcgtcggcatctacggcgccaagggcctggcctacatcaaggtcaacgacgtggccaagggccgcgagggcctgcagtcgcccatcgtcaagaacctgcacgatgccgcgctggccgaactggtcaagcgcaccggcgcgcagaacggcgacatcatcttcttcggcgcggatcgcgccaaggtggtcaacgacgccatcggcgcgctgcgcgtgaagatcggccacagcgaattcggcaagaaggccggcctgttcagcggcggctggaagccgctgtgggtcgtcgacttccccatgttcgagtacgacgaggaggaaaaccgctataccgccgcgcaccacccgttcaccagcccgaaggacggccacgaggacttcctcgaaagcgatccgggcaaggccgtcgccaaggcctacgacatggtgctcaacggctgggaaatcggcggcggctcggtgcgtatccaccgcgaggaagtgcagagcaaggtattccgcgcgctcaagatcgacgccgaggaggcgcgcgagaagttcggcttcctgctggacgcgctgcagtatggcgcgccgccgcatggcggcatcgcgttcggcctggaccgcatcatcaccatgatggccggcgccgaatccatccgcgacgtgatcgccttccccaagacccagcgtgcgcagtgcctgttgaccggcgcgccgtcggaagtcgacgagaagcaattgcgcgagctgcacatccgcttgcgcaacgtcgaagtgaaa

SEQ ID NO: 14976 - DNA, 882 bp, Bordetella pertussis
atgccgcgtcgtgatctgctggacttgctggcgctggccgccgtatggggcgggtcgttcctgttcatgcgcgtggcggtgcccgagttcgggcccgccgccctgatggagctgcgcgtggggctggccgcgctgttcctgctgccgctggccctgtggcgcggcaagccggcgttgatcgcacggcactggaaggcgatattggtggtgggcacgctgaattcggcgctgcccttcctgctgtatgcctatgcggcccagtcgctgggcgcgggctttctgtcggtggccaatgcggtcacgccggtgtggggcgcggtgatcggctggctgtggctgggggaccgcctgccgcgcatgcgcgccctgggcctgctgatcagcctgtcgggcatcatcgtactggtatgggacaagctggatttccatgacggcggcacggggccagccgtgctggccgccatcagcgcgccggtgttctacggcatggcggccaactggaccaagcgctatctcggccacgtggacgcgctgaccaacgcaacgggcagcatggtggccgcctcgctggtactggcgcccctggcgatcatccactggcccgaacaggcggtatcgttcgaggcgtggcgcgccacggtgctgctggcaatcgtctgcactggcgcggcctatatcgtgttcttccgcctgatcgcccgtgtcggcccgaccgccgcggtcagcgtgacattcctggtgccggtgttcggcgtgctatggggcgtgtggttcctggacgaagcggtgacgccgcgcatcctggccggcgccggcgtgatcctggtcggcaccgcgctggcgctgggcctggtgggcgcccggcgcgtcgcggcagccgat

SEQ ID NO: 14977 - DNA, 1518 bp, Bordetella pertussis
atgaccgaccaatcgcccgccccgaccgcccaggatgaaaaccgcttgatcgccgaacggcgcgccaagctggccagactgcgtgaaaccggcgttgcgttccccaacaatttcgtgcccgatgcgcacgccgccgacctgcacgccaggtacgacggcctggaccaggaggcgctgacggccgcggcggtcacggtcaaggtggccggccgcatgatgctcaagcgcgtcatgggcaaggccagcttcgccacgctgcaggacggcagcggccgcatccagatctacctcgagcgcggcacgctcggcgaagaggcctacgccgctttcaagcaatgggacatcggcgacatcatcgccatcgaggggccggtcttcaagaccaacaagggcgagctgtcggtgcacgccaactcggcgcgcctgctgtcgaagtcgctgcgtccgctgcccgacaagttccatggcgtggccgaccaggagctgcgctaccgccagcgctacgtcgacctcatcatgaccgacgccacccgccgcaccttcgaggcgcgcagcaaggccgtcggcggcatccgccaggccatgctcaatgcgggctttctcgaagtcgagacgccgatgctgcacccgattcccggtggcgcggcggccaagcccttcgtgacccaccacaatgcgctggacatgcagatgttcctgcgcatcgcgcccgagctttacctcaagcgcctgatcgtcggcggcttcgagcgcgtgttcgaaatcaaccgcaacttccgcaacgagggggtgagcccgcgccacaaccccgagttcaccatgatggagttctacgccgcgtacgccgactatcgctggctgatggacttcaccgaggacctgatccgccaggccgcgatcgcggccaccggcagcgccgtgctcagctaccaggaccgcgagctggacctgtcccagccgttcgaccgcctgacgatctgcgaagccatcctgaagtacgccgagggctatacccaggcgcagctcgacgaccccgcgttcgtgcgcgccgagctcaggaaactgggagccaacgtcgagggtccgccgctggcgcgcgccggcctgggcgcgctgcaactggcgctgttcgaggaaaccgccgaagccaagctgtggcgccccacctacatcatcgactacccggtcgaggtctcgcccctggcgcgcgcctccgacacccgcgacggcattaccgagcgcttcgaactgttcatcaccggacgcgaaatcgccaacggcttctccgagctcaacgaccctgaagaccaggccgagcgtttccgcgcccaggtcgaggccaaggacgccggcgacgaagaagccatgtacttcgacgccgactacatccgcgcgctcgaatacggcatgccccccaccggcggctgcggcatcggcatcgaccgcctggtcatgctgctgaccgacagccccagcatccgcgacgtcatcctcttcccgcacctgcgccgggaagac

SEQ ID NO: 14978 - DNA, 1105 bp, Bordetella pertussis
atggaagccgaacgtcagaaccagctcgtcgcccgactcgaagactacgcggagcgcgaacaggctctacggaggtatctttgactacgatgccaaatcggaacgcctgcaagtcgtaaacgccgagctcgaagacccggccatctggaacgaccccaagcacgcccaggacctgggccgtgaaaagaaatccctcgaagacgtcgtcgagaccctgaccgaattgggcagcggcctggccgactcgtgcgagctcgtcgaactggcgctggccgatagcgacgacgccacgctggaagccatcgagcacgatgccgaccgcttccaggaaaagctggaaacgctcgaattccgccgcatgttcgccaacccggccgatccgctgaactgcttcgtcgacatccaggcgggcgccggcggcaccgaagcgcaggactgggcctcgatgctgctgcgccagtacctcaagtacgccgagcgcaagggcttcaaggccgaaatcctcgaagaatccgagggcgacgtcgccggcctgaagtcggccaccatcaagatcgaaggcgagtacgcattcggctacctgcgcaccgaaaccggcgtgcaccgcctggtgcgcaagagcccgttcgactcctcgggcggccgccacacctcgtttgccagcgtattcgtctaccccgaggtcgacgagtccttcgaggtcgaggtcaacccggccgacctgcgcatcgacacctaccgcgccagcggcgcgggcggccagcacatcaacaagaccgactccgccgtgcgcatcacacacgcgccatcgggtatcgtggtgcagtgccagaacgaccgctcgcagcatcgcaaccgggccgaggcgatgcagatgctcaaatccaagctgtacgagctggaaatgcgcaaccgcatgaccgagcagcagaagctggaagattccaagaccgacgtgggctggggccaccagatccgctcgtacgtgctggaccagagccgcatcaaggacctgcgcaccaacgtggaaatttccaatacccagaaagtgctcgacggcgacctggacccgttcatccaagccagcctcaagcaaggcgtgtaa

SEQ ID NO: 14979 - DNA, 1734 bp, Bordetella pertussis
atggctgcccgcgcccaagcacaactggaacgcctggtggtctcgccccgtctgattatccgtactgccgatctgcaagcctgccagcacctcgaagcggccggcatccacccgctgctgtcgcgcctgtgggcggcgcgcggcgtcatccaccccgagcagacccgtatggcgtggcccgcgctgctgccgcccgaccgcctgacccactcggcccacgcggccgccgtgctcgccgacgccatcgagcagggcaagcgcctgctcatcgtggccgactacgactgcgatggcgccacggcctgcgcggtcggcctgcgcgccctgtcggccatgggcgccgacgtggatttcctggttcccaaccgcttcgagaccggctatggcctctcgccggcggtcgtcgagctggcctgccgccatcggcgcggcaagcccgacatcatcatcacggtcgacaacggcatcgccagcgtcgacggcgtggccgccgccaacgccgccggcatcggcgtggtcatcaccgaccaccacttgcccggcgacacgctgcccgaggccctggccatcgtcaatcccaaccagcccggctgcggtttcggctccaagcacctggccggcgtcggcgtcatcttctacatgatgctggcgctgcgcgccgagctgcgccgccgcggcgtctacgcgccggatggcggcccgcgcctggatgcgctgtccgacctggtggccctgggcacggtggccgacgtggtcaagctggacgccaacaaccggctgctggtcacgcaggggctgcagcgcatgcgggccggccgcatgcagcccggcgtgcgcgccctgttcgccgtggccgggcgcgagccgcgcaccgccagcggcttcgacctgggctttgccctcggtccgcgcatcaacgccgccggccggctggccgacatgagcctgggcatcgcctgcctgaccaccgacgacgaggcgcagacgctcgaaatggcgcgcgagctcgacaacatcaaccgcgaacgccgcaccatcgaagccgagatgcgcgaccaggcgctggccgccatggaggcgcccgacgccgccgccggcgccacggtatgcgtattcgaccccggctggcaccagggcgtggtcggcctggtggcctcgcgcctgaaggagaagttctggcgccccacgctggccttcgccccggccggcgaggacgagctgcgcggctcgggccgctcgatccccgacgtgcatttgcgcgacgcgctcgacctggtgtccaagcgccacccgggcctgatacgcaagttcggcggccacgccatggccgccggcctgaccctgggcagcggcgatttcgccgccttcgccccggccttcgacgccgcggtgcgcgagctcaccgggcgcgaccgcttcgagccgctgctcgaaaccgacggctcgctcgaaagcggctacgccaatgccgaagtggccggcctgctgcagcagcaggtctggggcgcggggttcgccgccccgctgttcctggacgaattcaccgtgcgcagccagcgcctggtgggcggcaagcacctgaagctggcgctcgagcgcggccaccagcgcttcgacgccatctggttcggccacgaccagtccctgcccgagcgcatccaggccgcctaccggctggagcagaacatctggaatggcatggtgtcggtacagctggtcatcgagcacgccgcc

SEQ ID NO: 14980 - DNA, 3920 bp, Bordetella pertussis
atgaacaagaacatttaccgtgttgtctggtcattggtccgcggggcctgggtggtcgccggcgaatgggcgcgtgctggccgcaagtcgagcagcccgcgtcgccagaaccgccagcgtgcgcgccggggcgtggccgcgatggtgggcggcagcatcctggcccaggccttgctgcccttgtcggcgctggcccagggagcgccgacgctgcgcccggcccgggtggcgcaggaggaggcggggcaggatgcggcatggacccgcaagctggccgcccaggccgagtcgctggcccggcgccaggccgagcgccaacccggcgcccgggtcgacggcgactatctcaagcgtgaagcgcaggcccaggtcaatgatgtcttgcgcgatggcgtgaacctggctcgggaatcgggtctgccctttctgcgcaacctgcaaggcgggttgagccacgatttcgagtcgggccgcacgtcgctgcaactgaacacgatagatgaggtctaccgcgccggacgcaacacgggcctgctgcagctgggggcgcacaaccagaacgatcgtcccacggccaatgcgggcgcggtgtatcggcgcgaggtcaacgatgcgctgatggtcggcgccaacggcttcctggattacgagtttggcaagcagcatctgcgcggctccgtggggctggaggtgatcgcgccggagttcagcctgtacggcaatgtgtatgcgccgctgtccgactggaagggcgccaagcgcaataatcgtcgcgaggaaaagcccgcctcgggcatggatgtgggggtcggctaccgtccggcgttcgcgcccgggctgagtctgagcgcgacgcatttccgctggaatggcgccgaagtggactacttcgacaacggccgcacccaggccggcgccaagggcttcaaggtcggcgtggagtatcgccccgtgtcgctggtcagcgtgggactggagcagaccaaggtgatcggcggcggacgcgaaacccgcatgcagctgggcctgaacatcaatctctcggaaccgctgtccaagcaattgcggcgcgacgcttcgggcacgccggccttctcgcccgacgcccggcggcacgccctggtcgagcgcgagaaccgcatcgtcctgaacacgcggcgcaaggagatcattctgccgctggtcgtgagcaaggtctcgaccctgcaggccgatggccgggtgacggtgatcggcgcgacccagccgttcgcgacggtgacggtgcgcatgcccgacggcatgacgggcaccgccacggcggatgccagcggtcgttttgcctatacctccgccggcgatcagccgtccggcgtcctggcgctgcgcgcccgtaacgccgagggcgacagcagccgcgaagtgacttatcggtacgtcgacgaggtggtgctgggcgatctgcaggtcgcggtgatggcgctggtgccgctgccggcggatcgcgcgctggaggtacggggcaagaccgaaccgaaggtcgacgtcaaggtgtcgttttccaatggcgaatcggtgctcgccaaggcggatgcgaagggcctgttcacggtgcgttcgacgcgcaaagtgacgcaggggaaagtgctggttcaggcgactcatccgcagacgcgcaaggaagcgcgtgccgtcgcggattatctgccgcccgcgacgctcgcgccgacgatcgatgccgtgacggcgcaagccgataccggccgcgtgaccgtgacgggccaggcggagccgggtgcgcaggtggacgtccactttccggacggcaccgccaagaccgtcgatgccggtgccgacggcgcctatgcggcgacttcggatggcgacatggtgtcgggcgacatccatgcgcaggccaccgacaaggcgggcaaccagagccccgaggccacgcgccactatggtgacaccacggacatcaccccgccggccgctcccaccatcgccaatgtggcgaccgatgccacgagcggtcgcgttacggccgcgggcatggccgagcccggcgccaatgtgacggtgaacttcccggatggcacgcgcaagaccgtcgtcgctggcggcgatggcgcctatacggcgacttcggatcgcgacatggtgtcgggcgacattcgcgtgcaggccaccgacaaggcgggcaaccagagccccgaggccacccgcgcctatgcggatgccgtggacaggaccgcgccggaggtaccgaccgtcacccatgtggccaccgatgccaagagcggccgcattacggtgacgggcatggccgagcctggcgccaatgtgacggtgaacttcccggacggcacgcgcaagacggccgtcgctggcggcgatggcgcctacacggcgacttcggatggcgacatggtgtcgggcgacatccgtgtgcaggccaccgacaaggcgggcaaccggagccccgaagccacccgcgcctatgcggacaccgtggacaccaccccgccggccgtacccacgatcaccgatgtgacgaccgatgccaccaacggtcgcatcacggtgacgggcgtggccgagcctggcgccaatgtgacggtcgatttcccggacggcacgcgcaagaccgtcgtcgcgggcggcgatggcgcctatacggcgacgtcggatcgcgacatggcgtcgggcgacgtccgcgtgcaggccatcgacaagggcggcaaccgcagccccgaggccacccgcgcctatgcggataccgtggacaagaccgcgccggccgcaccgaccatcaccaatgtgaccaccgatgccgccagcggtcgcatcacggtgacgggcatggccgaacccggcgccaatgtggcggtgaacttcccggacggcacgcgcaagacggtcgtcgccgatggcgccggcgcctatgcggcggactcggatggcgacatggtggcgggcgacatccatgtgcaggccaccgacaaggcgggcaaccggagccccgagggcacccgcgcctatgtggacaccgtggacaagaccccgtcggccgcgccgacgatcgtacgcgtgacgaccgaccgctcctcgggcgtggtgacggtggcgggcacggcggatccggacaacgatgtgacggtccagttcccggatggcgggcgcaagaccgtcaaggcgggcaaggacggcagctattcggtgacgtccgacaacgacattttctcgggcatcattcaggtgtctgccaggaaccccgccggaaatgccagcccggaggtgcggcaagactaccgtgacgaattcgtgccggccaatgcgatcacgaacatcgagaccaactcgaggaacggtatcgttaccgtctcgggcaagacctcgcccgatgcgaccgttgtggtgagtttcccgggcggcgacgaggcgcggacgcgggcgaagggggatggcactttcagtgtttcctcgcccatggacatcccgcggggtgtcgtgtcgctgagcacggaagtcaatggtgtccagaccgtcgtcgcgacgcgcacctatgaggataagttcacgaagggagggctggatttcaccgcgttcctgccgtacacgccgaagttcaacggcgtctcgacttcggacacctcggcggttctcctctccattcctcggtacttttactcgggtggcgcgcccgtggccaagatcatgccgccggaagcggacgggagtgaatttgccaagcgggcggccgcggccatgcgtgctcaggtgacgccgggccgtgattcgtctgagtacgacgtcagggtgagctggcccgcgggaaccttcaccccggcggatgtggggcagcgggccgacctcgcggtgaaggtcttcgacaaaggcaccggcaaatacatgctgctcctggcgccggtcaattttcc

SEQ ID NO: 14981 - DNA, 843 bp, Bordetella pertussis
atgaacattgccgcgcccaacgtcgatctgcattgccactccaccgtgtccgacggcagcatgccgccggccgcggtggcgcggcgcgcgcacgccaatggcgtggacgtctgggcgctgaccgatcacgacgagatcggcggcgtggccgaggccgcgcaggccgccgccgcattgggcatgcgtttcgtcgccggcgtcgagatttcggtgacctgggcgggcctgacggtgcacatcgtgggcttgcgggtggatccggccaacgaggcgctggtgcaaggcttgcgcgatacgcgcgccggccgcgccgcgcgcgcggtgcagatcggcgagcggctggcggggctgggcatgccgggcgcctacgagggcgcgctgccgttcgcgggcaaccccgaactgatcagccgcacgcacttcgcgcgcttcctggtcgaggccggctattgccccgatgtgcagacggtgttcaacaaatacctgggcgacgattgcccgggccatgtgccgatgcaatgggccagcctggccgaggccgtgggctggatccgcggcgcgggcggttgcgccgtcatcgcgcatccgggacgctacaagtacagccccatgcagttcgacgcgttgtacgacgagttcctgcaactgggcggcacgggtatcgaggtcgtgaccggcagccatacctccgaagaggcgcgccggtatgccgaggtggcgcgccgccacggtttcctggcttcgcgcggctcggacttccacagtcccaccgaaagcagggtggacctgggccgcttgccgccgctgccgcccgatctcaagccggtctggcacgactggttc

SEQ ID NO: 14982 - DNA, 659 bp, Bordetella pertussis
ccagctggcctggccgccgccatgaaccagggcgcttccgatttccggaggccaggcaccaacgcgcatccatgaagaaaaactaccctgcctatttcgccgccacgctcctggcgctggctggcctgtcggcgcaggccgcgccggtcgattaccggatcgatccggagcacaccgaagtcgtggtcacctgggaccacctgggcttctccaagcccacggcgcacgcgggcggcgtcaccggcgtggtgcgctacgacgcggccagtccggcggattcggcggtcgatctgcgcataccggtgtcgaagctgacttcgcacgttcccaagctggacgggatgctgcagggcgtccagttcttcgaggcagccaggtatcccgatatccgcttcaagagcacctcggtgaccgaccggggcgacggcaggctgcagatcgacggcatcctgcgcatcaagggcatcgacaagccggtggtcctgcaggcgcgccggaacgggcagggcatgcacccgatggcgcagcgtcccgccatcggtttcgacgccacgacgacattgaagcgcagcgatttcggcgtggacgcgttcgcgccggatgtcagcgacgaggtccagctgcgcatcaccatcgaggcggtcgcggaagcggcgcgc

SEQ ID NO: 14983 - DNA, 2280 bp, Bordetella pertussis
atggacgaaaatctcaccaaactggcgttggattaccacgcttatcccaccccgggcaaaatctcggttaccccgaccaagacgctggccaatcaggacgacctgtcgctggcctactcgcccggcgtggccgcggcctgcatggcgattttcgaccagggcaatgacgcagcatcgaaatacacgtcgcgctccaacctggtcggcgtgatcaccaacgggacggccgtgctgggcctgggcaacatcggctcgctggccgccaagccggtcatggaaggcaagggctgcctgttcaagaaattcgccggcatcgacgtgttcgatatcgagctggccgagaacgaccccgacaagctggtcgacatcatcgccgcgctcgagccgacgctgggcggcgtgaacctcgaggacatcaaggcgcccgagtgcttctatatcgagaagaagctgcgcgagcgcatgaacatcccggtgttccacgatgaccagcatggcaccgccatcatttcgtcggcggccatcctcaatggcctgaaagtcgtcggcaaggacatcggccaggtcaagctggcctgctcgggcgccggcgccgccgcgatcgcctgcctggacctgctggtgcacctgggcatcaagcgcgaacacatctacgtggtggactcgcgcggcgtcatctgggaaggccgtgacgagaacatggagcccaacaagcgccgctacgcgcagaagaccgaggcccgtacgctggccgacgtggtcaacggcgccgacgtgttcctgggttgctcgaccgccggcgtgctgacgccggaaatggtcaagaccatggcggcgcagccgctgatcctggcgctggccaaccctgagccggaaatccgccccgagctcgccaaggcggcgcggcccgactgcatcgtcgccaccggccgttcggactacccgaaccaggtcaacaacgtgctttgcttccccttcattttccgcggcgccctggatgccggcgccacgcgcatcaccgaggaaatgaagctggcgtgcgtcaaggccatcgccgagctggcccaggccgaacagaacgacgaagtagcgcgcgcctatgccggccaggagctcagcttcggccccgactacatcattcccaagccgttcgatccccgcctgatcgtgcagatcgcgccggccgtggcccaagccgccgcggactccggcgtcgccacccgtccgatcgaggacatcgaggcctatcgccagaagctgatgggcttcgtgtatcactccggccagttgatgcgtccgctgttccagcaggccaagcaggcgcccaagcgcgtggtgtatgccgacggcgaagacgagcgcgtgctgcgcgcggtacagaccgtgatcgacgagaagctggccgagcccatcctggtcggccgcccgtcggtgatcgagatgcgcatcaagaagttcggcctgcgcatggtgccgggccagaacgtcgagatcgtcgaccccgaggacgacagccgcttcaacgacacctggaatggctactatcagctgcgcggccgcgaaggcgtgacaccggccatcgccaaggcgatgatccgcaagcacaacacgctgatcggcgcgatgctgctgcgtcgcggcgatgccgacgcgctgctgtgcggcgtcgccagcaagtacgacaaccagctcaagtacgtggaggaggtgatcggccgcaagcccggccagacctacggcgcgctgaatgtgctgatgctgccgaaccagaccctgttcgtcaccgacacgcacgtcaacgagaacccgtcggccgacgaaatcgccaacatcacgatccaggccgccgaggagatgctgcgctttggcgtcatgccgaaaatcgcgctgctgtcgcattccaacttcggcagccggcccaccgattcgtcgcgcaagatggcccatgcccgcaagctggtggccgagcgcgcgccgcatctggaggtcgatggcgagatgcacgccgacgccgcgctgtcggagtcgatccgcctgcaggcctacccggacagcacgctcaagggtcgcgccaacctgctggtcatgcccaacctcgataccggcaacatcacctacaacatgctgaagatgaccggcagcaacgggattgcgatgggcccgatcctgctgggttcggcccgcccggtgcacatcctgaccaccagcgccaccgtgcgccgcatcgtcaacatgacggcattggcagtggtggacgcgcagcaggaagccgccgaaggc

SEQ ID NO: 14984 - DNA, 2868 bp, Bordetella pertussis
atgtctacggaatcagaatccctatccacgtcctatttgttcgggggtaacgccccgtacgtcgaagagctctacgaatcgtatctcgacaatcccggctcggtgcccgacaactggcgtgaatacttcgaccagctgcagcactcgcccgccaccgatggccaggaagccacccgcgaccaggcccacgctcccatcgtagaatcgtttgcgcaacgcgcccgcgccaatgccttcgtgcagcgcgtcgccgagcccgacctgtcggtagcctccaagcaggtgtcggtgcagtcgctgatcgccgcctaccgctcgctgggttcccgctgggccgacctggatccgctcaagcgccaggagcgtcccgccatccccgaactggacccggcgttctacggcctgaccgaagccgacctggaccaggtctactccgccaccaacacctacttcacgaccgccagcaccatgacgctgcgcgacatcctgaaggcgctgcgcgacacgtattgccgctcggtgggcgcggagttcatgcatatttccgatccggccgccaagcgctggatccagcagcgcctcgagtcgaccttcagcgcgccggtgttctccaccgaggaaaagcgccacatcctgcagcagctgaccgaatccgaaggcctcgagcgcttcctgcacaccaagtacgtgggccagaagcgtttctcgctggaaggcggcgagagcttcatcgcctcgatggacgaggtggtcaaccacgccggtgaatcgggcgtgcaggaaatcgtggtcggcatggcccaccgcggccgcctgaacctgctggtcaacatcatgggcaagatgcccggcgacctgtttgccgagttcgaaggcaagcacgccgaaggcctgaccgacggcgacgtgaagtaccacaacggtttctcgagcgacttgtccacccgtggcggtccggtgcacctgtcgctggccttcaacccgtcgcacctggaaatcgtcaacccggtggtcgagggcagcgtgcgcgcgcgccaggaacgccgcggcgacggcgagggcaagcaggtgctgccggtgctggtgcacggcgacgccgccttcgccggccagggcgtggtgatggaaacgctgaacctggcgcagacgcgcggttacggtacgggcggcacgctgcacatcgtcatcaacaaccagatcggtttcaccacctcggatccgcgcgactcgcgctcgacgctgtattgcaccgacgtggtcaagatgatcgaagcgccggtgttccacgtcaacggcgacgatcccgaggccgtggtgttcgccacccgcctggcgctggactaccgcatgcagttccgccacgacgtggtgctcgacatcgtctgcttccgcaagctgggccacaacgagcaggacaccccctcgctgacgcagccgctgatgtacaagcgcatcggccaccaccccggcacccgcaagctgtacgccgacaagctgaccacgcagggcgtgctggccgagggcgatgccgaccagctggtcaaggattaccgccagctgatggaagacggccagcgcaccatcgagccggtgctgaccgactacaagagcaagtacgccatcgactggtcgccgttcctgggcgccaagtggaccgaccaggccgataccgccgtgccgctggccgagctcaagcgcatcggcgagcgcatcaccaccgtgcccgagggcttcacggtgcacccgctggtcgccaagctgctcaatgaccgccgcaacatggccaagggcgaggtcaacctcgactggggcatgggcgagcacctggccttcgccacgctggtggcctcgggctacgccgtgcgcatcaccggccaggactcgggccgcggcacgttcacgcaccgccacgccgtgctgcacgaccagaaccgcgagcgctggaacgacggcttctacgtgccgctgcagaacgtctcggaaggccaggcgccgttcaccgtgatcgactcggtgctgtccgaagaggcggtgctggcattcgaatacggctactcgtcggccgaacctaacacgctgaccatctgggaagcccagttcggcgacttcgtcaacggcgcgcaggtcgtcatcgaccagttcatcaccgccggcgaagccaagtggggccgccagtcgggcctgaccctgatgctgccgcacggctacgaaggccagggtccggaacactcgtcgggccgcatcgagcgcttcctgcagctgtgtgccgaccacaacatccaggtggtgcagccgacctcggccgcgcagatcttccacctgctgcgtcgccagatgatccgcccgttccgcaagccgctggtcatcttcacgcccaagtccctgctgcgcaacaaggatgccggctcgcccctgaccgatctggccggcggcagcttccgcccggtgatcggcgaggtcgacgagtcgatcaaggccgcctcggtcaagcgcgtgctggcctgctcgggcaaggtctactacgacctggtcaacgcccgccgcgagcgtggcgccgaccacgtggcgatcgtccgcgtcgagcagctgtatccgttcgcgcacaaggcgttcgagaccgagctgcgcaagtaccccaaggccaccgaggtgatctgggtgcaggacgagccgcagaaccagggcccgtggttctatgtgcagcaccatttgtacgaaaacatggccgacggccagaagctgggctacgcgggccgcgccgcttcggcctcgccggcggtgggctacctggccaagcaccaggagcagcagaaggcgctcatcgagcaggccttcgccgccaagtacaagggcttcatgctgaccaag

SEQ ID NO: 14985 - DNA, 2475 bp, Bordetella pertussis
gtgttttctcgcagtcagaagcatccgtcctggcgcctgtcgccatgcgtacttgcggccgccttgtgcgccgtcgcggtcggtagcgcggacaccgcccgcgcgcaggcgcccgccgccagcgcccagcattatgaaatcgcggccggaccgctggccgacgcactgacccgcttcgcgcgccgtgccggcgtggtgctgtcgttcgacccggccctggtgcaggggcgcagcacggcgggcctgcagggcgtgtacggcgtgcgcgacgggttcgcggcgctgctggccggctcgggcctgcaggcgcgcgccggcggcggcaacaactggtcgctggcggcgctgccgcgcggcggcgatgcgcagacgctggcgccggtgacggtgctgggcctggagggcgcgctggcgcccacggtcggctatgtcgccagtgccagcctgagcggcaccaagaccgatacgccgctgatcgaaacgccgcaatcgatttcggtggtgactcgcgaccagataaccgagcagggcgcccagacgctgaaccaggtgctgcgctataccgccggcgtggcgaccgagacgcgcggcgcgaccgcgacgcggctggaccagttcagcgtgcgcggtttctccgccgccacctatctggacggcatgcgcgtgttcggcggccgggacgccttgccccaggtcgacgcctaccggctcgaacgggtcgatgtgctcaaggggccggcttccgtgctgtatggccagggcggcccgggcggcgtggtcaaccaggtcagcaagcgtcccctggacgagcctttgcgcgagatcgaagtgcaggcgggcaatttcgatttccggcgggtcaacatggatttttccggcccggtggacgaggaccggcgcttcctgtaccgggtaaccggcgcggcctatatgtccgatggccaggtggatcacaccagggagcgccgctacttcgtctcgccgtcgttcacgtggcggcccagcgcggataccacgctgaccgtgctgaccaacttccagcgcgaccccgacatgggttcgtacggatcgatctcggccatgcgcacgctgctgtcggcgcccgacggcaggcggctgggcccgaaccactacgacggcgacgccgatttcgaaaagagcgaccgccgcagctattcgctgggctatcaactggagcatcgcttcaacgataccttcaaggcctcgcagaacctgcgtttccagcatgccgagggcgtctatcgcagcatctacggcgccagcaacaacaattacggctatctcgacaaggactaccgctactcgcagcgcggcctggccatcagcgacgtggacgtggatgcgttcacgatcgacaacaacctgcaggcgcgcttcgataccggggcgctggcgcatacggtgctggtggggttcgactaccagcgcgtgcagaccgacaccttgtcgggctatggcagcgcgccgccgctcgacgtgttcgatccggactatcacatgggtatcgagcggccgccgtttacgtccgatcagacccagtacaactaccagaccggcctctacctgcaggaccagatcaggctggatcgcctgtcgttgctgctgggcgggcgctacgactggtcgcgcacccacaccggcaccgacaacctggccaacggctcgcacagcagctcggcgctcgccgccgaggcgttcaccggccgggtcggggcgatctacaacttcgacaacggcgtggcgccgtacgccagctactcggagtcgttcgagccgcagaccggcacgggctggaacaacacgccgttcaagccgaccgaaggcaagcagtatgaggtcggcgtgaaataccagccgccgggctcggccacgctgctcacgctggcggccttcgacatccggcgcaagaacctgcccaccaccgacccggatcccacccatatgtgcggcgtttcgcgctgctcgatacaggccggcgaagtgcgcacccgcggcatcgaactggaggccaagaccgaaccgctgcgcggcctgagcctgatcgccgcctattcgtacctcgacaacgaatacgagaaggcctatccgaacacgaccgggttggacctcaagggcaagaagccggtggccgtgccggcgcaccaggcgtcggcctgggcccgctatcaactgcaggagggcccgctggccggcctgggcatgggcgcgggggtgcgctacatcggcagttcgtacgccaacgaaaccaacacgctcaaggtgccatcggtgacgctggtggacatgatgctcgactacgacctgggccgggccagccccgcgctcaagggcatgcaggtggcgttgaacgtctccaacctgttcgacaaggaatacatcggctcgtgcctgtccgattcgtggtgctggtatggctaccagcgttcgatcaaggccagcttgcgctatcgctgg

SEQ ID NO: 14986 - DNA, 1353 bp, Bordetella pertussis
atgaatacccgagttctcaccggcatcaccaccaccggcacgccgcacctgggcaattacgcgggcgcgatccgccccgccatccaggccagtacccagccgggcgtggacgcgtttttcttcctggccgactatcacgcgctgatcaagtgcgacgatccggcgcgggtggcgcgttcgcggctggagctcgccgccacctggctggccgcggggctggacccggaacgcgtcacgttctatcgccagtcggacatcccggaaatcaccgagctgtgctggctgctgacctgcgtgacccccaagggcctgatgaaccgggcgcacgcctacaaggcgtcggtggaccagaatgccgccaagggcgtcgagccggatgacggcgtgaccatgggactgttctcgtatcccgtcctgatggccgccgacatcctgctgttcaacgccaaccaggtgccggtcgggcgcgaccaggtccagcacctggaaatggcgcgcgatatcgcgcagcgtttcaaccacctgtatggccgcgaattcttcgtcctgcccgaagtggtgatcgccgaggaggtcgcgaccttgccgggcctggatggccgcaagatgtccaagagctacaacaacaccattccgctgttcgaaggcggagcggcgggcctgcgcaacgccacgcagcgcatcgtcaccgattcgcgcctgccgggcgagcccaaggacgccgaggcctcgcacctgtacatgctgtaccgcgccttctccacgcagcaggaatccatggcgtttcgccgccagctcgaagaaggcatgggctggggcgacgccaagcaggccttgtacgaacggctggagcgcgatctcgcgccgatgcgcgagcgctatgtcgaactgatttccaaccccggcctgatcgaggacatcctgcaggtcggcgccgccaaggcgcgcaagctggcgcaaccgctggtccgcacgctgcgcgatgcggtgggcctgggcgtcttgcagccggctgcggccaaggccgcccagccggcccgcaaggccgccaaggacgcgcgtttcgtcagcttccgcgacgaggatggcagtttccgtttccggctgcttgccgccgacggggaagagttgctgtgctcggtgcctttcgccaatcccaaggaagcgggcgcgctgatgcgccgcctgcaggacgaggcgcccgagcaggccttgcgcggccacgatgacgtgtcgtatgcggcctggctggatggcaaggaagtggcgtacggaccgcaagccgccgatgccggcgcgcgcgatgcgctgctggccaaggcccgcgaggccctggcccaactggctgcagcc

SEQ ID NO: 14987 - DNA, 2373 bp, Bordetella pertussis
atgcctgaaacctccgctaccacgaacgccgcaccgggcgtcgatcacgcccggatcattgcccaactggccaccgaaatcggcgcccgagcctcgcaggtcgcctcggccgtggaactgctggacgacggcgccaccgtgccgttcattgcccgctaccgcaaggaagccaccggcgggctggacgacggcgccctgcgcaccctagaggtgcgcctgggctacctgcgcgaactcgaagagcgccgcggcgcgatcctggagtccatcacgcagcagggcaagctgacgcccgaactgcagcaggaaatcgccacggctgagaccaagcagcgcctggaagacctgtacgcgccctacaagcccaagcgccgcacgcgcgcccagatcgcccgcgaagccggcctcgagccgctggccgacgccatcctggccgatccggcctgcgatcccgcggcgctggcggcgcagtacctcaacccggaagcctcgatcaacgacgccaaggcggccctcgacggcgcgcgcgatatcctggccgagcgccatgccgagaacgccgacctgctggccgacatccgcgagcatctgtggagcaccggcctgctctattcgaaaatggtcgagggcaaggaaaccgacggcgcgaacttccgcgactggttcgatttcaacgagccgctgcgcacgctgccttcgcaccgcatcctggcgctgatgcgcggccgccagcaaggcgtgctggaattgcgcgtgggcctggaagccgacctcgaggccgagacgccccacccctgcgtggtgcgcatcgcctcgtttctcaagctgggcaacggcctgttcgccctggacgccacgccgcgcgcgcgctggctgggcgaggtatgccgctggacgtggcgcgtcaagctgctgacggcattcgaaagcgaattgttcggccgcctgcgcgaaagcgccgaagccgaggccatccgcgtgttcgccgccaacctgaaggatttgctgctggccgcgccggcgggccccaagacggtactggggctggaccccggcatccgcaccgggtgcaaggtggcggtcatcgaccgcaccggcaaggtcgtcgatacggccacggtctacccgttcgagccgcgccgtgaccgcgaaggcaccatcaagacgctggcggccctggcggcgcgccacaaggtcgagctcatcgccatcggcaacggcaccgcctcgcgcgaatccgaaaagctggtcggcgacatgatggcccgctttcccgacctcgcgttgacgcgcgtggtggtctccgaggccggcgcctcggtgtactcggcctcggaaacggccgcgctcgaattccccgacctggacgtgacgctgcgcggcgccgtctcgatcgcccgccgcctgcaggatcctttggccgaactggtcaagatcgatcccaaggcgatcggcgtgggccagtaccagcacgacgtcaaccagcgcgagctggcccgttcgctggatgcggtggtcgaggactgcgtgaacgccgtgggcgtggacgtcaacaccgcctcggcggcgctgctggcgcgcgtctcggggctgaacacgctgctggccaagaacatcgtggcctggcgcgacgagaacggcgccttccccacccgcgacatgctgcgcaaggtgccgcgcttcggcgagaaggctttcgagcaggccgccggcttcctgcgcattcccaacggcgacaatccgctcgatgcctcggcggtgcacccggaggcctatcccgtggtggagcgcatcgtcgcgcgcatcaaggccgacgtacggcacatcatcggccagcgcgaggcgctcaagggcgtgtcgcccagcgacttcaccgacgagcgcttcgggctgcccacggtgcgcgacatcttcgccgagctggaaaagcccggccgcgatccgcgcccggaattcaagaccgcgcagttcaaggaaggcgtcgaaaccctcaacgacctgttccccggcatggtgctcgaaggcgtggtgaccaacgtcgccaatttcggcgccttcgtggacatcggcgtgcaccaggacgggctggtccatatttcggcgctggccgagaaattcgtcaaggatccgcgcgacgtcgtgcgcgtgggccagaccgtgaccgtcaaggtgctcgaggtcgacgtggcgcgcaagcgcgtggccctcaccatgcgcctgaacgatgccgccgagccggcccgccgtggcaatggcgcgggagccggggccgcgcgcggcgccgatcggggcgcccgccgtccgcaggcggacaacggcaagggcgcgccggccaacagcgccatggccgacgccttcgccaaactcaagcgc

SEQ ID NO: 14988 - DNA, 1122 bp, Bordetella pertussis
atggccatcatcaagtccatcgaagtctgcgtggcgcgcgtcccgatggacaaggtcacctatctgtccaaccgcaccgtcgtggaccgccactacgggctggtgaaagtgcgcagcgcggacggcgtcgaaggcatcggtttctgctacgtcggcaaccaggccggggagatcttccgggtcgccgtcgagcaattgctcgggccggtgctgatcgggcgcgattcgctggccgtggaagggctgtggcgcgagatgtaccaggaagcgctgctgcagggccgcatgggcatggtcatgcgcgcgctcagcgcgctggatatcgccctgtgggacctgaacgcgcgcgccgcgaacctgcccctgcacaagtacctgggcgccgtcgagctcgacagcgtggcggcctacgccagcggcggctattacgtggagggcaagaccgccgggcagctgggcgaagagatggccagctacgtcgagctggggttcaaggcggtcaagatgaagaccggccgctggtcgccgcagggcgaggagtcgcgcgtgcgggccgcgcgcgaggccatcggcgaggacgtcgagctgatgctggactgcaacaacggctgggtggataccgtgcaggcgatggaatacctgcggcgcatggagccgtacaacccgtacttcatcgaggagccgttcagccccgatgacgtggaaagccacgcgcgcctggcccggctgacccgcattcccgtggccaccgccgagatcggctacggccgctggtaccacaagcagctgctggacatgggcgcggccgccatcctgcagacggacgcggcggtctgcgggggcatcaccgagtggaagcgcatcgcggcaatggcggccggctacggcatccagatgtgcccgcactggttccacgatgtgcatgcgccgctggccgcggccacgcccaacgcgcggtacgtggagttcttctgggacgaccaggtgctgaacttccgccggctggtggaccgccagctcgagcacaaggacggacgcgtcatcctgcatcaaacccccggcctgggcttcggattcgacgagaatgcggtcgccaggtacgggcgctggacgacggtgtcc

SEQ ID NO: 14989 - DNA, 1896 bp, Bordetella pertussis
gtgtgtcttgatgcttgcctgacgccgggcctcgccgatcgcgaccctgtcgggcgtgcatgcgatcgcgcgtacgtcatcgatcgtccggtgtttcggtctgccatgggtaattgccgcccatcgcacttccgcggaaacggcactcatgcggccatgaacggtgaatcatgcgcccagcgggggaaaaggacccataagatgcaagagtctgaatttttccaactctcagggaccacagccgtcctgctcctggtggccttctacggcgccactttcctgatgtcgttgatgatcgggcagaagaaggagaacgtcgatggctacatggtctccaacagctcggtcggtttcgggctgtcggcggccagcatgatcgccacctggatctgggccgcgtcgttctacgccagcgccacctccggcttcaagtacggcctgtccggccccatccaatacggtttctggggcgcgctgatgattctgttcatctacccgttcggcaagcgcttccgccagctggcgcccaaggcccacaccctggccgaggtcatccacgcccgccacggcgcgtccagccagatgatcatggccgtctccaacatcgtcggcagctgcatcagcctgatggtcaacttcaccgccgccggcgcgctggtctcggtgctgagcccgctgtcgttcatccagggcgtgctgatcgccggcctgggcgtgctgtcgtatacgctgtggtcggggttccgcgcctcggtgatgaccgacttcgcgcaactggtggccatgatcctggccgcggtcatcatcatcccgctcattttcttcaacgccggcggccccgacatgctgcaggccaacatgtggcggctgagcagcgagcaggccgacttcttctcgaccacggccatcctggaacagggcgcgccctacttcgtggcggtactggcctatgccatcggcaaccagaccatcgcccagcgcctgttcgcggtgcgcgaggacctgatcaagccgaccttcctgaccgccaccatcggctacggcgcggtggtgatcggactggacatgctgggcctgctggccttgttcgtcggcctggagccggtcaacggcaacatgaacaacatcatcccgcagatggcctcgacctacctgccgcccgtcgggatcgcgctgttcttcatcctggtggtgggctcgctgtcctccaccgccgactccgacctggccgcgctgtcggccatcgtgataacggacatctacgccaagaacctggccggcggccgccccgatccgcgccgcatgctgtggtggggccgcgcgaccatgatcgtggccaccatggtcggcgtgatcttcgccagcctgcggctggacatcctggtcatgctggtgttcgtcggcgcgctgtggggagccatcgtgtttcccgtcatcgccagcttctactgggaccgcgtcagcaacagcgccttcttctggtcggtgatctcggcggtggtgctgtttaccatcgtgcgcttcgaactggtgccgatcgaaggcgccgtggcggtgttctatgaaatctgcgcggccatcggcggcggcgtggtgatcggcctgatgagcttcgccttcttcggccgtgtcaccgccctgacgctgggcacgctggcgaccctcatcctgctgccctgcttcgtcggcacgctgcgcgaatacatcgtgctgctgggttcgctgacggcctacggcgtcagcaccgtggtctgcgtggccctgagcctgcgcaaccaggagcgcttcgatttcagcctgctggccgagcgcgtcacctcgttccactacgagaaggcgcgcatgatgggcgccaagcctgcggcccccgccgcccaaccccagcctgcccgcggc

SEQ ID NO: 14990 - DNA, 1059 bp, Bordetella pertussis
atgtccggcaatactctgggaacccttttctgcgtcacgaattttggcgagtcgcatggcccggccatcggctgtgtggtggacggctgcccgcccgggctgccgctggaggccgccgacatccaggccgagctcgaccggcgccgccccggcacgtcgcgccacgtcacgcagcgccaggaagccgaccaggtcgagatcctgtcgggcgtgtacgaaggggtcaccacgggcacgcccatcgggctgctgatccgcaacaccgacgcgcgcagcaaggattactccaatatcgccgacaccttccggcccggccacgccgacttcgcctattggcgcaagtacggcgtgcgcgacccgcgtggcggcgggcgctcgtcggcgcgcctgaccgcgcccacggtggccgctggcgcgatcgccaagaaatggctggccagccagttcggggtgcgggtgcgcgggtacatgagccaactgggccccatcgccatcccgttctccagctgggacgacgtgccgggcaatgccttctacgcgcccaacgcggccgtggtgcccgaactggaagcctacatggaccagctgcgccgcgacggcgactcggtcggcgcgcgcatcgaggtggtggccgaagggctgccggcagggtggggcgagcccatctacgatcgcctcgatgcggacatcgcccacgccatgatgggcctgaacgcggtcaagggcgtgtcgctgggcgctggcttcgagagcatcgcgcagcgcggttccgagcacggcgacgagatcaccccggaaggcttcgccagcaatcacgcgggcggcgtgctgggcggcatttcgaccggccagccgattaccgtgtcgctggcgatcaagcccacttccagcatccgggtcgaacggcgctcggtcaaccgcgccggcgagccggtgatggtgcagactctcggccgccacgatccttgcgtgggcatccgcgccacgcccatcgccgaggcgctgctggcgctggtgctcatcgaccatgcgttgcgccagcgcgcccagtgcggcgga

SEQ ID NO: 14991 - DNA, 915 bp, Bordetella pertussis
atgatgcagacactggggttcgtcggcttgggcatgatgggcttgccgatgctcgaaaacctggccggcgacgagcgctggcagatcctggcctacgaccgctcgcccgccccgttcgagcggctggccggccacccggcctggggcaaacgcctgcgcgcggccgccggcctgcaggaactggccgcctgcgacacggtgatcaccatgttgcccaacagcgccatcaccaacgcggtggtgctgggcggcgacggccagcccgggctgatcgacctgctcgagtccggcgccgccatcgtcgacatgggctcgtccaacccggccgatacgcggcgcctgtccgaacagctggccgcgcgcggcctgacgctgatcgacgcgcccgtctccggagccgtggccaaggcctccaccggcacgctggccatcatggccggcgccgccgaggccgacctgcggcgggtgcgccccatcctggaacgcatgggcgcggccatcatccacaccggcgcggtcggctcggcgcacgccatgaaggccctgaacaactatgtctacgcggccggcctgctggccgtctccgaagccatggtgatcgcgcgccgcatggagctggacctggaggtcttcaccgacgtgctcaacgcctccagcggccgcaacgtcgccagcgaaaccaagctcaggcagttcatcatccccggcacctacaacggcggcttcgcgctggcgctgatggccaaggacctcggcacggcgcaaagcctgcaggcgctgaccggcgtgcaggcggaccagctggcgctgtgcgccgagctgtggcggcaggcgctggcgcaactgcccggcggcgcggacaacaccgagatccaccgcttcctggcgcagcgcacgccagccaccgaacccgcc

SEQ ID NO: 14992 - DNA, 2967 bp, Bordetella pertussis
atgttgctgaccaagaaaaccagcggagccgctgcgggcgcctccgagtcgcacttcatccagagcctgcgccgcggcatggcgcaagcgctgcccacgatggaccgccgcaccttcctgcgccgctcgggcctgggtgtgggcgccggcctggccgccacccagctgtcgctggtcaagcgcgccgaagccgccgaaggcgatggcaaggtggccatcggcaataccaagatcgaagtccgccgcacggtctgtacgcactgttcggtgggctgtgccgtcgacgccgtggtcgagaacggcgtctgggtgcgccaggagccggtgttcgattcgcccatcaacctgggcgcgcactgtgccaagggcgcctccgtgcgcgagcacgggcacggcgagcaccgcctgcgctatcccatgaagctggtcaacggcaagtaccagcgcatcagctgggataccgcgtacgaggaaatcaccgccaagctgatgcagttgcgcaaggaaagcgggcccgactcggtctactggatcggctcgtccaagcacaacaacgagcagtcgtacctgctgcgcaagttcgtcagcttctggggcagcaacaactgcgaccaccaggcgcgtatctgccactcgaccacggtggccggcgttgcgaatacatggggctacggcgccatgaccaattcgtacaacgacatgcagaactccaaggtggcgctgtacatcggctcgaacgccgccgaggcccacccggtctcgatgctgcacatgctgcacgccaaggaaaccggctgcaagatgatcgtggtggacccgcgctttacccgtacggcggccaaggccgaccaatacgtgcgcatccgctccggcaccgatattccgtttttgttcggcctgctgtaccacatcttcaagaacggctgggaagaccaggcgtacatcgacgcgcgcgtctacggcatggatgaggtcaaggccgacatcctggccaagtggtcgccggacaaggtcgaggaagcctgtggcgtggacgaggccacgatgtattcggtggccaagaccatgcacgagaaccggcccggcacgctggtgtggtgcatgggccagacccagcactccatcggcaacgccatggtgcgcgcttcctgcatcgtgcagctggcgctgggcaacgtcggcaagtccggcggcggcgccaacattttccgcggccacgacaacgtgcagggcgccaccgacgtgggccccaaccccgactcgctgccgggctactacggcctggccgaaggttcctggaagcacttcgccaacacctggggcgtggactacgagtggatcaaggaccgctacgcgtcgccggccatgatgaccaagccgggcatcaccgtgtcgcgctggatcgacggcgtgctcgagaaccccgacctgatcgaccaggacaccaacctgcgcgccgtgttctattggggacacgcgcccaactcgcagacgcgcgggctggaaatgaagcgggccatggacaagctggacctgctggtggtggtcgacccgtatccgtcggcgaccgcggcgatggccgccatgccgggcaaggccgaagacctcaaccccaaccgggcggtctacctgctgccggccgcgacgcagttcgagaccaacggcagctgtaccgcttccaaccgttcgctgcaatggcgcgagaaggtcatcgatccgctgtgggagagccgcaccgaccacatgatcatgcatcagctggccgagaaacttggctttggcaaggagctcagcaagaactacaagatgcagaaggtcaagggcatggacgagcccgtggtcgaggacatcctgcgcgagatcaatgcctcggtctgggccatcggctacacgggccagagccccgagcgcctgaaggcccacatgcgcaacatgcacgtgttcgacgtcaaaacgctgcgcgccaagggcggcaaggacgccgagaccggctacgacctgaccggcgactacttcggcctgccgtggccatgctggggcaatcccagcctcaagcatcccggcaccgccaacctgtacgacaccagcctgcacgtgatggacggcagcggcaacttccgcgccaacttcggcgtcgagcgcaacggcgtcaacctgctggcggccgacggctcgcactccaagggcgccgacctgaccaccgggtatcccgagttcgaccacgtgctgctcaagaaactgggctggtgggaggacctgacgccggaagagcagaaggccgccgaaggcaagaactggaagaccgacccgtcgggcggcatcatccgcgtgaccatgaaggtgcacggctgccatccgttcggcaacgcgcgggcgcgcgccgtggtgtggaacttccccgacgccattccgcagcaccgcgagccgatctacggcacgcgcccggacctggtcgccaagtaccccacgcacaacgacctcaagacgttctggcgcctgcccacgctgtatacctccttgcagcagaagaacgttgccgagaagctgtacgagaagttcccgatcatcctgacctcgggccgcctggtcgagtacgagggcgggggcgaggaaacccgctccaacccctggctggccgaactgcagcaggagagcttcgtcgagctcaaccccaaggcggcggccgatcgcggcatccgcaacggcgaccgggtgtgggtcctgacgccgaccggcgcgcgcctgaacgtgcaggccctggtgaccgagcgggtcggccccgatacggctttcatgccgttccacttctcgggtcactggcagggcgtggacatgctggccagctatccggaaggcgcggcgcccatcgtgcgcggcgaagcggtcaacacgggcaccacgtacggctacgactccgtgacgatgatgcaggaaaccaagaccacgatctgcaacatagaaaaggcc

SEQ ID NO: 14993 - DNA, 1155 bp, Bordetella pertussis
atgatacggtcactgttcgcggcgctgctggcaagcgccctgctggcgacggcgggggcgcagactgccgcgccgtccgccgacgcgcccgccatgggcggcatccagagcgccaatatcttcgaggtcaagcccgacgccagcgagcagccgggctatgccgagcagaccaatgccgaacgcgccaaggtgcagccgggcaacaatgcgcccatgtggcggcaggtcaactcgggccagcccggctacagcagcctgccggccagcgaggcccccgaagccggcgtgctgatccagcgtttcgtccagtatcccggctcgcagtacaccacggccggcgaggcctggcgccaggtgcgcaacaactggctcatcccgtacggcggcggcctgctgctgatcgtgctggtggcgatcgcgctgttcttcctggccaaggggccgatgaagctgcgcgaggccgagaccggtcgccgcatcgagcgcttcacgtacttcgagcgcgccgcgcactgggtcaacgccacggccttcgtcatcctggcgctgacgggcatcgtcatcgcgttcggcaagttcttcctgctgcccatcatgggcagcgcggcgttcggctggatgacgtggctgctcaagaccgtgcacaacttcgtgggtcccgtgttcgcggtgtcgctgctggtggtcatcctgaccttcatcaaggacaacctgccgcgccgcgacgacctgatctggttgcgcaagggcggcggcctcatcaccggcgcgcacgtgccttcgcatcgcttcaatgccggcgagaagatcatgttctgggtcggcatgctgttcctgggcgcgctggcggtggcctcgggcctgttcctggaccaggtgttcccgggcctgtcgtacgtgcgcggcaacatgcagatcgcccatatggtgcatgccgcgtcggtcgtcctgatgatgtgcatgatcatggggcacatctacctgggcaccatcggcatgcgtggcgccttcaaggccatgaagaccggctatgtcgatgaaacgtgggcgcgcgagcaccacgagctgtggtacgacgatatcaaggcgggcaagattcccgcccagcgcacgcccgacaaatcggccaagcggctgacccgtccggcgggcgcc

SEQ ID NO: 14994 - DNA, 1431 bp, Bordetella pertussis
atgccggatgttcctctcaagagtgcttccatggcccaaacgctttacgacaaactctgggacgcccacgtcgtccaccaggaatccgacggaacctgtatgctctatatcgaccgccacctgctgcacgaagtgaccagcccgcaggcgttcgaggggctggcgctggccggacgccagccgtggcgcgtcggggccaacctggccgtggccgaccataacgttcccacgctcaaccgcgcccagggcatcgaagacccgatctcgcgcctgcaggtcgatacgctggacgacaactgcgccaagtacggcatcaccgaattccgcatgaatgacctgcgccagggcatcgtgcacgtcatcggcccggagcagggcgcgaccctgcccggcatgaccgtcgtctgtggcgactcgcataccagcacgcacggcgcgctgggcgcgctggccttcggcatcggcacttccgaggtcgagcacgtgctggccacgcagacgctgctcatgaagaaagccaagagcatgcagatcaacgtcgagggcgagttgccgttcggctgtaccgccaaggacgtggtgctgcacatcatcggcatcatcggcacggctggcggcaccggccacgccatcgaattctccggcagcacgatccgcggcctgtccgtcgagggccgcatgacggtgtgcaacatggccatcgaggccggcgcgcgctcgggcatggtggccgtcgacgacaagaccatcgattacttccgcggccgcccgttcgcgcccgtcggcgtgctgtgggaccaggccgttggctattggcgcacgctgcactcggatgccggcgccaggttcgaccgcgtcatcaacgtcgatgcgcgcgacatcaagccgcaggtcacctggggcacttcgcccgaaatggtgctgcccgtcgatggccgcgtgcccgatcccgatcgcgagaaggacgacgtgcgccgcagcggcatggaacgcgcgctcgagtacatgggcctcaagcccaatacacccctggtcgatatccgcgtcgatcgcgtgttcatcggctcgtgcaccaactcgcgcatcgaagacctgcgcgcggccgcggtcgtggcgcgcggcaagcgcgtggccgccaacgtgcgccaggccatggtggtgccgggttccgggctggtcaagcaacaggccgagcgcgaggggctggacaagatcttcatcgaagccggcttcgagtggcgcgagccgggctgttcgatgtgcctggccatgaatgccgaccgcctcgaaccgggcgagcgctgcgcctcgacctccaaccgcaacttcgaaggccgtcaggggcagggcgggcgcacgcacctggtcagcccggcgatggccgccgccgccgcggtggccggccatttcgtcgacgtccgctcgttccgt

SEQ ID NO: 14995 - DNA, 1488 bp, Bordetella pertussis
atgctgacacagataaagggcgaatgggtgctcgggttcgccgacggcaaccaccgcatgctgtgcgacgccagcgtcgtctacgaaggcgagcgcatcgtgcacgtgggtacggagttcgacggcgtggccgaccgcgtgatcgatgcgcgcggctgcctggtggcgcccgggttcatcgacacccatgtgcattccggccatcgcgccttgcacaagctgctggccgatggcggacgcccggacctgttcggccagccgtacatggacgtcacgatcgcgcgcgacgggacgcggatcaagggttatcccaactacctgagccgcgaggaggccgcggtcgatcccggcattgccctgcatgccgcgttcaccgtggccgaactgctgcgcaatggcgtgacgacgttcgtcgaactgggcggccacgtgatggtgcaggaagcgttgtggcgcgaatgcgagcggctgggcgtgcgcggctacctggggcccggttacgacagcgggcgatgggccgccgacgaccagggccgcctgcggcgcgttccgtatccggacggcggcgatcatctgttcgaggaggcggttgcgttcatcaagcgcgtccaggcggccggcaacgacctggtcaacggcatcctggtgccgcgcgaggtcgagaactgcagcgtcgacatcctgcgccgtaccgtgcaggccgcgcaggaactgggcgtgccgatggccacgcatgcgggctacaacgtcatcgagttctacgaaacggtgcgcgagcatcgcatgacgccgatcgaattgctgcacagcgtcggcatgctggggccgcggctgaacatcggccacgccaatctgatttccgatagcccgcgcctgaactattcgggcggacgcgacctggccctgatgggcgagcatcgcgtctccatctcgcattgcccgatcaacatcgtgcgccgcgcgcgcgtgctcgactcgtggaagaagtatcgcgaggcgggcgtcaacctgaccataggcagcgacacctatccgcgcgacatggtcatgaacatgcggaccgcgtcctatcacggcaaggtcatgagccatgacctgaacgcggcgagcgcggccgaagtgttcgaggccgcgaccctggggggcgctcgctcgctgggacgcacggatatcggccggctggagccgggcgcgcgcgccgatgtgatcgccatcaacgtgggccgccaggatgtgctgcgctatgggccgatctgggaccccatccgcagcctggtcgagtgcggcgtgggcgatgacgtggagctggtggtgaccaacgggcaggtgcgcatggagcaggggcgtattgccggcgtggacctgggcgcgctgcgcgccgaggcgcagcagtttgccgacaacgtctggcgcgacctgcaggattgggatccgttgcggcgcacggcgcaggccatgtgcccgccgtcgttctgcccggactgcatg

SEQ ID NO: 14996 - DNA, 1179 bp, Bordetella pertussis
gtgtctatgtactacattcacactgctactctcagaatgtcccaaccgcacccactgcgcatcgcgcacgctgaggccgcgataggctttggcgggcaagagcagcgcatcctcaaagaagccctggccatgcgcgagcgcggccatcatgtcgaactcatttgccggccccaggccaggttgatcgagcgcgcactcgacgcaggcatccgcgtgcacaccgtgcccatgggcggcttgcgcaatttcgtgcgcggcgtgccgcgcgtgcggcgcatcctgcgcgagggcggcttcgacgtgctcaatacgcacagccgcatcgataccctgctggcgggcgccggcgcgcgcctggcgggcacgccgctggtggtgcgcacgcgccatctgagcaatcgcgtcaactcgatgctgtcgtacacgtggataccgcaccgcgtcagcacggtcagcgatcatgtgcgccgctacctgatcgagcgtggcgtgtcgcccgcgcatatcgaaaccatctactcgcccatcaacctgcccccgccgggcctgcgctcgacgctgcgcgacgagctgggcctgccggccgacgccgtggtggtggcgtgcgtggcgatcatgcgggccaccaagggacatcgcgaactgatcgaggcgctgcgtccgttgatggccagccgtccgcaggtgcatctggtgctggtgggcaatggttcgccgctgttcgagcaactgcaggcgctgatcgccgagctcggattgggcgagcgcattcacatgctgggctttcgcgatgacgtgcccaacgtgctggcaggcagcgacatattcgcgctgcccacgcgcaaggaggcgtcgggcacggtctttgtcgaggccgcggcgtgcggcttgccggtggtcggcgtggatgtcggcggcgtcagcgagatgttgcgcaacggcgagacggggctgctggttcctcccgacgacgcggctgccctgcagggggcgctgcgcagcctgatcgacgatgcatccttgcgcgcgcgcatgggcggcgccggcgagcgcatggtgcgcgacgaaggcaagttctcgctggcccgcctggccgaacgtaccgagctggtttatcgtaaatggctcgccgagcggcgcgatgcgcccaccgctgcatcccgatcggcgcggcaatcc

SEQ ID NO: 14997 - DNA, 1128 bp, Bordetella pertussis
atgacgcaagcagtaggcctcgtcggttggcgcggtatggtcggttccgttctcatgcagcgcatgcgtgacgagaacgacttcgcactcatcgaacccgtattcttttccaccagcaacgctggcggcgccgcgcccgcctgggccgaaggcgcgggctcgttgcagaatgcctacgacatcgacgctcttaagaaactgccgattatcgtcaccgcccagggcggcgactacaccagcgaggtctatcccaagctgcgcggcgcgggctggcaaggtatctggatcgacgccgccagcaccctgcgcatggccgacgacgccatcatcgtgctcgatccggtcaaccggccggtgatcgacgcggcgctcaagcgcggcgtgcgcaacttcgtgggcggcaactgcacagtcagctgcatgttgatgggcctggccggcctgttcaacaacgacctggtcgagtggatgagctccatgacctaccaggccgcttcgggcggcggcgcgcagcacatgcgcgaactgctcacccagttcggcctgctcaaccaggcggtcaagcctctgctcgacgatccggctgcggccattcttgatatcgaccgcggcgtactggcgcgccagcaggacccctcgttgccgcaggagcatttcggcgtgccgctgggcggcaacctgatcccctggatcgacaaggatctgggcgacggcatgtcgcgcgaagagtggaaggccgaggccgagaccaacaagatcctgggccgcggcgcggcgttcggcacgccggccacgcccatcgatggcctgtgcgtgcgcatcggcgccatgcgctgccatagccaggcactgaccatcaagctcaagcgcgatgtgccgctcgacgagatcgaggacctgatcgcggccggcacgcaatgggccaaggtcgttcccaacaccaaggaagacacggtgaaggcgctgacgccggtggccgtgacgggcacgctggatatcccggtgggccgcctgcgtaagctgtcgatggggctgcagtacctgggcgccttcacggtcggcgaccaactgctgtggggcgcggccgagccgctgcgccgcatgctgcgtatcgcgctggccgaagcc

SEQ ID NO: 14998 - DNA, 2595 bp, Bordetella pertussis
atgcgattcgacaaacttaccaccaagttccagcaggccctggcggacgcgcaaagcctggccgcccgtaacgatcatccctatatcgagcccgtccatgtgctggcggccctgttgggcgaccccgacagcggcgcggccagcctgctggcgcgcgccggcgtcgccgtcaaccgcgtgcagccggccatcgacagcgccctgaaaggcctgccgcaggtgcagggcgacgacaatgtccaggtcgggcgcgagctgcaaagcgtgctcgtgcgcaccgacaaggaggccgcgcggcgcggcgacacctacatcgccagcgagctgttcctgctggcgctggccgacgacaagggcgacgccggccgcatcctgcgcgaggcgggcctgcagaagaaggccctggaagcggccatcgacgccgtgcgcggcggcgagaacgtctcgggcgccgaaggcgagtccaaccgcgaggcgctgtccaagtacacgctggacctcaccgagcgcgcccgccagggcaagctggatccggtcatcggccgcgacgacgaaatccgccgcaccatacagatcctgcagcgccgcaccaagaacaaccccgtgctgatcggcgaacccggcgtcggcaagaccgccatcgtcgaagggctggcgcaacgcatcgtcaacgacgaggtgcccgagacgctgcgcggcaagcgcgtgctctcgctggacctggcggcgctgcttgccggcgccaagttccgtggcgagttcgaggaacgcctgaaggccgtgctcaaggagctggcccaggacgacggccagaacatcgtcttcatcgacgaactgcacaccatggccggggcgggcaaggccgaaggcgccatggacgccggcaacatgctcaagccggcgctggcgcgcggcgagctgcattgcatcggcgccaccacgctggacgaataccgcaagtacatcgaaaaggatgccgcgctcgagcgccgcttccagaaagtgctggtcggcgagcccgacgtggagtccaccatcgccatcctgcgcgggctgcaggagcgctatgagctgcaccacggcgtcgagatcaccgatccggccatcgtggcggcggccgagctgtcgcaccgctacatcaccgaccggttcctgcccgacaaggcaatcgacctgatcgacgaggccggcgcacgcatccgcatggaaatcgactccaagcccgaagtgatggaccggctggaccggcgcatcatccagctcaagatcgaacgcgaagccgtcaagaaggaaaccgacgacgcctccatgcgccgcctggccgtgatcgaggaagagctggagaagctgcagcgcgaatacaacgactacgaggaaatctggaaagccgagaaggccgccgtgcagggcacgcaggccatcaaggaagagatcgaccgcgtgcgcgccgagatggccgaactgcagcgcaagggccagttcgacaagctggccgagctgcaatacggcaagctgcccgagctcgaggcgcgcctgaaggccgccgacagcgccgagcgtgaagccggcgaatccgacagcggcaagccgcgcctgttgcgcacccaggtgggcgccgaggaaatcgccgaggtcgtctcgcgcgccaccggcatcccggtggccaagatgatgcagggcgaacgcgacaagctgctgcgcatggaagatttcctgcacaagcgcgtcgtgggccaggacgaagccgtgcggctggtttccgatgccatccggcgttcgcgcgcgggcctggcggatccgtcgcgcccgtacggttcgttcctgttcctcgggcccaccggcgtgggcaagaccgagctgacccgtgccctggcggatttcctgttcgattccgaagagcacatgatccgcatcgacatgagcgaattcatggagaagcattccgtggcgcggctgatcggcgcgccgccgggatacgtgggctacgaagaagggggctacctgaccgaggcggtgcgccgcaagccgtacagcgtgatcctgctcgacgaggtcgaaaaggcgcaccccgacgtgttcaacgtgctgctgcaggtgctcgacgacggccgcctgaccgatggtcaggggcgcacggtggacttccgcaacacggtcatcgtcatgacgtccaaccttgggtcgcagcacatacaaagcatggcgggcaagccgtacgaggtcatcaaggaagtcgtgtgggacgagctcaagcacacgttccgccccgagttcctgaaccgtatcgatgaagtcgtggtcttccatggcctggaagcccagcacatcgagtccatcgcccggatccagctcaagcggctgggcgagcgtctcgagaagcaggagatgcgcctggacgtgtccgatgcggcgctggcggaaatcgcacgttcgggcttcgacccggtgttcggcgcccggccgctcaagcgagccatccagcagcagatcgagaatccggtcgccaagctgattctcgaaggcgtgttcggaccgcgcgatgtggtgccggtcgactggcaggacggcaagttcgtcttcacgcgcactttgcaa

SEQ ID NO: 14999 - DNA, 810 bp, Bordetella pertussis
atgtctcgcattgcattggggctggcctacgacggctcggcctggcagggttggcagacgcagccgcatggcgtgaccgtgcaggaccaggtcgaagccgcgctggcttcgttcgcgggcggcggcgggccggtggcgacggtctgcgccgggcgcaccgacacgggcgtgcacgccgccatgcaggtcattcatctcgacaccgatttgcagcgtcgcgacgagtcctgggtgcgcggcgtcaacgcctttctgccgcccagcatcgtcgtgcaatgggcgcgtccggtgagcgaggcctttcatgcgcgcttctcggcgcgctcgcgcacctacgtctatctgctgtggcgcggccgcgtgcggccggcgctatgggccggccgagccggctgggcattccagccgctggacgtgccggccatgcgcgccgcggcccgcgcgctgctgggcgagcacgatttctccagtttccgctcctcgcaatgccaggcgcgccatccggtgcgcacgctccaccgcctcgacatcgacgagcgcggcgcattcctggtgttcacgctgcgcgccaatgcctttctgcaccacatggtgcgcaatctgatcggcgccttgctgcaggtggggcaggggcgcgaaccggtggcctggatggatgcgttgctgtgcgcgcgcgacaggcggctgggcgcgcccacgttcatgcccgacggcttgtatctttcagcgatcgaatacccggcggagttcggttttgacgaactcgacggtgggataacgctgctctcgccgttcacgggcgctttaggg

SEQ ID NO: 15000 - DNA, 1083 bp, Bordetella pertussis
atggccggggaacacatggcacctaacagcaaacacctatcgcttcatatgcccgtcgatttcatcgacgccctggcacaggcggaatcgatcgacgagattctgaaggtcgtagcgacgtggttcatggagatgttcgtcgcggatcgtgcgtctattacatttccggtcaatgattcccaccttcgtgtagtagccctggaaggcaaccgtgttattgacgtggacgcgccagttcccatccatgggacgatggtggggcgagtgttcagcaggggacaggccgaaatttgtgacgaccttgccgcgtccacggatctagattgtcttattctcgcctcccggggccttggctcatgcctcgatgccccattgcgcagcggccgcgattgttatggaacgatcaacgttggacgccgggatcggaatgggttcacgttggcggacatgcgcaagatcgaagccctggcgatgtggattgcgacattgatccgcgtccacaggcaggtggaaaggctgacgcatctatcccgcacggatcctctgacccagatcatgaatcgacgggcgtttaccgagagcttccagaccaggcgcctggaaggcgagcggcgtcgtgccgaagttggtacgggattggggttcgccgtagtcgatatcgaccacttcaagcagatcaacgatacctacggacatgacgtgggagatgtcgttctcgcctttgtcggaaagatgatgaatgagtttttccgggagagcgactgcgtagcacgctttggcggcgaggagttctgcgtattgatgcaggatgtcgatgaagggggcatgcaacggctgctcgagcgatttcgagttgccctgggcgattgtgtcgttacccactcggccggaaccgtgtcgatcacggcgagcattggcgccgtgctggtgaagacgtccgtagccggtatcgacagggcattcagaagcgcggacctggccttgtacaaggccaaggccgacgggcgcaatcgtgtccggattgctccatctgctgagcaaagccatgcgggcaaccccgcgaaccgcctgtgctatcccggc

SEQ ID NO: 15001 - DNA, 774 bp, Bordetella pertussis
atgcctcaccgcctatcccacgccgcgccagtcctcgccgggcaggcctgcgcggcccatcctcccgccacctatccctccagcgcccagcccgccgtggcatcggcgcgccgctacatgctgctatcccggcccagccgccgcctgcgggtcgccatcctggacgaccaccccgccgtcgcggtaggcctgagcgcatacctgggcgaacacggcgacttcgaggtcgcgctgaccgagaccaacgccgtggcgctggcccaccagctcaagcgccatccttgcgacgcggccgtcatcgatttcttcatgccggcgcaaagctgggacggcgtggacttcatccgccgcctgcgccgcctctgccccgacatggccgtgatcacgatttcggccggcaaggcgcacgaaaccgagtacgcggccttccgcgccggcgccaacggtttcctgcccaagggcgcgccgctgagcctgctggccgaactgatccgcacgaccgtcgtcagccgacgggcgttcttcagcgcccgcacaggccagttgcgcgccaccatccccgacccgccagactcccggctcaccaatgccgagcgtgaaatcctgcgccaaatcgcgaagggcttttccgtaacccagatatccggccgcctattgcgcagcaagaaaacggtcagcacccacaagcgccgcgccatgaagaaactgggcctggccgacgacctcgcgctggccctgtacctgagcgagaaattcgagcaaaacgtctatggc

SEQ ID NO: 15002 - DNA, 1947 bp, Bordetella pertussis
atggtacaaattaccttgccggatggctcgcagcgccagtatcccggtcccgtgacggtggccgaggttgcgcaatccataggcgccgggctggccaaggcggcgctggccgggcgcgtcgctttcgacggcgccgagccccggctggtcgataccagcttccgcatcgacaatgatgcgcagctcgccatcgttaccgccaaggatgccgacggcctggacctgatccggcactccacggcgcacctgctggcctatgccgtgaagtcgctcttcccggatgcccaggtcaccatcggcccggtgatcgacaacgggttctactacgatttttcgtataagcgcccctttacgccggaagatctgcaggcaatcgagaagaaaatggccgaactggcgcgcaaggacgaggtcgtcacgcgcgaggaatggtcgcgtgacgaggctgtcgcctatttcaagggcatcggcgaggtctacaaggcggagatcattgcctcgattccgtccaacgaaaccctcagcctgtaccgggaaggcgatttcatcgacctgtgccgcggcccccacgtgccctcgaccggcaagctgaaggtcttcaagctgatgaaggtggccggcgcctactggcgcggcgacagcaagaacgagatgctgcagcggatctacggcacggcgtgggcgagcaaggacgaccaggatgcctatctgcacatgctcgaggaggccgaacggcgcgaccatcgcaagatcggccgcgaactcgacctgttccatttccaggacgaggctcccgggctgatcttctggcatccgaagggctgggcgctgtggcagcaggtcgagcagtacatgcgcaaggtgtaccaggacaacggctaccaggaggtcaaggcgccgcagatcctcgacctgacgctctggaagaagacgggccactgggacaactaccgcgagaacatgttcacgaccgagtccgaaaaccgggtctacggtctgaagcccatgaattgccccgggcacgtgcagattttcaatgccggcctgcattcctatcgcgaattgccgctgcgttacggcgagttcgggcaatgccaccgcaacgaaccgtccggctcgctgcatggcatgatgcgggtgcgcggtttcacccaggacgacggccacattttctgtaccgaagaccagttgcaggacgagtgcgccgcattcaccgccttgctgcagaaggtctacaaggacttcggttttaccgaggtgctgtacaaggtcgccacgcgtcccgagaagcgcatcggcagcgacgaaatctgggacaaggccgaaaccgccctgatggaaagcctgcgtcgtaccggctgcgaattcgagatctcgccgggcgagggcgctttctacggccccaaggtcgaatacacgctcaaggacgccatcggacgccactggcagtgcggcacgattcaggtggatttttccatgcccgtgcggctgggcgcggagtacgtcgaccagaacgaccagcgtcgtccgccggtcatgctgcaccgtgccatcctcggttcgctggagcgttttatcggcatgctgatcgaaaaccatgccggtgccatgccgccctggctggccccgttgcaggcggtggtatgctgcatctccgagcattccgccgaatatgcggcacaaataacacaaagcctgaaaaaacaaggctttagagtgcaggctgatttgcgtggtgaaaaaatcactcgtaaaatccgtgaacacagcctgcagaaaatcccgtatctcctcgtcgttggtgacaaggagatgcaaaacggcaccgtcgcggtgcggggattgggtggccttgatctgggcgtcatcgcactcgatgatttcatcgcgcgcctggccgaggatatctccacccgccgcaatgtcacccaactcgcgagcgctgct

SEQ ID NO: 15003 - DNA, 447 bp, Bordetella pertussis
atgggcttgctcaacttcatcaaggaagtcggagagaaactgttcggcgccagcgaagcgaaggccgcgaccgccgacgagctgaaaaaggaattggacaagcacgggctgtcggccgaagggctggacatctccgtcgatggcgacaaggtcacggtcaagggcagcgcggcctcgaccgaggcggccgagaaaatcgtgctggccctgggcaacaccgtgggcgtggcgcaggtggacaaccagctgcagaccgcgcaggccgcccccgccgccgtgatgtacacggtacagaagggcgacaccctgtggaagatcgccgaagccaactacggcaagggcaagggcgccaagtacccgacgattttcgaggccaacaagcccatgctcagcgacccggacaagatctacccgggccaggtgctgcgcattccgccgcttgccgag

SEQ ID NO: 15004 - DNA, 492 bp, Bordetella pertussis
gtgcgtctgataggcctggacggagaacagctgggcatcgtcaagattgccgatgcgttccgtctttccgagcaaagcgacgtggacctggtcgagatcgcgcccaatgccgatcccccggtttgccgcttgatggattacggtaagttcaagtaccaggaacagaaacgccaggccgaggcccggtcgaagcagaaggtcatccaggtcaaggaagtcaaattccgcccggcgaccgacgagggcgactaccaggtcaagctgcgtaacctgcgccgcttcctcgaagagggagacaaggccaaggtcacgctgcgcttccgtggccgggaaatggcccaccaggaactgggcatgcgggtgcttgagcgggtgcgcgacgatctgatcgaacttgcccaggtcgaggcgatgcccaagctggaaggccgtcagatggtcatggtgcttgcgccgcgcaagaaggccgtcggcaagcccgacgcggcaggc

SEQ ID NO: 15005 - DNA, 396 bp, Bordetella pertussis
atgactggcatcgttatcgtcgtgcacgccccgctgggcagtgccatgcgcgagagcgtcgcccacgtgctgggcgacgcgaccgaagcgctggccgtgcacgatatccatcccgaggatttgcccgacgacgcggcgccccgggtactggcggatatcctgcgcgtggaccaggggcagggcgtgctggtcctgaccgacctgatcggcgccacgccggccaatatcgccaagcgcgccgtggccgatgcgcaggcgcagggcatccagtgctgtgtgctggcgggattgaatacgccgatgctgttgcgggccctgacttatcgcaatctttcgctggccgagacgcgtgaaaaggcgctcgcaggcggcgtccagggttgcttgcgtgtagac

SEQ ID NO: 15006 - DNA, 354 bp, Bordetella pertussis
atggcgcagcagttccgccgtgccgggccggcagtccgacccggcgggcacgggattgcggctgccgccattgccagatcagaacttatgcctagctcagacatcgtcattagcaacaaactcgggctgcacgcccgggccgccgctaagctgacgcagctggccagccgcttcagcagcgagatcttcatttcgcgtggcgcccagcgcgtcaacgccaagagcatcatgggcgtgatgatgctcgctgccgggctgggggtgacagtcaagctggaggcctcgggcagcgatgccgaccaggcgctgtccgaaattcaaactctgttcgacaataagttcggtgagcaggaa

SEQ ID NO: 15007 - DNA, 1827 bp, Bordetella pertussis
gtgagcaggaatagcaaaacctcaggttccggcagcccgccgtcggcgcgggctgcatcgtctacgcgctcttccatcccatccctttctcctgatatcgccgccggtccggtcgtctgcctgcacggcaaaggcgtggcgcgcggctacgcgatcggccgcgccgtggtcatgggtgcggcggcgctcgaagtcgcccactaccgcatcgcgcccgaggatgccgcggccgaaagccagcggctgaccgaggcgctggccaaggcgcaggccgatctgctgcagatggccgacaccctgcccgaggacgcgccgcgcgagctgggcgccatgctcaatgtgcaccggctgctgctgggcgatcctttgctggccgagcaggccctggcgctgatcgccgagcggcactacaacgccgagtgggcgctgaccgcgcaagggcagatcctgggccagcaattcgaggccatggaggacgaatacctgcgcgagcgcggcggcgacgtgcgccaggtcatcgaacgggcgctgcacgtgctggccggcacctcggccatgctgcccgatggcgcccagctcgatggcaatgatccgctggtggtggtggcgcacgatatttctccggccgacatgctgcggctgcgcggcgggcgcttcgccgccttcgtgaccgacctgggcggtccgacctcgcacaccgcgatcgtggcgcgcagcatgggcgtgccggcggtggtcgcgctgggcaatgtgcgcgaactggtgcgcgacggcgacatgctgatcgtcgacggcgcggacggcgtggtggtgctcaacccttcggcccgcatcctggccgagtaccaggcgcgccagcgggtgtacgccgacgagcgcgccgagctggcgttgctgcgcgacgagccggctgtcaccctggatggtatcgatatcgtgctgcatgccaacatcgagctgcccgaggaggccagcctgtcgctggcctgcggggctcatggcatcggcctgttccgcagcgaattcctgttcatgggccggcccgacctgcccggcgaggaagaacagtacgaggcctatgcatcggtggtgaaggtgatggcgggccggccggtgacgatccgcacgctggacatcggcgccgacaagacgctcgatgacgaggcgacggtcgccaccaatccggcgctggggcagcgggccatccgctattgcctggcgcggcccgagatgttcgccacgcagttgcgcgccatcctgcgggcttcggcccatggcccggtgcgggtgctgattccgatgatcgcgcacatgcacgaggtacacgccacgtacgccgcgctggagtccgcccgccgcgagctcgatgcgcgcggccagccctatgcggcgcgcgtcgaggtgggggccatggtcgaaatcccggccatcgcgatcgcgatcgaaccgttcgtccaggcgctcgatttcctgtccatcggcaccaacgacctgatccagtacacgctggcgatcgaccgcggcgaccacgatgtggcgggcctgtacgaccccttgcatccggccgtgctgcgcctggtggccaacaccatcaacgcgggcgagcgcgccggcaagccggtggccgtatgcggcgagatggcgggcgatgcgcggctgacgcgcctgttgctcgggctggggctgaccgaattctccatgcacccgcagcagctgctcgacgtcaagcgcgaggtccggcgcgcccattccaatgccttgcgggtcaaggtcgccgcggccctgaaccgcgccctgcccatcgaccccgatacgctcgacgcgctc

SEQ ID NO: 15008 - DNA, 948 bp, Bordetella pertussis
atgctgcaaatcgacgctgaacacacccgccgcgcgctgcgcttcacggcggtcatcgatgccctgcgcgacgcctttcgcggcggcgcccatgtgccgccgcgccacgtccatgccatcgagtccggcggcgcgcaaggcacgacgctgatcatgccggcctggaacgacgccggctatttcggcgtcaaggtcatcaatatctttcccgccaacacccaccaggggctgcccggcctgcatgcgacctacacgctgtacagcgcccgtaccggggtgccgctggcgcaggtcgacggcgacgtcgtgaccgcctatcggaccgccggggcggtcgcgctgggcgcttcgtacctggcccgcgccgacgccagggtgttgctgatcctgggctccggccggatcgccggactggtggcgcaggcgatgcgcgcagtgcgcccgatcgagcgcgtactggtgtggaacgtgcggccggccggcgcgcagcgcctggccgccgaattgcgcgagcagggcttcgacgcgcaggcggccaccgatctgcaggccgcggtcgggcaggccgacatcgtcagctgcgccaccttgtccaccgagccgctggtgcgcggcgagtggctgcggccgggcgtgcacctggacctgatcggcagtttcacgcccgaaatgaaggaaaccgacccgcagtgttttgccggcacatccgtgtacgtggataccgatgaggcgcccaccaaggccggcgacctgctcgaagccttcgcggccggcacgctggcgcgcacgcagatccgcggcaccctggccgacctggcggcgggccgcgcggcgggcaggcgcgatgcggccgagatcaccgtgttcaaggcggtgggcagcgcgctggaagacctgacgctggccgcccaggtatacgaggcgcggcagggcgatgttcaggcacaa

SEQ ID NO: 15009 - DNA, 1188 bp, Bordetella pertussis
atggccaagatactttgcgtcctgtacgacgacccggtcggcggcatgccggccacctatgcgcgcgacagcctgccggcaatcgcgcgctaccccggcggcgccacgctgcccacgccgttggcgctcgacttcacgccgggccatctgctgggctgcgtgtcgggcgaactgggcctgcgccccttcctgcaggcgcgcggccacaccctggtggtgactgcggacaaggacggcccgggcagcgtgttcgagcgcgaactgcccgacgccgacgtggtgatctcgcagccgttctggccggcctacctgaccgcggcgcgcatcgccaaggccccgcgcctgaagctggccatcacggccggcatcggctcggaccacgtcgacctgcaggccgccgcgcaacatggcctgaccgtcgccgaggtgacctacagcaacagcatcagcgtctccgagcatgtggtgatgatggtcctggcgctggtgcgcaattacctgccctcgtaccaatgcgtgctcgacggcggctggaacatcgccgattgcgtggcgcgctcgtatgacctggaaggcatgcaggtaggcgcgggccgcatcggcagcgcagtgctgcggcggctcaagccattcgacgtggggctgcactacaccgaccagcaccggctgccggccgccaccgaacaggaactgggcgcccggtaccatcccgacgcggccgcgctggccggcgcgtgcgacgtgatctccctgcattgcccgctgcacccgggcaccgagcacctgttcgacgccgccatgctggcgcgcatgaagcgcggcgcctatctcatcaacaccgcgcgcggcaagatctgcgatcgcgacgcggtggtccaggccctggccagcggccagttggccggctacgcgggcgacgtgtggttcccgcaaccggccccgcgcgaccatccctggcgcagcatgccgcaccatggcatgaccccgcacatctcgggcagctcgctgccggcgcaggcccgctacgccgccggcacccgcgaaatcctcgaatgctggctggacggccgggcgatccgcaccgaatacctgatcgtcgaccagggccggctggccggcgcgggcgcgcatgcttacacgccgggcgacaccaccgccggctccgagaacgccgcccggttccatcca

SEQ ID NO: 15010 - DNA, 1008 bp, Bordetella pertussis
atgccgacgatcgaagatcgatacgcccggctggacgcggcccgctggctggccgcgcttgccgtggtattgctgcacagcgccgcccagaccgtatccgaccccgccgcctacggcagccacgcctggctggcggccaacctctacgactccgcggcgcgctggtgcgtgcccgtgttcgtgatggtcagcggcgcgctgctgctggacccggaccagccgcacgacgcgcggcgcttctacagccgccgcatggcccgcgtgtgcgcgccgctgctgttctggaccctcttctacctggcctggcgcaccgcgctggactggtgggacgacggccgcctggacttctcgttctggccccgcaaggtggccgaaggcgcgccctactaccacctgtggtacctgtacatgatcgtgggcctgtacctgttcgcgccgctggtgcggctgctgtacgcccgcagccagccgcgcgcccgcgcgctgtgggtggtggggatcctgggcgtggcggtgctcgatgcgctgtaccggcgcgcgctgggcggcggcaatgggctgttcctgacctggttcctgccctacctgggttatttcgtggccggccggctgatcttcgatggcgagttgcgcatgccacgtcccggcctggtgctggccgccagcgtggccgccacggcctggggagtcagcgccctgtccgattcgcgcgcgctggatctgtacttctatgattacttcagcgtcaccgtgcccttgatgtcgctggcggcgttccagctgatcgtcggctcgcccaggctgcccgccctgcccgccctggcgccgctcacgttcggcatctacctgatccatccgctgttcctggacctggcccaccgcatcggcgcggcgcgcgcctggcggccggacgcctggggcgtgccggcaatcacggccgccgtgttcgcgctgtcggcgctcgccagctggatgttgcgccggcatcggttgacccgccggctggtc

SEQ ID NO: 15011 - DNA, 1470 bp, Bordetella pertussis
atgacgcagtcctccgccacgcccaagccgcccgcgacgccccgccggctcgaccccgaagacgcccagcacgcactggccgaggtccaggagtgcctgcgccggcaacatctggtcgaagacctggtccatcgccaggaacagggcgacgacaaggcccacctggtggaagacctggtgcaccgccagcatgaggcggagctggcgaccctgatcaacgggctgcacccggccgacattgccttcatcctggaatcgctgcccaaggacgaacgccagacggtgtggcggctggtcagtaccgagcacgatgccgatgtcctgatcgaagtcgaagactgggtgcgcgaatcgctgatcgaggcgatggaccgccaggacctggtcgccgccaccggcagcatggacgccgacgagctggccgacctggcgcccgatctgccgcccgacgtggtggccgaagtccagaagggcctgaccgaggaagagcgtgcccagctgctcgaggccatgggctaccccgaggacagcgtcggcgccatcatggacttcgaaatggtccgggtgcgcgaggacgtgtcgctggaggtggtgttgcgctacctgcgccgcctgcacgaactgcccgaccacaccgaccagattttcgtggtcgaccgccaggacaagctgcaaggcgtcctgccgatcgccacgctgctggtcagcgagcccgataccgaagtgcgcgcggtcatgaactcggatttcctgaccctgggcccgctggattccgacgccgacgccgccagcgcgttcgaacgctacgacctggtctcggccccggtcaccgacgaacagggccggctgatcggccgcgtcaccattgccgacgtggtggacgtgatccaggaagactcgcaggagcaggcgctgtcgcgcgccggcctgcaggaagaagacatcttcgcgcccgtgctcatggccttgcgcaaccgcgccccctggctgctgttcaacctctgtaccgcggccaccgcctcgttcgtggcttcgcgcttcgaggataccgtcagccacatcgtgatcctggcgtttctcatgtccatcgtggcgggtatcggcggcaactccggcaaccagaccatgaccatgatcatccgcgcgctggccgtcggccgcatcaccggccgcaacctctggcaactggtcaagcgcgaaatgctggtcacgctgctggtgggattgtgcggcagcctggtggccgccctgttcgcctgggccatttccgattcgctgtccatcgccgtcgtcatgatggccgcgatgatctgcaacatgctggtcggcgcctcggtaggcgtcatggtgcccatgttgcgcgcgcgcttcggcaaggacccggccatcggctcgtcggtgctgctgaccttcgccaccgactcgctcggctttttcattttccttgggctggccacgatcttcctactg

SEQ ID NO: 15012 - DNA, 1062 bp, Bordetella pertussis
atggccctagtttccatgcgccaattgctcgaccacgccgccgagcacggctacggcattcccgctttcaacgtcaacaacctggagcaggtccaggccatcatggaagccgccgccgagaccgacagcccggtgatcatgcaggcctcggccggcgcccgcaaatatgccggcgaaggcttcctgaaatacctcatccaggccgccgtcgagtcgtacccccacatcccggtcgtcatgcaccaggaccacggccagtcgcccgcggtttgtcagggcgccatcgacctgggcttttccagcgtgatgatggacggctcgctgaaagaagacggcaagaccatcgccgactacgactacaacgtcgacgtcaccaagaaagtggtggacatggcccacaagctgggcgtgacggtcgaaggcgaactgggttgcctgggctcgctggaaaccatgcagggcgacaaggaagacggccacggcgccgacggcaagctgaccatggaacagctgctgaccgaccccgagcaggccgccgatttcgtgcgccgcacccagctcgacgcgctggccatcgccatcggcaccagccacggcgcctacaagttcacccgcaagcccaccggcgacatcctgtcgatcgcgcgcatcaaggaaatccacgcccgcctgcccaacacccacctggtgatgcacggcagctccagcgtgccgcaggacctgctggccgagatccgcgaattcggcggcgacatgaaggaaacctacggcgtgccggtcgaggaaatccaggaagccatcaagttcggcgtgcgcaagatcaacatcgataccgacatccgcctggccatgaccggcgcgatccgccgcttcttcgccgagaacccgagcaagttcgacccgcgcgaatacctcaagccggcccgcgccgccgccaaggcgatctgcgtgcagcgctacacccagttcggcaccgccggcaacgccagcaagatcaagccgctgccgctggccgacatggcgcagcaatacgccgccggcaagctggcccaggtggtgcag

SEQ ID NO: 15013 - DNA, 912 bp, Bordetella pertussis
ttgcgcgcgcccgatttttcgttgcggcagttgtcgtatttcctggcggccgccgaatgcgagtccgtgcagcaggctgcgcaggcattgcatgtgtcggcgcccgcggtatcgaccgctatcgcgcatctcgaagccctgctgggcgtacagctgtttcgccgccgccatgcgcgcgggctgatcctcaccgagcagggcagcgccttcgccgtgcagtgctgcggcatcctccaggaagcctgggggctgggcagcctgcaagggcgcggcgaactgcacgggcaggtgcgcgtcggctgcctcaccacctttgcgccgttcgtgattccccccttgctcacgcgcgtgcaacagcatctgcccggcgtgcgcctggcctggttcgagggccaccacgagtacctgctggagggcctgcgcacgggcacgctcgacatcgcggtgctgtacgacttcgagatcccgtccggcatcaagctggtggccttgcgcgccgcgccgctgcaggtggtgctgcccgcgtcccatgcgctggcggccaaggaaacgctggccaccagcgacctcaacaccgagccgctgatcctgctcgacctgccgcgcacgcgcgaatacatgctgacggccttcagctccaacggcgcgattccgcgcattgcccattcggtgctgtcgatcaatatgctgctgggcatggtggcggccggccatggcttctcgctcctgaatttctgtccgcccaatgccctgccgggcatgggcggcatcgtgtcgcgcgcattcgaatcgcatgtgcgtcaacccaatatcgtggcggcgtattcgttccgctatcactatccgcgcgccgccgccgcgatcgtggagcacatctcggagctggtcgacgaactcgtcatccaggcccac

SEQ ID NO: 15014 - DNA, 408 bp, Bordetella pertussis
atgaccaacccacccaaatcccccttcaccagcctgcccagcgggcgcgagccggtcctgcgcgtcatgcccatgcccgccgatgccaatatccatggcgacgtgttcggcggctggatcatggcgcaggtggatatcgccggctcgatccctgccgcccggcgcgccgccggacgcgtggccaccgtggccgtcaacgcattccagttcaagcaaccggtattcgtcggcgacctgctcagtttctatacctccatcacgcgcaccggcacgacctcggtcacggtgtcggtcgaagtgtatgctgaacgccagcgcctggacgccgaagtcgtgaaggtcaccgaagcggtgctcacctacgtcgccaccgacgaagcccggcgcagccgcccgctgcccaccctt

SEQ ID NO: 15015 - DNA, 1026 bp, Bordetella pertussis
ttgcagcttgtgccgcctataatcggggcgcgacgcttccggtcgcccgccgcctgcgccgtggcggcgccacgcctcccgtatcccattcccatcgccttgaccgacgcactcgacagatccgtttccgccgaattggtagccgtcctggtggcggtgacgcaaggagagccgcgcgtgctcaccaccgaggacgcccgcgcgctgccggccggcccgttcgaactggcgcaccgttcgctgcaggccggcctgcgcgcctgggtggagacccagacgcatcacccgctgggctatgtcgaacagctttacacctttgccgacagcgaccgttccaacgaggccggagcgcgcgtcatttcggtcagctacctgggcctgacgcgcgaggccggcgccaccggcgtggcgcaggtgggctggcagcactggtatcgctactttccatgggaagactggcgcgccggccggctggccatcatcgccgacgagatcgcgccccgcctgctggcctgggccggggcgggcgccgacgccgcggcccgggcgcagcgccgccagcgcgtcgccctgaccttcgggctggatggcgcgggctggaacgaggacatggtcctgcagcgctacgagctgctgttcgaggccgggctggtgcccgagtcgcgccacccggacgcctcgggcctgccggtggcggggcagtcgatgcggcacgaccatcgccgcatcctggccaccggcattgcgcgcctgcgcgccaagatcaagtaccggccggtggtgttcgaactgatgccgcccgaattcacgctgctgcagctgcagatggccgtcgaggccctggccggccgcggcctgcacaagcagaacttccgccgcctcatcgaacagcaggaactggtcgaggaaaccggcggcatggccagcggcgcggcggggcgcccggccaagctgttccggttccgccgcgacgtgctgctcgagcgcgccatcgccggcagcaaactgccgctggcgcggcaattc

SEQ ID NO: 15016 - DNA, 903 bp, Bordetella pertussis
atgggtgtgccggcgcggcgccccgccggagaggccgcgttggcctgtgtgctgggcattccgttcgactgcggcacgcatccgttccgggtgggcgcgcggcaggggccggacgcgatacgcgagcaatcgcgcctgctgcgcccgtacgacctggcgcgccgcgccggggtggacaacccggtggagttcctgcgcctgctggacctgggcaacgtggcctgcgtgccgggcgatccgcaggcttcctatccggccatcgagcaggccgtcgcgcaggtgctgcaagccggcgccattcccatcaccatgggcggcgacggcgcggtcacgctgccgcagctgcgcgcggtggcgcgccgctggccgggcgtggccgtgctgcatttcgattcgcacaccgacacctatcccatcgccggctacaacaccgccaccaccttcacgcgcgccgccgaggaagggctgatcgatctctcgcacagtttccacgtgggcacgcgcggcaattcgttcatgggcggcgtcatcgagtacggccgcgaagtcggctacacggtgatcccgtacgacgacttcgaccgcgaccaggccggcacgctggcgcgcctgcgcggccaattgggcgaccggccggtctacctgtgcttcgacatggatatcttcgatccctcctgcgcgccgggcgtgtgcacgccggagtggggcggcctctcgcccaaggagggcctgaacctgctgcgggccctgagcggcctgaacttcgtcgccttcgacgtcaataccgtatcgccgccgcaggacgtgggcggcgcgacggcgttcctggcggcctccgtgatgcaagaattctgcgccctggccgccgcggcggtacaggcctatccgcaagggcggccggac

SEQ ID NO: 15017 - DNA, 795 bp, Bordetella pertussis
atgagcaccaagttcctgaaaaccctcgccgcgttcgccctgggcgccgccgtgtttgcgcagcctgcgctggcgcaggacaagccgctgaagatcggcgtgaccgccggtccgcacgcgcagatcttcgaggtggtcaagcaggaggccgccaagcagggcctgaatatccaggtcatcgagttctcggactacgtgcagcccaacgtggcgctggcgtccggcgacctcgacgccaacagctaccagcaccagccgtacctggacaacgccaatgccgaccgcggctacaagctggtcagcatcgccaagaccgtgatcttccccatcggcgtctacagcaagaaggtcaagaacctgaacgagctgaaggacggcgcgcgcatcggcatccccaacgatcccaccaacggcgggcgcgccttgctgctcttgcaggagcatggcctgatcaagttgcgtccggaagccggcctgaaggccacgccgatcgatgtggtggagaatccgcgcaagctgcgcttcatcgaactggacgccgcccaactgccgcgctcgctggacgacaccgacgcctccgccgtgaataccaatttcgcgctggaagccggcctggatccgagcaaggacgcgctggtgcgcgaatcggccgagtcgccttatgccaacgtcctggtggtgcgcgagcaggacaaggaccgcgccgacctgcgcaagctggtttccatctaccagagcgcgccggtcagggagttcatcctcggcaagtacaagggcgccgtggtcgccgcctgg

SEQ ID NO: 15018 - DNA, 1320 bp, Bordetella pertussis
atgaaaatcacagtcgttggtaccggctatgtcgggttggtgtcgggcgcgtgcctggccgatatgggcaacgaggtgctgtgcctggacacggacgccgccaaggtggcgatgctgcgcgaagggcacatacccatctacgagccgggcctggaagacctggtcaagcgcaacgtggcgggcggccgcctgcagttcaccgacgacatcgccgccagcgtggcgttcggcgacgtccagttcatcgccgtgggcacgccgcccggcgaggacggctcggccgacctgcagtacgtattggcggcggcgcgcagcatcgcccgccacatgacggcccgcaaggtggtggtggacaagtccaccgtgccggtgggcaccgccgacaaggtgcgggcggccatgcaggaagtgctggccgagcgcggggtggaggtgccgttcagcgtggcctccaatcccgagtttctcaaggaaggcgcggcgatcaacgacttcatgagccccgaccgcatcatcgtgggcaccgacgacgagcacaccatcgacaccatgcgacgcatctatgcgccgttccagcgcacccacgagcgcgtgatggtgatggacgtgcgctcggccgagctgaccaagtacgccgccaacgcgatgctggccacgcgcatctcgttcatgaacgagatggccaacctggccgaggcgctgggcgccgacatcgaacaggtgcggcgcggcatcggggccgatccgcgcatcggctaccacttcctgtacccgggcatcggctatggcggctcgtgcttccccaaggatgtgcaggcgctgatgcgcagcgccggcgagcacgccctgcccatgcgcgtgatcgaggccgccgagacggccaaccaggcgcagaagctgcggctggcgcacaaggtggtcgcgcgctacggcgcggacctgcagggccgcacgttcgcgctgtggggcctggccttcaagcccaataccgacgacatgcgcgaggcgcccagcctgagcaccatcgccgacctgacgcggcgcggcgcgcgcatccgggtctacgacccggtggccatgccgcaggccgccaaggtcctggacgacaaccccgcggtcgaactggtcgacgacatgtaccaggcgctcgacggcgccgacggcctgctgatcgccaccgagtggaaggtgttccgggcgcccgacctgacccgcgtcaagcaattgctcaaggcgccgctgatcatcgacgggcgcaacctctatgtgccggccgacatgcgcgcgcagggcttcgattaccagggcataggccgcgca

SEQ ID NO: 15019 - DNA, 1146 bp, Bordetella pertussis
atgtttgagttctgtacgcatgcgaggacgctggttggcgctggcgccagcgacgccctgggagagacgctggcggcccggtggggcgcgagccgcgtcctgctggtgacggacggcgcgctggtttcactgggcctggcgggccggctgcgcgacgcgctgaccagcgcgggccatacggtggccatgttcgatgaggtggtcgcggatccgccggagtcggtggtcgagcgcgccatcacggcggcgcgcgatgcccgggcccagatgatcgtgggctttggcggaggttcttcgatggatgtggccaagctggctgccgcattcgccgggacgacgcaggacttgcgccaagcctatggcataggcctggtcgcggggccgcgcttgccgctggtgcaggtgccgaccacggcgggcaccggctcggaggccacgccgatcgccgtcgtgacgaccggcgagggcgccaaggccggcgtcatctcgcccgtgctgtacgccgacctggccgtcctggacgcctccttgacgctgggcctgccgccggccatcaccgcggccaccggtatcgatgccatggtgcacgcgaccgaagcatataccagccgggtgctcaagaatcccatttccgacgccctggcgcgcgaagcgttgcggttgctgtttcgcgcgttgccggtcgcttgccgcgacggcggcgacctggcggcgcggcaggacatgctgctgggcgcgatgctggcgggccaggcgttcgccaatgcgccggtgggcgccgtgcatgcgctggcctatccgttgggcagcgcattccatgtgccgcacgggctgtccaattccctggtgctggggccggtgctgcggttcaattcgctgcgttgcgagacccagtacgcggagctggcggacgtgatcctgccggggcatgccggcggcgtggcggaaaaggccgccgcgttcgtgcaggcgatggccgaggtggcaggggcgctggaactgccgacgcggctggcgcaggtcggcgtcacggcggcggacatcccggcgctggccgggctggccctgcagcaacagcgcctgctggcgaacaatccgcgcgatgtcacgctggccgacgccacgcgactctacgaagaggcgttc

SEQ ID NO: 15020 - DNA, 1383 bp, Bordetella pertussis
gtgatcggcgaggatgcgtccgccgcccggtgcggctcccgcaactcgccgcccgacgggctgcccacgccgcgccggtattgggccgccgctacggtcctgaccggcatgagcctggcggtgctcgatgccaccatcgccaacgtggcgctgccgacgatcgcgcgcgacctgaatgccgcgccttccgatgccgtgtgggtgatcaacgcctataacgtcgcggtggtggtcatgctgctgcccatgtcggcgctggccgagcgcgtgggcttccggcgcatgttcaccttcggcctgctgctgttcaccctgtcgtcgctggcctgtgtcttcgccgggcagctatggcacctgacgctggcgcgggtctgccagggcgtgggggcggcgacgctgatgtgcatgttcggcgggctggtgcgcaacatctacctcctgcgcatgctgggccgcggcatcagcatcaacgccacgacggtggccgtcatgtcggtgctggggccgacgctgggttcgctgatcctgtcggtggcgtcgtggcgctggattttcgccgtcaacctgcccattggcatcgtcatcatgtgcggcctgcgtttcctgcccgaggtgccgcgcaacaagatgccgctggattggctgagcgcgctgctggccatgctgacgctgggcattttcatttccggcgtggacctgctggggcacgacgtgctgcgcggcatcgggatgatcgccgtggctgtggccatcggctggctgctggtgcggcgcgccagcggccagacggcgccgctggtgccggtggacctgttgcgcatccaggcggtggcgtacgccgtggccgcctcggcctgtaccttcgccgcgcagatggcctcgtacgtggcgctgcccttctatttccagcaggtgcttgaacgcccctacctgcagatcggcctgctgatggcggcctggccggtgggcaccgccgtggtggcgccggtggccgggcggctgtccgaccgttacgcggcctcgacgctgagcggcgcgggggccggcatcatggcgctgggcatggcctgcctgaccctgctgccgaccacggtgtccaacccgtggatcatggccggcatgttcctgaccgggctggggttcggcctgttccagacgcccaataaccgcgccatgctgtcgtcggcgccgcgccagcgcagcggggcggccggtggcgtgcaggccaccacccgggtgttcggccagagcttcggcaccgcgctggtggccattgccttcagcgtctatccccagcacgggcccacgctggccctggcgctgggcacggtatgcgcctcgctgggcgtggtggtcaacgtggtgcgccgccgcgccgaggcc

SEQ ID NO: 15021 - DNA, 1371 bp, Bordetella pertussis
atgcttaatgtagtgatactcgccgccggactgggcaagcgcatgcagtccgatcttcccaaggtgctgcataccctggccggccggcccatgctcgatcacgtcatcggcagcgcgcggcagttgcagccggcgcgcatcatcgtggtggtcgggcacggcgccgatcgcgtcaaggcggccttcgagggccagcccggcctgcagttcgcgctgcagcagccgcagcatggcaccggccatgccgtgcagcaggcggtgccgcaattgctggaaggcgatggcgaggacgacgtcaccctggtgctctatggcgacgtgccgctggtgcagccggccaccttgcagaacctgctgcaggcgcgcggccgcggcgtcgccgtgctgaccgaggtgctggccgattcgaccggctacggccgcatcgtgcgcgatgcgcagggccaggtgtgccgcatcgtcgagcacaaggacgccagcgaggccgagcgcgccatcaaggaagtcaacaccggcatcctggccgcgcccacggcgcgcctgaaggactggctgggccgcatcaccaatgacaacgcccagggcgagtactacctgaccgacgtgatcggcctggcggtgggcgacggcgtgccggtgggcgccgcgcagcctggcgccagctgggagaccctgggcgtgaacagccgcgtgcagcaggcccagctggagcgcgcctggcaaagcgagctggcgcgccgccagctggaggccggcgtcaccctggccgatccggcccgcttcgacgtgcgcggcacgctgagctgtggccgcgacgtgttcatcgacgtggggtgcgtgttcgagggtacggttacgctgggcgacggcgtgcgggtgggcccgcactgcgtgctgcgcgacgtggccgtgcaggccggcgcgcgcatcgaggcatactcgcacctgcagcaggccaaggtgggccaggaagccgtggtcggcccgtatgcgcggctgcgtcccggcgccgacctgggcgagcgctcgcatgtgggcaacttcgtcgagatcaagaacagcgtgctgcaggccgatagcaaggccaaccacctggcctatatcggcgatgccgacatcggcgcgcgcgtcaatgtcggcgcgggcacgatcacctgcaactacgacggcgtgaacaagcatcgcacggtgatcgaggacgatgccttcatcggttccgatacccagctggtggccccggtgcgcgtgggcaagggcgcgaccctgggggccggcacgacgctcaccaaggatgcgccggccgggcagttgacgatttcgcgggcgcgccagagcaccatcgaaggctggaagcgcccggtcaagaaatcg

SEQ ID NO: 15022 - DNA, 930 bp, Bordetella pertussis
atgagttcctccgccccgctggcctcgcaggctgacctcgacgctttcatcgatgccgtctggctggaggacggcctggccgccaacacgctggcggcctaccggcgcgacctgagcgcgttcgcgcaatggctggagaacctcgcctgccatccgggcctggccaccggcgccagcctgcgcgaggcgggcaagggcgacatcgaggcctggttcgccgcgcgccacgcggaaagccgcgccaccacggccaaccggcggctggcggcgctgcggcgcttctacgcttgggcattgcgcgagcgcctgaccccgagcgatccctgcctgacgctggtcaccgccaagcagccgccgcgcctgcccaagaccctgtccgaggcgcaggtcgacgcgctgctgcaggcgccggacctggacaccgcgcgcggcctgcgcgatcgcgccatgctcgaaaccctgtacgccaccggattgcgggtgtccgagctggtctcggtcaaggcgctggacgtcagcctcaacgaaggcgtggtgcgggtcgtcatgggcaagggcggcaaggaccgcctggtgccgctgggcgcggaagccgcgcactggatcgagcgctatgccggcagcgcccgcccggagctgctgggcgcgcgcgtggccgatgcgctgttcgtgacggcgcgcgccgagccgatgtcgcgccaggccttctggcagctcgtcaagaaatacgcgctggcggccgatatccacgcgccgctgtcgccgcacgtgctgcgccatgcgttcgccacgcatctgctcaatcacggcgccgacctgcgcgtggtgcagatgctgctgggccatgccgacatttccaccacccagatctacacgcatgtggcgcgcgaacgcctgaaggcgctgcatgccgcccatcatccgcgcgcc

SEQ ID NO: 15023 - DNA, 876 bp, Bordetella pertussis
atggcgcgcccggcctgtgccgggaaatttcggtatggtgaaaaccccgtttgccctggagccatcttgtccgattccgccgcccccgttcgcgccgacgcgcccgccgtgctggtgcaattgaccgacatgcacctgttcgacgaaccgcatacggcgatgctgggcgtggataccgaagccagcctgcaggccgtgctgcggcaagtcggcgaggatggcttgaaccccgacgcgctgctgctcaccggcgacctgtcgcaggacggttcgccggcctcgtaccagcgcctgcacgccctgctggcgcagaccggcttgccggtgcgctgcctgcccggcaaccatgacgcgcctgccacgctgcgggcggaactgggcgcgtggagcgacccggtgctcgacctgggcgcctggcgcatcgtgctgctggattcgacggtgcccggctccaacggcgggcatctcgcagacgatcagctcgacttgctcagccgcgccgcccgcctcgccggcgaccgcccgctgctggtggccgtgcaccacaacccggtgcaaggcgaccccgactggcacgacaccatgatgctggacaacgcgcaactgctcttccagcgcctgcagcgcctgccgcaggcgcgcgtgctgctgtgggggcacgtgcaccaggaattcgactgccgccgccacaacctgcgcatgctggccacgccgtcgacctgtttccagttcgtcgtgcgcgacggcaagcattgcgtggacgacgccgcgccgggctatcgctggctgaagttgtatgcggatggatcgctggcgaccggcgtgcggcgcctggacggcgaccggtggcgcgccttgctgcgccagaacgccggt

SEQ ID NO: 15024 - DNA, 846 bp, Bordetella pertussis
atggcggtcctggaactcgtatcgcagcatcgctgcttcgatggctggcaacgctactatcgccatgcctcgaaggagatcggcctgcccatgcgcttttcggtcttcgtgccgccccaggccgcgcacggcccggtgccggtgctgttctacctggccgggctgacctgcaccgaggaaaccttcatgatcaaggccggcgcgcagcgcctggccgcccagcacggcgtgatgctggtggcgccggacaccagcccgcgcggcgccggcctccccggcgaggacgagcactgggacttcggcgtcggcgcggggttctacctcgatgccaccgccgagccgtggcgcagccactaccggatgtacagctacgtggtcgacgagctgcatggcatcgtcaccggcgagctgccgggcgacgcgggacgggtgggcatcttcggccactccatgggcggccatggcgccctggtgctggccctgcgcaatccggacaagttccgctcggtctcggccttcgcgccggtcgtcgcgcctgcccaggtgccgtggggccacaaggccttcgaacgctacctgggccccgaccgccaggcctgggaggcctatgacgccagcgcattgatgcgcacgctgcgccagccctatccggaaggcatcctggtcgaccagggcctggccgatggtttcctggtcgagcagctgcgtcccgagctgttcgaagcggcgtgccgccacgccggccagccgctgacgctgcgccggcacaagggctacgaccacggctattacttcatttcgaccttcatcgaggatcacatccggtttcacgtcgagcggctgggg

SEQ ID NO: 15025 - DNA, 618 bp, Bordetella pertussis
atggcagaacgtggtcgcccgcgcagcttcgaacggaccgaagcgctgcgccaggcaatggaagttttctggtccaagggatatgaaggggcctcgctggccgacctgacgtcggccatggggatcaatgcgcccagcctgtacgcggcgttcggctcgaaagaggccttgttccgcgaagcggtgcaacgctacgccgacaccgagggcgcgcgcacgcggcgcgccctgctggaggcgcccgacgcgcgcgccgccatcgaaggcatgctgctggccggcgcgcagacctgcacgctgaacggcaagccgcccggctgcctgatggtgctgggcgccaccgcgggcccggcgcagcatgcgccggtgcgcggctggctgtgcgagcaccgccgcacgatgcaggacctgatcctgcagcggctggagcaggggcgccgtgacggcgagatcggcccgggtgccgacctggccgcgctggcggccttctacgccaccgtcctgcatggcatgtcgatccaggcccgcgacggcgccgaccgcgcggcgctgcaagcggtggcgcggcaggccatgcacgcctgggacgcgctggcgcacccgcccgccgccgcccgc

SEQ ID NO: 15026 - DNA, 6200 bp, Bordetella pertussis
gagcgcgttatgccctataccaagtcttccgattcctgtcgcccggtcgcggcgacccccatcgacgcaagccgtatcggcctgcccgccccccagggcctgtatcacccgcacaacgagcacgacgcctgtggcgtcggcttcgtggcccatatcaagggccgcaagagccactccatcatccagcaaggcctgaagatcctggaaaacctggatcaccgcggcgccgtgggcgccgacaagctgatgggcgacggcgccggcatcctgatccagattcccgacgcgctgtaccacgacgaactggctcagcaaggcatcgtcctgccgccgccgggcgaatacggcgtggcaatggtgttcctgcccaaggaaaccgcctcgcgcctggcctgtgaacaggagctggagcgctcggtccgcgccgaaggccagatcgtgctgggctggcgcgacgtgccggtggacgtcgaaatgccgatgtcgcccgcggtgcgcggcctcgaaccggtcatccgccagctgttcatcggccgcggcgccgacgtgatggtgcccgacgcgctggaacgcaagctgtacgtgatccgcaagaccgccagccacgccatccagaacatgcgcctggcgcacagcaaggaatacttcgtgccctcggcctcggtgcgcaccgtggtctacaagggcctgctgctggccgaccaggtcggccgctactatcgcgacctggccgatccgcgcacggtatcggcgctggcgctggtgcaccagcgcttctcgaccaacacgttccccgcctggccgctggcccacccgtaccgcatgatcgcccacaacggcgaaatcaacacggtcaagggcaacttcaactggctgcgggcccgcgagggcatgatgcagtccgcggtgctgggcgacgacctgaagaagctgtaccccatcgtctacgaaggccagtccgataccgccacgttcgacaactgcctcgaactgctggtgaactccggctattccctggcgcacgccatgatgatgatgatcccggaagcctgggaacagcacacgcagatggacgaaagccggcgcgccttctacgagtaccacgccgccatgatggagccctgggacgggccggccgcggtcgccttcaccgacggccgccagatcggcgccacgctggaccgcaacggcctgcgtccggcgcgctacctgatcaccgacgacgacatggtcatcatggcgtccgaggcgggcacgctgtcgatcccggaaaaccgcatcgtcaagaaatggcgcctgcaaccgggcaagatgttcctgatcgacctggagcagggccgcatcatcgacgacggcgagatcaagctgcagctggccaacagccgcccgtaccgccaatggatcgaacgcctgcaggtcaagctggaatcgctgcccgcgcccaggaccgcctcgccggccacccagacggccgtgccgctgctcgaccgccagcaggcgttcggctggacccaggaggatttcaagttcatcctcgaacccatggccgccagcggcgaggaagtgatcggctcgatgggcaacgatgccccgctggccgtgctgtcgaaccgctccaagccgttctacaactacttccgccaactgttcgcgcaagtgaccaacccgccgatcgacccgatccgcgagcagatggtcatgtcgctggtctcgttcatcggccccaagcccaacctgctcgacatcaacaacgtcaacccgccgctgcgcctggaagtgacgcagcccgtgctggatttcgccgccatggcgcagatccgcgacatcgaccaggtcaccggcaagaaattccgcagttatgagctggacatcacctatccggccgcctggggctcggaaggcatcgaggcgcgcgtggcggcgctgtgcgcgcgcgccgtcgacgcggtgcaaagcggctacaacatcctgatcgtgtccgaccgcctggtcgacgccgaccgcgtggccatcccggcgctgctggcgacctcggcggtgcaccagcacctgatccgcgccggcctgcgcaccaacgccggcctggtggtggagaccggctcggcgcgcgaagtgcaccatttcgcgctgctgggcgggtacggcgccgaagccatccacccgtacctggcgctggagtcgctgggccacctggccgaccccgacaaggcgatcaagaactacatcaaggccatcggcaagggcctgaacaaggtgatgtccaagatgggcatctccacctacatgtcgtactgcggcgcgcagatcttcgaagcggtgggcctgcagcgcgcgctggtggacaagtacttcaccggcaccgcctccaacatcgaaggcatcggcatcttccaggtggccgaggaagcgctgcgcatgcatcacgccgcgttcggcaacgacccggtgctggccaacgatctggatgcgggcggcgagtacgccttccgcatccgcggcgaagagcacatatggacgcccgactccatcgccaagctgcagcacgcgtcgcgctcgaacaactaccgcacctacaaggaatacgcgcagatcatcaacgaccagagccgtcgccacatgacgctgcgcggcctgttcgaattccgtttcgacccgacccgcgccatcccgctggacgacgtcgagccggccaaggaaatcgtgcgccgctttgccaccggagcgatgtcgctgggctcgatctcgaccgaggcccactcggtgctggccgtggccatgaaccgcatcggcggcaagtccaacaccggcgagggcggcgaggacgaactgcgctaccgcgccgagatgcgctcgggcggcagcgccatcaaggacggcgacacgctcgcctcggtgctgggcaacgaccgcgtcgaggccgacgtggccctgcgcgccggcgactcgctgcgttcgcgcatcaagcaggtggcctcgggccgcttcggcgtcagcgccgagtacctgtccagcgccgaccagatccagatcaagatggcccagggcgccaagcccggcgaaggcggccagctgccgggccacaaggtctccgagtacatcgccaagctgcgctactcggtgcccggcgtgggcctgatctcgccgccgccgcaccacgatatctactcgatcgaggacctggcccagctcatccacgacctgaagaacgtcaatgcccgggcctcggtctcggtcaagctggtctcggaagtgggcgtgggcacggtggccgccggcgtggccaaggccaaggccgaccacgtcgtcatcgccggccatgacggcggcaccggcgcctcgccggtctcgtccatcaagcacgccggcacgccctgggagctgggcctggccgaaacgcagcagacgctggtgctcaaccgcctgcggtcgcgcatccgcgtgcaggccgacggccagatgaagaccggccgcgacgtgatcatcggcgcgctgctgggcgccgacgaattcggcttcgcgaccgccccgctggtggtcgaaggctgcatcatgatgcgcaagtgccacctgaacacctgcccggtgggcgtggccacgcaggatccggaactgcgcaagaagttccagggcaagcccgagcacgtggtgaactacttcttcttcgtcgccgaggaagtgcgcgaaatcatggcccagctgggcatccgcaggttcgacgacctgatcggccgcaccgacctgctggacatgcgcgccagcgtcgagcactggaaagcgcaaggcctggatttctcgcgcgtgttccatcggatcgtctcggacgccgacgtgcgccagaccgaagagcaggaccacggcctggcgggcgcgctggaccaccagctgatcgagcgcagcaagcccgcgctcgagcgcggcgagaaagtctcgttcatcgtgccggtgcgcaaccgcaaccgcaccatcggcgccatgctgtccggcgcggtggccgcgcgctacggtcacgacggcctgcccgacgacaccatccacatccagtgcaacggcaccgccggccagagcttcggcgcgttcctggcgcacggcatcacgatggacctggtgggcgaagccaacgactacgtgggcaagggcctgtcgggcggccgcatcgtagtgcgctcgcccaacgacttccgcggcttcggcccggaccacatcatcgccggcaacaccgtgttgtacggcgcgctgtcgggcgaagccttcttcaacggcgtggcgggcgagcgcttcgcggtgcgcaattcgggcgcggccacggtggtcgaaggcaccggcgaccacggctgcgaatacatgacgggcggcaccgtcgtggtgctgggcaccaccggccgcaacttcgccgccggcatgtcgggcggcgtggcgtatgtctgggatccggaccgtaccttccgcgagcgctgcaacagcgccatggtcgaactcgagccggtgctgccgcacgccgagcagcaatcggccaacgagatcgaatcgtggcacagcgcgcagcgcggcggcgagcgcagtaccgacgaaaccattctgcgccgcctggtcgaagaccacttccgctatacgggcagcttccgcgcccgcgagatcctgggcgactgggaagcgtcgtgcggcaagttcgtcaaggtcatgccgacggagtatcgccgcgcattgggtgaattgtggcgtgcagccaacccgcaacaaatggctgcgtgaggattagcatgggaaagatcactggctttatggaattccagcgcctgcaggaggccgccgaggccccgcagaagcgcctcaagcactggcgcgagttcgtcctgcacctgaacgacgaacaggccaagcaacaggcggcgcgctgcatggactgcggcatcccgttctgcagcaacggctgtccggtcaacaacatcatccccgactggaacgacctggtctaccggcaggactggcgccgcgcgctggacgtcctgcactcgaccaacaacttccccgaattcaccggccgcatctgccccgcgccgtgcgaggccgcctgtacgctgaacatcaacagcgacgccgtcggcatcaagtcgatcgagcacgccatcatcgacaagggctgggccgagggctgggtgacgccgcaggtaccggtgcgcaagaccggcaagaaggttgccgtggtgggctcgggccccgccgggctggcctgctcgcagcagctggcgcgcgccggccattcggtcaccctgttcgagaaaagcgatcgcatcggcgggctgctgcgttacggcattcccgacttcaagctggagaagtcgcagatcgaccgccgcatcgcgcagatggaagccgagggcgtggaattcgctccctcgacctacatcggcaacccggatgacgccgccgccgatgggctgacggtgcgtacgccgcagtcgctgctggcggacttcgacgccgtcgtcatgaccggcggctcggaaaccccgcgcgacctgccggtgccgggccgcgagctgtccggcgtgtactacgccatggacttcctgcgccagcagaacaaggccgtcgccggcgatcgcctgagcggccagacgctggccaaggacaagcacgtggtcgtgatcggcggcggcgacaccgggtcggactgcgtcggaaccagcaaccgccacggcgcggcctcggtcacgcaattcgaactgctgccccagccgcccgaatgcgaggacaagcccatggtctggccgtactggccgctcaagctgcgcacctcgtcctcgcacgatgaaggctgcgagcgcgactggtcggtggccaccaaggcgttggccggcagcgacggccaggtcgagaagctggtcggcgtgcgcgtcgagtggttcaaggacgaagccaccggccagatgaagatgcgcgagatcgaagactcggaattcgaaatcccggccgacctcgtcctgctggccatgggctttgtctcgccggtggccacggtgctcgacgcgttcggcgtggaccgcgacgcgcgtggcaacgtgcgcgccaacaccgacgattaccgaaccaatgttgacaaggtgttcgccgccggcgacatgcggcgcggccagtcgctggtcgtctgggccatacgcgaagggcgccagtgcgcgcgctcggtcgacgagtacctgatg

SEQ ID NO: 15027 - DNA, 2232 bp, Bordetella pertussis
gtgaccggaatgtatcgcgatccaggcggatcgcatcattcctggttgcggcgccccttttgcattccggcgggcgcgttcgcgcgccggtcagtgaaccagcgcgccgtgccgggcgcgcgcaactggctctacaatccgcccatgacttatctggtactggcccgcaagtggcgcccgcgatccttcgataccctgatcgggcaggatcacgtggtgcgagccctcacgcacgcgctggacacgcagcgcctgcatcatgcctggctgttcaccggtacgcgcggggtcggcaagaccaccctgtcgcgcatcctggccaagtcgctcaattgcgagaacggcatcacgtccaagccttgcggccaatgccgcgcctgcaccgaaatcgatgcgggccgcttcgtcgactacctcgagctcgatgccgcctccaaccgcggcgtcgaggaaatgacccagctgctcgagcaggcggtctacgcgccgggggccggccgcttcaaggtctacatgatcgacgaagtgcacatgctgaccgggcatgccttcaacgccatgctcaagacgctggaagagccgccgccgcacgtcaagttcatcctggcgaccaccgatccgcagaaaatcccggtcacggtgttgtcgcgctgcctgcagttcaatctcaagcagatgccgcccgacgcgatcgtggggcatctgcaggcagtgctgggcgaagagcagatcggcttcgaagtgccggcgctgcgcctgatcggccaggcggccggcggttccatgcgcgacgcgctgtcgctgaccgaccaggccattgcctatagcgccggcaatctcagcgaagaagcggtgcgcggcatgctgggcacgatcgaccagcgccatctggtacgcctgctggatgcgctggcctcgggcgacgccgccggggtgctggcggtggccgatgagctggcggtgcgcggcctgtcgtatgccggcgcgctggccgacctggcggtgctgttgtcgcgggtggccatcgagcagcgcgtgcgcggcgccttgccgcaggacgatccgctgaccgaggacattacgcgcctggccgccgccctgcatcccgatgcggtgcaactgttctattcggtggccgtgcacagccgtggcgagctgacgctgtcgcccgacgagtatgccggtttcgtgatggcctgcctgcgcatgctggcgctcaatggcgaggccggcccggcaacggccgtgcaggcgccgcgcgccgacacgacgccgcgggccgcggcgcccgccgccgcggcgccggccgaaacccggcccgaaccaacgcctgcgcccgcgcttgcgccgcaggccgccgcggctccgcgcgccgtagcccgatccgaatcaaagccgcagcccgcgcccgagcctgaacccgagcctgagccagcgccccggcccgcggccacgccggttgcggcgacgccgccggctgtcgccgaacccgaacccgtggcggcgccggcggcccaggcccgcgccgccgagcccgcgccggcgccagtgccgccctgggaggacctgcccgaggccgtggccgcccccgcgccggcccagcccgcggccgcgccggcgccggtcgcggcggacgacgacggtccgccggcctgggtcgacgaggccattcccgacgaggctggcggcggcttcgtgcccgagcacagcttcaccgccgatccggacgacgaattcgaaacgctggcgcccgctgccgcggccatgccggcgccacgggcgccgacgccgcgccgcgaatccggcggccgtggccgcgcggcgcggtcgcgccttgcggacatgtcgccgaccggctggcccgagctggccgcgcgcttgccggtcaccggccttgccgccgaactggcgcgccagagcgagtgggccggtgtgcagggcgacgcggtgttgttgcgcgtggccgtgcgcacgctggccgaaagcgaaagccgcgtgcgcctgcagaccgtgctgtgcgaacatttcggccagggcctgcggctggagatcgaagtcggcgtcaccggagacggcaccgcgcatgcggtggcccagatcgaacgcgcggcgcgccagcaggccgccgaagacgcggtggcggtcgatcccttcgtgcaggcgctggtcgccgatttcggcggccgcgtcgtgcccggctcgatccgccatgtagacaatccgccggccgcc

SEQ ID NO: 15028 - DNA, 636 bp, Bordetella pertussis
atgtacacgctttaccggcagggccgcgccacccttggcgccgcgctgctcgccgccggcctgctggccgcgccggcccgggcccacgaggccggcgactggctgctcaaggtcggcgcctcgcaggtccgccccaaatcgaacaacggcagcgtcctgaacgggtcggtggacctcgacgccaacaatagtgtccggccgtcgttcaccgtcacctacatggccacccgcaacatcggcatcgaactgctggcggcctggcctttcgaacacgatatccgcggcagcggcctgggccgcatcgccagcaccaagcaactgccgcccacgctcagcgtgcaatggcacttcctgccggacagcacggtgcagccgtatgtcggcgtcggcctgaactacaccaccttcttcgacaccaagacccacggcgcgctggagggctcggacctcaggctgggcgattcctggggcctggcgggacagctgggggtggacgtcaagctgaacgagcgctggttcctcaacgcggacctgcgctacatcgacatttcgtccaaggtcaaactggacggccagcgcatcggcaccgcccgcatcgatccgtgggtcgccaccgtggcggtgggctaccgcttc

SEQ ID NO: 15029 - DNA, 324 bp, Bordetella pertussis
atgatgaaaggacaactcgccggcctgatgcgccaggcgcagcaaatgcaggaaaacatgaagaaggcgcaggacgcgctggccgagatccaggtcgaaggcgcagcgggcggcggcctggtcaaggtcaccatgacctgccgccacgacgtcaagcgggtggccatcgacgccagcctgctgggcgaggacaaggacatgctcgaagacctggtggccgcggcgttcaacgacgcgctgcgcaaggccgaggccacttcgcaggaaaaaatggcgtcggtgaccgccggcatgccgctgcccccgggcatgaagctgccgttc

SEQ ID NO: 15030 - DNA, 606 bp, Bordetella pertussis
atggatccccaactacccgaacccgaaccgctgatcgccctgatcgaggcgttgcgccgcctgcctggcgtgggcgtgcgctcggcccgccgcatggcctatcacctgctgcagcacgacctgcagggggccgacatgctgggccgcgcgctttccgccgccgtgcagcacctgcgccattgcgcgcgctgcaacagcttcaccgaagacgaggtctgcgcgacctgtgccaatcccaagcgcgatcccggcctgctgtgcatcgtcgagacgccggccgaccagaacatgatcgagtccagccacggctaccgcgggctgtactacgtgctgatgggacgcatcgcgccgctggaaggggtggggccgcgcgagctcgacttccagcgcgtcatcgagcgcgcctgcgacggcgtggtccaggaggtcatcctggccaccaatttcaccgccgagggcgagacgacggcccacttcctggacgatgccctgagcgagcgcggcctgaaagtcacccggctggcgcgcggcgtgccggccggcagcgagctcgagtatgtcgatgccggcaccattgcctgggccttgatggagcgccgttcgacc

SEQ ID NO: 15031 - DNA, 834 bp, Bordetella pertussis
atgagcgtgcccaccgccgccaaacgcatcaccacccgccaattgcgcatgcgcacgccggacgagcccatcgtggcgctgaccgcctacacggctcccatcgccggcctgctggatgcgcactgcgacctgctgctggtgggcgactcgctgggcatggtcatctacggcatggaaaccaccctgccggttaccgtggacatgatgatccagcacggccgcgccgtgatgcgcggttcgcagcgtgcctgcgtggcggtggacatgccgttcggcagctaccaggaagacgagcgccaggcctatcgcaacgccgcccgcatcatggccgagaccggcgcaagctgcgtcaagctggagggcggcgcggaaatggcctcgaccgtggcgttcctggtcgagcgcggcattcccgtgatgggccacgtcgggctcaagccccaatcggtgcacggccatggcggcttccgtaccgtcggccgcggcgccgaggccgagcaggtcatggccgacgcacaggccatcgccgcggcgggcgcctttacggtggtcatcgaaggcacgctggaacccgtggcgcgcgccatcaccgaggccttgcccgttcccaccatcggcatcggcgcctcgcccgcctgcggcggacagatcctggtgtcggacgacgtgctgggcctgttctcggatttcacgccgcgctttgtcaagcgctacgcgcagctgggccccatcatcgaacaggccgccgcggcctacgccagcgaggtccgcgcgcgcacgttcccggcgccggaacactgcaccggcatgccggcgcccgacggccgcccggcc

SEQ ID NO: 15032 - DNA, 1338 bp, Bordetella pertussis
atgcgacgcctgagaacaatattcattctgctggtcgcggccctgtccgtcctgtggctgagccagaacccgcccggcgcatggggcgagggcttctgggtcatgcgcaagcccctgatctactacaccggcatcctggccctgggcatgatgtcgctgggcgtgatcctggcggcgcggccggcccgcttcgaaggcgccctgggagggctggacaagttctaccggctgcacaagtggctgggcctgggcggcgtggcgctggcgctgacgcactggctgctgaagatcgtgccgccctggatggccgcgcagggctggaccgtgcggccgccgcgcgtgcccgcgccggccgggcaggcggccctgtacgacccgttccaggcctggcacggggtggccaagagcctgggcgagtgggggctgtacgccttgctgctgctggccgcgctggccctgtacaagcgctttccgtaccggcacttcttccgcacgcaccggctgatgcccgcgctgtacctggtgttcgtgtttcatgccgtggtgctgatggcgccggcctactggcgcgggcccatcgggccggtgatggccgtggtcatggccgccggcggcgcgggcgcgctgttgtcgctgctgggcctgatcggccgcccgcgccaggccgccggccgcattgcgcggctggagcgattcgccgacaacgcggtgatgcaggtcgacgtgcagctggagacgcgctggcccggccacaaggcgggccagttcgcgttcgtggccttcgaccgcgccgagggcgcgcatccgttcaccatttcgtcggcctggcgcgacgacggcttgctgcgcttcagcatcaaggggctgggcgactacacccgcagcctgccggcgcgcttgcgggtgggcgacggcgtgacggtggagggaccctatgggcgcttcgatttccgcgcgaacggcaggccgcagatcctggtggcgggcggcatcggtatcacgccgttcctggcgcggctccaggacatggccgccgctcgctccgatggcgcgccggcgcacgaggtggacctggtgtattccaccaatgcgccggacccggatttcatcggcgaactgcgcgccctggccgagcgcgcccgggtcggcctgcacgtgctggtgacgcagcgcgacggcaagctgagcgcggagcgcctggtcgacatgctgccgcgggccgcgcaatcggaagtgtggttctgcgggccggccgggttcggccaggccctgcgcgaaggcctggccgcccgcggcatgccgccggcctgctttcaccaggagctgttcgagatgcgc

SEQ ID NO: 15033 - DNA, 789 bp, Bordetella pertussis
atgacgaagcactctgccgctcgaatcgccaccatcgccgccgcaggcgtcctgctggccggctgcgcagcgcccaagaaccccgatccgcgcgatccctgggaaggcttcaaccggggcgtctacaagttcaacgacacggtcgaccgcgcgctgttcaagccggtggcccaggcctataccttcgtcaccccgcagccggtgcgcagctgcgtgcacaatatgttcagcaacgtgggcgacctgtggtcggccaccaacagcttcctgcaaggccgcgggcacgatttcgtcaacacgatcggccgcttcctgttcaataccaccatggggatcggcggctgcttcgacgtcgcgtcgaccaccggggcgcgcaagatccccaacgacttcggcgtgacgctgggcgtctggggcttcggccagggaccgtacctggtgctgccgatctggggcgccagcagcctgcgcgacggcgtcggcctgatcggcgactggaccggcaaccagggcgcgaccatcggcgcgatcgacaacgtgccgctgcgcaactcgctgtggggcctggaggccgtcgacctgcgcgccagcctgctcgataccaccgacaccgtggaccgcgtggcgctggatccctacagcttcgtgcgcgacgcctacctgcagcgccgcgccgccatggtgcgcggcaccaagacgggcgacgacacgctgcccacctatgaagacgagggcgatgacgacgcggcccccgccgcgccggccgcccagccggccgcccagccgcag

SEQ ID NO: 15034 - DNA, 1266 bp, Bordetella pertussis
atggacaaactgcgcatcaccggcggctcgcccctgcgtggggaagtcaccgtctcgggcgccaagaacgcggccctgcccatcctgtgcgccagcctgctcaccgccgagccgctcgtgctgggcaatgtgccgcaactgaacgacacctcgaccacgctgcgcctgctgggccgcatgggcgtgcgcgccgaacgcgccggcgacggcaccgtcaccctgcaggccgaccaggtcgacaacctggaagcgccgtacgagctggtcaagaccatgcgcgcctcgatcctggtgctgggcccgctgctggcccgcttcggccaggcccgcgtcagcctgccgggcggctgcgcgatcggccagcggccggtcgaccagcacatcaaggggctggcggcgctgggcgccgagatcgagatcgagcacggcttcgtggtggcgcgcgccacgcgcctgaagggcgcctcgatccgcaccgacatggtcaccgtcaccggcaccgagaacctgctgatggcggcggtgctggccgaaggccagaccgtgctggaaaatgccgcgcgcgaacccgaagtggtcgacctggccgagctgctcatcaagatgggcgcgcgcatccagggccacggcaccgaccgcatcgtcgtcgatggcgtcgcgcggctgcacggcgcgcgccacgacgtcattgccgaccgcatcgaggccggcaccttcctgtgcgcggtaggcgcggcaggcggcgacatcacgctgcgcggcgccgcgcccgacaccatgggcgccacgctggacaagctggtcgaggccggcctgaccatcgaaaccgggccggactggatccgcggcgccatgcacggccgccctcgcgccgtcggcgcgcgcacgcacgagtatcccggtttcgccaccgacatgcaggcccagctgatggcgctggacacggtcgccgacggcaccgccgtcatcgtcgagaacatcttcgagaaccgctacatgcatgtgcaggagctgtgccgcctgggcgccgacatcgacatcgacggccataccgccgtcgtgcgcggggtcgcccggctgtccggcgccaccgtcatggccaccgacctgcgcgcctcggccagcctggtgatcgccggcctggccgccgagggcgagaccctggtcgaccgcatctaccatctcgatcgcggttacgatcggatggaagtcaaactgcgcgccctgggcgcgagcattcaacgcgtaactggcaaggaaacggca

SEQ ID NO: 15035 - DNA, 669 bp, Bordetella pertussis
atgaaccccgccgccgcccccctgacgctggccctgtccaagggccgcatcttcgaagaaaccatgccgctgctggccgaagccggcatcgaggtccccgagaacccggaaagctcgcgcaagctgatcctgccgaccagcgacccgggcctgcgcctgatcatcgtgcgtgcctccgacgtgcctacgtacgtgcagtacggggcggccgacctgggcatcgccggcaaggacgtgctgatcgagcacgccgcccagcaatcggggcgcctgtaccagcccatcgacctgaacatcgccaaatgccgcctgtgcgtggcggtgcgccaggacttcgactaccaggcggccgtgcaccagggcgcgcgcctgcgcgtggccaccaagtacgtgcagtcggcgcgcgagcacttcgccgccaagggcgtgcacgtcgacatcatcaagctgtatggctcgatggagctggccccgctggtcggcctggccgacgccatcgtcgacctggtctcgaccggcggcacgctgcgcgccaacggcctggcggcggtcgaggacgtcatgccgatctcctcgcgcctgatcgtcaaccaggccgcgctcaagacgcgcggcgcgcgcctgcagccgctcatcgacgccttccggcgcgccagcgaacgcatcgcc

SEQ ID NO: 15036 - DNA, 867 bp, Bordetella pertussis
atgctcgacggcgattgcatccggggcacgttctaccgcccggccggcgccggcgcgccggtgccggccgtggtgctggcgcatggctggtccatggtggccggcggcgacctggaagactatgccgcggcggtggtcaatcgtggtctggccgcgctgacgttcgattttcgcaacctgggcaagagcggcagcctgccgcgccaggagatcgatccgtatcgccaggtcgaggatttccgcgccgccatttcgtacgtgcgcggccgtcccgaggtggatcgcgagcgcatcggcatctggggcagcagctacagcggcggccacgccctgacggtggcggcgatcgaccggcgcgtcaaatgcgtggtcagccaggtgccgacgaccagcggcttctcggccgcccagcggcgcgtgcgctacgacaaggcgcaggcgctgcaggccgccttcgaggccgaccgcgaagcgcgcttcgccggcgcggagccggccacgctgcgcatggtcgaccccgatccggaggcgccggtcgcgtatcccggccccgactcctaccgctacatgaccggcgaggcgcgccgttgcccgcaatgggtcaatgcggtgacgctgcgttcgctggagctggcgcgcacctacgagccgggcgtgtatgcacggcgcatcgcgcccacgccgctgctgatgatcgtggccgccagcgacgggctgaccccggccgacctgcagcaggacgctttcaacaacgcgcagcagcccaaggaattgctgctgctgcctggcggacattactccgtctataccgaccacttcgaccgcaccagccaggcggcggccgattggtttgcccttcacctgcgc

SEQ ID NO: 15037 - DNA, 2424 bp, Bordetella pertussis
atgacttgcgcctcgtgcgtgggacgtgtcgagcgcgcgctgaaagccgtgccgggcgtcagcgacgcggtggtcaacctggctaccgagcgcgccgacgtgcgctttgccggcgcgccggatgtcggcgcggcggtgcaggcggtcgagcaggccggctacgccgtggccgccagcaccatggaattggccgtctccggcatgacctgcgcttcgtgcgtggggcgggtcgagcgcgcgctgaaggcggtgccgggcgtgcgcgcggccagcgtcaacctggcgaccgaacgcgcccatgtcgaagtcgcgggtgcggtggcgccgcaggcgctggtccaggcggtggccgccgccggctacgaggcccgcccgctggatccggggggcgccgccgccgatgccgcggcccggcgccaggcggccgaactgcagggcctgcgccgcgcgctgatcgtggcggcggtgttcgcgctgcccgtgttcgtgctggaaatgggctcgcacatgatcccggccttccaccatgccgtggccggcagcatcggcgtgcagaacagctggtacatccagttcgtgctggcctccatcgtgctgttcggcccggggctgcgctttttccgcaagggggtgccggcgttgctgcgcggcgcgcccgacatgaactcgctggtggccgtgggcacggcggccgcctatgcgtattcggtcatcgccactttcgccgccggcgtattgccgccggggacggtcaacgtctattacgaggccgccgcggtcatcgtggcgctgatcctgctgggccgctacctggaggcgcgcgccaagggcaacacctccgaggcgatcaagcgcctgatgggcctgcaggccaagacggcgcgcgtgcggcgcgacggcgccaccgtggaagtgccgatcgcgcaggtggcggcgggcgacgtggtcgaagtgcggccgggcgagcgcgtgccggtggacggccaggtgaccgagggcaccagcttcgtggacgagtccatgatcagcggcgagcccgtgccggtcgagaagcagccgggcgccgaggtcgtgggcggcacggtcaaccagaacggcgcgctggcgctgcgcgccaccaaggtgggcggcgataccgtgctggcgcagatcatccgcatggtcgagcaggcccagggctccaagctgcccatccaggcgctggtggaccgcatcaccatgtggttcgtgccggcggtcatggccgtggccctggcgaccttcgccatctggttcgtgttcggccccgatccggcgctgaccttcgcgctggtcaacgcggtcgcggtgctcatcatcgcctgcccgtgcgccatggggctggccacgcccacctccatcatggtgggcaccgggcgcgccgcgcagctgggcgtgctgtttcgcaagggcgaggcgctgcaggcgctcaaggacgcccgcgtggtggcggtggacaagaccggcaccctgaccaagggccgccccgagctgaccgacctggtgctggccgaaggcttcgagcgcgcggcggtgctgggcaaggtggccgcggtcgaggccaagtccgagcaccccatcgcgcgcgccatcgtcgacgccgcgcaggtcgagggcgcccggctgggcgcgatcgaggcgttcgagtcgatcaccggctacggcgtggcggcgcgggtcgacggcgcgcgggtcgagatcggcgccgaccgctacatggcgcggctggggctggacgtggccgtgttcgccgccgaggcggcgcgcctgggcgacgagggcaagacgccgctgtacgccgccatcgacggccgcctggcggccatgatcgcggtggccgatcccatcaaggacaccaccgccgcggccatccgcgccctgcatggcctgggcctgaaagtggccatgatcacgggcgacaaccgccgcaccggcgaggcgatcgcgcgccagctgggcatcgacgaggtcatcgccgaagtgctgcctgacggcaaggtcgacgcggtcaagcgcctgaaggccgagcatggcgcgctggcctacgtgggcgacggcatcaacgatgcgccggcgctggccgaggccgacgtgggcatcgccatcggcaccggcaccgacatcgccatcgaggcggccgacgtggtgctgatgtcgggcgacctgggcggcgtgcccaacgccatcgcgctgtcgcaggccaccatggccaacatccggcagaacctgttctgggccttcgcctacaacgtggcgctgatcccggtggccgccggcgtgctgtatccggtcaacggcagcctgctgtcgccggtgttcgcggccggcgcgatggcgctgtccagcgtgttcgtgctgagcaacgcgctgcggctgcgccgcttcgccgcgccgttcgccgcgcgt

SEQ ID NO: 15038 - DNA, 951 bp, Bordetella pertussis
atgagcggttcttcccattatcccgtcgccaactggaacctcgacggcatcgtctccggcctgcgcggcgcgcgccaggagtggcgcggcccgcgcggccgcctgcgcgaggagtccgagtcgggcgtgcgcgagtttccttcccaggaaagcctgcgcgacatcatgcggcaactgttcggcgcgctgtttcccatgcgcctgggccccatcgacctgcgcgaagaggtcgaggatttctacgtcggccacaccatcggcgccgcgctggacgcgctgctgcaccaggtctgcctggagctgcagcacctcggacgcgacgatccgcaaccctacggacaggtgctcgagcgcgcggtcgacatcgtgcgccgcttcggcgccgagttgccggcggtgcgcaaggcgctggacctggacgtcacggccgcctaccagggcgacccggccgcgcgcagcgtcgacgaagtgctgctgtgctatccgggcgtgaccgccatgatccaccaccgcctggccaatgtgctgtaccggctgggcgcgccgatgctggcgcgcatcgtcgccgagatcgcccattccgacaccggcatcgacatccatccgggcgcgaccatcgggcgcagtttcttcatcgatcacggcacgggcgtggtgatcggcgaaacggccatcatcggcgagcgcgtgcggctctaccagatggtcacgctgggcgccaagcgctttccgccgggcgagaacggcgaactcaagaaaggcctgccgcgccatcccatcatcgaggacgacgtggtcatctacgccggcgcgaccatcctgggccgcatcaccatcggccagggctcgaccatcggcggcaatgtctggctcacgcacagcgtgccgccgaacagcaccgtgacgcaggccggcgtgatcaacgacatgcccgactgcggcctgggcggc

SEQ ID NO: 15039 - DNA, 2739 bp, Bordetella pertussis
atgttgcgcaatgcgtcatcgcgcgacaccatggcggcccggcgcctgccgcatggcggaccgcgcgggcggcccgatacaatcctgcctatgtcttccacaccaaagcaaaccaccggcgacgccctggccggccatactcccatgatgcagcagtacctgcgcctcaaagccgaggccgggccgctgctgttgttctaccgcatgggcgacttctacgagatgttctatgaagacgccgaacgcgccgcgcgcctgctcaacctcacgctgaccaagcgcggcaactcgaacggcacgccgatcccgatggcgggcattcccgtgcacgccatggagcaatacctggcgcgcctggtcgcactgggcgaatcggtcgccatctgcgagcagatcggcgatcccgccgccgccaaggggccggtcgagcgccgcatcgtgcgcatcgtcacgcccggcaccctgaccgacgaagccttgctgccggccaaggccgaccgcgcgctggcggcggtctgcgtcacgggcaagcgcgaaccgcgcgccggcctggcctggctcaacctggccagcggcgccttccatgtcaccgagtgcgcgcccgcccagctcgagtccgagctgcatcgcatcgcgccggccgaactgatccaggccgaaagcgccgagctgcacatggccttcgaaggcgcgcgcacgcgcgtgcccgattggcatttcgaagccgacggcgcgcgcgcccagttgctggcgcacttcaagaccgacagcctgggcggcttcgacgtcgaggacatgccggccgccgtgtgcgcggcgggcgccctgctgcgctacgccgcgcgcacccagtcgcaggcgctggcgcacgtgcagaccatcgcggccgaacgctcggggcaatatgtgctgctcgatccggtcacgcggcgcaacctcgaactgacccagaccctgagcggcgaggaatcgcccacgctgttctcactgctcgatggctgccgcacgcccatgggcagccggctgctgcgccgctggctgcaccaccccctgcgcgagaacgaaccggtgctggcccgccaacacgccatcgccaccatgctgaccgcgcgccaggaaggcgaacagacctttgccgcggccggcttgctcgagacgctgcgcgatgcgctcaacgcctttccggacatcgagcgcatcgccgcccgcgtggcgctgcgctcggtgcgcccgcgcgagctggccagcctgcgcgacgccctggccgccctgcctgctctgcacgccagcctgacgcccctgtccggctcgccgcgcgcccgcgagctagccgcgcagctggccatgccgccggacatcggcgagctgctggcacgcgcggtcgccagcgagccggcggtggccatccgtgacggcggcgtcatcgccgccggcttcgacagcgaactggacgaactgcgcgcgctggccaccgacggcggcgatttcctcgtgcaactagaagcgcgggaacgcgaacgcaccggcatcggcaacctgcgcgtcgagttcaaccgcgtgcacggcttctacatcgaagtcaccaagggccagaccgacaaggtgcccgaggactaccggcgccgccagaccctcaagaacgccgagcgctacatcacgcctgaactcaagacctgggaagaccgcgtcctgtcggcgcaggaccgttcgctggcccgcgaaaaatggctgtacgagcaattgctcgacgcgctggcgcagtatgtgcggcccctgtcccagtgcgcgagcgccctggccgaactggacacgctggccgcgctggccgaacatgcccggcgtcacgactgggtcgcccccgaactgatcgacggcgccgagatcgacatcgaggcaggccgccatcccgtggtcgagcgcgccatcgaacgcttcacgcccaacggctgtcgcctggaccagacccgccgcatgctgttgatcaccggccccaacatgggcggtaaatcgacctatatgcgccaggtggccctgatcgccctgctggcgcgcaccggcagcttcgtgccggccacccgcgcgcgcgtcggccggctcgaccgcatcttcacccgcatcggcgcggccgacgacctggccggcggacgctccaccttcatgatggagatgaccgaggcggccgccatcctggcggccagcacgccggccagcctggtgctgatggacgaaatcggccgcggcacgtccacctacgacggcctggcgctggcctgggccatcgcgtaccggctcctgacgcacaaccgcgcgctcacgctgttcgccacccactacttcgagttgacccgcctgcccgccgaacagcccaccgcggccaacgtgcacctggccgcggccgagtcggccggcggcatcgtgttcctgcacgaagtgcgcgaaggcccggccagccgcagctacgggatccaggtcgcccagcgcgccggcgtacccgccgcggtcatccgccaggcctcgcgcgaactcgaacgcctcgaagcccagggcgcgcccaccccgcagctgggcctgttcgccgcggcgctcgacgcggacgtgcaaagccaggccatgaccgagcaggccgaggatgccgccgcgctggcgcaactgcgcgaccagcttgtggccatcgaccccgacagcctgaccccgcgcgaagccctcgacgcgctttaccgcctcaaacagcacctgaca

SEQ ID NO: 15040 - DNA, 1467 bp, Bordetella pertussis
atgacgcagttgacccaacccctgagccgcgccgaactgctgcgcgacgcctgctacatcgacggcaagtgggtaggcgccggcaacggcccgtccatcccggtcgataacccgtccaccggcaagaccatcatctcggtgcccaagctgggccgcaaggaagccgagcaggccatcgacgccgccgaggccgccctgcccgcctggagcgccaggaccggcaaggagcgcgccgcgatcctgctgaagtgggcccagctgatgatggagaaccagcaggacctggccgtcatcatgacgtccgagcaaggcaagcccgtgcccgaggccgccggcgagatcgcctacgccgcgtccttcctggagtggttcgccgaagaagccaagcgcatcgacggcgacatcctgcaaagccccaagggcggccagcgcctgatggtgctcaagcagcccatcggcgtgaccgccgccatcacgccgtggaacttcccggccgccatgatcacccgcaaggtcggcccggccctggccgccggctgcaccatggtggtcaagccggcccagcagacgccgctgaccgcgctcgcgctggccgtgctggccgtgctggccggcgtgccggccggcgtgttccaggtcgtgaccggcagctcgcgtgaaatcggcgcggccctgtgcgaaagcgaagtggtgcgcaagctgagcttcaccggctcgaccgaagtcggccgcacgctcatggagcaatgcgcgcccaccatcaagaaactgtcgctggaactgggcggcaacgcgccgttcatcgtgttcgacgacgccgacctggatcgcgccatcgacggcattctggcctccaagtaccgcaacgccggccagacctgcgtatgcgccaaccgcatctacgtgcaggccggcgtctacgaggaagtggccaagcgcctggtcgagaaggtcaacgccatgaaggtgggcgacggcttcgaacagggcgtcacccagggcccgctgatcgacaccgccgccgtggccaaggtgcaggaacacatcgccgacgccaccgcgcacggcgccaaggtcatcgccggcggcgagccgcatgcgctgggcggcagcttcttccagcccacggtggtgcgcgacgtcacgcagtcgatgcgctttgccgtcgaggaaaccttcggcccggtcgccccgctgttcaagttcgacagcgaagacgaagtcatcggcatggccaacaacaccatcttcggcctggccgcctacttctacacgcgcgactacgcccggatctggcgcgtctccgaagcgctggaatacggcatcgtcggcatcaacaccggcatcatctccaatgaagtcggcccgttcggcggcgtcaagcaatccggcctgggccgcgaaggctcgaagtacgggatcgaggactacctcgagctgaaatacctctgcgtggacctgggcgcc

SEQ ID NO: 15041 - DNA, 699 bp, Bordetella pertussis
atgtttactggcatcgtccaaggcaccgccaccatcgccggcatcgccgaccggcaaggcctgcgcaccttcaccatcgatttcccggccggtttctgcgtcgacctggccatcggcgccagcgtatcggtcgacggcgtctgcctgaccgtcacgcgcatcgtgtcggccgacaccgccaccttcgacgtcatgctgcaaagcctggacatcaccacgctgggcgggtatgcggtcggcgcgcgcgtcaacgtcgagcgcgccgccagggatggcgccgagatcggcggccacccgctgtcgggccatatcgatttcgccgcggccgtcgaacgcgtccggagcatggacaacaaccgcgtgctgcgcatcggcatcccgccggcgtttcgcaagtatgtgttcgccaagggctatatcgccgtcaacggcgccagcctgaccgtctcggaagtcgaccgcggggaaggctggttcgaagtctggctgattcccgaaacgcgccgcatgacggtgttcgaggaaaagcaggccggcgatgcgctgaacatcgagatcgagcgcagcacccaggtggtggtcgacacggtgcgcgaagccgtgcaggaaagcctgggcaagctgcagcccgtgctcgaggccatcctcaaggagaagggcctgagcctggaagacttcgtgcgcccgccggcgctcaag

SEQ ID NO: 15042 - DNA, 900 bp, Bordetella pertussis
atggatggtttgccgcctctcaatgcagtgcggacgttcgaggtagcgggccggctgtgcagcatcaccgaggcggccgccgagctgtgcgtcaccccgtcggcggtcagccggcaaatccggctgctggaagaacacctgggccgcaagctgttcatccggcagcatcgcggcgtcgtcctcaccaccatcggccaccagtacctgggcgatatctccaaggccctggtggaggtgcggcgcgccacctcggaggcggccaagccgcgccagcgcgcggtcttcaccgtgcgcgcgccgcacagcatcgcaatgcgctggctgctgccgcggctggcccgcttccatgccgcgcacccgcacatcgacgtcaagctgcacacctcgctgacgccgcccgacttcgaacgcgaagacctggacgccggcgtgatgctggggcgcggccagtggaagggcctgctcagccacatgctgatccgcaacgagctcatcccggtctgcgcgccgcacaaggcccgcgcgctgcgcaccccggccgacctggccgacgagacgctgctgcacgtgttcggcaggcccgacgattgggtggcgtggctgggcgcggccggcgtcgaacacgtggacgtgcaccgcggcatgaaatacgaatcgtcggcgctggcctacgaggccgccctggagggctatggcatcgccatcgcgcagaaggccctgatcgacaaagacctgcaggagggccgcctggtcacgcccttcgacctgagcgtggaccagagcgactacacctattacttcgtgctgccgcccgagggctacaagcgccgctcgccggcgctcgataccttcaggcgctgggtgcgcgacgtgtcgctgccgcgccaggctgcgccgcca

SEQ ID NO: 15043 - DNA, 1710 bp, Bordetella pertussis
atgaaacgtacaatcgccacggatctgttttgctgttcccttgtcgccggcctggcggcgctgccggccgccagccgcgccgacggccccttgcgcggcaatccggtcgacgcgctgccgcaactcgaacgcccgaccgcgcccgccgcgccggcgcctgccctgcaggctcccacgcccgagcagcgcgccgtgcaggcgcgcctggcgcaacgcatcgtgccgcgcaatttcgacgtggccggcgtgcacgccttgccgttcgaccaggtggcggcattcctgacgccgctggccggcaaggaaattaccgtggcgcaactggtgcagcaggtggacaggatcaccgagctgtaccgttcgagcggctatccgctgtcgttcgcgctggtccagaaccaggacttcgccaacggcctggtcgtggtcaccgtggtggaaggccatatcggcaatgtgcgcatcgatggggacatcggcaacgccaagcgccggctggaaaccctggccggcccgctgctggcggaaaagccgctgacccaggccacgctggagcgccagctcaacctgatgcgcatcgtgccgggcgtaaaaatcacgccgtcgctggatctgccgcgccgggccgacggcgccaccgaactggtgatcgcggccacccacggcaagttcacctccaatggcggcgtggccgacctgggcaccggcatgcagccgctggtcgacctgggcgcgcacagccttacgccgctgggcgagcagctcaaactgaccaccagcatcccgctcaacagcgacgacgtgaaatatgttgccggcgaagcgcgcctgcccatcggcgccgacgggttctcgatcaaggtcgacggctaccactaccaggccaaaccgcaggacgacgccatcgaatacctgggcttcgaccgcaaggtcaccaatgaccgcatcggcgtgggcgtgagctatccgttcctcttgaacaatcagcgctcgctgaccggtacgctgggcatgtatgccgtcaacgccaaggaccgctacacccaccgcgacagcgaccggtggctgcaacaggacacccgcgtgcgcgcggccacggccgagttgcgctacatcgatatcctgccgcaacgctccaccgacctgaccgtgtcggtgtccaagggcttcgacgccatgggcgcgaaaaaatcgatcgacaccaactacggctactcggcgattcccgatgtcgacctggacttcacccgcttcaacctgaacgtgcgccaggcctttaccctgccggcgcaattcggcctggtcctgtccggggccggccaatacagcagcgacatcctgccgagttcggaacaggtgtcgttcggcagctggcgcttcgccatgggctacccgcagggcgaacaaagcggcgacaagggcgtgggcgtgtcggccgaagtcaaccgccgcttcgggctgggctggcgctacctgagcgcggtgcagccctacgccatggccgactatgcgcgcacctggtacaacaacaagggcctgcaggaactcaacgaacgccacctctcgtcgctgtcgctgggcgtgcgctttaccgacgacaagttctacctgttcgacttcaacgtcgccaagccggtcgggtccagcacggtcaacggcgatcgcgacgtgcgcttcaacgccaactactcgctgttctatgacgcgctc

SEQ ID NO: 15044 - DNA, 867 bp, Bordetella pertussis
atgctcgatcccgtactgctgcgcagcttcgtcacggtggtggataccggcaacttcacgcgcgccagcgaacacctgcacctgacccagtccacggtcagccagcacgtgatccgcctggaggaaaacctgggctgccggctgctggaccgcggccagcgccacgtgctgcccaccgaggaaggcgagcgcctgctgggctatgcgcgcagcatcctgcggctggccgacgaggcgcgcgaaagcgtggccgcggcccagggcaacgccgtgctgcggctgggcgcgccggaggacttcatgggcgcggcgctgatgcccgtgctcgcgccgctgctggcgcgctatccgctgctgcggctggaattcgacagcggcctgagccaccagctgctgcggcgctaccgcgatggcgagctcgacctgctgctggtcaagcaatgggaggtggacgcggactgccaggcgcactggcccgagccgctgtgctgggtggccgcgcgcgacggccccaccctgcccgccggcgaggcggtgccgctggcggtgttcccggccggcgcgctgtaccgccaggagatgacgcgcacgctggaagccagcggccggccctggcatatccgctacgccagcaccagcctggccggcctggtggcggcggtcggcgccggactgggcgtaagcctgatgccggcggccagcgccggcggcgagctgcgggtgctgcgcaagcgcgacggtttcccggcggtcgacggcctgcagctggggctgtacgcacgcgcccggctgggcgcggccggacgcgacctgcgcgacgccctggccgcccattgcgggcggcgcgccgcggccatgaaccaggcc

SEQ ID NO: 15045 - DNA, 1419 bp, Bordetella pertussis
atggtaaaatcgcccggcttacaaccgcttccttcttacaccgacatgcagattgccgaccagcttacccaactcaatgctctttcgccactggatggacgctatgcgtcgcgcgccggggcgctgcgggggctgctgtccgaggccgggttcatggcgcatcgcgtcgaggtcgaggtggcctggctcgttgcgctgtccgatgcgggcctgcccgagctgccggcgttcccggccgccgcgcgcgagcgcctggccgcgctggtgcgcaatttttccgaggccgacgccgcccgcatcaaggacatcgagcgcgtgaccaatcacgatgtcaaggcggtcgagtactggctgaaagaacaggtggccgacgatgccgaattggcgcgtgccgccgagttcatccatttcgcgtgcacctccgaagacatcaacaatacttcgcatgcgctcatgctcacgcgtgcgcgcgccgaagtcgtcgtgccgcagctcaaccaggtgctggccaagctgaacgaactggcccggacgcatgccgaccagcccatgctgtcgcgcacgcacggccagcccgccagtccgaccacgctgggcaaggagttcgccaacgtggcggcgcgcctgcagcgcgccgtggccgccatcgaggcggtcgagccgctggccaagctcaatggcgccacgggcaactacaacgcgcatctgtcggcgtacccggaaatcgactggcccgccttcagccgcaatgtgctggccggcctgggcctgatccagaaccgccataccatccagatcgaaccgcacgactggatggcggcgctgttcgacgccgtggcgcgcgccaacgtcatcgtgctggacctggaccgcgacatctggggctacgtggccctgggctacttcaagcagcgcctgaaggagggcgaggtcggctcctcgaccatgccgcacaaggtcaacccgatcgatttcgagaactccgagggcaacctgggtctggccaatgccgtgctgcgccatctgtccgagaagctgccggtttcgcgctggcagcgcgacctgaccgattcgacggtgttgcgcaacctgggcgtgggcctgggctatgcgctggtcgcctgggatgcttgcctgcgcgggctgaacaagctggaagtcaacgccgcggcgatcgacgccgacatcgatgcgtgctgggaagtgctggccgagccggtgcagacggtcatgcgccgctacggcctgccgcagccgtacgagcagctcaagacgctcacgcgcggcaagggcattaccgaagaggccttgcgcgagttcatcggcggcctggcgctgcccgacgagcccaaggcccgcctgctggcgatgacgccgcgctcgtatatcggcctggccgcgcaactggcgcgggcggta

SEQ ID NO: 15046 - DNA, 891 bp, Bordetella pertussis
atgagtctcgccgcatccgatccggccggattttcggtctttcgcaccctggcaggcgccggcacggcgcggctggagcgcgccgccacgctgggcgacggcgtggcggcggcccaatggcgccgtgccggccacgaagtcgtcgactacgaccatcccggccatcacaccttgtcgctctacctgcatggcggcgaaaaatcgttccgggtcggcaacgacggctatggcggcgcgggcaagttctgcgtcctgccatccgagcaccgctcgcgctggaacatgaacgacaccgtgcgcttcctgcacctgtacatcgcgccgcagcggctggcgcgcgaagccgtctggcggctggactgcgagccgcgcgagctggcattgcgcgaccgcacctatatccaggatccggcgctgggccaggcctgccacatcctgctggacgccgattggaccgatccgtcgcaacgcctggccgccagcgccgcctccgagaccgtgctgcaccatctgctggtccagggcaccgggcgacgccccggcatgcccgcgcgcggcgggctggcgccggtggtgcggcggcggatgcgcgactacatcgaggcccatctgcacgagccgctgacgctggagcggctggccgcccaggccgccctgtccacctaccatttcgcccgcatgttccatgtttcgttcggggttccgccccacctctgggtgcaggcccggcggctggcgcgggcccaggccctgctgcgcgcgcccggccaggcggggctggacgcggtggcgcaggccagcgggttcggcagcgccagccacttgagcagggtgttccgccaggccacggccgctacgccgggccagtaccgggccggcgcgcgggcccat

SEQ ID NO: 15047 - DNA, 609 bp, Bordetella pertussis
atgaaactgatcggctcacttaccagtccttacgtccgcaaagtgcgggtcgttatggcagaaaagaagctggactaccagctcgagctggagaacgtctggtcgcctgattcgcaggtacagaagtacaacccgctgggcaaggtaccctgcctcgtcatggaagacggcggcgcgctgttcgattcgcgcgtgatcgtcgaatacctcgataccctgtctccggtggcgcggctgattccgcagccgggccgcgaacgcgcggccgtcaagtgctgggaagccatcgccgacggcctgctcgacgcctgcgtcaccgtcgtgcgcgaacgcctgcgcccggccgcgcagcaaagccccgaatggatcgagcgccagtacggcaaggtgcgcgccagcctggacgccatggaccacagcctgggcgaaaacgcccactgcatgggcgtgaactacagcctggccgacatcgccgtgggctgcgcgctgggctatctgaacttgcgctttgcggacctggactggcgcgccgatcacgccaacctggcccgcctgtatgaaaagctgtcggcacgcccatccttcgtcgacagcatgccgccgaccgcc

SEQ ID NO: 15048 - DNA, 1887 bp, Bordetella pertussis
atgtccgatcgccgcccgattgctaccctgcccgacctgttgatcagccagatcgccgccggcgaggtgatcgaacggccggcgtcggtgctcaaggaaatccttgaaaacgccatcgacgccggcgcgcgcgccatcgaggtgcgcctggaaggcggcggcatccgccgcatcgccgtcaccgacgacggcagcggcatcccgcccgaggaactgccgctggcgctcacgcgccatgccaccagcaagatccgctcgctcgacgaactggagtcggtggcctcgatggggtttcgcggcgaggccctggcgtcgatcgcctcggtggccgacctcaccatcatctcgcgcacgcgcggcgccgagcacgcctggcagatcgacggcggcagcctgcaggtcagcccggcctcggggccgccaggcacgacgatagacgtacgccagctgttcgaccgcgttccggcgcggcgcaagttcctgcgctcggaagccaccgaattcggccattgcgtcgacgccatggaacgcatcgcgctggcccatcccgaagtcgctttccgcctgttccaccacgaccgcgcgcagcgccaatggctgccggccgaccatggacagcgcatccgcgacgtgctgggcgccgaattcgtcggccatgtgctgccggtgctggcggccgccggcgccatcgccctgatgggcatggtgacgcggcccaccgccgcgcgggcgcgcgccgaccgccagtacctgtacgtcaatggccgcttcgtgcgcgaccgcaccgtcagccatgccttgcgcagcgcctatgccgacgtgctgcacggcgaccggcaacccgcctatgtgctgtatctggacatcgacccgggcgcggtcgacgtcaacgtgcacccggccaagcacgaagtgcgctttcgcgacagcggcgcggtgcaccggttcgtttcgcaggtggtgggccagacgctggcgcagaccggcggggccgaagcggtgccggccggcgtcccggacggcgccgcccccgacacggcctacgccggcgagccggccgccgccgcgcccggcctggccgagccgcgcgcgccctatcccgctgcgtatccgtcgccgggccagtcgccctatcaagggtcgccggcacggccgcacacgcaggtgccgttccgcctgcacggcgaacccgccggcatacccgcgaccgactggcaaagcctgtaccgccccctgcccggagatgcggcgccggccgccacggcactgcgcgccgcccccgccacgccgctgccgacggccgacgagcatccgctggggcaggccctggcgcagctgcacggcatctacatcctggcgcagaactcgcgcgggctggtgctggtcgacatgcacgccgcgcacgagcgggtggtctacgaacagctcaagcgcgccctggacgaccgggcgctgccgcgccaggacttgctggtgccggtcgtgttccacgccgccgagaaggacgtggcgctggtcgaagagcacgagacccagctgaacgagctgggtttcgagatgcgcccgtccggccccgcctccatcgcggtgcgcagcgtgccggccctgctggcgcgcggcgacatcgaaagcctggcgcgcgccgtgctgcgcgacctgggcgcggtgggcgtgtcgcgcctgctgaccgagcagcgcaacgagctgctgagcaccatggcctgccatggctcggtgcgcgccaaccggcgcctgacgctggaggaaatgaacgcgctgctgcgccagatggaaatcaccgagcgcgccgaccagtgcaaccacggccgccccacctgggtgcaatggtcggtcaacgacctcgacaaactgttcctgcgcggccaa

SEQ ID NO: 15049 - DNA, 1113 bp, Bordetella pertussis
atgccatccaatcctacccgcaaaggccgcgttgtcgtcggcatgtcgggcggcgtcgactcatcggtgaccgcctggctgctcaagcagcagggctatgaggtcgtcggcctgttcatgaagaactgggaagacgacgacgattccgaatactgctcgacgcgccaggacctgctggacgcggccagcgtcgccgacctggtcggcgtcgagttcgaatacgtcaattttgccgccgaatacaaggaccgggtgttcgccgagttcctgcgcgagtactcggccggccgcacgcccaatcccgacgtgctgtgcaacgccgagatcaagttcaaggccttcctggaccacgccatggcgctgggcgccgagcatatcgccaccgggcactatgcccgggtgcgcaccgtcgagacgccggccgggccgcgccaccagttgctcaaggccctggacgacaccaaggaccagagctatttcctgcatcgcctcaaccaggtgcagctggcgcgcaccctgtttccgctgggtgaactgcgcaagaccgaggtgcggcgcatcgcccacgagatcgggctgcacaacgcggccaagaaggactcgaccggcatctgcttcatcggcgagcggccgttccgcgagttcctcaatcgctacctgccgagcgaacccgggcccatcctgacgcccgagggccagcgggtcggcacccaccatgggttgtcgttctatacgctgggccagcgcaagggactgggcgtgggcggggtcaaggggcgccagcgcgacgacggcacggccgaggcctggtacgcggcgcgcaaggacctggcgcgcaacgtgctgtacgtcgtgcaggggcacgaccatccatggctgctgtcggcgcagctgcaggcgcaggacgcgagctggatcgccggcgagccgcccgcggccggcgcctacggcgccaagacgcgctatcgccaggccgatgcggcatgccggctggaccaggcgggcggcgagcgcttcgcgctggcattcgagcaggcccaatgggcggtcacgccggggcagtcggccgtgctgtacgacggcgaggtctgcctcgggggcggcatcatcatc

SEQ ID NO: 15050 - DNA, 1383 bp, Bordetella pertussis
atggttgaacgcgattgtccccccgcccacggcgcgctctctccccgcgccgccgcccgccgacgcctgatcagcgtcgccgcgaccctgctcgtcctccctgtcgttccccgcctggcgcatgcggccaccatcctggccgtgcgcacctggccggccgatgagtacacgcgcgtcacgctcgagctcgacagcgagctcaaggcggaacacttcacgctggagaacccccaccgcctggtggtcgacatcgaaggcctgtcggtcaatgccgccctcaacgacctcgtgtccaaggtgcggcacgacgacccgtacatccagggcctgcgcgtggcgcagaaccggcccaacgtggtgcgcctggtattcgacctcaagcagtcggtggcgccccaggtgttcaccctcaagccggtggccgactaccagtaccgcctggtgctggacctgtacccgaaggtggcgcaggacccgctgatggcgatcctgaacaagcagtccgggcccgatgtcgacgacccgctggcgcgcgtgctcgacgagatcgcgcgcaaccagcccgcgcccgaccagccggccgcgccgctggcccgcggccaggagccggcgcccgcgctgcccgccccgcccatcaagccgcttcccgcgcccggccgctcggccagccgcaagcgcatgctgaccatcgcgctcgatcccggacatggcggcgaggaccccggcgccatcggccgctcgggcctgcgcgagaaggacgtggtgctgcgcatcgcgcggcggctgaagaccctgatcgacgcccagccgtacatgcgcgcctatctgacgcgcgacgacgattacttcgtgccgctgcacgtgcgcgtgcagaaggcgcggcgcgtgcgcgccgacctgttcgtgtccatccacgccgacgccttcatcaagcccacggccaacggctcgtcggtgttcgcgctgtccgaacgcggcgcatccagcacgcaggcgcgctggctggccgacaaggagaacgcggccgacctgatcggcggcgtcaacctcggcagccacgaccgccaggtggccaaggtgctgctggacctgtccaccacggcgcagatcaacgattcgctcaaggtcggcagcgccttcctggacgagatcaagaagatcaaccggctgcacaagaaccgggtcgagcaggcgggcttcgcggtactgaaggcgcccgatatcccgtccatcctggtcgagacggccttcatcagcaatccgaaggaagaagccctgctgcgcagcgcggcgcaccaggaaaagctggcgcaggccatgatgaccggcatcgaccgctacttcaccgccaacccgccgctggcgcgcgtaggcgacgtgagc

SEQ ID NO: 15051 - DNA, 1752 bp, Bordetella pertussis
atgccattgcggacgctgttggcggcgctgtgcgccgccgccatttgccaggcgccggcctgggcgcgcgaggcgccgggcgtggcgcgcgaggacgtcaatccggagatcgccagcgcgcgcagcgagcgcgcgcaagcgcacgcccagcgctacatgatcgccaccgccaacccgctggccagcgaggccggctaccgtatcctgcgggccggcggcagcgccaccgacgccatcatcgccgcgcaactggtgctgaacctggtcgagccgcaatcctcgggcataggcggcggcgccttcatggtgcactacgaccgcggcgccggcgagctgcgcgtctacgacagccgcgagaccgcgcccgcggctgcgcggcccgaccgcttcctgcgcgagggcaagccgctgtcgtatgccgaatcggtcaacaacggccgcgcggtcggcacgccgggcctgttgcgcggcctggagctggcgcatcgccagcacggcaagctgccatggcaggccctgttcgagccggccatcgcgatggccgagcaggggttcgccgtgtcgccgcgcctgcacgagtccatcgccggcgacaaggcgctggcggcgcagcccgcggcggcgcgctacttctacggccccgacgggcaggcctggccggtcggccaccggctgcggaatcccgagttcgcggccacgctgcgcagcatcgcgcgcgagggggccgatgccttctaccgcgggccgatcgcgcgcgacatcgtggcggcggtgcgtgcccatcccacgccgggcgacctggccgaggccgacttggccggctaccgggccgtggtgcgcgagcctgtgtgtggcctgtaccggggctaccgcctgtgcggcgcgccgccgccgagcagcggcccgctggcggtgctgcagatgctgggcgaactggaacagtacccgctggcgcgcatgcgtcccggcagtgtcgaggccgtgcattatttttccgaggccgggcggctggccttcgccgaccgagacttctacgtggccgatccggcctttgtcgatgttccggtgcgggcgctgctcgatcccgcctacctgcgccagcgcggcgcgctgatccgccccgaccgcagcatgaagacggccctgccgggcgatccgcaggggctgctggccgaacgcgcgcgcgacgacgccatcgaggtgccctcgaccagccacctggtggcggtggatgccgcgggcaacgtggtttccatgacgtccaccatcgaggccgcgttcggcagcaagatcttcgtgcgcggtttcctgctcaacaacgagatgacggacttctcgtcctcctaccgcgatccggaagggcggctggtcgccaaccgggtcgagccgggcaagcggccgcgcagctcgatggcgcccatgatcgtgtttcgcgccggcaagcccgtgctggcgctgggttcgcccggcggcagcgccatcatcaactacgtggccaagacgctggtcggcgtgctcgattggaagctggacgtgcagcaggcgatcgcgctgcccaacctgggcagccgcaacaaggaaaccgagctcgagcgcggcacggcgctggaagcgctggccccggcgctgcggcgcatgggccatgaggtgcgcatcaccgattttcccagcggaatccagggcatcgtgatcgggccgcacggcctggccggcggcgccgatccgcgccgcgaaggcctggcgctgggcgac

SEQ ID NO: 15052 - DNA, 1116 bp, Bordetella pertussis
atgcaaatcggggtacctaaagaaacccgggatggggaaacccgcgtcgcggcaacgccagagaccgtcaagaagtacataggcggcaaacacagcgtgatcgtcgaacgcggagcaggcgtggccgcgcattacccggacagcgcctatgaggaggccggcgccacgctgggcacggccgaaaccgcactgggttgcgagctggtgctgaaagtccgcgcgccggccgacaacgaactgccgcacatgaaacgcggtgcggtgctcgccggcatgctcgatccgttcgatgccgacgacctgcaacgcctggccgccgcggggctgaccgccttcgcgctggaagcggcgccgcgcatcacccgcgcgcaaagcctggacgtgctgtcatcgcaggccaacctggccggctacaaggcggtactgctggcggccaactactacggcaggctgctgcccatgatgatgaccgccgccggcacgctgaaggcggcccgcgtggtcgtgctgggcgccggggtggcgggcctgcaggccatcgccaccgcgcgccgcctgggcgccgtggtcgaggcctcggacgtgcgtccggccgccaaggagcagatcgagtcgctgggcgccaagttcatcgacgttccgttcgagaccgatgaagagcgcgaaatcgcgcagggtgtcggcggctacgcccgtcccatgcccccggcatggatggcccggcaggccgaactggtcgcccagcgctgcaagcaggccgatatcgtcatcaccaccgcgctgatccccggccgcccggcgcccacgctgctgacggccgaaaccgtgcaggccatgaagcccggatcggtcgtggtcgacctggcggtcgagcgcggcggcaactgcccgctgacgcaaaaaggcctggtggccgaccaccacggcgttaccctggtcggcctgaccaatctgcccggaatgttgcccaccgacgcatcggctctgtatgcgcgcaacctgctggatttcctcaaactcatcgtcgatgccgaaggcgcgctggccatacggcgcgatgacgaaatcgtcacggcctgcctgatgtgcgaaggcggccaggttacccggaggtca

SEQ ID NO: 15053 - DNA, 1617 bp, Bordetella pertussis
atgtcggctgtccgggccggcctaccgtctgggagcgtctccatgattgacctcgatgtcgtcaacctgtcgcgattccagtttgccgcgaccgcgctataccacttcctgttcgttcccctcacgctcggcctgtcgttcatcctggccatcatggaaagcgtgtacgtcatgaccggccgccagatctggaagcgaatgacgatgttctggggcacgctgttcggcatcaacttcgccctgggcgtggccaccggcgtggccatggaattccagttcggcatgaactggtcctactacagccactacgtcggcgatatcttcggcgcgccgctggcgctcgagggcctgatggcgttcttcctcgaggccaccttcgtcggcctgttcttcttcggctggaaccgcctgtccaaggtcggccacctggtggtgacctggctggtggcgttcggcaccaacttctcggcgctctggatcctgatcgccaacggctggatgcagaacccggtgggcgcgatgttcaatccggacaccatgcgcatggaaatgaccgacttcgccgccgtgctgctcaacccggtggcgcaggccaagttcgtgcatacggtcagcgccggctacgtggcgggcgcgatgttcgtgatgtcgatcagcgcctggtacctgctcaagggccgccacatcgacctggccaagcgttcgatggcggtggcggccagcttcggcctggcttcggcgctgtctgtggtggtgctgggcgacgaaagcggttatctcaccaccgaacaccagaaaatgaagatcgcggccatcgaggccatgtggcataccgagccggcgccggcctcgttcaacctgatcgccattcccaaccaggaagagcgcaggaacgagttcgcgatttccattccgtacgtcatggggctgatcggtacgcgttcgctgaccacgccgctgctgggcatcgacgacctggtgcggcgcgcggaggtgcgcatccgcgagggcattaccgcctacgaggcgctgcagcgcgttcgcgccaatcccaaggacgtcgacgcgcgcatgctgttcgagcgcacctggccggatctgggctacgccctgctggtcaagcgctaccagcccgacctgtccaaggccaccgacgaacagatcgcgcaggcggcgctcgacacggtgccgaacgtggcgccgctgttctgggcgttccgcgtcatggtggcggtgggcttctacctgatcctgttcttcggcgtggcgttctggctggcttcgcgcgggcgcctggacagccggcccggcctgctcaaggtggcgttgtggagcctgccgctgccatgggtggcgatcgagagtggctggttcgtggccgagtacggccgccagccctgggtgatcgagggcgtgctgccgacctactatgcggcatccggcctgaccatcaccgacctggcgatcagcctggccattttcctggtgctctatacggtgctgctggtgataggcgtcaaggtgatgctgcatgccgtcaaggccgggccgaaaggcgaggcgagcgagccggccggccggcgcgccgatccggtccaggcggccgtcgatgcgtat

SEQ ID NO: 15054 - DNA, 1539 bp, Bordetella pertussis
atgcaactcaatccctccgagatcagcgaactgctcaaaagccgcatcgagggcctgggcgcttcgactgatgttcgtactcagggtaccgtcgtctccgtgaccgacggtatcacccgcatccacggcctgtccgacgtgatgcagggcgaaatgctcgaattcccgaacaacgtgttcggcgtggcgctcaacctcgagcgcgattccgttggcgccgttgttctgggcgactacaccggcgtgtccgaaggcgaccaggtcaagacgaccggccgcattctcgaagtgccggtcggccccgaactgaagggccgtgtggtcaataccctgggcgacgcgatcgacggcaaaggcccgatcaacaccacccagaccgacatcatcgagaaagtggcgcctggcgttatcgcccgccgctcggtgtcgcaaccgctgcagaccggtatcaaggccatcgactcgatggtgccgatcggccgtggccagcgcgaactgatcattggcgaccgccagaccggcaagaccgccgtggccgtcgacaccatcatcagccagaagggcaagggcgtcacctgcgtgtacgtcgccatcggccagaaggcttcgacgatcaacaacgtggtgcgcaagctggaagagcacggcgcgatggaatacaccatcgtggtcgccgccgccgcttcggactcggccgccatgcagtacatggccgcctacgccggctgcaccatgggcgagtacttccgcgatcgcggcgaagacgccctgatcgtctatgacgacctgaccaagcaggcctgggcctaccgccaggtgtcgctgctgctgcgccgcccgccgggccgcgaagcctatccgggcgacgtgttctacctgcactcgcgcctgctcgaacgcgccgcgcgcgtcaacgaggaatacgtcgagaagttcaccaacggcgccgtcaagggcaagaccggctcgctgaccgcgctgccgatcatcgaaacccaggcgggcgacgtgtcggccttcgttccgaccaacgtgatctcgatcaccgacggccagatcttcctggaaaccgacctgttcaacgcgggcgtgcgtcccgccatcaacgccggtatttccgtgtcgcgcgtcggtggcgccgcccagaccaaggtcatcaagaagctgtccggcggtatccgtaccgacctggcccagtaccgtgaactggctgccttcgcgcagtttgcctccgacctggacgacgccacccgtcgccagctcgagcgcggcaagcgcgtggtggaactgctcaagcagccgcaataccagccgctgcaagtgtgggagctggccgtctcgctgtacgcggtcaacaacggttacctggacgacgtcgacgtggcgcagatcctggccttcgaaaagtcgctgaaggatcacctcaaggccaagcacgccgccttgatccagcgcatcgaagacaccaaggaactgtccaaggacgacgaagccgaactggctgccgcggtccaggatttcaagaagcacggtgctttt

SEQ ID NO: 15055 - DNA, 2589 bp, Bordetella pertussis
atgctggaaacgtaccatcaacacgtcgccgaccgcgcagccctgggcattccgccgctgccgctgtccgcgcaacaaaccgctgacctgatcgagctgctgaaaaacccgccggatggcgaggcgcagaatctgctggagctgctgacctaccgcgtgcccgccggcgtggacgacgccgccaaggtcaaggcctcgtacctggccgccgtggccttcggcaccgaatcgtgtgccctgatcgaccgcgccaaggcgaccgaactgctgggcacgatgctcggcggctacaacatcggcccgctggtgcaactgctggacgacgccgaggtcggcaccatcgccgcagacgcgctgaagaagaccctgctgatgttcgacgccttccacgacgtcaaggagaaggcggacaagggcaacgccaacgccaagtcggtgctgcagagctgggccgatgccgaatggttcaccagccgtccggaagtgccgcaaagcctgaccgtcacggtcttcaaggtacccggcgaaaccaacacggacgacctgtcgcccgcccccgacgccaccacgcgccccgatatcccgatgcacgccctggcgatgctgaagaacaagcgcgacggcgcggcgttcgagcccgaggaagacggcaagcgcggtcccgtgcagttcatcgaatcgctgaaggaaaaaggccacctggtcgcctacgtcggcgacgtggtcggcaccggctcatcgcgcaaatcggccaccaactcggtgctctggttcaccggcgaagatatcccgttcgtgcccaacaagcgcttcggcggcgtctgcctgggtagcaagatcgcgcccatcttctacaacacgatggaagacgccggcgccctgccgatcgagctggacgtctcgaaaatggaaatgggcgacgtggtggaactgcgcccgtacgacggcaaggccatcaagaatggcgagaccatcgccgagttcacggtcaagtcggacgtgctgttcgacgaagtgcgcgccggcggccgcattccgctgatcatcggccgcggcctgaccgccaaggcgcgcgaggccctgggcctgccgccctccaccctgttccgcctgcccaacaacccggccgacaccggcaagggctacacgctggcccagaagatggtcggccgcgcctgcggcctgccggaaggccagggcatccgcccgggcacctattgcgagccgaagatgacctcggtgggcagccaggacaccaccggcccgatgacccgcgacgaactgaaggacctggcctgcctggacttctcggccgacctggtgatgcagtcgttctgccataccgccgcctatcccaagccggtggacgtcaagacgcaccacaccctgccgcagttcatcagcacgcgcggcggcatttcgctgcgccccggcgacggcgtcatccactcgtggctgaaccgcatgctgctgcccgacacggtcggcaccggcggcgactcgcacacgcgcttcccgatcggcatttcgttccccgccggctcgggcctggtggccttcgccgcggcgaccggcgtgatgccgctggacatgccggaatcggtgctggtgcgcttcaagggcaagatgcaacccggcgtcacgctgcgcgacctggtcaatgcgatcccgctgtatgccatcaagcaaggcctgctgaccgtggccaagcaaggcaagaagaacatcttctcgggccgcatcctggaaatcgaaggcctgcccgacctgaaggtcgaacaagccttcgagctgtccgacgcctcggccgaacgctcggccgccggctgctcggtgcgcctgcacaaagagccgatcatcgagtacatcaacagcaacatcgtgatgctgaagtggatgatcgccaacggctatgaagacgagcgctcgctgggccgccgcatcaaggccatggaagcctggctggccgatcccaagctgctggagccggacgccgacgccgactacgccgccgtgatcgagatcgacctggccgacatccatgagcccatcgtggcctgcccgaacgaccccgacgacgtcaagacgctgtcggatgtcgccggcgccaagatcgacgaagtgttcatcggcagctgcatgaccaacatcggccatttccgcgcggcgtccaagctgctggaaggcaagcgcgacattccggtcaagctgtgggtggcgccgccgaccaagatggacgcgcagcagctcaccgaggaaggccactacggcgtcttcggcacggccggcgcgcgcaccgaaatgccgggctgctcgctgtgcatgggcaaccaggcgcaagtgcgcgagggcgcgacggtcatgtccaccagcacgcgcaacttccccaaccgcctgggcaagaacaccaacgtgtacctgggctcggcggaactggcggcgatctgctcgcgcctgggccgcatcccgacccgcgaggagtacatggccgatatgggcgtcatcaacaagagcggcgaccagatctaccagtacctgaacttcgaccgcatccccgactacaaggatgtggccgacgtgatcgaggtc

SEQ ID NO: 15056 - DNA, 2067 bp, Bordetella pertussis
atgtccgcaagcgatacctcgataggcagtggcctgaatccctcccagaaagaagccgtgctgtacctggacgggccgtgcctggtgctggccggcgcgggcagcggcaagacgcgcgtcatcacgcagaagatggcctatctgttgcgcgagtgcggctacatgggccgcaacatcgtggcgctgaccttcaccaacaaggccgcgcgcgaaatggccgagcgcgtcaagaccctggtcgatccgaagctggccaaggggctgaccatcagcaccttccatgcgctgggcgtgcggctgctgcgcgaagaggccgcgcatgccggcctcaagccccagttctccatcctggacgccgatgatgccatgagcatcatccaggagttgctggcgaccaccgaccgcggccggctgcgcgaggtgcagtccatcatctcgctgtggaagaacgccctgcttacgccggaccaggcggccgccgccgccatcacgcccaccgaagtcgaggccgtgaccgtctaccgcggctacgcggcgacgctggcggcataccaggcggtggatttcgacgacctgatccgcattcccgccgaactgctcgagcgcaacaaagaggtgcgcacgcgctggcagaaccgcgtgcgctatctgctggtggacgaataccaggacaccaacgtttgccagtaccgcctggtgcagctgcttaccggcgtacgggccatgttcacggcagtgggcgacgacgaccaggccatctacgcgtggcgcggcgccaccatcgagaacctggccaagctgaccaccgactatcccaatctcaagctgatcaagctggagcagaattaccgctcggtgcagcgcatcctggccgccgccaacaacgtgatcgaacgcaaccccaagctgttcgagaagaagctgtggtcggacctgggccatggcgagcccatcatcgtctcgccgatgaacggcgacgagcacgaggccgagtccatcgcgatgaaagtgtcggcggcgcgcttcgagcgccaggcgcaatggaaagacttcgccattctgtatcgcagcaatcatcaatcgcgcgtgctggagcaggcgctgcgcaacctcaagattccgtacaccatctcgggcggccagagcttcttcgacaaggccgaggtgcgcgacatcctggcctacctgcgcctggtcgccaatgacgaggacgaccctgccttcatccgtgccgcgaccacgcccaagcgcggcatcggccagggcaccctgcagacgctgggccaatacgccgcgcaacgccaatgctcgctgctggccgcggtggacgaggccgggctcgagagcctgctggcgccgcgccagctggagccgttgcgcaccttcgccgagttcgtgcggcgcatccagtggcgcgccggacggggcgtcgaaggccagcccgcgcgcgcgccggagccggccggccagatcctcgatgacctgctctcggccatccagtacgaacgctacctgtacgacatgctggaagagcggccggcgcagacgcgctggcagaacgtgctggagctgacgggctggctcaagcgcaaggccgaggaggacggcatgacgctgttcgacctggtgcagcacgtcgcgctggtgaccatgctcgagcgcggcgaggaggaagagccggacgcggttaagctgtccaccctgcacgcgtccaaggggctggagtacccgcacgtctacctggctggcgtcgaggaaggcctgctgccgcacctgggcaaggacgacgaggacagcggcgaccccgcgcgcgccgccgagaccctggccacgcgcatccaggaagaacgccggctgatgtacgtcggcatcacgcgagcgcagcgcagcctgaacctgagctggtgcaagaagcgccgccgcgcgcgcgaagacgtggtgcgcgagccttcgcgcttcatcgaggagatgggcctgggcgacgccaaagtgcaggaagacgaagccacgcgcgccatgagccccaaggagcgcctgggcatgctgaaggcgctgctgaagaaggac

SEQ ID NO: 15057 - DNA, 609 bp, Bordetella pertussis
atgatggtgctctattccggaaccacctgcccgttctcgcaacgctgccgtttcgtgctgttcgagaagggaatggatttcgaaatccgcgacatcgacctgtacaacaaacccgaagacatttcggtcatgaacccgtacggtcaagtgcccattctggtcgaacgcgacctggtgctgtacgagtccaacatcatcaacgagtacatcgacgagcgcttcccgcacccgcagctgatgccggccgacccggtcatgcgcgcgcgcacccgcctgttcctgtacaacttcgagaaagagttgttcgtgcacgtctgcgccctggaagaccgcagcgccaagccggacgacaagaagatggtgcaggcccgccagagcatccgcgaccgtctcgcgcagctggccccgatgctgctgaagaacaagtacatgctgggcgatgaattctcgatgctcgacgtggccgtggccccgctgctgtggcgcctggaccactacggcatcgaactgcccaagaacgccgcgcccctgcagaagtacgccgaacgcatcttctcgcgcccggcctatatcgaagcgctgacgccttccgaaaaagtcatgcgccgc

SEQ ID NO: 15058 - DNA, 1167 bp, Bordetella pertussis
atgcgccgtctttggctgatatttgctcaggccgtgacagtcagtctggccattttattcgtcgtcatcaccctgcgccccgattggctgcggctgtcgggtccggcgccggccacgcgcgcgcccgcggcggccgcgtccggccaggcaggggcgtcgtatgccgacgcggtggcgcgcgccgcgccggcggtggtcaacgtatacaccaccaagcatgtcaacgtgccgctggtgccgctgcccgacgatcccgtgctgcgccagctgttcggccaggtgcccggcctgagccgccgcgaggcgtccaccagcctgggctcgggggtgatcgtcagcgccgagggctatgtgctaaccaactatcacgtcgtcgaagccgccgacgccatcgaggtggccctggccgacgggcgccaggcggcggccaaggtggtgggcgcggatccggagaccgacctggcggtgctcaagctggcgggcaagctgggcgagctgccggtcgcgaccttcgccgacaagcgcgcgccgcgggtgggcgacgtggtgctggccatcggcaaccccttcggcgtgggccagaccactacgcagggcatcgtgtcggcgctggggcgcaatggcctgggtatcaatacctatgagaatttcatccagaccgacgcggcgatcaatcccggcaattcgggcggtgcgctgatcgacgcccatggcgacctggtcggcatcaatacggccatttactccgagaccggcggctcgctgggcataggcttcgccatcccggtcgacagcgcgcgccgcgtgatggaagacatcgtgcgcacgggcgccgtgcggcgtggctggttcggcatcgagccgcaggacatgacgcccgaactggcgcgggccttccagctgccgcgcgaggcgcgcggcgtgattatcgcgggcgtcatgcgcgacgggccggcgggcaaggccggcatgcgggtgggcgacatcgtgcaggcgctcaacggcgcgccggtgatcgacacgcgtggcctgctgggccagattgcgtcgctgcagcccggccagcaggcggtggccagcgtgctgcgcgccggcaagccggcggatcgactgttgcccgcatgcatgccgcttcgctgcccgccctggccagccatcaggcccggc

SEQ ID NO: 15059 - DNA, 1584 bp, Bordetella pertussis
atgaactaccgacacatccggggcacgctgcgcgccctcctgctggccagcgccgccatcgccaccctggccggcgcgcccgcgcaagcccagacccgcggcggcacgctgcgcgccatcgtgcatcccgagccgcccatcctgatcaccgccatcaattcgcaatcgcccacccagttcgtcggcggcaagatcttccagggcctgttgacctacgacgcggacctcaagccgcaacccagcctggcgcgcgcctggcgcatctcgcccgacggcctggtctataccttcgagctgcagcccgacgtgaaatggcacgacggcaagccgtttagcgccgacgacgtggtgttttccatcgacaagctggtgcgcgaggtgcatccacgcaccaagctgatcctcaacgcctatgtggaaagcgtgcgcgcggtagacccggccaccgtagaaatccgcctgaaggaacccttcgctcccttcatctcgatgttcgagaccggcaccatgcccatgatgcccaagcatctctacgagggcaccgattaccgcaacaaccccgccaaccagcacccggtgggcaccggcccgttcaagttcaaggaatgggtgcgcggctcgcacatcgcgctggtgcgcaacgacgaatactggaaacccggcctgccctacctggacggcatccgcttccaggtcattcccgattcggcctcgcgcgcggtggccttcgagcaggccaacgtggacctggtctacggcgacgacgtcgacagcgtcgacatcaagcgcctgcgcgccctgcccggcgtgcaatacaccaccaagggctgggagatgttcggccccatggggctgatggtgctcaaccagcgcgaggcgccgttcgacaatgtgctggtgcgccgggccgtcatgcatgccctgaaccgcgacttcatcgtcaagaacatcttcttcggcatggggcgcgtccccaccgggccgttcagctcggccacgctgttccatgacaaggacctgccggtctacgactacaacatcaagaaggcgcgcgcgctgatcaaggagtccggcgtggacgtcgggcagcgcaccttgcggctgctggcgttcccgtacggcgccaactgggagcgcgtgggcgaatacacgcggcagacgctggagcagctcggcttcaaggtggacatccaggctaccgacgccggcggctgggccagccgcatgagccagtgggacttcgacatctccttcaaccacccctaccagtacggcgacccggtgctgggcgtgcagcgcctgtacctgtcgagcaaccgcgtcaagggcacgccgttcggcaacaaccagggctaccacaaccccaaggccgacgcgctgtggcagcaggccgcgcgcagcgtggacccggccgaacgccagaagctgtacagcgagctgcagcgcatcctggtggacgacgccgcgctgggctggctgctggaaatcgactacccgacgctgtaccgtggcaatgtccacaacctcgtcaccagcgccatcggcgtcaaagagagtttcgacacggtctacctcgacgcccgc

SEQ ID NO: 15060 - DNA, 990 bp, Bordetella pertussis
atgaacgcacgagacaccgccatgccccatcccgtggttgccgagctgtacgccagcatgaccctgcccgtggtctgctcgcccatgtttatcgtctccaaccccaagctggcgatcgcgcaatgcgtcagcggcgtcatggggtcgtttcccgcgctcaatgcgcgcccccaatcgctgctgggcgactggctcgacgaagtcgaggccggcctggccgaacaccgccgcgcgcatccggacggcatcgtggcgccctacgcggtcaaccagatcatccaccagtcgaacgaccggctcgaacacgacctggacgtgtgcgcccgccaccgggtgccctacatcatcaccagcctgcgcgcgcccggcgacctggttgccggcgtgcatgcctggggcggcaaggtcttccacgacgtcacgaccgtgcgccacgccgagaaggccctggaggccggcgtcgacggcctgatcctggtgtgcgccggcgcgggcggccacgccggcacgctcagcccgttcgcgctggtctccgaagtacggcgcttctacgatgggccgctggtactgtccggcgcaatcacctcgggccagggcatcctggcggcgctcgccacgggggccgacttcgcctatatgggtacgcgcttcatcgcgaccgccgaggccaatgcctccgaggcctacaagcaggccatcgtcgacgcgagcgcgtccgacgtgctgtacacgccttttttcaccggcattcccggcaactacctgaaagccagcatcgtggccgccggcctggacccggccgacctgccggctgccgaggcggcctcgtccaacttcggcacgacgcgggccaagccctggaaggacatctggggcgccggccagggcgtaggcggcattgccagcgtgctgccggcgcgcgagctggtcgcgtcgctgcgcgccgagtatgcccaggcacaggcgcggctgggcgcgcgcaacctggga

SEQ ID NO: 15061 - DNA, 410 bp, Bordetella pertussis; identical to SEQ ID NO: 14924

SEQ ID NO: 15062 - DNA, 399 bp, Bordetella pertussis; identical to SEQ ID NO: 14923

SEQ ID NO: 15063 - DNA, 819 bp, Bordetella pertussis
atgagcgagatccagactatcggcatcgtgggcgccggcgccatggggcgtggcattgcccagatcgccgcgcaggccggcgtgctggtgcggctgtacgacaccaacgccgccgcggtggaagcggcgcgcgacgcgttgcgtcaaacctgggacaagctggcccagaagggtaagctgagcgaggccgacgcccaggctgcgctggcgcgcatcgcgccggcggcggcgctggccgatctggccgattgccagctggtcatcgaggcggtgatcgagcggctggacgtcaagcgcgacctgttcgcggcgctggaagaaatcgtggcggccgactgcgtgctggcctcgaacacgtcgtcgttgtcgatcaccgccattgcggcggcgtgcaagcgcccgcagcgcgtggtcggctatcacttcttcaacccggtgccgctgatgaaggtggtcgaggtgatcgacggcctgcgcagcgatcccgccgtgggcgatgcgctggccgagctggcgcggcgcatgggccatacgccggtgcgggccaaggacatgcccggtttcatcgtcaaccacgccggccggggcatgaacaccgaaggcctgcgggtggcgcaggaggccgtggcgccgttcgaccagatcgacgccatcatgcgcgaacaggccggtttccgcatgggcccgttcgaactgctggacctgaccgcgctggatgtctcgcatccggtgatggaatcgatctaccggcagttcttcgacgagccgcgcttccggccgtcgcccatcacgaccgtgcggctagctgtgaagattcaa

SEQ ID NO: 15064 - DNA, 276 bp, Bordetella pertussis
atgcgctcccgctacagcgcattcgtgctcgatcagctggactatctactgcagacctggcatccggacacccgcccgtccgagctcgaacccaacgccgccgacgtcaaatggctgggcctgcaaatcaaggccagccagcaacaggacgacacccacgccaccgtcgaattcgtcgcccgcctgcgccaggccggccgcgccacgcgcctccatgagctgagccgcttcgtcaaagaagagcaacgctggtactacgtggacggcgacatccgc

SEQ ID NO: 15065 - DNA, 1857 bp, Bordetella pertussis
atgccgcactatcgctcccgtacttccacccatggccgcaacatggcaggcgcgcgcgcgctatggcgcgccaccggcatgaaggatggcgatttcggcaagcccatcatcgccgtggtgaactcgttcacccagttcgtgccgggccacgtgcacctgcgcgacctgggcgcgctggtggcccgcgagatcgaggccgccggcggcgtggccaaggaattcaacaccatcgcggtcgacgacggcatcgccatgggtcacggcgggatgctgtactcgctgccctcgcgcgagctgatcgccgactcggtcgagtacatggtcaacgcgcactgcgccgacgccatggtgtgcatctcgaactgcgacaagatcaccccgggcatgctgatggccgcgatgcgcctgaacatcccggtggtgttcgtctcgggcgggccgatggaagcgggcaagatcacctcgcccgtcgacggcaaggtcatcgccaagctggacctggtcgacgccatgatcaaggcggccgatcccaacgtgtccgacgccgaggccgaagaggtcgagcgcagcgcgtgcccgacctgcggctcctgttccggcatgttcaccgccaactcgatgaactgcctgaccgaggccatcggcctggcgctgccgggcaacggcaccatcgtcgccacgcacgcctggcgcaagggcctgttcgagcaggccggccgcctggtggtcgagctgtgccggcgctactacgagcaggacgacgcctcggtgctgccgcgcagcatcgccaccaagagcgcgttcgagaacgccatgacgctggacgtggcgatgggcggctcgaccaatacggtgctgcacctgctggccgccgcccaggaagccggcgtggacttcaccatgtccgacatcgatcgcatctcgcgccgcgtgccctgcctgtgcaaggcggcgccggccaccgacaaataccacatcgaggatgtgcaccgcgccggcggcatcctcggcatcctgggcgaactggggcgcgccgacctgctcgacctgtcgtgcggcaacgtgcacagcggcacgctgggcgaggcgatcaaccagtgggacatcaacggcggcgccggcgaagccgcccagaaattcttccgcgccgcgcccggcggcattccgaccacggtggccttcagccaggacgcgaccttcctgacgctggacatggaccgccagaccggctgcatccgcgacaaggcccacgcctattcgcaggacggcggcctggcggtgctgtacggcaacctggccgagaagggctgcatcgtcaagacggcgggcgtggatgagtcgcaatgggtcttcaccggccgcgcgcgcgtgttcgaaagccaggaagacgccgtcgaaggcatcctgggcgatcgcgtgcaggccggcgacgtggtcatcatccgctacgaaggccccaagggcggtcccggcatgcaggagatgctctatcccacgtcctacctgaagtccaaggggctgggcaagacttgcgccttgttcaccgatggccgtttctcgggcggctcgtcgggcctggtgatcggccacgcctcgccggaagcggccgagggcggcaccatcggcctggtcgaagaaggtgacaccatcgagatcgacatccccaaccgccgcatccacctggccgtcggcgacaccgtgctggccgagcgccgcgccgccatgcaggcgcgcggcgagcaggcctggcagccggtcgaccgcgagcgcgtggtgtcccaggcgctgcgcgcctacgcggcgctggccacttcggccgaccgcggcgccgtgcgcgacctgtcgcaactgaagcgc

SEQ ID NO: 15066 - DNA, 1257 bp, Bordetella pertussis
atgtcctctatcgaaacctatatgcagtccgtgggcgaacaggcccgcaccgcctcgcgcgccatgatgcgcgccaccggcgccgccaagaaccaggccttgctggccatggccgaggccatcctggcccagcgcgccgaactgcaggccgccaacgccaaggacgtggccgccgcgcgcgccaacggactcgaagccgccctgctcgaccgcctgaccctctcggaccgctcgatcgagctgatggccgagggcctgcgccagatcgccgccctgcccgatccgggcggcagcattaccgccaccagcgtgcggcccaacggcatgcgcgtggcgcagatgcgcgtgcccctgggcgtgatcggcatcatctacgaatcgcgccccaacgtcaccatcgacgccgccgcgctgtgcctcaaatccggcaacgccaccatcctgcgcggcggcagcgaagcgctgcactccaacgtggcgctcgggcgcatcgtgcaggcgggcctgcaggccgccggcctgcccacggccgccgtgcaagtgatcgacaccaccgaccgcgctgccgtcggcaagctggtcaccatgaccgaacacgtcgatgtgatcgtgccgcgcggcggcaagggcctgatcagccggctggcgcaggaggcgcgcgtgccgctgatcaagcacctggacggcaattgccacgtgtacgtggacgcggccgccgatctcgccaaggcgcacgacatcgccttcaacgccaagacctatcgctacggcgtgtgcggcgccatggaaaccctgctggtgcacgccgacgtggcgcagcgcctgctgcccgcgctgggccaggcgctgcgcgagcacggcgtcgaattgcgcggctgcgcgcgcgcgctccaatggctgcccgagggcaaaccggccgacgacgccgactgggccaccgagtacctcggtcccatcctggcggtgcgcgtggtcgacacgatcgacgaagccatggaccacatctcgcgctggggttccggccataccgacgccatcgtcaccgaaaacctgtcggcggcgcagcgcttccagcgcgaagtggactccagctcggtgtacgtcaacctgcccacctgctttgccgacggcttcgaatacggcctgggcgcggaaatcggcatctcgaccaaccgcctgcatgcgcgcggcccggtcggtctggaaggcctgaccaccctcaaatgggtgctcaacggcgaaggccaggtgcgcgca

SEQ ID NO: 15067 - DNA, 2655 bp, Bordetella pertussis
atgcaggaacgctaccaacccaactccgtcgaagcagccgcccagcaaacctggcaggcccgcgatgcctatctggtgcacgagcacgccaagaaccccgacgggtcggaaaaacccaagttctacgcctgctccatgctgccctaccccagcggcaagctgcacatgggacacgtgcgcaactacaccatcaacgacatgatggcgcgccagctgcgcatgcgcggctacaacgtgctgatgccgatgggctgggacgccttcggcatgcccgccgagaacgccgccatcaagtccaaggtaccgccggccaagtggacctacgacaacatcgcctacatgaagaagcagatgaaggcgatgggcttggccatcgactggtcgcgcgaaatgtgcgcctgcgacccgaagtattacaagtggaaccagtggctgttcctgaagatgctggaaaaaggcatcgcctaccgcaagacccaggtcgtcaactgggatccggtcgaccagacggtgctggccaacgaacaggtcatcgacgggcgcggctggcgctcgggcgccccggtcgaaaagcgcgagatccccggctactacctgcgcatcaccgattacgccgaagaactgctggaccaggtgagcaccaacctgccgggctggcccgagcgcgtgcgcctgatgcaggagaactggatcggcaagtccgagggcctgcgcttcgccttccctcaccgcatcgccggcgccgacggcaagctgatccaggacggcaagctgtatgtgttcaccacccgcgccgacaccatcatgggcgtgacgttctgcgcggtagcgcccgagcacccgctggccacccatgccgcgcagtccaatccggcgctggccgccttcgtcgagcaatgcaagctgggcggcaccaccgaggccgagatggccacgcgcgaaaaggaaggcatgcccacgggcctgaccgtcacccacccgctgaccggcgcggaaatcgacgtctgggtcggcaactacgtgctgatgacctacggcgacggcgccgtgatgggcgtgccggcgcacgacgagcgcgatttcgccttcgcgcgcaagtacggcctgccgatccgccaggtcgtcgcgctggaaggcaagacctactccaccgacgcctggcaggaatggtacggcgacaagcaggccggccgcaccgtcaactccggcaaatatgacggcctggcctaccaggccgccgtggacgccatcgccgccgacctggcggcccagggcgtgggcgagaaacagaccacctggcgcctgcgcgactggggcatttcgcgccagcgctactggggcacgcccatccccatcatccactgcgccgattgcggcccggtgcccgtgcccgagcaggacctgcccgtggtgctgcccgacgacctcatcccggacggctcgggcaacccgctggccaagaacgaagccttcctgtcgtgctcgtgcccgcgctgcggcaagcccgcgcgccgcgaaaccgacaccatggacaccttcgtggactcgtcctggtacttcatgcgctacacgtcgccggacaacgaccaggccatggtcgacgcccgcaacgattactggatgccgatggaccagtacatcggcggcatcgagcacgcggtgctgcacctgctgtacgcccgcttctggaccaaggtcatgcgcgacctgggcctgctcaacttcgacgagcccttcaccaagctgctgtgccagggcatggtgctgaaccacatttactcgcgcaagacgccgcagggcggcatcgaatacttctggcccgaggaagtcgacaacgtctacgacgccaagggcgccatcgtcggcgccaagctccagcgcgacggctccgaagtgaattacggcggcgtgggcacgatgtccaagtccaagaacaacggcgtcgacccgcagtcgctgatcgacaccctgggcgccgacacggcgcggctgttcgtcatgttcgccagcccgcccgagcagacgctcgaatggtccgactccggggtagagggcgccaaccgcttcctgcgccgcctgtgggcgctgggctacgcgcagcgcgaggcggtcggccgcggcctggccaccggcgccgactgggcgcaggccccggcccccgtcaaggaattgcgccgcgaggtctacgggctgctcaagcaggccgactacgactaccagcgcatccagtacaacacggtcgtgtcggcctgcatgaaaatgctcaacgccatcgacgacgcgcccctgcccgaaggccccgccgccgatgccgcgcgcgccgagaccctcggcctgctgctgcgcgtgctgtaccccgtggtgccgcacatcacctggcacctgtggcaggatctcggctacgccgagcacctgggcgacctgctggacgcgccctggccgcacgtcgacgaggccgccctggtggccgacgagatcgagctgatgctgcaggtcaacggcaagctgcgcggctcgatccgggttgccgccaaggcgcccaaggaagacatcgagcgcatcgccgccgcccaggaagaagtggcgcgctttctcgaaggccgtccgcccaagcgcgtcatcgtcgtgccgggcaagctggtcaacgtcgtaggc

SEQ ID NO: 15068 - DNA, 510 bp, Bordetella pertussis
atgaaagaccacgtcgacctggtgctgtcccaatgggcgcacgaacgccccgacctggacgtctcgtccatggccgtgctggcgcgtattttccggttcaataccgccgcgctgcggcgcatcgagccgctgtttcgcgccgccggcctgcaccagggacagttcgacctgctggccacgctgtatcgcgcaggcgccccgcatgcgctgtcgccgcagcaactgaccgccgccctgctgctttcctccggcgccatgacgcaccggctcgatcaactcgaacagggcggcctgatcgcgcgcagccccaacccggacgaccggcgcggcgtcattgtctcgctcacgcccgcgggcctgcgcaccatccggcagatcctggccgactacctggaggcgatcgacgccctgctgacgcccctgtcggccaccgagcgccgccagctggcgggcctactcaagcgcctgctggccgaacacgaccgcacgacgccgggaggcatcccgcaa

SEQ ID NO: 15069 - DNA, 234 bp, Bordetella pertussis
atggcacgcgtatgccaagtgaccggtaaaggcccgatggtgggcaacaatgtttcgcacgcgaacaacaaaaccaagcgccgcttcctgcccaacctgcaatcgcgccggttctgggtcgaaagcgaaaaccgctgggtgcgcctgcgcgtgacggcaaaagccatccgcacgatcgacaagaacggcatcgacgccgtcctggccgacctgcgtgcccgcggcgaagcggtc

SEQ ID NO: 15070 - DNA, 1197 bp, Bordetella pertussis
atgcccccgcaaaccatttcccgcagcatgccgggctggctcatcctcatgggtgcgctcaccgccatcggccctttttccatcgacatgtacctgccggcctttccgtcgatcgccgccggcctgggcgtcgaacgcggcgaagtcgagcggaccctggcggcatacctgatcggcatggccggggcgcagatcatctatggcccgctggccgaccgctacggccgcaagctgcccatgatgggcgggctcatcctgtacgtgctggcctcgctgggctgtgcgctggccgacgacatccagaccctgacggcgtgtcgggtggcccaggccctgggcggcgcggccggcgtcgtcatcccgcgcgcggtgatccgcgaccactacgagacccaggaagccgcgcgcgccatgtcgctgctgatgctgctcatgggcctggcgccgatcctggcgccgctggccggcgcacaattgctcgctttcgtcggctggcgcagcctattctggctgatggccgccggcggcctggcgctgctgctggccgtggcgctgacgatgaaggagacgctggctcccgagcgcgtgttgccgctgcgggcaggcaccatcctgagcaattaccgcgccctgctggcgcaccgcggcttcatgggccacagcctggcgggcggcatgggccaggcgggcatgttcgcctacatcgtcggctcgccgcgcattttcatcgagctgtacggcatagcgccccagtattacggcctgctgttcggcgccaacgcggccgcgctgatcgtcggctcgcagatcagcgcccggctgttgcgcaagtccgcgccggccaccctgcagcagcgcgcccaggtcgcgctggcggtggccagcctgagcgccctggccctggccctggccctgctcgggctgatgagtctgccgctgctgatggcctgcctgatgggctatatgttcagccagggcttcgtcaaccccaactcggccgccctggcgctggcggaacagggccggcgcctgggcgcggcatcggccctgctgggtacgctgcagctgtcctgtggcgcgctggccgggctgatcatcagcatctggccggccgaaagcgtgctgccgctggccgcggtgctggccggctcggcctgcctgtcgtggcagttcggccgcatggcgcgcagacctgct

SEQ ID NO: 15071 - DNA, 1260 bp, Bordetella pertussis
atgagcaaaatcgaagtcaagaatatctacaagatcttcggcccgcatcccggcaagtggctgcaggccgcccgcgacggcatcagcaaggaagacctgctggccaaaagcggccacacgctgggcctgcgcgacatcagcctgtccatcgaggaaggcagcatctacgtgatcatggggctgtcggggtcgggcaagtcgacgctcatccgccacttcaaccgcctgatcgagcccagcgccggccatatcctggtcgatggcgtggatgtggtcagcctgaacaagcgcgacctggagacgttccgccagaagaagatgagcatggtcttccagcgctttggcctgttcccccaccgcacggtgctggacaacgccggctacgggctggcggtgcagggcgtggcgcgcgcagagcgcgaacagcgggcccgccattggctcgaccaggtaggcctgtccggcttcgagaaccagtatccccaccagttgtcgggcgggatgcagcagcgcgtggggttggcgcgggcgctggccaccgacgccgagatcctgttgatggacgaagccttctcggccctggacccgctgatccgccgcgagatgcaggaccacctgctgcagctgcaggccaagctgaacaagaccatcgtgttcatcacgcacgacctggacgaggcgctgcgcttgggcaaccgcattgcgatcctgaaggacggcgagctggtgcaggaaggcacgccggaagacatcctgctcaatcccgccaccgaatacgtgcagtcgttcctgcaggacgtcaaccgcaccaaggtgctcaacgcggcgcacgcggtcaacccgccgcgcctgaccttgacgatgcgctcgcggccggcgcatgcgctggaccgcatgcaggcgctgagctacgagtacgctccggtgctcgatggcaagcgcctggcgggcgtgctgatggccgccgccgcgcagcaggcggtggacgagggcgcgcgcgatgtgtcgcgcttcgtcgaggacctggcctcggtgccggccaccgccggcctggaccaggtgctggcgcagctggtgcacagcgaccagccggtggcggtgacgggcgagggcgacgagttcatcggcatgctgtcgcgcaagaaggtggtcgagctggtcacgccggtgctggccgagtccgactcggccgacgggcagggcgatgctgcggacgcggcctcggacggcgcggggcaggcgcacgagcgcgacgcggcc

SEQ ID NO: 15072 - DNA, 1185 bp, Bordetella pertussis
atgaacgaagtcgtagtcgtagtcgtagccgctgcccgtaccgccattggcgatttcggcggcggcctgaaagacgtggcgccctgcgacctgggcgccacggtcatccgggaagcgctggcgcgcgccggcgtggccggccccgaggtcggccacgtcgccgtcggccatgtcatcaacaccgagccgcgcgacatgtacctgtcccgcgtggccgcgatcaacgccggtatcggcaaggaaaccccggcgttcaacgtcaaccgcctgtgcgggtcggggctgcaggcgatcgtgtcggccgcccagaccatcatgctgggcgataccgagatcgccgtgggcgcgggcgccgaaagcatgagccgcgcgccgtatatcgccccggcgcagcgctggggcgcgcgcatgggcgacagcgccatggtcgacatgatgaccggcgcgctgtccgatccgtttggccgcatgcacatgggcgtgacggccgagaacgtggcggcgcgctattccatcagccgcgccgaccaggacgcgctggcggtcgagtcgcatcgccgcgccgcggccgccatcgacgcgggccgctttcgcgaccagatcgtcccggtgacgttgaagacgcgcaagggcgagacagtgttcgacaccgacgagcacgtgcgccgcgacatcaccatcgaaggcatggcggccctgcggccggtgttccagaaggaaaacggcacggtcacggcgggcaacgcgtcgggcctgaacgacggcgcgggggcggtggtgctgatgagcgcggccgcggcggcgcagcgcggcatcgcgccgatggcgcgcctggtggcctatgcgcatgccggcgtggaccccgagatcatgggcatcggcccggtgccggccacgcaggccgcgctcaagcgcgctggcctgaccgtcgaccagctcgacgtgatcgaggccaacgaggcgttcgccgcgcaggcctgcgcggtgacgcgccagctggagctggatcccgccaaggtcaatccgaacggcagcggcatcagcctgggccatcccatcggcgcgaccggggccatcatcacggtcaaggccttgtacgagttgcagcgcgtgggcggccgctacgcgctggtgacgatgtgcatcggcggcgggcagggcatcgccgccattttcgagcgcgtc

SEQ ID NO: 15073 - DNA, 651 bp, Bordetella pertussis
atgaagacgctgcgatttcccgccgggctctacggcatcacccccgaatgggacgataccgaccgcctgctggcggccgtgcgcgccgcggcggccggcggcatgacggcgctgcaattgcggcgcaagctggccgacgaacgcctgcgcgcggcgcaggcgcgcgccctggcgccgctgtgccgcgagctgggcgtggtgttcctggtcaacgatcactggaaactggccctggatgtgggcgccgacggcgcgcacctggggcgcgacgacgccgacccggccaccgtgcgggcgcaggccggcgccggcctgctgctgggcgtgtcctgttacaacgacctgcggcgcgcggacgccctgctggccgccggagccgactacgtcgccttcggtacggtgtttgcctcgcccaccaagcccgaggccgtgcatgcgccgctgcaaaccctgaccgaggcccgcgcccgggtgctggcctgccccgcgccgcgtccggcggtcgtcgccatcggcggcatcacgccggccaacgtgtcgcaggtggcccaggccggcgccgattcagccgcggtcatcagcggcctgttcgaggcgcccgacattcaggcggccgcgcgcgcatgcgccgcggctttctccgtcaacccc

SEQ ID NO: 15074 - DNA, 795 bp, Bordetella pertussis
atgtcagcacaccaggcgcgcaagcgcttcggccagcatttcctgaccgacgagagcgtggtcgagtcgatcgtgcgggccatcgggcccgcgcgcgacgaccgcgtggtcgagatcggtccgggcctgtcggcgttgacccgccccttgctcgatcgcatcgatcacctgaccgcggtcgagatcgaccgcgatctggccgcgcgcctgcgccggcagtaccccgccgaacggctgaccgtggtcgaggccgacgccttgacggtcgatttcgcgcagttcggccaggggctgagggtggtgggcaatctgccgtacaacatttccagcccgctgctgtttcacctgatgggcgccgccgaacaggtgcgcgaccagcatttcatgctgcagcgcgaggtcatcgaccgcatggtggccgagcccggcagcggcgactacagccgcctgtcggtcatgctgcaggcccgctatcgcatggagaagctgttcgacgttgcgcccgaggcgttcgatccgccgccgcgcgtggtatcggcggtggtgcgcatggcgccgctgccggccgaccggttgcgtccggccagcgacgcggcgttcgagacggtggtggcgcgggctttttcgcagcggcgcaagatgctgcgccgcgtgctggacgactgggcggccctgaccccctgggacgaactgggcattgcaccgaccgcgcgcgccgaggaagtgggcgtggcgcaattcatcggcctggccgacgccttgctggcggccggcgcgccggggctggcccgtccc

SEQ ID NO: 15075 - DNA, 1464 bp, Bordetella pertussis
gtgttttcgtcggagagagcctacatgcccgtactgcgccgcaccaaaatcgttgccaccctggggcccgccacgtccacgcccgagcggctcgacgggctgatacgcgccggcatggacgtggcccgcctgaatttctcgcacggcagcgcgcaggaccatcgcgagcgcgtgcggctggtgcgcgagctggcggccgagcaagggcgcttcgtggccctcatgggcgacttgcagggcccgaagatccggatcgcccgcttcaccgaccagcaggtcaccctgcaggccggccagcctttcacgctgtcgcgttcacattccaaggaggccggcgacgcaaccatcgtgggtatcgattatcccgagctggtgcaggactgccgccctggcgacgagctgctgctcgacgatggccgcgtggtgctggtggtcgacagcgtgggggccgaggaggtccacaccaccgtgacggtgggcgggccgctgtcgaacaacaagggcatcaaccggcgcggcggcggcctttcggcgcccagcctcaccgacaaggaccgcaccgacatcaagctggccgccgagatggagctggactacgtggccgtatcgtttccgcgctatggggccgacatcgatgaagcccgcgcgctgctgcgcgcggccggcagccaggcctggatcatcgccaagatcgagcgcgccgaggcggtggccgacgacgacgcgctggatgcgctgatccgcgccagcgacggcgtgatggtggcgcgcggcgacctgggcgtggaagtgggcgacgccgaactggtcggcatccagaagcgcatcatccagcacgcgcgtacgctgaacaaggtggtcatcacggccacccagatgatggagtccatggtggccagccccatgcccacgcgcgccgaggtgtcggacgtggccaacgcggtgctcgactacacggacgccgtcatgctgtcggccgaaagcgcctcgggccagtatccgatcgaggcggtggcggcgatggcacgggtctgtctgggggcggagaagcaccctaccaccacgcattcgcaccatcgcctgggcgagacgttcacgcgctgcgacgagaccatcgcgctggcggccatgtacgcggccaaccatttcccgggcgtgaaggccatcatcgcgctgaccgaaagcgggcacacgccgctgatcatgtcgcgcatccgttcgggcgtgccgatctactgctacagcccgcatggtcccacgcagcggcgcgcggcgctgtttcgcggcgtctacacggtgcccttcgcgccggccgaatacgacccggccgacttgagcaacgcggccatcgacgagctgaagaagcgtggccgtgtcgcggcgggcgactgggtcatcctgaccaagggcgatttctaccgcgacagcggcggcaccaacggcctgaagatcctgaaggtggaa

SEQ ID NO: 15076 - DNA, 1227 bp, Bordetella pertussis
atgctgaacaagctctggctcgccttcttcctgaccgccgccgccgcggccctgtaccgctggctgggcctgggcgaacccgacgtcttccaggccatggtggtctcgctgttcgacatggcgcgcgtgtcggtggaagtgatggtgctgctgttcggcacgctcaccctgtggctgggctttctgcgcatcgccgaagccgccgggctggtcgagcggctggccagcctgctcgggcccctgttcgcgcgcctgatgcccgaggtcccgcgcgggcatcccgccatcggcctcatcacgctgaacttcgccgccaatggcctggggctggacaacgccgccacgccgatcggcctgcgcgccatgcgcgagctgcagtcgctcaatcccaatcccgatacggccagcaatgcgcagatcctgttcctcgtgctcaacgcatcgtcgctcaccctgctgccggtcacgctgttcatgttccgagcccagcagggcgcggccgatccgacgctgatcttcctgcccatcctgctggccaccagcgcctcgacgctggccggcctgctggccgtcgcgttctgccagcgcctgcgcctgcacgacccggtggtgctggcatggctgggcagcgccgcgctggccttgggcgcgttcatggtgatgctggccggcatgtcggccgccgcgatcgccgcgctgtcctcgctgctgggcaacctgacgctgttcgcggtgctgctggcgttcctggtggcgggcgcctggaagaaggtgccggtctacgagaccttcatcgccggcgccaaggacggcttcaacatcgcccgtgacctgctgccctacctggtggccatgctgtgcgcgatcggcgtgctgcgcgcctcgggcgcgctggatttcgcgctcgacggcatgcgctggctggcgcatgccgccggctgggacacgcgcttcgtcgacgcgctgcccaccgccctggtcaagcccttctcgggcagcgcggcgcgcgccatgatgctcgaaaccatgagccacttcggcgtggacagctttccggcgctgctggcggcggtcatgcagggcagcaccgaaaccactttctacgtgctggccgtgtacttcggctcggtcggcatcgtgcgggcgcgccacgccgtgggttgcgcgctggccgccgacctggccggcgtgctggcctcaatcggcgtgtgctactggttcttcggc

SEQ ID NO: 15077 - DNA, 890 bp, Bordetella pertussis
atgtcattgttctctttgctcggggcgttggaaatcggcctgatcttcagcctggtcgcgctgggggtgctaatttccttccgcctgttgcgctttcccgacctcacgtcgacggcagcttcccgctgggcggcgcggtggccgcgaccctgatcgccgcgggctacgaccccttcacctccaccagcgtcgccaccctcgccggcgccgccgccgggctggtcaccggctggctcaacgtgcggctgcgcatcatggacctgctggccagcatcctgatgatgatcgcgctgtactcggtcaacctgcgcatcatgggcaagcccaacgtgcccctgatcaccgaacccaccgtcttcaccctgctgcagccgcagtggctgagcgattacgtggcgcggccgctgatcctcctggtggtggtcatcatcgtcaagctggcgctggactggttcctcgccacccaggccggcctggccatgcgctcgaccggctccaacggccgcatggcgcgcgcccagggcgtcaataccggcgccatgatcctggccggcatggcgctgtcgaacgcgctggtggcgctggcgggcgcgctgttcgcgcagacccagggcggcgccgacatctcgatgggcatcggcaccatcgtcatcgggctggccgcggtcattgtgggcgagagcatcctgccgtcgcgccgcctggtgatggcgaccctggcggtcatcctcggcgccatcgtgtaccgcttcttcatcgcgctggccctgaacagcgatttcatcggactcaaggcacaggacctgaacctggtgacggccgtgctggtcacgatcaccctggtgattccgatgctcaagcgccgcctggtcggcaggaagggggcctga

SEQ ID NO: 15078 - DNA, 1173 bp, Bordetella pertussis
atgacggtgcgcacggtacgcatcgccggcggccggctgatcgatcctgccagcggcgccgacgcccgcgccgacctttacctggcggacggccgcatcgccgccatcggccaggcgccggcgggcttccaggcgcagcagcacatcgacgcgcgcgggctggccgtgctgccgggcctggtggacctgtcggcgcgcgtgcacggcgccgggctcgcgccgctggcctgcgaaatgcaggctgcgctggccggcggcgtgacccggctggtcgtgccgccggataccgacccgccgctggacgagccgggccgggtggaaatgctgcgccaccgcgcgcaccaggccggccaggcacagctgcacccgctgggcgccctgaccgagggcctgcgcggcgaacggctcagcgagatggccgccctggccgaggccggctgcgtggccttttcccaggccggcttgccggtggccgatacccgggtgctgtggcgcgccatgcaatacgcgcgcaccttcgggctggcattgtggctgcggcccctggacccctggatgggccgcgacggcgtggccgcggccggcgcctatgcgtcgcggctgggcctggccgaggtgccggtgcaggccgagacgctggcgctgcacacgattttcgaactgcagcgcgccaccggcgcgcgcgtgcacctgatgcgcctgtccagcgcagccggcgtggcgctggtgcgcgccgcgcgccgcgagggcctgccgctcacctgcgacgtggccgcccaccagatccacctgaccgatgtggacatcggctttttcgacagccgctttcgcctcgacccgccgctgcgcggccagcgcgaccgcgatgcgatcgtcgccgggctggcggatgacaccatcgatgccatctgctccgaccacaggccggtcggcgataccggcaagctgctgcccttcgccgaggccgaggcgggcgccagcggcctggagctgctgttgtcgctgacgctgaaatgggcgcagcgcgaacgcgtgcccctggcgcgggcgctggccctggtcaccagcgcgccggcggccatcctgcgcgccgccacggcggcgccgccgccctgcggcgaactggcggcgggcgcgccggccgacctgtgcctggtcgacctggacgccgac

SEQ ID NO: 15079 - DNA, 459 bp, Bordetella pertussis
atgagctccgtttccgcggccggcgcgacgccgcccgcgtcgcccggctgcatcgccggcatcggcatggacctgttgcgcatcgaacgcatcgagcgcgcgctggcgcgccatggcgaccgtttcgcgcagaagatcctggggccgaaggagctggccaagttccaggcgcgccgccgccgcgacccggcgcgcggcgtgcgtttcctggccacccgctttgccgccaaggaagccttttccaaggccatcgggctgggcatgcgcatgcccatgagctggcgacgggtgcagaccctgaatgcgccgggcgggcggccggtgctggtgatcggcgccgagctggccgattggttcgatgcgcgcttcggcgcggcgcatgtgtccattaccgacgagtccgatatggccgcggcctacgtcatcgtcgaacgcaaaccggcgcccgacggccggccg

SEQ ID NO: 15080 - DNA, 726 bp, Bordetella pertussis
atgcccaagcccaccgcgcgccgcctgaactggttccgggtcatcaccgccgtcatcatggcggtgctgtgcatcgccatcctgtaccaattgtggatgttctccctggtggtctggtacgcctaccgcgacccgggcagcagcgccatcatgcggcaggagctggcgcgcctgcgcgaacgcgaccccgaggccgagctgaagtaccagtgggtgccctacgaccgcatcagcaatacgctcaagcaggcggtcgtggcgtccgaggacgccaacttcaccgagcacgacggcgtcgagtgggatgccatccgcaaggcctgggaatacaaccagcggcaggccgaacgcggccgcaccaagatgcgcggcggctcgaccatcacccagcaactggccaagaacctgttcctgtccgggtcgcgcagctacctgcgcaagggccaggaactggtgcttgcctacatgatcgagcatgtcatgcccaaggagcgcatcctggagctgtacctgaatgtcgcggaatggggcgtgggggtgttcggcgccgaggcggcggcccggcattattacaataccagcgcggcgcggctgggcgcaggccaggcggccaggctggctgccatgctgcccaatccccgctactatgaccgccaccgcaacaccggttacctgaactcgcgcaccgccacgctgacacgccgcatgcgcatggtcgagattccc

SEQ ID NO: 15081 - DNA, 687 bp, Bordetella pertussis
atgcgcgatcaagccctgcccctgcgtactctggtcattaccgccagcctggcccttgcggccatggcagctcccgcccatgcctttgccgacgatgaagcgcgccgcgccatcctggatctgcgccagcaggtgcaacagcagaatgagcagaaccagcgcgcgcggctgcaattggccgatcagttgcaggccatgcaacaggaaatcgcccaattgcgcgaccagttggaactgatttcgcgccagcagcccaatgcccagggcggccagccccagcacgccggcaacccgcccggcgtgaccgcggtcgaccagcaggaacaggccgcctatgacggcgcgatcgatctgttccgcaagggccagtacaaggacgccgccgaatcgctggccgccttcatcgcgctgtacccgaacagccagctggcgccgacggcgcagttctacctgggcagcagccgctacgccatgaaggatttcaagggcgcgatcgagcagctcaacaatctggtgcagaacgcgccgaccaacgcccgcgcccccgacgccctgctggtgatcgccggcagccagatcgagctgaacaaccgcgccggcgccaaggccacgctgcagcgcatcgtgcgcgactatcccaccacgccggccgccaacacggccaagagccgcctgcaactgctgcag

SEQ ID NO: 15082 - DNA, 1728 bp, Bordetella pertussis
atgcgcgcctccaagtaccacctgaacactctgaaagaagcccctgccgaggccgagatcgccagccaccagttgatgacgcgggccggcatgattcgcaagctggcgggcggaatctacacctacatgccgctggggctgaaggtcatccgtaagatcgagggcattgtccgcgaggaaatgaacgcagccggcgccatcgagctgctgatgccggtggtgcagccggccgaactctggatggagtccggccgctgggaacagtacggcgcggagctgctgcgcatcaaggaccgccaccagcgcgatttcgtcctgcagccgacctcggaagaagtgatcacggacatcgcgcgcaacgagatccagagctaccgccagctgccgctgaacttctaccatatccagaccaagttccgcgacgaacgccgcccccgcttcgggttgatgcgcgggcgcgagttcaccatgaaggacgcctactcgttcgaccgcgacgaggccggcgcccagcgcagctacgacatcatgtacgccgcctaccagcgcattttccagcgcctgggcctggagttccgcgccgtggcggccgacaccggctcgatcggcggatcgcgcagccatgagttccaggtcatcgccgacaccggcgaggacctgatcgtgtacaaccccgagtcggactacgccgccaatatcgagctggccgaagcgcccgccctgctggccacccgcgccgctcccggccaagacctggaggcggtgcccacgcccggcgcggccaagtgcgaggacgtggccaagctgctggacctgccgctggcgcgcaccatcaaatccatcgtgctggccgtcgaccagcccgaggggccggcgcaggtctggctgttgctgctgcgcggcgatcacgaactcaacgaaatcaaggcgggcaagctgcccgggctggccggcttccgcttcgccaccgagacggaaatcctcgaccatttcggctgcaagcccggttacctgggcccgatcaagacggccaggccggtgcacgtggtggccgaccgcacagtcgccaacatggccgacttcgtctgtggcgccaaccgcgaggactaccactaccagggcgccaactggggccgcgacctgcccgaacccgagctggtcgcggacctgcgcaacgtggtcgagggcgacccctcgcccgacggcaagggcgccctgtccatccagcgcggcatcgaggtcggccacgtgttcttcctgggcaccaagtactcggaagcgctcaaggccactttcctggacgacaacggcaagccggccgtgctgcagatgggctgctacgggatcggcgtcacccgcatcgtgggcgcggccatcgagcagaaccacgacgcccgcggcatcatctggccgcgcgccatcgccccctacgaggtggtgatctgcccggtgggctggggcaaaagtgaaactgttcgtgacaccgcgctggcgctgtacgaggcgctgcgcgcgcgcggcgtggacgtcatgctcgacgaccgcgacagccgtccgggcgtcatgttcgccgaatgggagctgatcggcgtgcccctgcgcgtaacagttggagaacgcggcctgaacgagggtgtggtggaattgcaggcccgccgcgaagccgaggcggccaaggtcccggtggaccaggccctggcgcagacgctggccaaactcgacttgcta

SEQ ID NO: 15083 - DNA, 786 bp, Bordetella pertussis
atgaccctgcaagcccgcaatctgaccttggcgcgcggcggcgcgcccatcctcaccgacgtgtcgctgacgctggcgcccggcgcgctggtgggcctgctgggcgccaatggcgccggcaagtccaccctgctggcggcgctggccggcgaactggcgccgcgctcgggccaggtcttcctgggcgatgcagacctggcgacgttgagcgcgcggcagctggcgcgccgccgcgccgtgctgccgcaaaaaccctcgctgtcgttcgacctgggcgtcagcgacgtggtcggcatgggcgcctatccgtttccggaactggatccggccgccgtgcgccagctggtgcgcgacgcgctggagcaggcgggcgtgacccacctggcgcagcggcgctatccgcagctgtccggcggcgagcagcagcgcgtgcagttcgcgcgcgtgctggcgcagtgccatgccatgcacgcgcccggccagacccgctacctgatgctggacgaacccatttccaacctggaccccaggcaccagatggaattgctggccacggcgcgggcgctggcccacgaggccggcatgggggtgctggtgatcgtgcatgacatcaatcaggcggcgcgctggtgcgacacgctggcactgctggccgatggccggctggccgcgctggggccgcccgccgacgtgctgacgccggaccacatgcggcgcgtctatggcatcgaggccgatgtgctggcgcatcccaccctgcccggccgcctgctggtgctggcgcgc

SEQ ID NO: 15084 - DNA, 1020 bp, Bordetella pertussis
gtgtcgctggccacggcgccccgcccgcccgctagccggcgccatccggtcgcgctgctgctggcgctgggcgctgccctgctggcggtgggcattctcgccgccgccagcggcgcggtgcatattccgctggccgacctggcgcgcctgatcggcggcgacagtacgccgcgggatgcgctgtggcgcaacgtgctgttcgacatccgcctgccgcgcgtgctgttcgcggccaccgcgggcgcggcgctggcgatctgcggcgcggccatgcaggcgctgtttcgcaatccgctggccgagcccgggctggtaggcatttcggccggcggcgcgatgggcgcggtgctggccatcgtgctgacctccggcggcttcgccatcacggcgcccgcggccttcgccggcagcctgctggctaccggctgcgcctacgtgctgggacgccgcgcgcatggcgtggcgggcctgctgctggccggcatcgccatcaacacggtggccggcagcgtgatcggcctgctgaccttcatggcctcggacgcgcaactgcgcgacctcacgttctggagcatgggcagcctggccggcgcgcgctggtcgttgctggcgtttctggcgccctggaccttgctgtggtcgtggtggctgatgcgccagtggcgcgccatgaacgcactgctgctgggcgagcgcgaggcgcaccacctcggtttcgcgctgcgctcggtacggcggcaactggtgctggccaccgcgctgatcgtcggccccctggtggcggccaccggcggcatcgggttcgtcggcctggtcgtgccccacctgatacgcatgacgctgggcgccgaccaccgctggctgctgcccgcctcgatgctggccggcgccctggccctgacgctggcggactggctggcgcgggtggtcatcgtaccggcggaactgcccatcggactggtcaccagcctggtgggcggcccctttttcctgtggctgctggcgcgcggccgccgtctc

SEQ ID NO: 15085 - DNA, 1131 bp, Bordetella pertussis
atgaaattcgtagacgaagccaccattgaagtcatcgccggcaagggcggcaatggcgtggccagctttcggcgcgaaaaattcatccccaagggcggcccggacggcggcgacggcgggcgcggcggcagcatctatgccgtggccgaccgcaatatcaacaccctgatcgacttccgctacgcccgcctgcatcgcgccaagaacggcgagaacggccgcggctcggaccaatacggggcagcggcccccgacatcaccctgcgcgtgccggtgggcaccgtggtgcacgacgccgataccggcgaggtgctgttcgacctggaccggcacgaccagaaggtcacgctggccgcgggcggcgccggcggcatgggcaacatccatttcaagtccagcaccaatcgcgcgccgcgccaatggacgcccggcaaggaaggcgaacagcgccgcctgcgcatggagctcaaggtgctggccgacgtcggcctgctcgggctgcccaatgccggcaagtcgacgctgatcagccgcatttcgaacgcgcggcccaagatcgccgactaccccttcacgacgctgcaccccaacctgggcgtggtgcgcacctcgccctcgcgcagcttcgtggtggcggacattcccggcctgatcgaaggcgcctccgagggcgccggcctgggccacctgttcctgcgccacctggcgcgcacgcgcgtattgctgcacctggtcgatatctccagccccgacccggaagccgatcccatcgagcaggcggtcgtcgatgccaacgccatcgtcgaagaactgcgccgctacgatcccgagctggccgccaagccccgctggctggtgctcaacaagctggacatggtgcccgacgcccaggacgcccagcagcgcttctgcgccgaattcggctggaccggcccggtcttcgcgatctccggcctcaacggcgaaggcacccaggacctgatctgggccctgcaggactacctcgacgccgaaaagcgcaaggaccaggacgcccaggaccaggccgacggcacctatgtgttcgaagatccgcgtttcgacgccagccgtggcggcgccgcgcccgccacgccgcctggcggtgacgaa

SEQ ID NO: 15086 - DNA, 1083 bp, Bordetella pertussis
ttgaacccggcgcgccagaaccataccctggagaatgcaatgaccgaaccgacctttgccacccgcgccgcggcgctgcgccagcgcaacgacgagctggccgccagccagcccggccagcgtgcccgcaacctggcccaggcgctcggcgtctcggaagccgaatggatcgcggccggctgcaacggcgcgcgcgtcaccgcgctgcgcggcaagccgcaagccatcttccgcgacctgggcgagctgggcgaagtcatggccctcacccgcaacgactggtgcgtgcatgaacggcacggccgctacgaggacatccaggccgaggggccggtgggcctggtgctggggccggatatcgacctgcgcgtgttcttcaactgttgggccagcgcctgggccgtcgaacaggacggccacaccagcctgcaattcttcgacggcgcgggcgtggcggtgcacaaggtgtaccgcaccgaagcgaccgacggcgcggcctgggaggcgctggtcgcccgctacgcgggcgagcccgaatggcccgagccgcagccctatccgcccgccgccgacgccgccgccgtggacgatccggccgcgctgcggcgtgactggctggccatgcaggacacgcacgagttcttcccgctgctgcgcaggctgaaggtcgggcggctggcggccctgaaggccgccggcgccgacctggcgcaacaggtgccggccgagacggtcgagcacatgctgacgcaggccgcggccagcggcctgtccatcatgtgcttcgtcggcaaccgtggcatgatccagatccataccggcccggtcgagaagctgcgccgtaccggcccctggtacaacgtgctggacccgcgcttcaacctgcacctgaacaccgagaccgtcgattcggcctgggtggtcagcaagcccaccagcgacggctgggtcacctcgctggagctgtacacggccggcggcgagctgatcgtgcagttcttcggcgagcgcaagcccggcaagcccgaactgaccgcctggcgccaactgctgtctggcctgtgcggccagccgctggccgag

SEQ ID NO: 15087 - DNA, 258 bp, Bordetella pertussis
atggcacagaaaaagggcggcggttctacccggaacggccgcgactcggaatcgaaacgactgggcgtcaaggtgtatggcggccaaagcatcctggctggctcgatcatcgtgcgccagcgtggcacccgctttcaccccggcgtgaacgtcggcgtgggcaaggaccacaccctgtttgccctggccaacggcaaggtgcacttcagcgtcaagggcgccctgaacaaacccaccgtctcggtggtcgccgccgag

SEQ ID NO: 15088 - DNA, 972 bp, Bordetella pertussis
atgcatcctgctggccccctgaatccgcccggcgacgacgcgccgatcgagcgccgggtggcgcgcgaggccgcccgctggctcgtgcggctgggctccggccaggccagcgccgacgaaatccaggcctgcgaccactggcgcgccagccatgccgagcacgaacgcgcctggcagcgcgcccgccggctgacgagcatgttcgaccgcatcccgccggccgtaggccaggccgccctgggccgcgcgcgggaccgccgcgcgatgctgaaatccttggtcgcactgctggcggcgccgccggccgcctgggccgcgctgcggggcgcccggaacagcggctggctggccgacctgcgcaccggcaccggcgaaacccgcacggtggcgttgggcccgggcacgcagttgcgcctgaataccggcaccgccgtcagcctggacgacggctccggcttgctcagcctgcgcctgcaccgcggcgaaatctacctcgaagccgaccgcccctgccgcgtgctgacccgcggcggcatgatccgcacgcaggcggcgcacctctggctgcgccaggacgatgccgacggcctgctcggcgtggtggccgggctggccttctggcagggcgccgacaaccgcacccactcggttgcggccggacaacgcatcgcgtggcacgacggcgccctgcagggcgcggcgcaaacgctggatggctcgccggactggctgcgcggcgtgctgcgcgccgatgccatgcgcctggaccgcttcctgcgcgaactgagccgctaccgcccgggtacgctgcgctgcgaccccagggtggccgggctgcgtctgtccggcgtgttccagctggcccacaccgacgacatcctgcgcgccctgccggcgctgctgccggtgcaactgtcctatgtaacgccgtactggatcaccgtcgggccccggcccgccggcgccacgacg

SEQ ID NO: 15089 - DNA, 963 bp, Bordetella pertussis
ttgaatctccctgagttgattgcccctattgccgacgacatgaaggctgtcgacacggtcatccgcgaccggctgaattccgatgtcgtgctgatccgcaccatcggcgactacatcatcggcgccggcggcaagcgcatgcggcccgccatggtgctgatggtggcgcgcgcgctcggctaccagggcacgcaccaccagttgctggccgcggtcgtcgagttcatccacaccgccacgctgctgcatgacgacgtggtcgacgagtcggacctgcgccgtggccgcgacacggccaacgccgtgttcggcaacgccgccagcgtgctggtgggcgattacctgtattcgcgttcgttcgagatgatggtcgaggccgactcgatgcgcatcatgcagatcctgtcgcaggccaccacggtgatcgccgaaggcgaggtgctgcagctgctcaacgtgcacgaccccgatgtgtcgcaggagcgctacctgcaggtggtgcgctacaagaccgccaagctgttcgaggccgcagcccaggtcggcgcggtgctggctggcgccagccccgagcaggagaccgccgcggccgcctatgggcgccacgtcggcaccgccttccagctggtcgacgacgtgctggactacagcggcgatgcccacgccttgggcaagaacgtgggcgacgacctgcgcgagggcaagcccacgctgcccctgatccgcgtcatggagacgggcacgcccgagcagcgcgagctgatccgcgaggcgatcaagaccggccaggccgacttcgccgcggtggcccaggccatccaggccaccgacgccctggcgcatgcgcgccaggccgccgaaaacgaggccgaacttgcccgacaggcgctgtcggccttcccggtttccctttatcaaaaatctctgctagaattctgcgctttcgcggtgaatagagatcgt

SEQ ID NO: 15090 - DNA, 249 bp, Bordetella pertussis
atggacctgaatagctatctcaaccgggaagacgccaccagtgctgcagcgctggcgcgcgaggtcggagtgtccccggcactcgtctatcagtggcgcacgggccgccgacctgttccggtcgagcattgcgcagcgatagagcgggccaccggcggcgaagtaagccgccgtgatctgcgtcccggcgactggccccgcgtctggcccgagctggccgcccaggcccagcaggaggttactcatgct

SEQ ID NO: 15091 - DNA, 918 bp, Bordetella pertussis
atgtcgatgtcggaccgcgacggcttcatctggtatgacggcaagctggtgccttggcgcgaggccaccacgcacgtgctgacccactccctccactacggactgtccgtcttcgaaggcgtgcgcgcctacgaaaccgcggccggcaccgccatcttccggctgcaggaccacaccaaccgcctgttcaattcggcccacatctaccagatcccgctgccgtacgaccgcgacaccctcaacgaggcccagcgcgaagtggtgcgcgccaacggcctggcatcgtgttacctgcgcccgctggccttctatggctcggaaaaaatgggggtctcgcccaagggcgcccaggtgcacgtggccatcgccgcctggccctggggcgcctatctgggcgagaccgccctggcgcagggcatccgcgtcaaggtgtcctcgttcgcgcgccagcacgtcaacgtcaccatgccgcgcgccaaggtggccaccacgtacgccaattccatcatcgccaatgccgaagcgctgcaggatggctacaacgaggccctgctgctcgataccgagggtttcgtggccgaaggcgccggcgagaacattttcatcgtcaaggacggcgtgctgtgcgagcccgagatcgcctcggcgctgacgggcatcacccgctccaccatccatgcgctggccgccgacctcggcctgcgcgtcgtcaccaagcgcctcacacgcgatgacgtctacattgccgacgaagccttcttcactggcaccgcggccgaggtcacgccgatccgcgaggtcgacaaccggcagatcggcgccggccgccgcggcccggtcaccgagaagctgcagcaggccttcttcgacctggtcaacggccgcaaccccaaataccagcattggctgaccccggta

SEQ ID NO: 15092 - DNA, 837 bp, Bordetella pertussis
atgcaagttgtccgcaaagccgtctttcccgtggccggtatgggcacccgttttctgcccgccaccaaggccatgccgaaggaaatgctgccggtcgtggacaaacccctgatccaatatgccgtcgaagaggccgtcgccgctgggatcaccgacctcatcttcgtcacgggccgcaacaagcgggccatcgaagaccatttcgatgccgcccccgagctggaaaccgacctggaagcgaagggcaagcacgaactgctggcgctggtccgcgacatcctccccgcgcacgtgaactgcctgtacatccgccaatcggccccgctgggcctgggacatgccgtgctgacggccgcgccggcggtaggcaacgagcccttcgcggtgctgctggccgatgacctgatcgacgccgacacgccggtgctcaagcagctgatcgacgtggcggtggcgcgccagggcagcgtgctgggcgtacaggaggtgccgcgcgaagacacgcgcaaatacggcatcgtggccagccagccagtcgatgcgcgcaccgagcgtgtcacccacatcgtcgagaaacccgcccccgagcaagcccccaccaccctggcggtcgtcggccgctatgtgctggaggcagccattttcgaccatctgcgtgccaccacggtcggggcgggcaatgaaatccagctgacggacggtatcgccgcgctgctgcgcgaacgcgacgtctatgcgcaccgctatgacggcaagcgctatgactgcggcagcaaggcgggcatgttccaggccaccgtggccctgggccgcaaataccacggcctgattccggaa

SEQ ID NO: 15093 - DNA, 1092 bp, Bordetella pertussis
atgcgtcgtcttctcgtcgtggccgccatggcggccggctcttccagcgttttctggtccgtcgcgccagcaagggccgccaaccaactcgagttgtatggggtggtggacgtggggctggccaccacgcgcgtgtccggcctgggcacgcggcagcaggtgctcggcggggggcagaccgacaacctctggggcctgcgcggcaccgaggagctggacggcggctggcgggcgtcgttcggcctggaaagcggtttcgacgccgccaacggcacccgcaacgacgacgcccggctgttcgactacggcacctgggtcggcctgggccacgccggcgttggcgaattgagcctgggccgccagcagtccatcggcctgcaatacgggggccagctcgaaatcgcctcgtggcgcgacatgggcatgggggcgctgttcaaggcgtccgacaactatcgcgtcaacaacctggtcaattacctgtcgccggagttctccggctggcaatggggggtgggctacgccttcgacgtcgaaagcggcgacaccgggcggttcgaccgcagcccggctttcagcaccggtctcaagtacgaggatggcccgctgctggccgccttcacctgggacaagctcaacctccacgacacgtcggcaaccggcggccgctcgccgcaagccttgcaggccggtttcacgtacgatttcgaggcgctcaagatggcgctagcctggtcgcgccagcgcaacggtttcgtgggcctgaacggtggcggccagatcggcctgggcccggagccgttcgcccatggtggcgccatcaatgcatggctgctgggtctggaagtgcccgtgcacggcaatggcgcatggctggtgcagggctccatggcccgccccgactggcattgggccaatggccagcaggcaagcaaggcctatgtcgtgacgctgggctatcgccaggatctttccgcgcgcaccagcctttatgcctatggcgggtatatgaaaggctacgatccggaagaccccttcgcctccgacgtgggccgcgccacgcggtttggcgtgggaatgacccagcgcttc

SEQ ID NO: 15094 - DNA, 1392 bp, Bordetella pertussis
ttgcaccgcaacacaacgcgctgcaccatcgcattgccaggaggcagtatcttgaaattgcagagtctggacgacttcctgcgccgggttgccgcgcgcgatccgcaacaagccgaattcatgcaggcagtccaagaggtcatgctgagcctctggcccttcatcgagaagcacccgcattacgccgagcacgccctgctggaacgcctggtcgagcccgaacgcgtgatccagttccgtgtctgctggaccgatgaccagggccaggcccaggtcaaccgcgccttccgcatccagcacagctcggccatcggccccttcaagggcggcatgcgcttccacccgacggtcaatctgtcggtgctgaagttcctggctttcgaacaaaccctgaagaacgcgctgaccaccctgcccatgggcggcggcaagggcggctccgacttcgaccccaagggcaagtcggacgccgaggtgatgcgtttctgccaggcgctgatgctggaactgcaccgccacctgggcccggacaccgacgtgcccgccggcgatatcggcgtgggcgcgcgcgaggtcggcttcatggccggcatgatgaaaaagctgtcgaactcggcggccagcgtattcaccggcaagggcctgtgcttcggcggcagcctgatccgccccgaagccaccggctacggcacggtctatttcgcgcaggaaatgctgcaacgcgccggcctgtctttcgacggcatgcgcgtgtcggtgtcgggctcgggcaacgtggcccagtacgcgatcgagaaagccatggcgctgggcgccaaggtcgtcacgatctcggactcgtgcggcacggtcatcgacgaagccggcttcacgcacgagaagctgctggccctgatgcacatcaagaacgacctgcgcggccgcctggacacgtacgccagccagttcggcctgcgctacgaggccggcgtgcgcccctggcacgtgccggtggatgtcgccctgccgtgcgccacccagaacgagctggacgaaaacgacgcccgcacgctgatccgcaacggcgtgaaatgcgtggccgaaggcgccaacatgcccgccaccctggacgccgccaaggctttcatcgcggccgaagtgctgtacgcgccgggcaaggccagcaacgccggcggcgtggcggtgtcgggcctggaaatgagccagaactcggcccgcctgccctggacgcgtgaacaggtgaacgcgcggctgcatgccatcatgcgcgatatccacgaaaactgcgtgcgccacggccacggcgccggcaactacgtcaactatgtggatggcgccaacatcgccggcttcgtcaaggtcgccgacgccatgcgccagcaaggcctgtac

SEQ ID NO: 15095 - DNA, 1452 bp, Bordetella pertussis
atgaactgggaaatcgtcatcggcctggaaacgcacacccagctttccaccgactccaagatcttttcgggtagcagcacgcgctttggcgccgcccccaacacgcaggccaacgcggtcgacctggcgctgcccggcagcttgccggtcatgaaccgcggcgccgccgaacgcgccatcctgttcggcctggccgtgggcggcaaggtcgcgccgcgctcggtgttcgcccgcaagaactacttctaccccgacctgcccaagggctaccagatcagccagtacgagctgccggtggtcgaaggcggcacgctctcgttcttcgtcggcgaggaagaaaaaaccgtcaacctgacgcgcgcccacctggaagaagacgccggcaagtcgctgcacgacgaattcagcctggccagcggcgcgccggccagcgggatcgacctcaaccgtgccggcacccccttgctggaaatcgtcaccgagcccgaaatgcgctcggccgccgaggccgtggcctatgcgcgcgccctgcacagcctggtggtctggctgggcatctgcgacggcaacatgcaggaaggctcgttccgctgcgacgccaacgtctcggtacgcccggtgggccagaaggaattcggcacccgcaccgaaatcaagaacgtcaactcgttccgcttcctggaacgcgccatcctgttcgaggcgcgccgccagatcgaactgatcgaggatggcggcaccgtggtgcaggaaacccgcctgtacgacgccgaccgcgacgaaacccgcagcatgcgcagcaaggaagacgcgcacgactaccgctacttcccggaccccgacctgccgccgctggtcatcggccaggactggatcgacgcggtgcgcgccggcatgcccgaactgccggccgcccagcgcgcccgcttcgaggccgactatggcctgcccgcctacgatgccgcgcaactgaccgtcagccgcgccatggccgactacttcgaggcggtggcgcgcgccctgccggccggccaggccaaactggccgccaactggatcatgggcgaagtcgcggccaccctgaaccgcgaagagaaggacatcgacgccgcgcccgtatcggcagccgccctggcggccctgatcaaccgcatcatcgacggcacgatttccaacaagatcgcccgcgacgtgttcgccgccatgtgggcgggcgaaaacggcggcgacgcggacgccatcatcgaggcgcgcggcctcaagcagatcagcgacagcggcgccatcggcgccatgatcgacgaagtcctggcggccaaccccgccatcgtcgaggaataccgggccggcaagcagaaagccttcaactcgctggtcggccagatcatgaaggccgccaagggcaaggccaacccccagcaggtcaacgagctgctgaaggaaaaactgggc

SEQ ID NO: 15096 - DNA, 1536 bp, Bordetella pertussis
atgacccaatccgccctgcataccgaattcggcggcattgccgccttgcgcgacgccctggcccgacgccaggtcagcgcggtcgagctggcgcaaagcggcctggacgccgcccaggccgccagcggcctgaacgccttcctgcacatcgaccccgatctcacgctggcgcaggcccgcgccgccgacgccgccctggccgccggcacggccggcccgctggcgggcatccccatcgcccacaaggacgccttcgtcacccgtggctggcgcaccaccgcaggcagcaagatgctggccggctatgccagcccgttcgacgccaccgtggtcgagcgcctggccgaggccggcgcggtatcgctgggcaagctgaactgcgatgagttcgccatgggctcgggcaacgagaactcggcctacggcccggtgcgcaacccctgggacacccaggcggtgcccggcggctcgtcgggcggctcggccgccgcggtggccgcccgcctggtggccgcggccaccggcaccgacaccggcggctcggtgcgccagcccgccgccctgtgcggcgtcagcggcatcaagcccacctacggcacggtgtcgcgctacggcataatcgccttcggctccagcctggaccaggccggcccgctggcgcccagcagccgcgacctgctcgaactgctggacgtcatgaccggcttcgacccgcgcgacgccaccagcctgcaggcctgcgacggccaggccaacgaaagcggccgggtgcgccgtggccacgacgccgcccaggccggctacgatgcggccggcagccagccgctcaagggcctgcgcatcggcgtgccgcaggaatacttcggcgcgggcctggcccccgacgtggccgccgcggtcgaagccgccctggcgcagttcgaacagctgggcgcggtgcgcgtgccggtgtcgctgccgcgcaccgaactggccatccccgcctattacgtcatcgcgcccgccgaggcctcgagcaacctggcgcgctacgacggcgtgcgctacggccaccgcgccgcccagtacggcgatctcaacgagatgatcagccgctcgcgcgccgaaggcttcggcgacgaggtcaagcgccgcatcctgatcggcacctacgtcctgtcgcacggctactacgacgcctactacctgcaggcgcagcgcctgcgccgcctgatcgcccaggacttccagcgcgccttcgccggccagtgcgatgtcatcatggggccggtgtcgcccaccgtcgccaagaacatcggcgacaaccgcgacgacccgaccgccgactggctggccgacgtctacacgctgggcgtcagcctggccggcctgccggccatgtccgtgccctgcggcttcggcggccaggacggccgccgccccgtggggctgcagatcatcggcaattacttcgacgaaggccgcttgctggccttggccgaccgctatcaacaagtcaccgactggcaccagcgcgcgccggtttcgcaggacgcc

SEQ ID NO: 15097 - DNA, 306 bp, Bordetella pertussis
atggcgctcaacgaacaagacgtggcccgcatcgcccggctggcccgcatcgaactgacccccgaccagcgtggccgggcccaggccgaactcaacggcatcctgcacctcatcgagcgcttgcaggccgtcgatacgcagggcgtcgaaccgctcgcgcatcccctgtcggcccacgaggacatcaccctgcgcctgcgcgaggacgccgtcagcgagcaggccaccgaggcgcgccgcgccgaactgctggccaacgcccccgaatcggccgacggcctgttcctggtcccgaaagtaatcgaa

SEQ ID NO: 15098 - DNA, 1041 bp, Bordetella pertussis
atgttcggattcctgcgcagttacttttccagcgatatggcgatcgacctcggtaccgccaatacgctgatctacgtccgcggcaagggcatcgtgctggatgaaccctcggtcgtcgccatccgccacgaaggcgggcccaatggcaagaaaatcatccaggccgtcggccacgaggccaagcagatgttgggccgcgttcccggcaatatcgaagccatccgccccatgaaggatggcgtgatcgccgacttcaccgtcaccgagcagatgctcaagcaattcatccgcatggtgcacccgcgcaatatgctggcccccagcccgcgcatcatcgtctgcgtgccgtgcggctcgacccaggtcgagcggcgcgccatccgcgagtcggcgctgggcgccggcgcctcccacgtctacctgatcgaagagcccatggccgcggccatcggcgccggcctggccgtttcggacgccagcggctccatggtggtcgacatcggcgggggcaccaccgaagtggccgtcatctcgctgggcggcatggtgtacaagggctcggtccgcgtcggcggcgacaagttcgacgaggccatcgtcaactacatccgccgcaactacggcatgctgatcggcgagcccaccgccgaactcatcaagaaggaaatcggctcggcgttccccggctccgaagtgcgcgaaatcgaggtcaagggccgcaacctggccgaaggcgtgccgcgcagcttcacggtctcgtccaacgagatcctcgaatcgcttaccgatccgctcaaccagatcgtctcggccgtcaagatcgcgctcgaacagacgccgcccgagctgggcgccgacatcaccgacaagggcattgccctgaccggcggcggcgcgctgctgcgcgacctggatcgcttgctgcaggaagaaaccggcctgccggtggtggtggcagacgatcccttgacctgcgtggtgcgcggctgcggcgaagcgcttgagcatcttgagaaactcggtgccatcttcatcaacgac

SEQ ID NO: 15099 - DNA, 1029 bp, Bordetella pertussis
gtgcgcatgcgcatcggtccctggtcccttcccaacaacgttctggtcgccccgatggccggggtgacggatcgtccctaccgccagctctgcaagcggctgggggcgggctatgcggtctcggaaatggccgcgagcaacccgcggctgtgggacagcgtcaagacctcgcgccgcttgaaccatgagggcgagatagacccgatttcggtgcagatcgccggcgctgaccccacgatgatggcggaagccgccgctttcaatgtcgccaagggcgcccgcatcatcgacatcaacatgggctgcccggtcaagaaggtgtgcaacgtggcgtccggctcggcgctgctgcgccacgaagacctgatcgtccgcatcctggaggccgtggtggcagcctgcgcgccgctgggcgtgccggtgacgctcaagacccgcaccggctgggaccgcgagcaccgcaacgccttgcgggtgggccgcctggccgaacaggcgggcatcgccgccctgaccctgcatggccgcacccgcgccgacctgtacaccggacaggccgagtacgacacgatacgggccgtcaaggccgaactgaagattcccgttatcgccaacggcgatatcgattcgcccgagaaagcgcgccaggtcctggattacactggcgccgacgccgtcatgatcggccgggccgcgcaggggcgtccctggatattccgggagatcgaccactacctgcgcaccggcgccaggctggcgccgccgtcgtacggcgagatgcgcgacctgctgctcgaacacctggacgaccactaccgcttctatggcgaacacaccggcgtacgcacggcgcgcaagcacataggctggtacctggacgacctgccgggcgcagccgcgttctgcgcccgcatgaaccagatcgacaacacgcgcgagcaatggcgcgcggtggccgactggttcgacaccattttgcgcgagggccgcgaccagcaggcctttgtggcgcaacccctgctggcggca

SEQ ID NO: 15100 - DNA, 912 bp, Bordetella pertussis
atgaaacgccttctcaatgcgctgacggcagcgctggccatcggcgcggcggccgccggccaggcccatgcggccgacctcgacggaaccctgaagaaaatctccgataccggcgtcatcaccatcgggcaccgcgagacttcgatcccgttctcgtactatgacgccaaccagaagccggtgggctattcgatcgacatctgcacgcgcatcgtcgacgcggtgaagacgcgcatcaagcgcgacgatatccaggtcaagtacctgccggtgacctcggccacgcgcattccgctgatgggcaacggcaccatcgacctggagtgcgcctcgacgtccaatacgctggactgccagaagcaggtggctttctcggtgacgaccttcgtgaccggcaaccgcttcatcagcctgaaatccgccaacctgaagaccatcgacgacctcaagggcaagacggtggcctcgacctcgggcacggccaacatccgccaggccaatgagatcaacgaggcgcgcagcctgggcatgaaggtggtgccggtcaaggagcacgccgaaggcttcctgatggtcgagaccggccgcgccgccgcattcatcatggacgacatcctgctctacggcctggccgccaacgccaaggagccggaccgctatcaggtgtccggcgactcgctgtcgatcgagccctacgccatcatgctgcgccgcgacgatccccagttcaaggccctggtcgacgacaccatcaagtcgttgtatgccagcggcgatttcgaggccttgtacaagcgctggtaccagagtccgttgccgcccaagggcatcaacctgaacgtggccatgagcgaggtgctcaagcgcgtggtcgccacgccgaccgactcgggcgatccggtcgcctacaag

SEQ ID NO: 15101 - DNA, 1948 bp, Bordetella pertussis
ccgcgcgccctgggcgtgcttgcgcgcgttttcggttacgaatccttccgtggcgaccagcaagccatcgtcgagcacgtcatcggcggcggcgacgcgctggtgctgatgcctaccggcggcggcaagtcgttgtgctaccaggtgcccgcgctggtgcgcgaaggcaccggtatcgtggtttcccccctgatcgccctgatgcaggaccaggtcgacgccctgaccgaactgggggtgcgggccgcgtttctcaatgccacccaggattggcgcgtggcgcgcgaggtcgagcaggcattcctggccggcgagctggacctgctctacgtggcgccggagcgcctgctgaccgaccgctgcctgcaattgctcgagcgcgggcgcatcgccctgttcgccatcgacgaggcgcactgcgtctcgcaatgggggcatgatttccggcccgaatacctcgggctgtcgatgctgcacgagcgctggcccgaggtgccgcgcatcgcgctgacggccaccgccaccgcggccacgcgcagcgagatcgcgcagcgcctggccctggacgaagcccgccatttcgtggccagcttcgaccgtcccaatatccgctaccgcatcgtcgagaagaacgaagtgcggcgccagctgctggatctcatccgcagcgagcacgaaggcgaatcgggcgtggtgtacggcctgtcgcgcgcccgcgtcgaggaaaccgccgacttcctgtgcgccaatggcgtcaacgccttgccctaccatgccggtctgagcccggcggtgcgcgccgccaaccaggcgcgcttcctgcgcgaggatggcatcgtcatggtggccaccatcgccttcggcatgggcatcgacaagcccgacgtgcgtttcgtggcgcacatcgacctgcccaagtcggtcgaaggctactaccaggaaaccggccgggccggccgcgacgggctgccggcctcggcgtggctggcctatggcctgcaggacgtggtgcagcaacgccgcatgatcgacgagtcgcccggcgacgatgcctaccggcgccggctcggccagcagctcgatgccatgctgggcctgtgcgaaaccgtcgaatgccggcgcgtgcgcctgctggcttacttcgggcagaccatcacggcttgcggcaactgcgacgtctgcctcgaaccgccgcaggcctgggacggcacggtcgccgcgcagaaagtgctgtcggccgtgtaccgcctgtggaaggagcgcggccagcgctacggcgccggccatatcatcgatatcctgcgcggcaagagcaccgaccgcacgcgccagcacgaccacgaaaccctgagcgtattcggcgtgggcgccgacctgtccgagaatgcctggcgcggcgtgctgcgccagctgctggcccagggcctgctggcggtcgatcacgagggtttcggcaccctggcgctgaccgagggcagccgcgccgtgctcaagggcgagcatcagctcatgctgcgccgcgaggccgagaaaaagccgcgcagctcgcgcgcgggcgcccgcgcgcggcccgaccccatcgacctgccggccgaggccaagccggtgttcgagtcgctgcgcagctggcgcggcgaggttgccaagagcaacggggtgccggcctatgtgatcttccacgatgccaccctgcgcgagatcgcgctggcccggccggagtcgctggacgatctcagccacatcagcggcgtgggggcgcgcaagctgcaagcctacggcgaggaaatcctgcgctgcgtgcagcgcccgtagcggcctacttgctgaacagctcgcccgtgccgccgctcgccgcggccggcggggtcagccccaggtggcgccaggtcgtcagcgtggcggtgcggccgcgcggcgtgcgctgcaggtagccgtgctggatcagata

SEQ ID NO: 15102 - DNA, 732 bp, Bordetella pertussis
atggcaacattggccaaccgccccctttttgcgccgattccaccttccatgaacatgccgctcgcgcccatggcgcgcgaaaacattgccgccgtcatctatcgccagctcaagcagctgctgatgatgggcgagctcaagcccggcgagatcctcacgctgcgcatgctgaccgaacgcctgggcgtgagccagacgccggtgcgcgaggccttgctgcaactggtgtccgagcgcgcgctggccatgtcgcgcggcaagtccgtcagcgtgccggcgcccacgcgcgagaagctgcaggagctgcgcgatatccgcctgacgctggaagtgctggctaccgaacgggccacgccgcgcatttcggatgccgagatcaagacgctggagcgcctgcaccgcgaaatggtccgctacaagaacagcgagcagcgcgagggcgtgctcaagaccaactacgagttccacttcacgctgtacaacgcctccggcatgccggacctggtggccatcatcgaggggctgtgggcgcagaccggcccctcgctgacctacctgtaccagaagccgtttgcccatctgtacgacgcgcatccgcatctgccgctgatcgaggcgctgcgccggcacgatgtggaggcggctgtcgcggcgatccgccgcgatgtggcgggctacggcgccgccctgatggagcgcctgcccgccgaagccggccagccggccggcggc

SEQ ID NO: 15103 - DNA, 1713 bp, Bordetella pertussis
atggaactcaatggcgccgacatcgtcgtgcgctgcctggccgaagaaggcgtggaacacgttttcggctaccctggcggcgcggtgctttacatctacgacgcgattttcaagcaggacaaattccagcacattctggtgcgtcacgagcaggctgccgtgcacgccgccgacgcgtactcgcgcgcctcgcagaaagtgggcgtatgcctggtgaccagcggtccgggcgtcaccaatgccgtcaccggcatcgccaccgcctacatggactccatccccatggtcatcatcagcggccaggtgccgactgcggccatcggcgaggatgccttccaggaatgcgacaccgtgggcatcacgcgtccctgcgtcaagcacaacttcctggtgcgcgacgtcaaggacctggccgagaccatgcgccgtgccttcttcatcgcccgcaccggccgtcccggccccgtgctggtcgatatcccgaaggacatcaccgtcgcgcagtgcaagtacgcgccgcccaagggcgagatctcgatgcgctcgtacgcgccggtgaacaaggggcaccagggccagatcaagaaggccgtgcagatgctgctgcacgccgagcgtcccatgatctacacgggcggcggcgtgatcctgtccgatgccgccgaggccttgcgccacctggtggaccagaccggcgcgccgtgcaccaacaccctgatgggcctgggcgcgatgccggccaccgaccaccgcttcctgggcatgcccggcatgcacggcacctacgaggcgaacatggcgatgcagcactgcgacgtgctgctggccatcggggcgcgcttcgatgaccgcgtcatcggcaatccgcgccatttcgcgcagaacgcgcgcaagatcatccacatcgacatcgatccctcgtcgatctccaagcgcgtgcgcgtcgacgtgcccatcgtcggcaacgtcaaggacgtactggccgatctgagcgcccagtacgacctggcgcgcgccgacgccaagccggcgccgatcgagaagtggtggcagcagatcgaggcctggcgcggcaaggagtgcctgaagtacgccggctccgacgaggtcatcaagcctcagttcgtggtcgagaaactgtgggaagtgaccggaggcgacgccttcgtgacctccgacgtcggccagcaccagatgtgggccgcgcagtactacaagttcaacaagccgcgccgctggatcaactccggcggcctgggcaccatgggcgtggggctgccctatgccatgggcgtgcagatggccaatccgggcgccgacatcgccgtgatcaccggcgaggcgtcgatccagatgaacatccaggaattgtccacctgccaccagtaccacctgacgcccaagatcatctgcctgaacaaccgtttcctgggcatggtgcgccagtggcagcagatcgactacggctcgcgctattccgagtcgtacatggattcgctgccggatttcgtcaaggtcgccgaggcctatggccacgtcggcctgcgcatcgagcggcccgccgacgtcgagccggcgctgcgcgaagcattcaagaagcacaaggatcgcctggtcttcctggacttcatcaccgaccgcaccgaaaacgtgtggcccatggtgaaggccggccgcgggctgaccgagatgctgctcggttccgaggatctg

SEQ ID NO: 15104 - DNA, 489 bp, Bordetella pertussis
atgaaacacgtgatttctgtgctgatggaaaacgaacccggcgcgctgtcgcgcgtggtcggcctgttctccgcgcgcggctacaacatcgagacgctgaccgtggcgcccaccgaggacgcgaccctgtcgcgcctgaccgtggtgaccgtcggttcggacgaggtcatcgaacagatcaccaagcacctcaatcgcctggtcgacgtggtcaaggtcgtggacctcaccgaaggcgcgcacatcgagcgcgagctcatgctgatcaaggtgcgggcagtgggcaaggagcgcgaggaaatgaagcgcatggcggatatcttccgcgggcgcatcatcgacgtcaccgacaagtcctacacgatcgagctgaccggcgttcaggagaaaatccaggctttcatcgaagccctcgaccgcagtgccatcctggaaaccgtgcgcaccggcgtgtccggcatcgggcgcggcgaacggatactgaaaatc

SEQ ID NO: 15105 - DNA, 1014 bp, Bordetella pertussis
atgaaagttttctacgacaaagactgcgatctctccctggtcaagggcaaaaccgtcgccatcatcggctacggctcgcaaggccacgcccacgcgctgaacctgcatgattcgggcgtcaaggtcgtggtgggcctgcgcaagggcggcgcctcgtggaacaaggccgccaacgccggcctggaagtcgccgaagtggccgaggccgtcaagcgcgccgacatcgtcatgatgctgctgcccgacgagaacatcgccgccgtctaccgcgacgaagtgcacgccaacatcaaggccggcgccgcgctggccttcgcccacggcttcaacgtgcactacggccaggtcgtgccgcgcgaagacatcgacgtcatcatggcggcgcccaaggccccgggccacaccgtgcgctcgacctacagccagggcggcggcgttccgcacctgatcgccgtctaccaggacaagtcgggcagcgcccgcgacgtggccctgtcgtacgccagcgccaacggcggcggtcgtgccggcatcatcgagaccaacttccgcgaagagaccgagaccgacctgttcggcgaacaggccgtgctgtgcggcggcaccgtcgagctgatcaaggccggcttcgacacgctggtggaagccggctacgcgcccgaaatggcctatttcgagtgcctgcacgagctcaagctgatcgtcgacctgatctacgaaggcggcatcgccaacatgaactactcgatctcgaacaacgccgaattcggcgagtacgagaccggcccgaaggtcgtgaccgacgcgacccgccaggcgatgcgcgagtgcctgacggccatccagaccggcgaatacgccaagaagttcatcctggaaaacgccgccggcgccccgaccctgacctcgcgccgccgcatcaacgcggaatcgcagatcgagcaggtcggcggcaagctgcgcgccatgatgccctggatcgccgccaacaagctggtggacaaggccaagaac

SEQ ID NO: 15106 - DNA, 267 bp, Bordetella pertussis
atgtctgtagctgacatcaaaaaatccgaaatcgtcgcgcaattccaacgcgctcaaggcgataccggctcccctgaagttcaggtggcactgcttaccgctcgcatcaacgaactgaccggtcacttcaaagaacacatgaaggaccaccactcgcgccgcggcctgctgcgcatggtcagccgtcgtcgcaagctgctcgactatctcaagggccgcaatcccgattcgtaccgcgcactgatcgaaaaactcggtctgcgcaag

SEQ ID NO: 15107 - DNA, 2157 bp, Bordetella pertussis
atgttcaataaagtgaccaagaccttccagtacggccagcattcggtcgtgttggaaaccggcgagatggctcgccaggcgtccggcgcggtgctggtgtccgtggaggacaccgtcgtgctggcaacggtcgtggcggccaagaaagccaaggccggccaggacttttttccgctgaccgtcgactacatcgagaagacctacgccgccggccgcatcccgggcggtttcttcaagcgcgaaggcaagccctccgaaaaggaaacgctgacctcgcgcctgatcgaccgtccgctgcgtccgctgttcccggaaggcttctataacgacgtgcaagtggtcatccacacgctgtcggtcaatccggacatcgatcccgacattcccgccatgatcggcgcctcggccgcgctggccatctcgggcatcccgttcaacggccccatcggcgccgcccgcgtcggctatgtcgacggccagtacgtgctcaaccccaccgcgacgcaactgaagtcgtccaagatggacctggtggtggccggcaccgagaacgccgtgctgatggtcgaatccgaggcgaagcagctgtccgaggaaatcatgctgggcggcgtggtgttcggccacgagcagatgcaggccgccatcaacgccatccatgacctggtgcgcgatgccggcaagcccgactgggactggcaacccgcccccaagaacgaagcgctgatcgccgccgtgagcgccgccgcccaggaagggctgaacgccgcctaccagatccgcgaaaagcaggcccgcaccaccaagctgcgcgaagtctacgccgccgtgcaggcggccatggccgaacaggccgcgcaggctggccagcccgcgcccgacagcgtcggcgtggacaacatcctgttcgacctggaagcgcgcatcgtgcgcagccagatcctcaacggcgagccgcgcatcgacggccgcgacacccgcaccgtgcgtccgatcagcatccgcctgggcgtgctgccgcgcgcgcacggcagcgcgctgttcacccgcggcgaaacgcaggcgctggtggtggccacgctgggcaccaagcaggatgagcagatcatcgacgccctgatgggcgagtaccgcgaccgcttcatgctgcactacaacatgccgccgttcgccaccggcgaaaccggccgcatcggcgtgcccaagcgccgcgaaatcggccatggccgcctggccaagcgcgcgctgctgccgctgctgccggccccggaagacttccagtacaccatccgcctggtgtccgagatcaccgaatccaacggctcctcgtcgatggcctcggtgtgcggcggttcgctggccatgatggacgccggcgtgcccaccaacgatcacgtggccggcgtggccatgggcctgatcctggacagcggcaagttcgccgtgctgaccgacatcctgggcgacgaagaccacctgggcgacatggacttcaaggtggcgggtaccgaaaccggtatcacggcgctgcagatggacatcaagatccagggcatcaccaaggaaatcatgcaggtcgcgctggcccaggcccgcgaaggccgcctgcacatcctcggcaagatgcgcgacgcgctggaaggctcgcgtaccgagctgtcggcgttcgcgccgcgcatgctgaccatcaagatcaaccccgagaagatccgcgacgtgatcggcaagggcggcgccaccatccgtgcgctgaccgaggaaaccggcacgcagatcgatatctcggacgacggcaccatcgtgatcgccagcgtggacgagacccaggccaaggaagcccagcgccgcatcgtcgaactgaccgctgacgtcgaagtgggccagatctacgacggctcggtgctgcgcctgctggatttcggcgccatcgtgcaagtgctgccgggccgcgacggcctgctgcacatctccgagatcgccaactaccgcatcgccaacatcaacgatgtgctgaaggttggccagccggtccgcgtcaaggtcatcgaggccgacgacaagggccgcctgcgcctgtcgatcaaggcgatcggcggcatcgagcagcagcagtccggtacggccgagccggccgcccagtcggagccgcaagccgaa

SEQ ID NO: 15108 - DNA, 879 bp, Bordetella pertussis
atgacgcgcccgccgcgcaggccgccatcgtgcatgtgctgcaagccgcctcgcgcgcacacgctgatgccggtcagcgacgccacggcgctgccgggcgtggcgcgccaggctgtcgaacgcgcgtgcgccgaagggggcatcgtcgtggccgccggcggcgacggtacgctcaatgccgtggcgcgcgccgtactgggctcgggcgtgccgttcggcatcctgccgcaaggcaccttcaatttcttcgggcgcgcgcacggcatcccgcaggatgcgcacgccgcgacccgctgcctgttcgacgcccgcatcgagcccgtgcaggtcggcttgctcaacgaccgcctgttcctggtgaacgccagcctcggcctgtacccgcaattgctggaagaccgcgaggcgtacaagcagcgctatgggcgcagccgcatggtggcgctgtggtcgggcctggtgaccctgctgcgggcgccgccgcaactgacgctgcaactggagcatggcggccaggcgcgcacgctgcgcacgcccacgctggtggtgggcaacaacgcgctgcagctcgagcgcctgggcatcgccgaggcggcggcgctgcagcaggggcaattggtcgcgatgtcggtgcgcccggtgggcaccctggcgctttacggcctgctgctcagcggcttgttcagccgcctgggcgaggccgacaaggtcgtcagcttcggctttgatcgcctgaccgtccgcgtgcgcgggcggcggcgcgtcaaggtggccatggatggcgaaatctcctggttgccgacgccactgcaattccaggtctcgcccgagccgctgcgcctgctggtgccgtcgcctggccagcggctggaggcggca

SEQ ID NO: 15109 - DNA, 492 bp, Bordetella pertussis
atgctgctttccgaacaggcctacaaaaaaatcgaccgtgagctggccaagttcccggccgaccaaaggcagtcggccatcatggcctcgcttgccatcgcgcaagaagagaaaggctggttgccggccgaaattctcgaagacgtggccaattacatcggcgtgccgcccatcgcggtgcaggaagtcgccacgttctacaacatgttcgacgtcaagccggtcggcacgcacaagattgccgtgtgcaccaacctgccctgtgccttgcgcgatggcgaaaaggccgccgactatctcaagcgcaagctgggcgtcgatttccgtgagaccacggccgacggccggttcacgctgatcgaaggcgaatgcatgggcgcctgcggcgattcccccgtgctcatcgtcaacaacaagcatatgtgcgtgcgcatgacggaagagaaactggacgcgctggtcgatggcctgaagtcgcaaggagagtcggca

SEQ ID NO: 15110 - DNA, 1365 bp, Bordetella pertussis
atgaacgcgcccgacctgtacaagcgcctggcgcaggggctggaccccaatccgctgaacgatctgtcgatctcgatgtgcctgcatggccggcacatcgcgccgcagatcatggccgacgtcgatggcgagaactggcgcctgcaggagtacgtcaagcgcggcggctacgaggcgctgcgcaagatcctcaccaccggcatgacgccggaagacgtgatcgcggaagtcaaggcctcgggcctgcgcggccgcggcggagcaggctttcccaccggcctgaagtggagcttcatgccgcgcgcgttcccgggacagaagtacctggtgtgcaactcggacgagggcgagcccggcacgttcaaggatcgcgacatcctgcgcttcaatccccatatcgtgatcgagggcatggcgatcgccgcctacgcgatggggatcagcgtgggttacaactatatccacggcgaaatcttcgaggtgtatgaacgcttcgaggaagcgctcgaagaggcgcgcgcggcgggctttttgggcgacaagctgctgggctcggatttcagcttccagctgcacgcgttccatggctacggcgcctacatctgcggcgaggaaaccgcgctgctcgaatcgctggaaggcaagaaaggccagccgcgcttcaagccgccgttcccggccagcttcggcctgtacggcaagccgaccacgatcaacaacaccgaaaccttcgcggcggtcccctggatcatccgcaacggcgggcaggcctacctcgaagtgggcaagcccaacaacggcggcaccaagctgttctcgatttccggcgacgtcgagcgtcccggcaactacgagatcccgatgggcacgccgttctcgaagttgctggaactggccggcggcatgcgcggcggccgcaagctgaaggcggtgattcccggcggctcgagcgcgccggtgctgcccgccgacatcatgatggactgcacgatggactatgacgccatcgccaaggccggctcgatgctgggttcgggcgcggtgatcgtcatggacgagacgcgctgcatggtcaagtcgctgctgcggctgtcgtatttctatttcgaggaaagctgcggccagtgcacgccgtgccgcgaaggcaccggctggctctaccgcatggtgcaccgtatcgagaatggccagggccgccccgaggacctggacatgctcgacagcgtggcgggcaacatcatggggcgcaccatctgcgccctgggcgatgccgctgccatgcccgtgcgcagcttcatcaagcattttcgcgacgaattcgcgcaccacatcgagcacaagtcttgtgtggtcccgcaatatctg

SEQ ID NO: 15111 - DNA, 888 bp, Bordetella pertussis
atgagcaatccgcaatttcgcgccggctttgtcgccatcgtcggccgccccaatgtgggcaagtccaccctgaccaacgcgctgatcggcaccaagatatcgatcgtgtcgcgcaaggcccagacgacccgccatcgcatccatggcgtgctcacgcgcgagcacgagcagttcgtgttcgtcgatacgccgggtttccagacccgccacggcggcgccatgaatcgcatgatgaaccgcgtcgtgacgcaggcgctggccgacgtcgacgtcgtggtgcacgtggtcgaggccggcaagtggtccgagggcgacgccaagctgctgcccctgctgcccaagtcgcgccgcagcatcctggtggtcagcaagatcgacgccctgaagaaccgcgacgagctcttcccgttcgtcagcaagctgatggcgctgcatgcctatgacgcggtcgtgccggtgagcgcgaccaagggccagcagctggaccagttgctcgacgagatcgccgccggcttgccgcaaggcgatcccatgttcgaggaagacaccctgaccgaccggccggtgcgcttcatcgcggccgagctggtgcgcgagaagatcttccgtctggtcggcgacgaactgccctatggctgtaccgtggtcatcgagcaatgggaagaaaccgagaggggagtgcgcatcgccgcctgcgtggtggtcgaacgcgaaagccaccggcccatcctgctgggcgcgggcggcatgcacatgaagcgcatcgccacggaggcgcgccaggatatcgccaagctgctggacatgcccgtgcacctggaaatctacatcaaggtgcgcaagggctggtccgaccgcgaaggcgcgctgcgcgacctgggctatgag

SEQ ID NO: 15112 - DNA, 882 bp, Bordetella pertussis
atgagttggaactttgccctgatactttttgtactgctggtgattaccggcgttatctggggattggatctggcgctgtttcgcaagcgacgcgaacggcgggcccaggcggcggccgcgcaagtggacgccgccggcatcacggatgccgagcaggccggccgcgagcggcgcgaggccatcgacgcggcgcgccgcgcgccctggtggatcgagtatgcggtcagcttcttcccggtgatcctgttcgtgttcgtgctgcgctcgttcgtggtcgagccgtttcacattccgtcggggtccatgctgcccacgctgcaatcgggcgacctgatcctggtgaacaagttcagctacggcatccgcctgcccatcatcgatcgcaagatcatcgagacgggctcgctggagcgtggcgacgtggtggtgttccgctacccggtcgatacggatgtcgactacatcaagcgcatcgtgggtctgccgggcgaccaggtggcctacctggacaagaagctgtacatcaacggaaaattggtgccgcatgaacgcgacggggattatttcgagcccgatcgcgtgtcctatattgcgcaatacaaggaaaaactgggcgaagtggagcataagatcctgcttgatgagcagaaaatacaggatttcggccccatctggaaatttcccagtatccagaactgccagtacgcccgcaacggcgtgcgctgtaccgtcccccccggccattatttcgccatgggagacaaccgtgacaatagtgcggacagccgctactggggattcgtgccagacggtaatatcgtggggaaggcattttttgtctggatgaacttcagcgatttgagccgcattggccgcttccat

SEQ ID NO: 15113 - DNA, 1485 bp, Bordetella pertussis
atgaaagcaattacagtgtcgaacctttttttccggcgcttcggcgcggccgcgctggtcgcgttcatggcagtaaccgccgcgggcacgcaagtccaggcgcagacgcaggtcgccccccccgcggtggcgttacccgatttcaccgggatcgtcgagaaagtcgagcccgccgttgtcaacatccgtaccacggccaccgtgccggtgcgcggcggcccgggcggcggcaacgatccgtacgaattgttccgctggttcttcggccccgatttccagccgcccggcccggcgcccggccagcgccgcaagcagccgcagccccagcctgaagagcgcaccattccacgcggcgtggggtcgggcttcttcatctcggccgatggctacatcctgaccaacaaccacgtgatcagcgatgccaccgacatctacgtcaccctgaccgacgggcgcgagttcaaggccaaggtgatcggttcggacgaccgcaccgacgtggccctgatcaagatcgacgccaaggacatgacgccgctgaccatcggcgaccccaagacgctgaagaaggggcaatgggtgctggccatcggttcgccgttcggcctggactccaccgtcaccgcgggcatcgtcagcgccatcggccgcgataccggcgaatacctgcccttcatccagaccgacgtggccgtcaacccgggcaactccggcgggccgctgctgaacctgcagggcgaggccgtgggcatcaactcgcagatcatttcgcgcagcggcggcttcatgggcatttcgctggccattcccatcgatgaggccatgcgcgtggtcgaccagttgcgtgccaccggcaaggtgacgcgcggccgtatcggcgtgcagattggcgaggtcggcaaggacgtggccgatgccatcggcctgccgcgcgccgaaggcgcgctggtcagcagcgtcgaggccgaaggcccggccgagtcggccggcgtgcagcccggcgacgtgatcctgaagttcaacggcgagcccatcaagcgctggtccgatctgccgcgcatcgtgggcgagaccaagccgggcacaagcgccaagatggacgtctggcgcaagggccgcaacgtgaccctgtcggtcaaggtggccgagctgaagtccgaccgcagcgccgcgaccgcggacgagggcaagcaggccgagccgacggccgagaaccacctgggcctgggcgtcgtcgacgtgccgtccgatatgcagcgcaagctgcgcatcaagggcggggcgcaggtgcgcgtggccgagggcgcggccgcgcaggcaggcctgcaggaaggcgacatcgtgctggcggtcaacgacaccgacgtcacggacgcggcccagttcaacaagctggtgtcgcgcctggacaagaaaaaggccgccggcctgctggtacgccgcggcgaccagacccaatgggtcgcggtgcagcccgccagcaaa

SEQ ID NO: 15114 - DNA, 1227 bp, Bordetella pertussis
gtgaagcgacgagtcgtcatcaccggcctgggtatcgttagccccgtgggcaacgacattgccagcgcctgggacaatatcgtcaacggacgttccggcatcagccgcatctcccgtttcgaccctaccccgctgacgacgcacatcgccggcgaggtcaaggatttcgacgtcacccagtacatgcccgccaaagaagcccgccagatggataccttcatccattatggcctggccgccggcatgcaggcgtggcgcgattgcggccttgaggtcaccgaaaccaatgccgagcgcattggcgtgatcgtggggtcgggcatcggtggcctgccgcgcatcgaagaaacccagaccgagatgttggccaagggaccgcgccgcatttcgccgttcttcgtgcctgcgtcgttgatcaatctcatttccggccagctctccatcgcctatggcatgaagggcccgagctacgcggtcgtgtccgcgtgcaccaccggcctgcattgcatcggcgatgccgcgcgcctgatcgaatacggcgatgccgacgtcatgcttgccggcggggccgaatcgaccgtctcgccgctgggcatcggcggctttgccgcgatgcgcgcgctgtcgacgcgcaacgacgatccgaccaccgcctcgcgtccctgggaccgcgaccgcgatggtttcgtgctgggcgaaggcgccggcgtgctggtgctcgaagagtacgagcatgccaagaagcgcggcgcgcgcatctacggcgaactggccggctacggcatgagttccgacgcgcaccatatcaccgcccccgacaaggacggcccgcgccgcggcattctcaatgcgctgcgcaacggcggcatcaatgccgacgaggtttcctacgtcaatgcgcacggcacgtccacgccactgggcgacaagaacgaaaccgacgcgttgaaactggccttcggcgaccatgcctccaagctggtggtgaattcgaccaaatccatgaccgggcacctgctgggcgccgctggcgggatcgaagccgtattcacgaccctggccgtccataaccagatttcgccgccgaccatcaacatcttcaaccaggatccggagtgcgacctggattactgcgccaacgaggcgcggcccatgaagatcgagatcggcctgtcgaattcgttcgggtttggcggcaccaacggttcgatggccgttcgtcgggtt

SEQ ID NO: 15115 - DNA, 750 bp, Bordetella pertussis
atggaaaaaacctccacggaactgcagggcaagatcgcgctggtgaccggcgcgacgcgcggcatcggccgcgccatcgcccaggaactggcggcgcgcggcgccacggtggtcggtacggccacgtccgaggcgggcgcccaggccatcaccgaggcgctggccgcccagggcgggcggggcgtggtgctggacgtgaccgatgcccaggcctgcgaggcgctgatcgagcagcttggcaaggatggcggcggcccgcacatcctggtcaacaacgccggcatcacgcgcgacacgctggccatgcgcatgaaggacgacgattggtcggccgtcatcgataccaacctggcggcggtcttccgcctgtcgcgcgccgtgctgcgcggcatgatgaaggcgcgttggggccggatcatcaatatcacgtcggtggtgggcgcaagcggcaacgctggccaggccaactacgccgccgccaaggccggcgtggcgggcatggcgcgggccctggcgcgcgagctcggcagccgcaacatcaccgtcaactgcgtggcgcccggctttatcgataccgatatgacgcgtatcctgggcgaagaccagacggcggcgctgctgcagcagattccgctgggccgcctgggcgcgcccgccgacatcgcccatgcggtcgcctttctggccgggccgcaggcgggttacattaccggtaccacgctgcacgtcaacggcggcatgtatatgcaa

SEQ ID NO: 15116 - DNA, 933 bp, Bordetella pertussis
atgaagctggcgtttgtctttcccggtcaaggctcccaatctgtcggcatgctcgatgcatgggccggcaatgccgccgtggccgacgtcgtggcgcgtgccagcgccgcgctgggccaggacctgggcgccctgatggcgcaaggcccggcccagcaactcaatctcaccaccaacacccagccggccatgctgaccgccggcgcggcctgctttgccgcctggcgcgcggcgggcgggcccatgcccgaggtgatggccggccatagcctgggcgaatacgccgcgctgacggccgccggcgcgctggcgctggaagatgccgtgcgcctggtgcgcgtgcgcgccgacgccatgcaggccgcggtgccggtgggcgccggcgccatggcggcggtgctcggcctggacgacgacgccgtgcgtgccgcctgccagcaggctgcccagggcgaagtggtcgaggccgtcaatttcaatgcgccggcgcaagtcgtcatcgcgggccacaaggccgcggtcgagcgcgcctgcgaagccgccaaggcggccggcgccaagcgcgcgctgttgctgccggtgtcggcgccgtttcactccagcctgctcaagcccgccgccgaggtgctgcagggcgcgctggccggcgtggaggtgtctgcgccgcaagtgccggtgctcaacaatgtcgacgtcgccacgcctgccgaaccggcggccatccgcgacgcgctggtgcgccaggcatggcatccggtacgctgggtcgagacgctgcgcgcgatgaaggaacttggcgtcacccacgtgatcgaatgcggtccgggcaaggtgctgaccggcctgaccaaacgcatcgatgccgacctgacgggcatcgccatcaccgacccggcctcgctggaagcggcgctggcggctgtaaacgggaac

SEQ ID NO: 15117 - DNA, 984 bp, Bordetella pertussis
atggaaaaagctatgaaatacgccaagatcgccggttcgggcggctaccttcccgaacgcgtcgtcaccaacgacgatctggccgccgagctggcgacgcggcaaatttccacgtccgacgagtggatcgtcgagcgcaccggcatccggcagcgccacctggccgagcgtggcgtgaccaccagccagctggccaccgaggcggcgcgccgcgccatggacgacgccggggtgcaggccgacgagatcgacatgatcatcgtcgccacgtcgacgccggactacgtcttccccagcacggcctgcctggtgcaggccaacctgggcgccaagggcggcgcggccttcgacgtgcaggccgtctgcagcggcttcgtctacgccatgaccaccgccgacaacttcattcgcgccggccgcgcgcgctgcgcgctggtgatcggcgccgaagtcttctcgcgcattctcgactggaacgaccgcggcacctgcgtgctgttcggcgatggcgccggcgccgtcgtgctcaaggcggccgacgagccgggcatcctggctgcgcacctgcatgccgatggcagccagaccaagattctctgcgccgcgggcaacgtcgcgtacggggacgtcaccggcgatcccttcctgcgcatggacggccaggcggtgttcaagcaggcggtcacggtgctcgaccgttcggcgcgcgacgtctgcgccgaggctggcgtcgaggtcgatgacatcgattggctgatcccgcaccaggccaacgtgcgcatcctgaatttcctggcgcgcaagttgcgcgtgccgaccgaacgggtcgtcatcaccatggaccagcatgccaacacctcggcggccagcgtgccgctggcgctcgatgtcgcgcgccgcgacgggcgcgtcaagccgggccagctggtactcatgcaaggcgtgggcggcggcttcacctggggctccgtgctggcccgcatg

SEQ ID NO: 15118 - DNA, 597 bp, Bordetella pertussis
atgcccgccattcctccaaagctgatcctcgcatcgagctcgcgctatcgccgcgagctgctgtcccgcctgcgcctgccgtttaccgccatttcgcccgatgtggacgaaacgccacagcctggcgaagcgcccgccgacctggcgctgcgcctgtcggtcgccaaggcgatggccgtggccgccacccacccgggcagcgtggtgatcggctcggaccaggtggccaccgtcgacggcgaacccatcggcaagccgggcgggttcgagcgcgcccgcgaacaattgcgccggctgtccgggcgcgccgtggaattccacagcgccatggccgtcaccgacggcgtgcacacggaaacagcggatattgtcacgctgtgccgtttccgcacgttgaccgatgcggccatcgacgcctacctgcgcgccgaggagccctacgataccgcaggcagcgccaaggccgaaagcctgggcatcgcgctgatggacagcatccggagcgacgaccccaccgccatcatcggcctgccgctgatcgcgctgacgcgcatgctgggccgcttcggcctggatccgctgacgggccatccggca

SEQ ID NO: 15119 - DNA, 1755 bp, Bordetella pertussis
gtgaactggggggttggcgatttccagtttctcaaatccggttcggatgaaccatgcatacaacctattgaatcttcacacctagacgacgcctaccgcaccctgatccagcgccagtcggccatgacggagaagcaccaggccgcgcgcgacatggtgctgcgcgccctgccgcgcggcggcggctttcgcgaagacgaccgggtcatgctgtggaacatgttcgtcgacatgctgcagctgctcgatacgctggtcgccacccataccgattacgcctcgctgcgccgcaccctggccggccacgacgcgctggtcttcatgcgcgacgccctggtaaagatgtcgctggagctcaaccgcgtcgcgctggacgtctcgcgcggccacaagacgcaataccgcagcagcgccaaggccgagctgcgcgccatcgagtacgagatcgagcagctcaagcagcaggggctgggcgagcgcgaacccgagatgctggcgctgaccgtgcaggtgctgcgccggctgcgcaacgccgcgcgcatcgtcgacaagctggcccagcacaccgaggcgcgctcggacgccatccccacgagcatgctgcgcatcgacaaatcgctgacgcagttcatctcgcgccaggagctgcgcctgggcatgatcaccagcaacctgcggctggactcgccccacttccgctacgccatccgcgtcacgctggccgcggcgctggccatgacgctgatcggcatctggctggcgcccaacatggccgcgcacagctactgggtgctgctgaccatcgtcatcatcatgaagccgggcttcgcgctcacgcgccagcgcaacggctggcgcctgatgggcacgctggtgggctgcatcctggccctgatcctgttcacgctgaccaacaacccgaccatcctgttcgcggtgctgctgggcgcctgcatcatgggcaacagcctggtgcagctgaactacatggccagcgccatcttcaacacgctgttcgtggtgctggtgttccatttcgtcgccccgggcacggtttcgctggaggtgatcggcgagcaggcgatggatacggcgctgggctgcgcgctggcgctgatctgcagctatgtgctgccctggtgggaggcgcgctacatgaagccgctggcgcgggccgcctcgcgcgccaaccgcgaatacctgcgcgccgggctgcgctatatcgaggccatgcgccagccggcgcccggcggcgcggcggcgcggcggcgggcgaggaaacgcccgagaccggcgagcgcgccgacgccgacgccgacctggcctggcctggcctggcctggcctggcctggcggctgggccgcaagaacgtgcatatcgcgttcagcaatttcgccgaggcgttctatcgcatgatgagcgagccgacgcagcaccaggtgagcgtgcccgaattcaataacctgctggtgcagaaccacatcctggcctcgcagatcacggccgtcgtgcccatcctggtcggcctgccgcacacgccgcccgcggtgcagcaggcgctggacgcgatgatggacctgctggacccggcccgcaagccgccggccgcgctgcccgcgcagttcgacaccgaaggcgagcaggcggcgctggcctatccgctcaagcagatgctgcgcgcctgcgtgatgatccgccaggaactggccggcgtcgccgaccccgaagacccgcgtccggcgccggcctcggcc

SEQ ID NO: 15120 - DNA, 726 bp, Bordetella pertussis
atgagcatggtcgaattccacaatgtcaccaagaagttcggcgattcgacggtgctcgacggcatcacgctggatatcgacgcgggcgaagtggtggtggtggtcgggccgtccggctcgggcaagtccacctttctgcgctgcatcaacgtgctggagaccatcaacgacggcgacctgctggtcggcgggcaaagcgtcaagggcgatgccgcccaggtgcgcgagatccggcgcgaggcgggcatggtgttccagcagttcaatctgtttccgcagatgacggcgctggagaacgtcatgttcggcccggtgcatacgcgcggcgccgcgcgcgccgaggcgcgccggcaggccgaggagctgctgggcaaggtggggctggccgaacgcatgaaccactatccgtccgagctgtcgggtggccagcaacagcgcgtggccatcgcccgcgcgctggccatcaagcccaagctgatgctgttcgacgagccgacttcggcgctcgacccggagctgcgccacgaagtattgaaggtgatgcgcgacctggccgaggagggcatgaccatgatcgtggtcacgcacgaaatggagttcgcgcgcaaggtgggcagccgcctgatcttcatcgattgcggcaagatcgcgcacgatgggccgccggccgaactgctgtccaatccgcccagtcagcggctgaaggacttcctgcagcacgtatcc

SEQ ID NO: 15121 - DNA, 2277 bp, Bordetella pertussis
atggcttttcccgggctgaagtacgcctcttcaggattgcttgccgcgttgcgcctgggacggcgcaccggtaagaaaggccgcacgcctccctctccgtctcccggcgcccaggaagccgtcgacgcggccgcctcgccggtcgcctcgctggcgccgctgaccgagatcatcagcacctacctcgaccccaaagaggtcgaacgcgtgcgcgaagcctaccgcttcgccgaccaggcccacctgggccagttccgcgccagcggcgcgccgtacatttcccaccccatcgccgttaccgaaatctgcgccggctggaagctggacgccaatgcgctgtcggccgccctgctgcacgacgtgatggaagaccagggcgtgggcaagcatgagctggccgagaaattcagccccgaagtcgccgaactggtcgacggcctgtccaaactggaccggctggacttcgcgaccaaggccgagcagcaggccgagagctttcgcaagatgctgctggccatggcgcgcgacgtgcgcgtcatcctgatcaagctggccgaccgcctgcacaacatgcgcacgctggacgcggtcaaccccgagaagcgccgccgcatcgcccgcgaaaccctggaaatctacgcgccgatcgcgcaccggctgggcctgaacctgttgtttcgcgaactgcaggacctgtgcttcgcggcgatgtaccccaaccgctaccaggtactgtatcgcgccgtgctggcggcccgcggcaaccggcgcgaagtcatcagcaagatcgaggacgccgtgcgcgcggcgctgccggccgccggcatcgaggccgaggtgaccggccgcgagaagacgctgtacggcgtctaccgcaagatgaccgaacagaagaaatcgttttccgaagtcctggatatctacggtttccgcgtcatcgtccataccctgcccgagtgctacctggcgctgggcacgctgcaccagctgtaccggcccgtgccgggcaagttcaaggactacatcgccatccccaaggtcaacggctaccagtccttgcacaccacgctggtgggtccgtatggcacgccggtggagttccagttccgcacgcgcgacatgcaccacatcgccgaggaaggcgtggcctcgcactggctctacaaggatgccgacctgacgctcaacgagctgcagaagcgcacccaccagtggctgcagtcgctactcgacatccagagccagaccggcgattcgggcgagttcctcgaacacgtcaaggtcgacctgttccccgacgcgatctatgtcttcaccccgcgcggcaagatcatttccctgccgcgcggcgccacgccggtcgatttcgcctacgccatccataccgacatcggcaaccaggcggtcgccgccaaggtcaatggcgagttcgtcccgctgcgcaccgagctcagcagcggcgacacggtcgaaatcatcacttcgccggcctcgcgcccgaacgcgcaatggctcaattacgtgcgcaccggccgcgcccgttccgaaatccgccattacctgcgaaccgtcaagtacgaggagtccgtggccttcggcgagcgactgcttgaacaggcgatgatcgagctgcacctgcccgtgcccagcaccgacgacccgcaatgggacaagctggcgcgcagctcgggcaccagctcgcgcgatgaaatcctggccgatatcggcctgggcaagcgcctggccgccgtggtggcgcggcgcttcgcgcccgaacacgatctcatcgccaccaccgccgccgccgtggaccagatcacctcggcgcgcgccgcgcccatcctgatccagggcagcgaaggccaggcggtccagctggcgccatgctgcggcccgctgcccggcgaccccatcatcgccggcatgcggctgggccacggcctggtcgtgcatacctccgattgcccggtcgcgctgcgcgcccgcgcgcgcgagcccgagcgctggatcaacgtggcctgggacgcccagaccgccaagcacctgcccacgcgcctggatatcgtcacgcgcaacgagcgcggcgtgctgggccggctggcggccgaagtcacggcggccgacgccaatatcgtgcatgtcacgatgcacgacgacgcggtttccacggtctcgctgcacctgacggtgcaggtggacagccgcaagcacctggcgcaggtcatccgcgccatccggcacgtgccgcaagtccagaagatcgtacgcgtcaagggc

SEQ ID NO: 15122 - DNA, 2202 bp, Bordetella pertussis
atgccagatcccgctcacttctccccggcgcattcgcgccgtttgcgtttctttgcccacgttctgcacctgctcggcgcactctttacccagcacgccctggcccaggaagcgcgaacggggaacgatatcgctcagttgcccgccataagcgtcacgggtcgtgagatttccgacctcaccgagggtacaaacgcctacacaaccgaggccatgagcacggccacgggcctgacactctcgccacgcgaaacaccacaatccgtcagtgtggtcacccgacagcagatcgaggatcagggcctcaccgacaccggcgccatcctggcgaccgcgccagggatttccgtcacgcgcagcgacagcaaccgctattcattctcggcccgcggcttcaccatcgacaacttccagtttgacggcctggtatcgcccatcctgagccaatggaactatggttcgaccgatatggacgccgccatctacgatcacgtggaaatcgtacgtggcgccacaggcctgatgacaggctcgggcaatccttcagccgccgtgaacttcgtgcgcaagcgtcccttgcgtgagttcgcggctacgttcaatgcgagtgtcggcagctgggactatgtgcgcggcgatgccgacatctccgtgcccatcacggaagacggcagaatacggtcacgcttggtggccgcctacagtcagggcgacagctatgtgcactttttagatacgcgccggcgcacattctatggcgtggtcagcgccgatctgacgccggatacggtgctgacgaccagcgtggagtaccagcacaaccacagcaatgggtttggcagcggctttccgctgttctatagcgacggttcgcgcaccgatttcaaccgctcggtggccaacaacgctccctgggcccggcaggataccgaagccaccacctatttcgtggacctcacgcaccgcttcaccaatgactggaagctgcgcgcggcctatagccacactgatggccgctatctcatgaaacatgtgtaccggggcggctaccccgatcgccatactggcatcatcgctgccccccctgcattttccaactacgacggcaacctcgatcgggatgacatccatttttccttgtccgctcctttcgaggccttcggcctgcgccacgaagttgccctgggctggatgagcatcgacaaccatagcgacatccagcgatacgcaatggtcggaccggccccagccatcggcagcttcttcgactggcgccgcgcccacatccaagagcccagctgggccgacacgctgtcgcccgccgacgacgtgcgcaccaagcagaccggcgcctatctggtcggccggtttgcactagccgaacccctgcacctcatcgtgggcgaccgttggagcgactggaaaaccaaacagatgtattttggctcgcgccgcgaatacaggatcaagaatcagttcaccccctatgccggtctgacctacgacatcaacgacacctacacggcgtacgccagctatacggagatcttccagccgcagaacgcgcgcgacaccagcggcggcattcttcctcccatcaaaagcaagagctatgagctgggtctgaaggcagcctatctggagggacggctcaatacctccgccgcgctctttcagacgcggcaggataacctggcccaggtcatcccgggctcatccattccgggctttccgaacatgcaggcctcacgtgccgcctccggcgccaaggtcgaggggatagacctggaggccagcggccagatcctgcccgactggaacatcggcgccagctatacacacttcaccaccaaggacgccagcggcaaccccatcaacaccaatcatccgcgcagcctgttcaagctctacaccacgtaccgcctgccgggcgccctgcaccggcttaccgtgggcggcggcgttgactggcaaagtcgcatgtaccaggccgcagccagtccgcgcggcaatgtcgaagtcgaacaggacagctacgcactcgtgagcctcatggcgcgcttcgactttaacaaaaaactgtcggcaacactgaacgtgaacaatctgttcgacaaaaagtactacgatcagatcggcttctacagccagggttggtggggtgcgccacgcaatgtaatgctcaacttgcgggcgcagtat

SEQ ID NO: 15123 - DNA, 738 bp, Bordetella pertussis
atgctgcgtggccggcgccggcttgcgtggcggcgcaaaagcgcggacactggctgcgccccgatggccgcgaggaagaacatgggtaatttcgtgtcggagatcctgtttggctacacgacgctcatcagcatcatcaacccgctgggcctggccttcgtcttcctgaacaagaccgccacgctcacgcccgaggaacgcgcccggctggcctacagcgtggcgctcaacgcgatgttcctgctgctggtgacgtttttcatcggcgcctacatcctgcacttgttcggcatttcgctggaggcgctgcgcgtggcgggcggcctgtcggtggccgtgtccggctgggccatgctcaacgccccggagccgcacccgcaggcccaggcgctgcagcagatcacgcccagcatggcgcgcgagatggtgttcttcccgctcaccatgcccctgaccaccggcccgggcacggtcgcggcgaccatcgccctgagcgccaaccgcaccaacgaattgcgcgacttcctgctggccagcctggcgtcggtcctgatcaccatggcggtagccgccacggtatatctcgcctatagccgagccggcacgctggcgcgctacctgggcgcggacggcacccgcatcgtcacccgggtatcggcgttcctgctgctgtgcgtgggcgtgcagatcatgctgaccgggctggagcaattcctgcgtccgatcatcggccacggc

SEQ ID NO: 15124 - DNA, 1353 bp, Bordetella pertussis
atgctagatccgatactgctgcgcaaagacctgcaaaccgtcgtcgaccgcctcaagagccgtggcgtcgatttcgacatcgcccggttcaacgagctggagtcccgccgcaaggccgtccagaccgaaaccgagtcgcagcaggcgcgccgcaatgccttggccaagcagatcggccagctcaagggcaaaggcgcacccgaagcggaagtgcaggccgtgatggccgagtcgcaggccttgccggcccggctcaaggcgctcgaggacgaactggcgcagacgcaggcgcaactcaacgacctgctgatgtccgtgcccaacctgccgcacgccagcgtgccgcagggcgcgtccagcgacgagaacgtcgaggtgcggcgttggctgccgggcgcggccgacgagcgcggcatccctgcggcgctgggtttcgaggtgcgggatcacgtggcggtgggcgagccgctgggcctggatttcgatctggccgcacggctgtcgggcgcgcgcttttctttcatgcgcggccagatggcgcgcctgcaccgcgcgctggcgcagttcatgctggacttgcagacgggcacgcatggctacaccgagtgctacacgccctacatcgtcaacagctcgaccttgttcggcaccggccaactgcccaagttcaaggacgacatgttcttcgtcaccaagggcggcggcgacgacgagcccaaggtcgacgagcagggcaacccgctggcgcgcgaagaccaatacctgatctcgacctcggaaatcaccctgaccagcgtggtgcgcgagaccatcgtggccggcgccgacctgccgctgcgcctgaccgcgcatacgccgtgcttccgctccgaagccggcagcggcgggcgcgatacgcgcggcatgatccgccagcaccagttcgacaaggtcgagatggtgcagatcgcccatcccgagcattcgtacgaggcgctcgaggaaatggtcggccatgccgagcgcgtactgcagctgctggagctgccgtaccgcgtcatgctgctgtgcaccggcgacatgggtttcggctcggccaagacctacgacctggaggtctggctgccggcgcaggatacctggcgcgagatctcctcggtttccaactgcgaaacattccaggcgcgccgcatgcaggcccgcttccgtaacgcgcagaacaagcccgaatacgtgcatacgctcaatgggtccgggctggccgtgggccgcgccctggtggccgtgctggaaaactgccagcaagccgacggcagcgtgcgggtgccggccgtgctgcagccctacatgggcggcctgaccgttctcgaacct

SEQ ID NO: 15125 - DNA, 1488 bp, Bordetella pertussis
atgccctccgactattcgatcgctcaactgcattgcccggacccggtgcccttcgaggccttcgacagcgcggtcgccgccaccgaccgcctgatcgagctgtaccgccgcaataccgggttcgtgcgcgagctgttccacgaggtggtgggcgggcgtgagttgtccggacgggtgcgcgcctactacccggccatccgcatcggcgtgcagacctacgatccgatcgattcgcgcctgtcgtacgggcacgtggccgagccgggcgagtaccagaccaccatcacgcagccgcatctgttccgcgactatctcatcgagcagatcggcctgctgctgcagaaccaccgcgtgccggtggaggtgggcgaatccgatatgccgattccgctgcatttcgcctttccggacggcacctacgtggaaggcgagcatatcgagaacctgcggcggccgctgcgcgatctgttcgacgtgcccgacctggcggtcaccgacgacgccatcgtcaatggctcgtggcgcggccagcccggcgagccccggccgctggcgccgtttacggccacgcgggtggattattcgctgcatcgcctgcagcactacacggccaccgcgcccacgcacttccagaatttcgtgctgttcacgaactaccagttctatgtggacgaattctgcgtgtgggcgcgcgggctgatggccagcggcggcggcgactacgacgcgctgatcgagccgggcaaccgcatcacgcggcgcggcgaccaggcgccggtggaggcggcggcggtgcgcctgccgcagatgccggcgtaccacctggtgcgccccaatcattcgggcatcacgctggtcaatatcggcgtggggccgtccaacgccaagaccattaccgaccacatcgccgtgctgcgcccgcatgcctggctgatgctgggccattgcgccggcctgcgcgattcgcagcgcctgggcgattacgtgctggcgcacggctacgtgcgcgaggaccacgtgctggacgccgacctgcctacctgggtgccggtgccgccgctggccgaggtgcaggtggcgctggagcaggcagtcgaggaagtggcgggcctgtccggctgggagctcaagcgcatcatgcgcaccggcacggtggccaccatcgacaatcgcaactgggagctgcgcgaccagggcgaactggtgcagcggttcgcgcaatcgcgcgccatcgcgctggacatggaatcggccaccatcgcggccaacggcttccgtttccgggtgccgtacggcacgctgctgtgcgtgtccgacaagccgttgcacggcgagctcaaattgcccggcatggccagcgccttctaccggcgccaggtcaaccagcacctggagatcggcatccgggcgctggagcgcctgcgcgaaatgccgcccgagcggctgcagtcgcgcaagctgcgcaccttcatggaaacggcgttccag

SEQ ID NO: 15126 - DNA, 1338 bp, Bordetella pertussis
atgagcaacgacctgttcgcctccgatccggcccatcggccctatgtgccgctggccgaacgcctgcggccccgtacgctgtccgatgtggtcgggcagtcgcatctgctggggccggacaaaccgctgcgcgtcgcgttcgactccgggcggccgcattcgatgatcttctggggcccgcccggcgtgggcaagaccaccctcgcgcgcctgatggcagacggcttcgatgcgcagttcatcgccatttcggccgtgctgggcggcgtcaaggacattcgcgacgcagtggtgaccgcccaggtcgcgcaagggcaggggcgccgcacgatcctgttcgtcgacgaggtgcatcgcttcaacaaatcgcagcaggacgccttcctgccgtatgtggaaagcggcctgttcaccttcatcggcgccaccaccgagaacccttccttcgaggtcaactcggcgctgctgtcgcgggcgcgcgtctacgtgctgcagtcgctgtcggccgaggagttgatgcagctggtcgaccgcgccgtcgccgcgctcaacgagggcctggaggacgggcagcagatccgcttcgaggccgaggcgcgcgagcaattggcggcctgggccgacggcgatgcgcgccgcctgatcagcgcggtcgaggtggtggccgagtccgcccaggccgccgggcgcgacagcgtcgacgcggcctggctggaaacctcgctgtcgcagaacctgcgccgtttcgacaaggggggcgacgccttctacgaccagatcagcgcgctgcacaagtcggtgcgtggctccgacccggacgcagcgctgtactggctggcccgcatgctcgacggcggcgccgatcccaagtacctggcgcgccgcctggtgcgcatggcgatcgaggatatcggcctggccgatccgcgcgccaccgagctggccgtcaacggcgccgacatctacgaacgcctgggttcgcccgaaggcgagctggcgctggcgcaggcggtggtctacatggcctgtgcggccaagtccaatgcggtctacaacgcgtacaacgccgcgcgcaagtttgcggccgagcatggcagcgcgccggtgcccttgcatctgcgcaatgcgcccaccaagctgatgaagcagctcggccatggcaaggcatatcgctatgcccacgaccagccgcatgcctatgccgcggacgagcaatatttccccgacggcctcaatcccaccttctaccggccgaccgaccgggggctggaggctaaaatccagcagaagctggcattcctggatgagcttgacgcccaggaacgcgccaggaaacgg

SEQ ID NO: 15127 - DNA, 924 bp, Bordetella pertussis
atgatccgcagcatgactgccttcggcaacgcccgcgccgacctcgagcagggctcgctcgcgctcgagctgcgcagcgtcaacagccgttatctcgacctgtatttccgcctgcccgacgagctgcgccacgtcgagacgccgctgcgcgaattgctgaccgccaagctggcgcgcggcaaggtcgaagtgcgcgtgtcgtatacccgcgccgcctccaccgaactctccacgctggacccgcaatggctgcgctcgctggccgcgcaactggacaacgcgcgcgccgtcctgcccgaagtcgccgcgccgcgcctggtcgaactgttcaactggcccggccagcgcggcaacgacgcgctcgatccgcaggcctggggcgcggcctgcatgcaggccgcccagcaagcgctggcgcagatgcaggaaggccgcgcccgcgaaggcgagcgcctggccgcgatgatgcgcgaatgcgccgacggcgtgggccgcattgtcgacggcgtcgaaacccacctgccccagctgctggccgatcaccgcgagaagctggcgctcaagctgcgcgaagcggtcgaatcggccttccccggcggcttcgcccacatcaccggaccggagctgtccgagcgcctgactcaggaagccacccttttcgcgttgcgcatcgacgtcgccgaagaactctcgcgcctgcgctcgcacctcgaagaattgcgccacctgctgggcgacggccccgccaaatccgacgccaagcgcggcggtagcgccggcaagcgcctggacttcctgttccaggaaatgaaccgcgaggccaacaccctgggttccaaggccggcagcctggaagtcacgcgcgcggcgatggatctcaagctgctgatcgagcagatgcgcgaacaggcgcagaacctggag

SEQ ID NO: 15128 - DNA, 2367 bp, Bordetella pertussis
atgagccgcatgccgcgtatttcgaatgctactccgcgcgcctcgcgcaacacccgcaacgggccgtctccctttcaagcgcgcatctccgcgctcctcagggaggcccgctggatcctgttcgccgcgctggccgcctggctgaccctggtgcttgccacctggagcccggccgaccctggttggtcacattctgtttccggtgacgccatccacaacggcggcggcacgctgggcgcctatctcgccgatatcctgttgtacctgttcggattttccgcctggtggtgggtcgtgctgctgctgcaccgcgtgcgcgccggctaccgccgcctggccagcaacctgcgcgtcaccagcggcaagcagcccgacgccttgccgcgcgtgcactgggaagagggcatcggcttcgtgctcctgctgaccggctcgctgggcatcgaggcgctgcgcctgtacagctggggcatgcacctgcccggcggcaccgacggcgaaagcggcgccggcggcgtgatcggccagatgctggccggctggctgtcgcgcggcgtgggctttaccggcggcaccctggccctgctggtgctgctggcggtcggcctgagcctgttcttctcgttttcgtggctgcagatcgccgaacgggtcggcagctggctcgaaggcctggtgcggcgcgtgcgcgattcgtacgccgcgcgcgaggaccgcaaggtcggcgaggtcgccaaggcggtccgtaccgagcaggtggtggccaagcaggaaaagctggtgcacgagcagcccgtgcgcatcgagcccgccattaccgtggtgccgcgctcggatcgcgccgagaaggaaaagcagcaaagcctgttcgcgccgccggccggcgagagcgacctgccggccatcgggctgctggatcctcccctgcagaaccaggaaaccgtttccgccgagacgatcgaattcacctcgcgcctgatcgagaagaaactggccgatttcggcgtttccgtggtcgtggtggcggcgcaggccggcccggtgatcacgcgctacgagatcgagcccgccacgggcgtaaaaggcagccagatcgtcaacctggccaaggatctggcgcgcgcgctcagcctggtcagcatccgcgtggtggaaaccatcccgggcaagaacctgatgggcctggagctgcccaacccgcgccgccagatggtcaagctgtcggaaatcctcggctcgcagacctaccatgccagccattcggtgctgaccatggcgctgggcaaggacatcgccggcaacccggtggtggccgacctggccaagatgccgcacttgctggtggccggcaccaccggctcgggcaagtcggtcggcatcaacgccatgatcctgtcgctgctctacaaggccgacgccagccatacccggctgatcctgatcgacccgaagatgctcgagatgagcgtctacgaaggcattccccacctgctggcgccggtggtcaccgacatgcgccatgccgccaacgcgctgaactggtgcgtgggcgagatggaaaagcgctatcgcctgatgagcaagatgggcgtgcgcaacctggccggctacaacagcaagattcgcgacgccatcaagcgcgaagagcccattcccaatccgttctcgctgacgccggacgcgcccgagccgctgcaggcgttgccgcatatcgtggtggtgatcgacgagctggccgacctgatgatggtggtgggcaagaagatcgaggagctgatcgcccggctggcgcagaaggcccgcgccgcgggcatccacctggtgctggccacccagcgccccagcgtggacgtgatcaccggcctgatcaaggccaacatcccgacccgcatcgccttccaggtgtcttccaagatcgactcgcgcaccatcctggaccagatgggcgccgaaaccctgctgggccagggcgacatgctgtacatgccgccgggcaccggcctgccggtgcgggtgcacggcgcgttcgtgcacgacgacgaggtgcaccgcgtcgtcgaggcgctcaaggcgcagggcgagcccaactatatcgatggcctgctcgaaggcagcgaaggcgagaccggcgatggcctgagctcggtcaccggcatgggcgacgcggagtccgatccgatgtacgaccaggcctgcgaagtggtgctcaagcaccgccgcgcctcgatttcgctggtgcagcgccatctgcgtattggttacaaccgtgccgcacggttactcgaacagatggagcaggcgggtatggtgtcgcccatgcaatccaacggcaaccgggaaatcctggtgccggcccgagaggaagcc

SEQ ID NO: 15129 - DNA, 699 bp, Bordetella pertussis
atgttgcgtaggttcgccagtcgcgccgaggcggccgcatcccattctacaatgttgcccatgtccgcagaaatactcaatccaaacttgcgtcgcgtggtgcttgcatccaacaatgccggcaaattgcgcgaattctcggccctgttcgccccgcttgggatagaactggtgccgcaaagcgaattgggcgtctcggaggccgaggagcctcacgccacctttgtcgagaacgcgctggccaaggcccgccacgccagccggcataccggcctgccggccctggccgacgattcgggcctgtgcgtggtggcgctgggcggggcgccgggcgtgcattcggcccgctacgcccagcagcccggcggcgcccgcagcgacgcggccaacaacgccttgctggtgcgcgagctggccgcggccggcgaccggcgcgcctggtatgtggcgctgctggcgctggtgcgcaccgagaacgatccctgtccgctcattggcgaagggctctggcacggcgagatcgtcgatgcgccggccggcgagcatggcttcggctacgacccgcatttctatctgccgcagcagggttgcaccgccgcccaactggcgccggagcacaagaaccgcatcagccaccgggcgcaggccctggcgcagctgctggacaagctgcgcgcaaccgggccggtggaccggccc

SEQ ID NO: 15130 - DNA, 1497 bp, Bordetella pertussis
gtgcgggacctggcacgcattttgcttgcctgtttattgccagtcgggcaaccaaggccctcgacgcttttatcttatggagatgacatggcaagccccaaagacgttctcaagcagatcgccgacaacgaagtcaagttcgtggatttccgcttcaccgatacgctcgggcgcgagcaccacgtttccgttcccacctcggctgtcgacgaggacaagctggagagcgggcaggcgttcgacgggtcgtcgatcccgggctggaagggcatcgaagcctccgacatgctgttgattcccgacctggacacggccaacctggacccgttccgcgaagagccgaccttgatcctgagctgcgacgtggtcgagccgtcggacctgaagggctatgaccgcgacccgcgttcgctggccaagcgcgccgaagcctacctgaagtcctccggcctgggcgataccgcctacttcggtccggaacccgagttcttcgtgttcgacggcgtgacctggaacaccgacatgtcgggcaccttcgtcaagatcaagtcggaagaggcgccgtggtccagcggcctggaattcgaaggcggcaacatgggccatcgtccgggccccaagggcggctacttccccgtgccgccggtcgattcgttccaggacatgcgttccgaaatgtgcctgctgctcgagcagatgggcgtgccggtcgaagtgcaccaccatgaagtggccgcgcccggccagctggaaatcggcaccaagttcagcacgctggtgcaacgcgcggactggaaccaggtcatgaagtacgtgatccacaacgtggcgcacgtatacggcaagaccgcgacgttcatgcccaagcccatcgtcggcgacaacggctcgggcatgcacgtgcaccaatcgatctggaaggacggccagaacctgttcgcgggcaacggctacgccggcctgtcggagttcgcgctgtactacatcggcggcatcatcaagcacgcccgcgcgctcaatgccatcaccaatccgggcaccaactcgtacaagcgcctggtgccgcacttcgaggcgccggtgaagctggcctattcggcccgcaaccgctcggcctcgatccgcatcccgtacgtcggcaaccccaaggcgcgccgcatcgagacgcgcttcccggatccgctggccaacccgtacctggcgttctcggccctgatgatggccggcctggacggcgtgcagaacaagatccacccgggcgacccggccgacaagaacctgtacgacctgccgccggaagaagacgccaagatcccgaccgtctgcgcgtcgctggaagaggccctggccgcgctggacaaggatcgcgagttcctgacccgtggcggcgtgttcagcaacgacatgctcgacgcctacatcgaactgaagatgggcgaagtcacgcgtctgcgcatgaccacgcatccggtcgaattcgacatgtactacagcctg

SEQ ID NO: 15131 - DNA, 2163 bp, Bordetella pertussis
atggccaactcccctacccccctgtccgcccaggccggcctgccggctgcaagcccctccctgccggcggccacgccgcatcgcgcgttcggcctgtggtcgcgcgcgctggccggccccgccctgcgcgacaccctgcgcaaactgtcgccggccgcccagttgcgcaaccccgtcatgttcgtcgtctacgccggcagcatcctgaccaccctgttgtggctgctggccctggccggcctggccgaggcccccgcgggcttcatcctcgccgtcgcggccggcctctggttcaccgtgctgttcgccaacttcgccgaggcattggccgaggggcgcggcaggcagcaggccgccgccctgcgcggcttgcgcaccaccatcgaggcgcgggtgctgacaggctttcgcgatagcgacgccgccgcagcactgccgccgtactggcgctcgcgcgccacctcgcgcccctcgggcgcgctgcgcagggacgacgtggtcctgatcgaagcgggcgaaaccgtgccgggcgacgggcaggtgatcgccggcatcgcctcggtcgacaaaagcgccatcaccggcgaatcggcgccggtgatccgcgcggccggcagcgatttctgctcggtcaccggcggcacgcgcgtcctgtccgactggatcttcgtgcgcatcgcggccgaccctggcgacagcttcctcgaccgcatgatcgccatggtggaaagcgcccgccgccagaaaacccccaatgagctggcgctgaccatcctgctggtgggcctgacgctggtgttcctgctggtcgtggccagtctgctgccgttctcgatgtacgcggtgtccgcctcgggcgcggggcaggctgtgtcgatcaccgtgctggtggccctgctggtctgcctgatccccaccaccatcggcggcctgctgtcggccatcggcgtggcgggcatgagccgcatgatgcgggccaacgtcatcgccacctcggggcgcgcgatcgaggcggccggcgatgtcagcgtcctgctgctggacaagaccggcacgatcacgtttggtaatcgccaggccgcggccttcgtccccgcgccgggcgtatccccggcggtgctggccgaggccgcgcggctggcgtcgctggccgacgaaacgcccgagggccgcagcatcgtcgccctggccgagcgcatcctggacacccgcagcgaggcgcccgccggcgcgcgcttcgtgccgttctccgcccagtcgcgcatgagcggcgtggacctcgacggccgccttatccgcaagggagcggccgacgccctggcacgctggctgggcgaaggacagggcggcctgcccgccgccgtggcgcgcgacgtggacgacgtggcgcgccgcggcagcacgcccctggtggtcgccgaaggcgggcaggcgctgggcgtgatcgagctcaaggacatcgtcaagcccgggatccagccgcgctttgccgcgttgcgccgcatgggcatcaagacggtcatgatcaccggcgacaacgccctgaccgcggccgccatcgccgccgaggccggcgtggacgacttcctggccgaagccaccccgcaagccaagctggaactgatccgcgcctgccaggccgacggccatctggtggccatgacgggcgacggcaccaacgatgcgccggcgctggcccaggccgacgtggcggtcgccatgaactccggcacgcaggccgccaaggaggccggcaacatggtggacctggactccaaccccaccaagctgatcgaaatcgtcgaaatcggcaagcagatgctgatgacgcgcggcgcgctcaccaccttcagcgtcgccaacgacgtcgccaagtatttcgccattattcccgcggcattcatggcggtgtacccgcagctggcgcaactcaatgtgatgggcctggccacccccgcctcggccattctttcggccgtcattttcaacgccctgatcatcgtggccctgattccgctggcgctcaagggcgtgcgctaccgcccgctcggcgcggcggtgctgctgcgccgcaacctgctggtctatggactgggcgggctgctggcgccctttgccggcatcaaactgatcgacatggcgctggccgccctgggctggacc

SEQ ID NO: 15132 - DNA, 1065 bp, Bordetella pertussis
atgacgaatgtcgatgcttttgatctgctggccacatcggtcttcctgctgaacgagcgcgggcatatcgaatacgccaatgccgccgccgaggacctgttcggccgttcccgcaagcagttgcgaggcctgtcggccgcgacgctgttcgacaatcccgaagacctgcaatcggccatcgacagcgcggccgccggcaagtttgccgacgtgcgccagctggcctcgctgcggcgggtggtcgagtcggtggaggtcaccgtcacgacggtgtcgctgtccggccaggcctggccggtattgatcgagacgcgcgagatcgagcagcgcgtgctggccgatcgcaaccagcggctggtcgacgaaatcgaatcgcatcgcgaattgctgcgcaatctcgcgcacgaggtcaagaaccccctgggcggcctgcgcggcgcggcccagctgctggaagccgagctgcccagcgcggccctggccgaatatacccaggtcatcatcaccgaggccgaccggctgcaggcgctggtcgacaggctgagcggtccgcagcgcgtgccgctggccgcgcggccggtgaacatccatgaaatctgcgagcgcgtctgcgcgctgatccaggccgagttccgcgacgcggtcgaactggtgcgcgactatgacgcgtcggtgcccgagctgcgcggcgacgcggccaggctgatgcaggcggtgctgaatgtggcgcgcaacgcggcgcaggagctggtgcagcagaagccgggcgccgacgtgcccgcgccgcgcgtcgtgctgcgcacgcgggtggcgcgccaggtcatgctggcgcaccggcagcaccggctggcgctggtcgtgtcggtgctggacaacgggccgggcgtgcccgagcacatccgcgagcgcattttccatccgctggtgaccgcgcgcgccggcggcaccgggctgggcctgagcctggcccaggatttcgtgcagcagcacggaggcatcatcgaattcgagtcccgtgcgcggcacaccgaattccggttggtattaccgatggagcccccactt

SEQ ID NO: 15133 - DNA, 597 bp, Bordetella pertussis
atgaccatgcaccctccgcttccccccgccgggcgccccctgcgcgccgccctggtgatcttcctggcgctgtccgtgctggtcggactgctttatccgctggccaccaccggcgtggcccgcctgctgtggcccttccaggccggcggctcgctgctcgagcaggacggccgcgtggtcggctcggcgctgatcggccagtcgttcaccgatccgcgctatttctggggccggccatcggccatcgcgcccatgccctacaacgccgccgcctcgggcggatcgaacctgggccccgccaacccggcgctggcgcaggccgtccgggcgcgcatcgccgccttgcgggcggccgatcccggcaatccggcgccgattccggtggatctcgccaccgcttcgggcagcggcctggatccgcacatcagcccggcggcggccggctaccaggccgcccgcgtggcgcgcgcccgcggcctgcccaccgccacggtggagcagctcatcgcccggcacacggaacgcccggtgccggacatcctgggcgaaccggtcgtcaatgtgcttgccctcaacctggcgctggaccgcctgcgc

SEQ ID NO: 15134 - DNA, 2696 bp, Bordetella pertussis
cgcctcgaccccgaccgcctgctccagaccctggagcaggcgcagtccgacgcccggcgcgggcggctgcgcatctacttcggcgcctgcgccggcgtaggcaagacctatgccatgctggccgcggcgcgcgcccaggccgcgcagggcgtggatgtcgtggcggggctggtcgaaacccacggccgcgccgacaccgccgcgctgctcgatacgctgccggccctgcccctgcagacgctcgacttccagggacgccgcctgcgcgaattcgacctgcaggccaccgtggcgcgccggccccgcctgctgctgctcgacgaactggcgcacaccaacgcgcccggggcgcgccacgccaagcgctggcaggacgtcgaggaactgctggcggccggcatcgacgtctggaccaccctcaacgtccagcacctggaaagcctgaacgaggcggtcggcggcatcaccggagtgcgcgtgcgcgaaaccgtgccagactcggtattcgatgccgccgacgagatcatcctggtggacctgtcggccgacgaattgctgcgccgcctgcgcgagggccgggtctatgtgccggaacaggcccgccacgccagccggcacttcttccgcaagggcaatctgatcgccctgcgcgaactggcgctgcgccgcaccgccgaacacgtcgacgacgatgtgcgcgcgtaccgccacgaacgcgcgatcgagccggtctggcgcacgcgcgaggccgtggtcgcctgtatcgacgccgacccgcatgccgagcatgtgctgcgcagcgcgcaccggctggcccagcaactggactgcgagtggcatgccatcaccatcgaggcgccgcgggtcgcgcccctgccgcgcgccggccgggcgcggctggaccaggcgctggcgctggccgagacgctgggcgcgcatgtcgagaccgtggccggcaccgacatggtcgacgccgcgacccgctacatgcgccgccacaacatcaccaaggccgtggtcgggcgcgacgcgtggcgccgccgcggcctgtcgggcctgctggatgccgccctgacgccgggccggctgctgcgccggcgcagcttcgccgatgtcctggcgtcggcctgcccggaagcggacatcgtgagggtcggcgcgccgtcggcggccacggccgcgccacggcgcgacccgcgttcgtggcgcaacgcttccgcgcccgccggccacgccgccgccggcgcctatctgtgggccctggcctattgcgcggcggccaccctggcctcgcgcctggcctttccggttctgcaccagaccaatatcgtcatgatcttcctgctggcggtcgtggcggcggccctgcgccacggacgcgggccggcggcgctggcctcggtggtcagcgtcgcgctgttcgatttcttcttcgtgcagccattggcctcgttcgccgtctcggacgtgcagtacctgctgacgttcgccgtcctgctgacggtcgggctgctgatcggccagctgaccgccggcttgcgccagcaggcccgggccgccgccaggcgcgaggccgatgcgcgcggcctttacgaattcgcgcgggagctgtccgcggccctgcagccggagcaaatcgccggcgcggcctcggcattcctgaacgccgcgttcggcgcccgcggcgccctctacatactgggcctggacgaccggctgcggctggcgcccggcgctggcgacgcggcactcgaacccacgctggcgcaatgggccttcgaccacggccaggcctgcggcgccggcaccgacaccctgtcgaacagccccgtgctgtacctgcccctgcgcgcgcccatgcgggtgcgcggcgtgctggccctgcaccacgccggcccgccgctctacagcgcggcgccggcgcgccgccagctcgacgcctacgccaccctgatcgccatcgccatcgaacggctgcactatgtggaagtcgcccagcaggcgctgctcagtatcgaatccgaacgcctgcgcaacgccctgctggcggcggtctcgcacgatctgcgcacgccgctgaccagcttgctcggcatggccgagaccctgcagcgctcgcccgccgccatgacgccggccgcgctcgaaaccgtggccgccatgcaggaccaggcgcggcgcatgcacgcgctggtcgtcaacctgctggacatggcgcggctgcaaagccacgatgcgccgctgcggcgccaatggcaatcggtcgaggaactggtgggctcggccctggcggccatgaacgccgcgctgcaggatcgccccgtcacggtcgcgccgctttctgccctgccgctggtgaaatgcgatggcatcctgatcgaacgggtgctgtgcaacctgctggaaaatgccgccaaatacacgccgcccggcagtgccatccacatcgacgccctggccgacgcccataccctgcaggtacgggtggccgatgacggggcgggcgtcgcgcaggccgaccgccagcggatcttcgagaaattcgcgcgcggccagcgcgagtcggccccccccccggcgcaggcctcgggctggcggtatgccgcgccatcctggacgcccaccagggccgcatctgggtcgagccggcccggcgcctgcgcggcgcctgcttcgtcttcgcgctgccgctgacc

SEQ ID NO: 15135 - DNA, 1254 bp, Bordetella pertussis
atgtcctatcaacatatcaaggttcccactgggggccaaaaaatcacggtcaacgccgattactcgctgaatgtgcccgatcaggtcatcattccggtcatcgagggtgacggtacgggcgccgacatcacgccggtgatgattaaggtcgtcgacgcggccgtgcagaaggcctatgcgggcaagcgcaagatccactggatggaagtctacgccggcgagaaggccaccaaggtctacggcccggacgtctggctgcccgaggaaaccctcgacgccgtcaaggactacgtggtgtcgatcaagggtccgctgaccacgccggtcggcggcggcatccgttcgctgaacgtggcgctgcgccagcagctggacctgtatgtctgcctgcgcccggtgcgctacttcaagggcgtgccctcgccggtgcgcgagcccgagaagaccgacatggtcatcttccgcgagaactcggaagacatctacgcgggcatcgagtacatggccgagtccgagcaggccaaggacctgatccagtacctgcagaccaagctgggcgtgaccaagatccgcttcccgaacacctcgtcgatcggcatcaagccggtttcgcgcgaaggcaccgagcgcctggtgcgcaaggcgctgcagtacgccatcgacaatgaccgcgcctcggtgaccctggtccacaagggcaacatcatgaagttcacggaaggcggcttccgcgactggggctacgccctggcccagaacgagttcggcgcgcagccgatcgacggcggcccgtggtgcaagttcaagaatcccaagacgggtcgcgagatcatcgtcaaggattcgatcgccgacgccttcctgcagcagatcctgctgcgtccggccgaatacgacgtgatcgccacgctgaacctgaacggcgactacatctccgacgcgctggccgcgcaagtgggcggcatcggcattgccccgggcgccaacctgtcggattccgtggccatgttcgaagccacccacggcaccgcgccgaagtacgcgggcaaggactacgtgaaccccggttccgaaatcctgtcggccgaaatgatgctgcgccacatgggctggaccgaggccgccgacctgatcatcgccagcatggagaaatccatcctgtccaagaaggtcacctatgacttcgcccgtctgctcgaaggcgccacccaggtgtcgtgctcgggcttcggtcaggtcatgatcgacaatatg

SEQ ID NO: 15136 - DNA, 1923 bp, Bordetella pertussis
atgagcaaaatcattggcatcgacctgggtacgaccaacagctgcgtggctgtcctggacggcggtcaggtcaagatcatcgagaacgccgaaggcgcccgtaccaccccctccatcgtcgcctacatggacgatggcgagacgctggtcggcgcgccggccaagcgccaggcggtcgccaaccccaagaacaccctgtacgcggtcaagcgcctgatcggccgcaagttcgacgagaaggcggtccagaaggacatcgacctgatgccgtactcgatcgtcaaggccgacaacggcgacgcgtgggtcgaagtgcgcggcaagaagctggcgccgccccaggtgtcggccgaagtgctgcgcaagatgaagaagaccgccgaggactacctgggcgaggaagtcaccgaggccgtgatcacggtgccggcgtacttcaacgacagccagcgccaggccaccaaggacgccggccgcatcgccggcctggaagtcaagcgcatcatcaacgagccgaccgcggccgcgctggccttcggcctggacaagaccgagaagggcgatcgcaagatcgtcgtctatgacctgggcggcggtacgttcgacgtctcgatcatcgagatcgccgacgtggacggcgaaatgcagttcgaggtgctgtcgaccaacggcgataccttcctgggcggcgaggatttcgaccagcgcatcatcgactacatcatctccgagttcaagaaggaacagggcgtcgacctgtccaaggacgtgctggccctgcagcgcctgaaagaggccgccgaaaaggccaagatcgagctgtcgtcgagccagcagaccgagatcaacctgccgtacatcacggccgatgcctccggtcccaagcacctgaacctcaagatcacgcgcgccaagctggaagcgctggtcgaggagctgatcgagcgcaccatcgagccgtgccgcgtggccatcaaggatgccggcgtcaaggtttccgacatcgacgacgtgatcctggtcggcggcatgacccgcatgcccaaggtgcaggacaaggtcaaggaattcttcggccgcgagccgcgcaaggacgtcaaccccgatgaggcggttgccgccggcgccgcgatccagggttccgtgctgtcgggcgagcgcaaggacgtgctgctgctggacgtgaccccgctgtcgctgggcatcgagaccctgggcggcgtgatgaccaagatgatccagaagaacaccacgatcccgacgcgctactcgcagacgttctcgaccgccgacgacaaccagccggcggtgacgatcaaggtgttccagggcgagcgcgaaatcgcggccggcaacaagggcctgggcgagttcaacctggaaggcatcccgccggcgccgcgcggcctgccgcagatcgaggtcacgttcgacatcgacgccaacggcattctgcacgtctcggccaaggacaagggcaccggcaaggaaaacaagatcaccatcaaggccaactcgggtctgtcggaagacgagatccagcgcatggtcaaggatgccgaggccaacgccgaggaagatcaccggctggccgagctggcgcaggcccgcaaccaggccgacgcgctggtgcatgccacccgcaagtcgctcacggagtacggcgagaagctggaagccgccgagaaggagtcgatcgaggctgccatcaaggacctcgaggacatcctcaagacgggtgacaaggccgagatcgacgccaaggtggaagccttgtcgacggcctcgcagaagctgggcgaaaagatgtacgccgacatgcaggcgcagcagcaggcccagcagcagcaggcggccgacaacgccaagccggtggacgacaatgtggtcgacgccgacttcaaggaagtcaagcgcgaccag

SEQ ID NO: 15137 - DNA, 3105 bp, Bordetella pertussis
atgattctgtcggcgccgttcatcgtccgtccggtggccaccacgctgctgtgcctgggtgtggtgctggccgggctgctggcgtaccgcctgttgccggtcgcgcccctgccgcaagtggacatcccgaccatttcggtatcggccagcctgcccggcgccagccccgagaccatggcctccagcgtggccacgccgctggagcgctcgctgggcagcatcgccggcgttaccgagatgacctcgcgcagctcgcaggggtcgacccgcatcaccctgcagttcgatctcagccgcgacgtcgatggcgcggcgcgcgacgtgcaggccgccatcaacgcggcgcgctcgctgctgcccaccagcctgcgcagcaaccccacgtaccacaaggccaatccgtcggcggcgccgatcatgacgctggccatgacctcggccacgctgggccagggcaagctgtacgacctggcctcgaccatcgtcgcgcagaagctggcccaggtgaacggcgtgggcgaggtgacggtgggcggcagctcgctgccggcggtgcgcgtcaacctcatcccgggcgcgctggccaatcgcggcgtgtcgctcgacgaggtgcgccaggcgctgtccagtgccaacgccaaccgccccaagggcatggtggagaacgaccagtaccactggcaggtcatggccagcgaccagctcgaccgcgccgagcagtaccggccgctgatcgtggcctggcgcgacggcgcggccgtgcggctgtccgacgtggccagcgtggaagactcggtcgaggacctgtaccagaccggcttctacaacgaccgcaaggccatcctgatgatcgtgcggcgccaggccgacgccaacatcatcgagaccgtcgacgcggtgcgcgcccagctgccccagctggcggccctgctgccgggcgacgtggacctgaccgtggcgcaggatcgcacgcccagcatccgcgcctcgctgcacgaggccgagctgacgctggtcatcgcggtgggcctggtggtgctggtggtgctgctgttcctgcgccggctgcgtgccgccttcattcccagcgtggcggtgccggtatcgctgatcggcaccttctgtgtgatgtacttgtgcggctacacgctgaacaccatttcgctcatggccctgatcgtggccaccgggttcgtggtcgacgacgccatcgtggtgctggaaaacatcatgcggcatatcgagcgcggcgccacgcccatgcgcgcggcgctgcgcggctcgcgcgaggtgggcttcaccgtgctgtcgatgagcctgtcgctggtggcggtgttcatccccatcctgctgatgggcggcgtggcggggcggctgtttcgcgagttcgccgtgaccctgtcggcctccatcctggtttcgctggtggtgtcgctgacgctcacgcccatgatgtgcgcgcggctgctgcgcgccgagccggccgcgccgcgcccgccggggcggatcggacgcctctggacgcgcctgtacggcggcatgcagggcggctacgagcgcagcctgggctgggcgctggcgcatgcgcggctgatgatgctgatcctggccgccaccatcgggctcaacgtgtatctgtacatggtggtgcccaagggctttttcccgcagcaggacaccggccagctgctgggctttttccgcggcgaccagggcacctcgttccaggccacggtgcccaagctggagtacttccgcaaggtcatcctggccgacccggcggtgcagagcgtgacggcctacgcgggcggtcgcggcggcagcaattccagcttcatgcagatccagctcaagccgctcgaagagcgcggcgtgagcgccgacacggtcatcaaccggttgcgcgggcgcctgcagaacgaacccggcgcgcgcatgttcctggtggcgcagcaggatatccatatcggcgggcgccagagttccggctcgtacgactacacgctgatgtccggcgacctggcgctgctgcgcgaatggatgcccagggtgcagcgggccatggcggcattgcccgaaatcaccgatgtggacgccgatgtcgaggacaaggggcgccagatcgacctggtgatcgaccgcgatgccgccacgcggctgggcgtgagcatggccaccatttcggccgtgctgaacaattcattcagccagcgccaggtttcggtcatctacgggccgctgaaccagtaccacgtggtcatgggcgtggatccgcgcttcgcgcaggatatcgagtcgctcaagcaggtgcatgtgatcgcggccgacggccagcgcgtgccgctggcggctttcgcgcagctgaaggtggccaacgcgccgctgtcggtcagccaccaggggctgttcgtggccgatacgatttcgttcagcctgtcgcccggcgtatcgctggaccaggccaccggcgccatcgacgcggccgtggcccggatcggcctgccgtcggaccagatccaggcgggtttccagggcacggcggccgagctgcagaagacgctggcgcgccagccatggctgatcctggcggcgctggtgacgatgtatatcgtgctgggcattctgtacgaaagcctggtgcacccgctgaccatcctgtccacgctgccgtcggccggcatcggcgcgctgctggccctgatgctgctcggccacgagttcaccctgatcgcgctgatcggcgtgttcctgctgatcggcatcgtcaagaagaacgccatcatgatggtcgacttcgcgctggaggccgagcggcgcgatggcctggacgcgcgcgcggcgatcctgcgcgcctgcctgacgcgtttccgtcccatcatgatgacgaccatggcggccattttcggcgccttgccgctgatgctggccagcgggcctggcgtggagatgcgccgtccgctgggcatcaccatcgtgggcggcctggtgctcagccagatccttaccctgtacaccacgccggtggtgtacctgtacctggaccgcttccgcctgtgggccgcgcgccggcgcgcggcgcggtccgctcctgatcccacccgccca

SEQ ID NO: 15138 - DNA, 801 bp, Bordetella pertussis
atgaccatcccttcctttggcgtgggtaccttccgcctgaccggccagaccgtgatcgactcggtccgcaacgccatcgacctgggctatcgcgccgtcgacacggcgcagatctacggcaatgaaaccgaggtcggccagactatcgccgaaagcggcgtggcgcgttccgaactgttcgtgaccaccaagatctggaccgacaactacgcccgggccaagctgctgcccagcctgcgcgccagcctggaaaaactgcgcaccgactacgtggacctgacgctgatccactggcccgcgccgggcaacggcgtggccttgcccgaacacatggaggcgctggccgaggccaaggcgctgggcctgacgcgccggatcggtatttccaatttcaacatcgcgctgaccaggcaggccatcgcggcggtgggacagggcgagatcgccaccaaccagatcgaactcagcccctatctgcagagcgccaggctgacggctttcctcagggagcagggtattgccgtgacttcctatatgaccctggcctacggcaaggtactgaaggatccggtgctggcgcggatcgcggacaagcatcggtcgaccgtggcgcaggtggcgctggcctgggccctgcaacagggctatgcggtgatcccgtcctcgaccaagcgcgagaacctggcgagcaatctgctggcccgcggcctggcgttggacgccgacgacatggcgcggattgccgcgctggagcgtaacggtcgcgaagtcgatcccgagggcctggctccggcgtgggac

SEQ ID NO: 15139 - DNA, 1248 bp, Bordetella pertussis
atgcctgaaagccgttccgttgcgccgcctgcccgccaggggcgccgccgcctgatcgcagccgcgatcgccgtcctggccgtcctggccctggcctggtggctgtggccgaaggacacgggcgggcagcagggccggcccggcggccgcggcgccatgcgcggcggcccggcctcgatgatgaacatggcggtgccggtgcgcgtgggcgaggcccgcacccaggatatccagatcgtcctgcgggcgctgggcacggcgaccgcctacaacaccgtgacggtgcgcagccgcgtcgatggcgaactggtcaaggtggcgttccaggaaggccagcacgtcaaggccggcgatctgctggcgcaggtcgacccgcggcccttcgaggtggcgctggcgcaggcgcagggccagcagcagcagaacctggcgcaactggaaaacgcgcgccgcgacttgcagcgctaccagacgctctacaagcaggattcgatcgcccgccagcagctcgacacgcaggcggcgctggtgcgccagtacgagggcaccatcaagagcgaccgggcggccgtggacagcgcccggctgcaactggatttctcgcgcatcaccgcgcccatcgctggccggctcggcctgcgccaggtggaccagggcaacctgatttccagcggcgacgccaatggcctggtggtgatcacccagacccagcccatcgcggtggtgttcacgctgcccgaaacccagctgcccgaggtgctggcgcagttgcgcgccgggcggcagctgccggtggaagcctatgaccgcgccgacacgcgccgcatcgccagcggccagctcgagaccgtcgacaaccagatcgacgtggccaccggcacggtcaagctgaaggcgcgtttcgacaacgccgaggaggcgctgtttcccaaccagttcgtcaacgtgcgcctgtatgtcgagacgcgcagcggcatgaccgcgatacccaacgcggcggtgcagcagggttcggccggcgccttcgtgttcctggcccagcccgatgacacggtgtcggtgcggcaggtcaagctgggcgccatcaacggcgactgggtggcggtcaacgagggcctgcagcccggcgacaaggtcgtggtcgaaggcatggaccggctgcgcgccggcgccaggatagagatcgtgaccggcaccacgccggaagcggccgcgccggtcaataccggggcgcccaggcggacgccg

SEQ ID NO: 15140 - DNA, 759 bp, Bordetella pertussis
gtggcaagcgtgattctgtacgaataccctttcaacgaacgtatccgggcctatctgcgtctggagtacctgttcgacaggttgttctttttcgcgcgcgagggcgacgcccggctgcaccagatcgcggtttcctccctgttcgatctgctcgatgccagcgagcgcaccgacatcaagggcgcggtgctgcaggacctggagcgccagcgcatggccctggtggggctgcgcgaccatcccggcgtggcccaggatgcgctggaggccatgctgcgcgacatggagcgcgtggtggcggcgctggcggcgcagggcaagaccggccaggcattgcgcgagaacgaatggctggtcagcctgcgcggcaggctggcggtgccgggcggcgccacgcaggtggacatgccgtcctatcatgcctggcagaacaagcccgagtcggtgcgctgcgccgacctgcaaagctggctggcccccttgctgcccctgcatgaaggcctgtccatggcgttgcggctgctgcgcgaatccgggcggcgcgccgatatcgcggccgagcagggcggctaccagcagatgctggccggcaagatctaccatttgctgcgcgtctgggtcgatcccagcctcggcgtctttcccgagatcagcgccaacaagtacatggtctggatacgcttctcgacccaggacggcgaggtcaagccgcagcaggtgtcgcgcgacgtggcgttccagatgtcgctctgcagctcc

SEQ ID NO: 15141 - DNA, 807 bp, Bordetella pertussis
atgacgcaagccaccccccagcgcatcgccatcgcgggcgccagcggccgcatgggccagatgctgatcgaagccgtcctcgacaccgagggcgtcgaactggccgtagcgctggaccgcgccggctcgccctcgatcggccaggacgcgggcgccgcgttggggcgcccctgcggcgtcaccatcaccgaccagctcgacgccctggcgcaggccgactgcctgatcgacttcacccggcccgaaggcacgctgcagcacctgcaggcctgcctcaggcatgacgtgaagatggtgatcggcaccaccggcttcgacagcagcggccgcgccgaaatcaaggtcgccgcccagaagatcgccatcgtcttcgcccccaacatgagcgtgggcgtcaatgccaccctcaagctgctggacatggccgcgcgcatcctcaactcggggtacgacgtcgagatcttcgaggcgcaccaccgcaacaaggtcgacgcgccctcgggcacggccctgatcatgggcgagacggtggcttcggcctgggacgtcgccctgcccgacgtcgccacgtggacccgccacggcgacaccggggtgcgcaagcccggcaccatcggtttctcggtggtgcgcggcggcgacatcgtcggcgatcacacggtgttcttctgcggcacgggcgaacgcatcgagatctcgcaccgttccagcagccgcgccacgtacgcgcagggcgccgtgcgcgcggcgcgcttcctggcgcgccaggacaacggcctgtacgacatgcaggccgtactgggcctg

SEQ ID NO: 15142 - DNA, 1053 bp, Bordetella pertussis
atgtcaactgttcctgcccgtatcgagcccgtcgcgcccctggcgccccaggcgcaggatttgcgttgtttcaacaccctgggcctggcgtcccacgcaccggcctttgtcgcgctgaccgagccctcgcagctgccggcgctgtcggcgctggcgccgcgctttcgccagctggtggtgctgggcggcggcagcaacgtggtgttgcccgccagcatcgacggcctggtggcgcaggtgcgcctgcctggcgtgcgcctggtggggcagtgcgccgacgcctgggtcgtcgaagccgcggcgggcgagaattggcacggtttcgtcacggcctgcgtcgacaatggctgggacgggctggagaacctggccctgatcccgggcacggtcggggccgcaccggtgcagaacatcggcgcctacggcgtcgagctggccgatcgcttccacagccttacggcctgggacgtcaagggcgggcgctgggtggagatgggcgccgccgaatgccgctttgcctatcgcgacagtttcttcaagcaccaggagccgggcgcctgggtgatcggctcggtgcgattcgcgctgccgcggccctggcagccggtgctggactatcccgacctgcagcggcatgccgcgctggacggcgccgcgccgaccgcccgcgccgtgtatgacgcggtgtgtgcgatccggcgcgccaagctgcccgatcccgccgtggtgggcaatgccggcagctttttcaagaatcccttggtggacgcgggcacgcggcaggcgctgcttggccgtttccccggcctggtttcgtatccgcagcccgatggccgctacaagctggccgccggctggctgatcgatcaatgcgggtggaaggggcgccagctgggcgccgcgggcgtgcacgatcggcaggcgctggtgctggtcaatcgaggcggcgcgcaggcgcgcgacatcatggcgctggcggccgccatccagggcgacgtcgagcggcgctatggagtgaggctcgagcccgagccggtcgtggtgccggcccgc

SEQ ID NO: 15143 - DNA, 558 bp, Bordetella pertussis
ttgttgcgttcctcggtggtattcttgacatgtttccatcccctggacaaggagcactacatggcaaaaccgaccaagaacagcagcgccgcgccgcgtatcaatatcggcatttccgacaaggaccgcgctgccatcaccggcgaactgtccaagctgctggccgactcgtacaccctgtacctgatgacgcacaacttccattggaacgtgaccgggccgctgttcaatacgctgcataacatgttcatggcgcagtacaccgaagaatggaacgcgctggacagcatcgccgagcgtatccgcgcgctgggccattacgcgcccggcacgtatcgggagtacgccaagctgtcgtcgatcgccgagcccgattccgtgcccgacgcgctggagatggtgcgcatgctggtcaagggcaacgaagccgtggccaagacggcgcgggcggccttcgacaaggccgacgcggccaacgaccagcccactgccgatctgctcacgcagcggctggacgtgcacgagaagaacgcctggatgctgcgcagcctgctgcag

SEQ ID NO: 15144 - DNA, 783 bp, Bordetella pertussis
gtgctgcccggcgacacgccgctgcggcccgccgatttcattggcctggcgccgatttccccccggcccgtcgccgccggcgccccgctgataagcgtcataatctgcgcccgcgacgccgcgccttatatcaacaatgcgctgcaatccatacaggcgcaaacctatcctaatattgaaatcattgcgatagatgacggctcgaccgataacacatttcaacatctgagcgccgccgccgctcaaaattcgcgtataaatatcgccaggacgaaaaaccacggcgtatatgcggctcgcaatatggccctgcagcgggcaaaaggcgaattcattacctttctcgatgccgacgacataatgctggccacccgcctgcaggatcaggcggccctgctgcaggcaagcggcgcctgcgccgccgtcagccgcctgctgcgcctgacggccgacggacaactggccgccccgcgcgtgtttcccttcgtccggcacaacccctgctcgctgatgatccggcgcgacgcgctggccgtcatcgggcagttcgaggaaatgcgcttcggcgccgatgaggagtacgagcatcgcatgcaggttcttttgggtttccacagcatcgcccgcagccgcgcggtccagaccgtggccttgcaccggccgcagtcgctgacccagcacggcgcgaccggcctgggctccgaccagggcagacagcggcggatcgcctaccgcgagacctggatgcggcgccacgccagcctggcgccgctacgcacgccc

SEQ ID NO: 15145 - DNA, 1524 bp, Bordetella pertussis
gtgacggcaaatgaattcatcctggcgctggaccagggcacgaccagctcccgcgccatcgtgttcgaccgcgccggcacagtgcgcggcatggggcagcgcgaattccgccagcactacccgcggccgggctgggtcgagcacgatgccggcgaaatctggcaaagccagctcgaggtcgcgcgcgaggcgctgcgcaacgccggcgccagcgccgccgacctcgccgcgctgggcatcaccaaccagcgcgaaaccaccctgatctgggagcgcgccaccggccgcccgctggcccgcgccatcgtctggcaggaccgccgcaccgcggcgatgtgcgaaaaactgctgcacgacggccacggccggatgctgcaggagcgcaccggcctggtcgtcgacgcgtacttttccggcaccaagctggcctggctgctcgatcacgtgccgggcgcgcgcaagatggccgagcgcggcgagctggccttcggcacgatggacacctggctggtctggcagctgaccggcggcgccgtgcacagcaccgacccgagcaacgcctcgcgcaccatgctgttcgacctgcacgcccaggactggtcggacgatatcctggccctcttgaacattccgcgcggcatattgccgcgcatcgcccccagcagcgcgcgcatcggcgaaaccctgcccgagtggctgggcggctcgatacccatcgccggcgtggccggcgaccagcaggccgccacgttcgggcaggcctgcttcacgccgggcatggccaagaacacctacggcaccggttgcttcatgctgatgaacgtgggcgacgcgccggtggcctcgcgccacaacctgctgtccaccgtgggctggagcctgccggcgggcaacgccacgcacgccacctacatggtggaaggcggcgtgttcatggccggcgcagcggtgcaatggctgcgcgacggcctgggcatcatccagcgctcggccgacatcgaggccctggcggccagcgtggccgacacggacgacgtattcatggtgccggccttcgccggcctgggcgcgccgcactgggatccctacgcgcgcggcacgctggtgggcatgacgcgcggcaccacgcgcgcccacatcgcgcgcgccacgctcgaatcgatcgcgctgcaaagcgccgaactgctgtcgtgcatgaatgccgacagcggcatcccgctgtccgagctgcgcgtcgacggcagcgcggcgcgcaacgacctgctgatgcagatgcaggccgacctgctgggcgtgccggtggtgcgcccgcgcgtgcccgagtcgaccgcgctgggcgcggccgggctggcgggcctggcggtcgggttctggtcgagcctggacgagttcggcgcgcagtggcaggccgaacgcactttcgagccggcctggccggccgatgtgcgcgaagcccgcatgcaacgctggcgccaggcggtggagctatcgaagggctggtcgcgccctgccgccggccacgcg

SEQ ID NO: 15146 - DNA, 744 bp, Bordetella pertussis
atggagacggccatggaccaggacaccatcatttcgctgcgcaatgtctgcaagggctatcgctccaagaaaggcatcaggcgcattctcgatgacgtgtcgttcgatttccgcggcggcgagaacctggccatcctgggcggcaacggctcgggaaaatcggtgctgctgcgcatgatctgcggcatggagctgcccgactcgggcacggtgcagcgggcggtcagcatttcgtatccgctggggttcgccggcggcatcagttcgaacatgaccggccgcgacaacgtgcgcttcatcgcgcgcatctacggctgcgatgtcccggacgtggagcgcttcgtctacgacttctctgaactggggcggtcgttcgacctgcctgtggtcacctacgccaacagcatgcgcgcgcggctgtcctacggcatatcgatggcgctgcgctgcgatgtgtacgtggtcgacgagatggccgcggtcggcgacgtgaacttcaagcgcaaatgtctcgaggtgttcgccgagcgctcgcgcggcgccaccatcatcatggcggccaacgcgcccaccacggtgcggcgcttctgcagccacggcgtgatcatgcagcacggcgccatggcgcactacggccccttggacgaaaccatcgcgcgctacacgcagagcgcgcccgcgcccgcgcccgcgccggcggccgaggccgagccggccgtcgacacggtcgacgctgagcaatcc

SEQ ID NO: 15147 - DNA, 1023 bp, Bordetella pertussis
gtgcacaagaaaatcgtggttccgagcgcgacagacatggcaacacgtttcacgcaagacagtttcgtgttcgactgcctgtccatgtactacgttatcgacgacccctgggccgagaactgcctggcggccggggtcaatgccacgaatgtcacgttcggcactgaacagccgtgggatatcgtgttgcgcgatttcgattccggcctggaaaaaatcgagcgcagcccttatctggcattggccaccaaccggcaggaaatcgacgccgcgaataagcagggcaagctcgcagtcattatcggaacgcagggttccgcgatggtcgacctcgaattccatcgcctgcgcaccatgcaccggttgggcatgcgctatttcggactggcatatacgggacccaccatgttcgccgacggatgcggcgagagccggaacgcgggtttgagcttcgccggaatcgagctgatcgacgcctgcaacgatctcggcttgatactggatctgtcccacgtcggacaccgttcacgggaagaagcggtggcgaggtcgcgctttccggtgtacacccactccaattcctatgccctcaatcccaacgaccgcaacacgacggacgagacggcgcgcgccatacgcgccaagggcggaatcatgggtatctgcgggttgcccaagacagtacacccggaaaatgcgacgttgaacgaactgctcgatcatgccgaccactgggtgaaaaccatcgatgccgcccacgttggattcgggctcgatttcgtcgaagcctataaaagcgatagatcgaccatgcccgctgccagccgcctgtggcgcacccggcgtcccgacatattcggcaccgtcgaggaattccatcttcaggattatccgctcggcatcgccagcatcaaacaactgccgaacctgacgcaaggcctgttcgatcggggttatgccgagaaagaggtggccggcatcatcggcggtaactggctgcgccactttacggaggtctacgga

SEQ ID NO: 15148 - DNA, 1926 bp, Bordetella pertussis
atgggcacgatggtcgtcgtcatcctggggagcgccaccctgctgggggcggtcacttacttcggtaagtggaaatacctgtggaccgaatggtttacctcggtcgatcacaagaagatcggcatcatgtacatcatcgtggccctggtgatgctgctgcgcggcttcgccgacgccatcatgatgcgcacgcagcaggccgtcgcctcggccgactcggccggcttcctgccgccgcaccactacgaccagatcttcaccgcccacggcgtcatcatgatcttcttcatggcgatgcctttcatcacgggcctgatgaacatcgtcgtgccgctgcagatcggcgcgcgcgacgtggcctacccgttcctgaactcgctcagcttctggctgttcatggtcggcgtggtgctgctgatgctgtcgctgttcgtgggcgaattcgccgcgaccggctggctggcgtatccgccgctttcggggctggactacagtccgggggtaggggtcgactactatctctgggccttgcagctatcagggctgggcaccacgctgagcggcatcaacttcatcgtcaccatcatgaagatgcgcgcgcccggcatggcgctgatgaagatgccggtgttcacctggacggcgctggtcaccaacatcctgatcgtggccgccttcccggtgctggccgccacgctggccctgctgacgctggaccgctacctggacatgcacttcttcacgaatgacctcggcggcaacgtgatgatgtatgtcaacctgatctggatctggggccaccccgaggtgtacatcctggtcctgccgtgtttcggcgtgttctcggaaatcgtcgccacctattcgaagaagaccctgttcggctacaagtccatggtctacgcgaccgcctcgatcggcgtgctctcgttcctggtctggctgcaccacttcttcaccatgggcgcgggcgccaacgtcaacgcgttcttcggcatcatgaccatgatcatctccatcccgacgggtgcgaaggtgttcaactggctgttcaccatgtaccgcggccgggtggagttctcgctgcccatgctgtggaccatcggtttcatgatcatcttcgtcatcggcggcatgaccggcgtgctgatggccatccccgccgtgtcgttcgtgctgcacaacagcctgttcctggttgcgcacttccacaacaccatcatcggtggcgtggtgttcgggtgcatcgccggcatggtgtactggttccccaaggccttcggcttcaagctgaacgagcgcctgggcaagtactcgttctggtgctggttcgtcggcttcttcctgaccttcacgccgatgtacctgctgggcttcaagggcatgacccgtcgcctgaacacctacgacaaccccgagtggcagccctacctgctggtggcgctggtgggcgcgaccctgatcatgctgggcatcttcttcctgctgcagcaggtgttcgtcagcatccgcgaccgcaaggaaaacatggacgtcacgggcgacccgtggggcggccgcacgctggagtggtccacttcctcgccgccgccgttctacaacttcgcccacgtgccgcacatcgactcgctcgaccagttctgggaagacaaggaaaacggccgcgcctaccagcgcccggccaagtacgaagacgtgcacatgccgcgcaacaccgccgcgggcatctacatcggcgccttcggcctggccatgtccttcggcctgatctggcacatgtggtggctggccatcgtcggcttcctgggcatgatcgtgtccttcgtggtgcgttcgtatgatcgcgacgtcgattactacgtgcccgccaaggaagttgaagagatcgaaaacgcttacttcggaaagttgcagcagaaggctgcc

SEQ ID NO: 15149 - DNA, 912 bp, Bordetella pertussis
gtgaaacacccccaccttacgaccatcgcgcgcacgctcggcgtcggcgcggtcctcctgcttggcggctgcaccctggaagtcctgtctcccaagggagacatcggcgcccaggaaaagacgctcattctcaccgccctcgggctgatgctgatcgtcgtggtgccggtcatcctgatgacgctgtacttcgtctggaaatatcgcgagggcagcgtacacgcgcagcgggaatacgcgcccaagtggtcgcactcgaacgccatcgaggcggtggtctggacggtgccctgcatcatcgtggccatcctggccgtgctgacctggaagtcctcgcacgcgctcgacccctaccgcccgatcgagtcggacgtcaagccggtcaacatcgacgtggtgtcgctggactggaagtggctgttcatctaccccgactacgacatcgccacggtcaacgagatcgttttcccggtcgacgcgccggtgcagttccgcatcacctccgcctcggtgatgaactcgttcttcatcccccagctgggcagccagatctactcgatggccggcatggagaccaagctgcacctgatcgcgcgcgaagccggcagctacgacggcctgtcggccaactacagcggcgccggcttctcgggcatgcgcttcaaggccatcgccacgacggaccagggcttcgaggactggatcgccaggatccgcgccaccaacaacccgctgacgccccaggcctacgccgatctggccaagccgagcgagcgcacgccggtgaccctgtactcgaccgcgcccacgggcatgttcgatttcattatgcataaccagatgagtaagctggccggcgttgacccgttcaactgcacgcccgcgaccaagaatctgatcgctaccgcggag

SEQ ID NO: 15150 - DNA, 693 bp, Bordetella pertussis
atggattacgtatttcccccttcgccgccggcggccgtgccggtggcaggcggcaacgcccgcttcccggtgcgccgcgtctattgcgtgggccgcaactacgccgagcatgccaaggaaatgggcttcaccggccgcgaagatccgttcttcttctgcaagcctgccgacgccatcctgtcggtgggcgatggcgccacgggcgaaatgccgtacccgcccaaaacggccaacctgcactacgaaatggagctggtcgtcgtgctgggcaagggcgggcgcgacctgaccgtcgagcaggccgacgaatgcgtatggggctacgccctgggcctggacatgacacgccgcgacctgcagggcgaggccaagaagcagggccgtccctgggaagtgggcaaggctttcgatctctcggcgccgctcggccccatccatccgcgcagcgccgtcggcacgctggacaaaggcgccatctggctggacgtcaatggcgagcgcaagcaatccagcgacatttcgcagatgatctggaacatccccgaaagcatcgcctatctgtcgggcctgttcgagctgcaaccgggcgacatcattttcaccggcacgccggaaggcgtgggcgcggtggtcaagggagacgtcatcgtcggtggcgtcgagggcctgggcgagctgcgcgtacgcatcgcc

SEQ ID NO: 15151 - DNA, 942 bp, Bordetella pertussis
gtggccgctgtagaacgcctgaccatcgccacgcgcgccagccggcttgccttgtggcaagccgagcatgtgcgcgatctgctgcgcgcgcgctacccggcgtgcagcgtcgagttgctgacgctgaccacgcgcggcgaccagatcctggaccgcaccctgtccaaggtgggcggcaagggcttgttcgtcaaggaactcgaaaccgccttgctcgacggccgcgccgatctcgcggtgcattcgctcaaggacgtgccggtggacctgcacgcgccgttcgagctgagctgcgtgctcgagcgcgccgatccgcgcgatgcgttcgtctccaacgattacggcagcctggccgacctgccgcccggggcggcggtcggcacgtccagcctgcggcgcgagtcgcagatccgcgcccgctatccgcacctggtcgtcaagccgctgcggggcaatctcgatacgcgcctgggcaagctggacaacggcgattacgccgccatcgtgctggccgcggcgggcctggagcgcctgggcctggcggcccgcatccgcgcgctgctggaaccggacgacagcctgcccgcggccgggcagggcgcgctgggcatcgagatcctgcagggccgcgccgatgtgcgcgccatgctggcgccgctgggcgacgccgccaccctggcctgcgtgaccgccgagcgcgcggtctcgcgcatgctgggcggatcgtgccaggtgccgctggcggcctatgcccgtatcgatggcgatgagctcgccttgcgcgcgctggtcgccgcgcccgacggccgccgcatcgtgcgggccgagcgccgcggtccgcgcgaccaggcccaggccatcggcgagtcggccgcgcgcgacttgctggccgacggcgccgacgcaatactggccgaattgctgccaacctcgcccgcgcct

SEQ ID NO: 15152 - DNA, 879 bp, Bordetella pertussis
atgtcgattctgatcaacaaggacaccaaagtcatcacccagggcatcacgggcaagacgggtcagttccatacccgcatgtgccgcgagtacgccaacggcaaggccgccttcgtggccggcgtgaaccccaagaaggccggtgaggatttcgaaggcgtgcccatctacgccaacgtcaaggacgccaaggcggataccggcgctaccgtgtcggtgatctacgtgccgccggcgggcgccgcggccgcgatctgggaggccgtcgaggccgaactggacctggtgatctgcattaccgaaggcattcccgtgcgcgacatgctggaagtgaagaaccgcatgcaggccatgaacagcaagacgctgctgctgggcccgaactgccccggcctgatcacgcccgacgaaatcaagatcgggatcatgcccggccacatccaccgcaagggccgcatcggcatcgtcagccgctccggtacgctgacctacgaagccgtggcgcaagtcaccgagctcggcctgggccagtccagcgccgtgggcatcggcggcgatcccatcaacggcctgaagcacgtcgacgtgctcaagctgttcaatgacgatcccgacaccgacgccgtcatcatgatcggcgagatcggcggtccggacgaagtcaatgccgcgcagtgggccaaggacaacatgaagaagcccgtggtcggcttcatcgccggtgtcaccgcgccggccggcaagcgcatgggccatgctggtgccctgatctcgggcggcgccgacacggccgatgccaagctggaagtgatggaagcgtgcggtatccgtaccacgcgcaacccgtcggaaatgggcaagctgctcaagtccgtgctg

SEQ ID NO: 15153 - DNA, 1158 bp, Bordetella pertussis
gtgaatacttccacgcccaccgacgacgtttcctggattcggcgcgccctggcactggcgcgttcggtcatgtacagcacggcccccaatccgcgcgtgggctgcgtcatcgtgcgcgacgggcaggtgctgggcgagggcgccacgcagccgccaggcggcccgcacgccgaggtgtgcgcgctgcgcgaggccgccgcgcgcggcgcttcgctggccggcgccaccgtgtacgtgacgctggagccatgcagccatttcggccgcacgccgccgtgcgtcgatgccctggtggcggcggcgccggcgcgcgtggtggtcgccatgggcgaccccaatccgcgcgtcaacggccagggcctggcgcggctgcgcgccgccggcatcgcggtgaccgaggacgtgtgccgcgacgaggcgctggaactgaacgcgggcttcgcggcgcgcatgagccgcggcctgccgtgggtctggctgaagctggccacctcgctggacgggcgcagcgccctgcacaacggcgtatcgcagtggatcaccggcgaagccgcgcgcgccgacggccaccattggcgcgcccgcagcggcgtggtgctgaccggcatgggcacggtgctcaaggacgatccgcaattgaatgcgcgcgcggtgcagaccagccatccgccgcgcaaggcggtcatcgatggccgcttcgaaatccccgaggacgcgcgcctgttcgacgacggggcgcaagtgctgattttcacggcccgctccgatgcggccaaggcgcgccgcatggccgaccgcaacgcgcgcgtgatcgaactgccgggcgtgcgtccggaccgcgtcgacctgcccgccgtgatgcgttggctggccagccaggaaatcaacgaagtgcacgtggaagcgggggccggattgtcaggcgcgctgcttgctgaggattgcgtggacgagttgctggtgtatctggcgcccgtcctgctgggcgacgcggcgggcatggtacgactgcccttgctcgaacatctcgatggggcgcgccgcttcgaattcgccgaactggctccggtaggcaccgatgtgcgcctgcgagcccgggtggcgtcgcgctggcgcgcgctgcaagacagcgtgagcgccgcgtcgcgacagcgcgga

SEQ ID NO: 15154 - DNA, 1245 bp, Bordetella pertussis
atgttcaaccgcaacctgaccctcgaccaggtggatcccgacgtctgggccgccatccagaaagaagacgtacgccaggaacagcacatcgagctgatcgcgtccgagaactacgccagccccgccgtgatgcaggcccagggcacgcaactgaccaacaagtatgcggaaggctacccgggcaagcgctactacggcggttgcgagtacgtcgacgtggtcgagcagctggccatcgaccgcctgaagcagattttcggcgccgaggccgccaacgtgcagccgaactccggctcgcaggccaaccagggcgtgtacatggcggtgctcaagccgggcgataccgtgctgggcatgagcctggccgaaggcggtcacctgacgcacggcgcgtcggtcaacgcctcgggcaagctgtacaacttcgtgccctacggcctggacgccgacgaggtgctggactacgcccaggtcgagcggctgaccaaggaacacaagcccaagctgatcgtggccggcgcctccgcgtacgcgctgcacatcgacttcgagcgcatggcgcgcatcgcccacgacaacggcgcgctgttcatggtggacatcgcccactatgccggcctggtggccggcggcgcctatcccaacccggtgccgcacgccgatttcgtcacctccaccacgcacaagtcgctgcgcggcccgcgcggcggcgtcatcatgatgaaggccgagttcgagaaggccgtcaattcggccatcttcccgggcatccagggcggtccgctgatgcacgtcatcgcggccaaggccgtggccttcaaggaagcgctgtcgcccgagttccaggattacgcccagcaggtcgtcaagaacgccaaggtgctggccgatacgctggtcaagcgcggcctgcgcatcgtgtcgggcaggaccgaaagccacgtcatgctggtggacctgcgtcccaagggcattaccggcaaggaagcggaagcggtgctgggccaggcccacatcacggtcaacaagaacgccattcccaacgacccggaaaagcccttcgtgaccagcggcatccgcctgggcactccggccatgaccacccgcggcttcaaggaggccgaggccgagctgaccgccaacctgatcgccgacgtgctggacaatccgcgcgacgaggcgaacatcgccgcggtgcgcgcgcgggtcaatgaactgaccgcccgcctgcccgtctacggcaac

SEQ ID NO: 15155 - DNA, 1551 bp, Bordetella pertussis
gtgaactgggggggtggcgatttccagtttctcaaatccggttcggatgaaccatgcatacaacctattgaatcttcacacctagcgtgccgtaccccgagaaggatgaacgcaatgaccaacaagaccctcactaccgccgccggtgcgccggttgccgacaacaacaacaccatgacggcggggccgcgcggccccgccctgctgcaggacgtctggttcctggagaaactggcccacttcgaccgtgaacgcattcccgagcgcgtggtgcacgccaaaggctcgggcgcctatggcaccttcacggtcacgcatgacatttcccgctacacgcgcgccaggatcttcgccgaagtcggcaagcagacgccgttgttcctgcgcttttcgaccgtggccggcgagcgcggcgcggccgacgccgaacgtgacgtgcgtggcttcgccatcaagttctataccgacgaaggcaactgggacctggtcggcaacaacacgcccgtgttcttcattcgcgatccgctcaagttccccgacttcatccatacccagaagcgcgaccccaagaccaacctgcgcaacgccaccgccgcctgggacttctggtcgctcaacccggaatcgctgcaccaggtcaccatcctgatgagcgatcgcggactgccgcagaactatcgccagcagcacggcttcggctcgcatacctacagcttcgtcaacgacgccggcgagcgtttctacgtcaagttccacttcaagtcgcagcaaggcatcgcctgttatacggacggcgaagccgccgagctggtcggccgcgatcgcgaaagcgcgcagcgcgacctgttccagaacatcgagcagggccagttcccgcgctggacgctcaaggtgcaggtaatgcccgaagccgaggccgccacctatcacatcaacccgttcgacctgaccaaggtgtggccgcatgccgactaccccttgatcgaagtgggcgtgctggaactgaacaagaaccccgagaactatttcgccgaagtcgaacaggccgcgttcacgccggccaatgtggtgccgggcatcggcttttcgcccgacaagatgctgcagggtcgcctgttctcgtacggcgacacccatcgctaccgcctgggcatcaaccaccatcagattcccgtcaatgcgccgcgctgcccgttccacagcttccatcgcgacgggatgggccgggtcgacggcaatggcggcgccacgctgaactacgaacccaacagtttcggcgaatggcgcgaagccaagcacgcagccgaaccgccgctggcgctggacggacaggccgccgaccgctggaaccatcgggtcgacgaggactactactcgcagccgggcgcgctgttccgtctcatgaacgacgaccagaaacagcagctgttcggcaacatcggccgccacatggccggcgtgcccgaggaaatccagcgccgccagctcgagcacttccgccgtgccgacccggcctatgccgcgggcgtggccaaggccctgggcctgaag

SEQ ID NO: 15156 - DNA, 564 bp, Bordetella pertussis
atggcgactttcaaccgccgtccgccatccgccgcccgagccgggcggcggaccgcaaatcccgacgatgagttcgagacactggcccaatcccgggacgacgcggcggcaccgtcgcgcccgggccggactctgaaggcgcgcgcggtcggctatttgtcgcggcgtgaatactcgcgccttgaactggcgcgcaagctgcagccttacgccgaagagggcgatgacatcgaggcggtgctcgatgatctgcagcgcgaagggtggttgtcgaatgcgcgttttgcccaaagcctggcgcatcggcgcgcgccacgccagggcgcttcgcgcatcgtccaggagttgaagcaacagggcgtggccgacgaccaggtggccgagttgcgcgaacaactgcgcgccaccgaatacgcacgcgcgctggccgtctggcagaagcgctttggcgaaaagcccgccgaccgcgccgcgtacgcgcggcaggcccgcttcctggcgggccgtggcttcgcccatgatgttatccgccgcattctgggcggtggcgacgacgaactcgac

SEQ ID NO: 15157 - DNA, 1227 bp, Bordetella pertussis
atgtctcaccccgaagccccaatcactcctgaagtcgaggccgacctggccatcgcacgccgcggctgcgacgaattgctggtggaatccgagtttgcccgcaagctggcccgcagccgcgcgaccggagtgccgctgcgcatcaagctggggctggaccccaccgcgccggacatccacctggggcacacggtggtgctcaacaagatgcgccagttgcaggacctgggccacaacgtcattttcctgatcggcgatttcacctcgacgatcggcgaccccagcggccgcaattcgacccgcccgccgctgacgcgcgagcagatcgagaccaacgccaagacctattacgcccaggccagcctggtgctggacccggcccgcaccgagatccgctacaactcggaatggtgcgatccgctgggcgcgcgcggcatgatccagctggcctcgcgctataccgtggcccgcatgatggagcgcgaggatttcaccaggcgcttcaagggcggcgtgccgatcgcggtgcacgaattcctgtatccgctgctgcagggctatgactcggtcgccctgaaggccgacctggagctgggcggcaccgaccagaagttcaacctgctggtgggccgcgaactgcagaaggaatacggccaggagcagcagtgcatcctgaccatgccgctgctggtgggcaccgacggcgtcgagaaaatgtccaagtccaagggcaactacatcggcatctcggaagcgcccgaatcgatgttcggcaagctgatgtcgatctccgacacgctcatgtggcgctactacgaactgctgtcgttccgttcgctggccgacatcgcggcgctgaaggccgagatcgacggcggccgcaacccgcgcgacgccaaggtcgcgctggcgcaggagatcgtggcgcgctttcactcgccgcaggccgccgaggcggcgctggccgcgttcgaggcgcgctttcgcgacggcgccattcccgaggacatgcccgaggtgaccgtgggcggcgctccccagggtatcctgcgcatcctgcgcgaggccgggctggttgcctccggttccgaggcccagcgcaacgtcgagcagggcggggtgcgcgtcaacggcgaccgggtcgaagacaaatcgttgcaattgtccgccggcacctatgtcgtacaggtgggcaagcgcaagtttgcgcgtgttaagttggtgggg

SEQ ID NO: 15158 - DNA, 1059 bp, Bordetella pertussis
atggacgacaaaaccagcaaggccgccgcggccgagaaagccaaggcgctggccgccgcgctgtcgcagatcgaaaagcagttcggcaagggctcgatcatgcgctatggcgacaacgaggtcgaacacgacatccaggtcgtgtccaccggttcgctggggctggacatcgcgctgggcgtcggcggcctgccgcgcggccgcgtgatcgaggtctacggccccgagtcgtccggcaagaccacgctcacgctgcaggtcatcgccgaaatgcagaagctgggcggcacctgcgccttcgtcgacgccgaacacgcgctggacgtgcaatacgcctccaagctgggggtcaacctgaccgacctgctgatctcccagccggacacgggcgagcaggccctcgagatcaccgacgcgctggtgcgctcgggctcggtcgacctgatcgtcatcgactcggtcgcggcgctggtgcccaaggccgaaatcgaaggcgagatgggcgactccctgccgggcctgcaggcccgcctgatgagccaggcgctgcgcaagctgacggccaccatcaagcgcaccaactgcatggtcatcttcatcaaccagatccgcatgaagatcggcgtgatgttcggcaaccccgaaaccaccaccggcggcaacgcgctcaagttctattcctcggtgcgcctggacatccgccgcatcggcgccatcaagaagggcgacgaggtggtcggcaacgaaacccgcgtcaaggtggtcaagaacaaggtggcgccgccgttcaagcaggccgagttcgacatcatgtatggcagcggcatctcgcgcgaaggcgaaatcatcgacctgggcgtgcaagccaatgtggtcgacaagtccggcgcctggtacagctacagcggcaaccgcatcggccagggcaaggacaatgtgcgcgagtacctgaaagagcacaaggaaatggccatcgagatcgaaaacaaggtgcgcgagaaccagggcatagtcagccgcgccgccacctttccggccagcgaagccgaagacggcgaa

SEQ ID NO: 15159 - DNA, 1413 bp, Bordetella pertussis
atgaatcgtggccccaacagtttggtgcgcagcttcaaacgcaaagttgccgccctgttcgcccctcctgtcgaacctacctcgcgtggcggcgccctgctccgccgcaccctgacagtctccgcgctcggcctgttcgccggcgccgccgcgctgggcatggttcaacagcccgaccgctccgaacttccccccttgcgcctgatcgacagcgtcctgccgctcgaggcgggccagatgcaggtcagcgacgccagcaacgccccctatatcagcgaaacccgcatccgcgccggcgacaccctggccgccgtgctgcagcgcctggacatcgacagcccgcggctgcagaacttcctgacccacgacgccagcgcgcgcagcatctacaagctgtacccgggccgctcggtacaggccgccaccaacgagaacggcgacctggtctggctgcgctacatccacacccccggcaacgaatccggcgggcaggtggtcacgcggctgctgcacgtggcgcccgacggcgccaacggctacaaggccgaggaagtcacccagggcaccgaacaacagacccgcgtcgcggtcggcaccatccgctcctcgctgttcggtgccaccgacgcggcgggcatccccgactcggtcaccatgcagatggccgacatcctcagctccaagatcgacttcctgcgcgacctgcgccagggcgaccagttccgcgtggtgtacgaggtccgcacccacgaaggccgctatgcgggcgccgggcgcgtgcaggcgctggaattcatcaacggcgacaagacctacaacgccgtctggttcagcccggacggcaagagcggctcctactacgacttcgacggaaccagcctgcgcggcgccttcctgcgtaccgccctgaagttcagccgcatcagctcgaccttcggcatgcgcatgcatcccatccacaagacctggaccggccacaagggcgtcgattacgcggcccccacgggcaccccgatccacgccacggccgacggcacggtggagttcgcgggctggcagaacggctacggcaatgtggtcatcatcaagcaccacggcaagtactcgacgctgtacgcccaccagagccgcatcgcctccggcctcaagaaaggccagaaaatcgcccagggcgaactggtcggctacgtcggctcgaccggctgggccaccggcccgcacctgcactacgagttccgcgtcaacaaccagccgatcgacccgctcgcggtcgacctgccggtggcgcgcaagctggaacccgccgaactgcgcgccttcacgcaggcggtgcagccgtacaagcagcagatcaagctgctgaccgagttccagcagaccctgccggaaggctcggccaccgtggccagccgc

SEQ ID NO: 15160 - DNA, 1554 bp, Bordetella pertussis
gtggctgagacgttctggctggcattggcgcccgcctgggccggcggactggtgctgtcgtgggcgctggaggcattgctgcgtccgccggtgcagccgccatggcggcggccggcctggatgctgctgctgcatgccggcgtctggaccctgctgttcgcgctcgagctggccctgtttcgccggccgtacttcggcgcgatcaacgtattggccatcgaggcggtgctggtgctggtcagcgccgccaaggcgcgcgtgctgcgcgagccgttcgtctacagcgatttcgaatacttcaccgatgcgctgcgccatccgcgcctgtacctgccgttcctggggtggccggcggcgctgctgctggcgtgcgggtacggcctggcgttgtgggccggactggcgctggagtcctcggctaccggggcgcgcacggcggcctgggccgcccatgctgcgccggccccgttctggggcgccacgctggcgctggcggctgccggcgcggcgctggctgtgctggccggccaccgcgacgccgggctgacctacgaggcggatcaggacttgcggcgcctgggtctggtggccaccctgtggctgtatggaagggccgagcgccagccttggacgcccgccatgcgatccggtccgttcggcgcggcgcccgcggcggcaggcgccggcccgctgccgcacctggtcagcgtgcagagcgagtcattcttcgacgcgcggcgcgtgttcgggacgctcaagcccgaggtgctggccggcctggatgcgctgcgcgccgaggccctggagcacggccagctcgaggtggcggcctggggcgccaatacggtgcgcaccgaattcgccttcctgaccgggctggccgcgtcggcgctgggcgtgcaccgctacaacccgtaccggcgcctgcgccagccgcagcccagcctggccagccatctgcgccagcgcggctaccgcacggtgtgcgtgcatcccttccacgccagcttctacggccgtgaccgggtcatgccctggctgggcttcgacgagttcgtgcacctggacgccttcgccgacgcgccgcgcgccgggccctatgtggccgacgcggcgctggcgcgctacgtggccgagcggctggccgggcagggcagccagccgttgtacgtgcatgtcatcaccatggagaactatggtccgctgcattgggaaagcgtcgacgcggccgacgccgcggcggtgctggacgggccgcttgcgcctggctgcgccgacctggtggcgtatgcgcggcatctgcgcaatgccgacgccatgttcaccggactggcggcggccatgcgcggcctgtcgcgcccggcaggcctgtgcgtgtatggcgaccatgtgcccatcatggccgaggtgtaccggcgcctgggcgagccggacggccgtaccgattacctgatctggcaggccggcggccagggcagcgccgcacccggcctgcgtcgcgtcgacgagctggcgcaggtgttcctgcggcacatggggttggccccgcccggc

SEQ ID NO: 15161 - DNA, 1674 bp, Bordetella pertussis
atgagcacagcaaccctatcgggccaaagcccgtcggcgcaacggcgccccatgacccgcgaggagcggcgcgtgatcttcgcgtcgtcgctcggcacggttttcgagtggtacgacttctacctctacggttcgctcgcagccatcatcgcgcagcacttcttctccggggtcaatcccaccgcggctttcatcttcgcgctgctggccttcgcggctggcttcgcggtgcgcccgttcggcgccctggtgttcggccgcctgggcgacctggtgggccgcaagtacaccttcctgatcaccatcgtcatcatgggcctgtcgaccttcctggtcggcgtgctgcccagctacgccagcatcggcatcgccgcgcccgccatcctcatcatcctgcgcctgctgcagggcctggcgctcggcggtgaatacggcggcgccgccacctacgtggccgagcacgccccgcatggccgccgcggcttctacaccagctggatccagaccaccgcgacgctgggcctgttcctgtcgctgctggtgatcctgggcgtgcgcaccttcatgggcgaagaagccttcaaggactggggctggcgcattccgttcctgatctcggtggtgctgctcggcatctcggtgtggatccgtctgcagctcaatgagtcgccgacgttcaagcgcatgaaggaagaaggcaagggctcgaaggcccccatcgcggaatcgttcggccaatggcgcaacctgaaggtggtgatcctggcgctgctgggcctgaccgccggccaggccgtggtgtggtacaccggccagttctacgcgctcttcttcctgacgcagtcgctgaagatcgattccaacaccgccaacatcatgatcgcgattgccttgctggtgggcacgccgttcttcgtgctgttcggcgcgctgtccgacaggatcggccgcaagcccatcatcatggcgggctgcctgatcgccgcgctgacctacttccccatcttcaagggcctgacgcactacgccaacccggcgctggaaaaggcccaggccaccgcgccggtcaccgtgatcgccgaccccgccacctgctcgttccagttcaacccggtgggcacggcctcgttcaccagctcctgcgacgtggtcaagtcgttcatggcgcgcaactcggtgaactacgagaaccaggccgccgcggccggctcggtcgccaaggtcatgatcggcaacgacgagttcgcatcgttcgacggcaagggcctggcgcctgccgagttcaagaccaaggccaccgagctggacaaggcgctgaccgcggcgatccgcagccatggctatccggccaaggccgatccggcccagaccaactacttcatggtggtcgtgctgctgacgctgctggtgatctacgtcaccatggtgtacggcccgatcgcggccatgctggtggagatgttccccacccggatccgctacacctcgatgagcctgccctatcacatcggcaacggctggttcggcggcttcctgcctccggtggccttcgcggtggtggcggcgacaggcaacatctacgacggcctgtggtacccgatcatcatcgctgtcatgaccctggtcatcggtacgctgttcgtacgcgaaaccaaggacaacgacatcaacgcc

SEQ ID NO: 15162 - DNA, 390 bp, Bordetella pertussis
atgatcggtaactggaactacggaaccggccgtcgcaaaacctcggtggctcgtgttttcatcaagaagggttcgggcaagatcgtcgtcaacggcaagcctgtcgacgagttcttcgctcgcgaaaccggccgcatgatcgtgcaccagccgctcgaactgaccggccatctcgagtcgttcgacatcaaggtcaacgtgcacggtggcggtgaaaccggccaggccggcgcggtgcgtcacggcatcacgcgcgccctgatcgactacgacgcggcgctcaagcccgcgctgtcgcaagctggtttcgtcacgcgagacgcgcgagaagtcgaacgcaagaaagtcggcttccgcaaggcacgtcggcgcaagcagttcagcaagcgc

SEQ ID NO: 15163 - DNA, 426 bp, Bordetella pertussis
atgaagacctttgtggccaagccgcatgaagtcaagcgtgactggtttgtgatcgacgccaagggcaaggtcctcggtcgtgtggccagcgaagtcgcacaccgtctgcgtggcaagcacaaacccgaattcacgccgcacgttgataccggcgattacatcgtcatcatcaacgctgccgatatcgttgtcacgggcaacaaggcgcaagacaagaagtacttccgccacaccacctaccccggtggcatccgtgaaacgaacttcgagaaaatgcagcagcgttttcccggccgcgctatccagaaggctgtcaagggcatgctgcccaaggggccgctgggctacgccatgatcaagaaactcaaggtgtacgccggtgccgagcacccgcacactgctcagcagcccaagccgctggaattc

SEQ ID NO: 15164 - DNA, 1359 bp, Bordetella pertussis
atgcttgccatgtccctgtacgcccccattgctgcaatcgccacggcccccggccgcgggggcatcggcgtggtgcgcatatccgggcccgatctcgccgaacttgcacaacggctgttcgggcgtccgctgacgccgcgccacgcgcactacctgccgtttcgcgccgccgacggcgaggtgatcgacgaagggctcgccatctacttccgtgctccgcactcctataccggcgaagacgtactggagctgcagggacatggcggccccgccgtgctgcgccgcatcctggcgcgctgcctgcaggcgggccacgacctcggactgcgtccggccgaacccggcgagttcacccgccgcgcctttctcaacgagcgcctcgacctggctcaggccgaggccgtggccgacctcatcgacgcctcctcggaagccgccgcgcgcggcgccatggcgtcgctgtcgggcgagttctcgcagcgcgtcaacgacctgtccgaccgcatcatccacctgcgcatgctggtggaagccaccctggactttcccgaagaagaaatcgacttcctcgagaaataccaggcgcggcccacgctgcaggcgctcacgcacgacctcgacacgctcattgcccaggcgcgccagggcgtgatcctgcgcgaaggcctgcacgtcgtgctggccggcaaacccaatgtgggcaaatccagcctgctcaacgccctggccggcgacgacatcgccatcgtcacgcccatcgcgggcaccacgcgcgacaaggtcgtgcaggagatccacatcgatggcgtaccgctgcacatcgtcgacaccgccggcttgcgcgacaccgacgacgccgtcgaaagcataggcatcgaacgcacctggaaagagatcgagcgcgccgacctcatcctgcacctgcaggacgtcacccagccgcccgatcacctcgacgcgcaaatcgtcaggcgcctgcccgcgcgcacgccggtgctaaacgtcttcaacaaagtcgatctgctcgacgcggcgttccagggccagcccgacagcctggccatctccgcgcgcggcggcatcggcctggacgcattgcgccagcacctgctgcaactggccggctggaaccccggcgccgaatcgccatggctggcgcgcgaacgccatctgcatgcgctgcaacaggccgcgcagcatctcgagatcgccaccgaacacgcccgcgaggacgaccgcgtgctggacctgttcgccgaagagctgcgcctggcgcacgaagccctgaccggcatcaccggcaaattcaccagcgacgacttgctgggcgagatcttttcgagtttctgcatcggcaag

SEQ ID NO: 15165 - DNA, 1056 bp, Bordetella pertussis
atgtccagcaagaagaaaaccaagcccgtcctgcctcccggtcccgtcatggtggatgtggccggcacgacgctgaccaaggacgagaagcgccgcctgcgcaaccccctggtgggcggggtgatcctgttcgcgcgcaatttcaccgatcgccggcaattgtgcgcgctgacgcgggccatccacaaggcgcgcaaggagccgctgctgatcgcggtggaccacgagggcggccgcgtgcagcgctttcgcgacgatggctttaccgcgttgccgcccatgcaggaactgggcaagctgtgggaccgcgatccgctggcggcgatgcggctggcgaccgaggccggctacgtgctggccgccgagctgcgcgcctgcggcgtcgatctcagcttcacgccggtattggacctcgactacggcgtgagcaaggtgatcggcaatcgcgccttccaccatgacgcacgcgtggtcaccatgctgtcgcgcgcgctgacgcagggcctggcgctggcgggcatggcggcctgcggcaagcatttccccggccatgggttcgtgggcgccgattcgcaccacgagatcccggtcgatccgcggccgctcgcgcgcatcctgaaggatgacgcggcgccttacgcctggctgggcgacctggtcatgccggctgtcatgccggcgcatgtgatctatccgaaggtcgatgcccagcccgcgggtttttcgcgccgctgggtcagcgagatcctgcgtgaacggctgggctacgatggcgtggtgttctccgacgatctgaccatggagggcgcgtcggtggcgggcgacatcctggcccgcgccgaggcggccctgggcgccggctgcgacatggtgctggtatgccgcccggacctggccgacgagctgctggaccgcctgcaggtccagcatccggccgcctcggtcgagcgcatccgccggctgttgccgcggttcgccgcgccggactgggacactttgcagaatgacagccgctatcagcatgcccgacgacttcaatctcaaatcgtttctggc

SEQ ID NO: 15166 - DNA, 1386 bp, Bordetella pertussis
gtgaccaacacgtctttttcctccctgcctcttctgcccgccttgctcgacaacctgcaaggcctgggcttcgaacagatgacgccgatccaggcgcaaagcctgccgctcatcctggaaggccgcgacctgatcgcgcaagccaagaccggcagcggcaagaccgccgcattcggcctgggcgtgctgcagaacctggacgtcaaccgcctggcgccgcaggcgctggtgctctgtcccacccgcgaactggccgaccaggtggcccaggagctgcgccggctggcccgcctgattcccaacgtcaaggtgctgacgctgtgcggcggcgccgccgcgcgtcctcaggccgagtcgctggcgcgcggcacgcatctggtggtgggcacgcccggccgcatccaggaccacctggcgcgcggcagcctggacttgtccacgctgaacacgctggtgctggacgaggccgaccgcatggtggacatggggttctatgacgacatcgccgccattgcctcgcattgcccggccaggcggcagaccctgctgttctcggccacctaccccgacaacatccgcaagctgagcgcccgcttcctgcgcaatccggccgaaatcaaggtagaggcccagcacgacgccagccgcatcgagcagctcttcttcgagatcgacgaaggccagaggctggatgccgtggcgacgctgctggcccacttccgcccggcgtccacgctggcgttctgcaacaccaagatccgcagccacgacctggtcgaacgcctgcgcgcccagggcatcagcgcccaggcgctcaacggcgacctggagcagcgcgagcgcgatgaaatcctgatccagttcgccaaccagagctgcgccgtgctggtcgccaccgacgtggccgcccgcgggctggacatccagaacctgggcgcggtcatcaacgtggacgtgaccaaggacaccgaggtccacgtgcaccgcatcggccgcagcggccgcggcgaccagaaagggctggcgctgagcctgtgctcgcccgaggaaatgcgctgggccaacctcatcgagcaataccagggcgccccgctgaaatgggccgacctcggctcgctgcggcccaagtccgaccgccccttgcgcgcgcccatgatcaccctgtgcatccagggcggcaagaaggacaagctgcgtcccggcgacctgctgggcgcgctgaccggcgacggcgggctggcgttcgagcaggtcggcaagatcaacatcaccgaattcaacgcctatgtggcgctggaccgccaggtcgccaagcaggccttcgcgcgcctgtccaacagcaatatcaagggacggcggttccgcatgcgcttcctggaagagttc

SEQ ID NO: 15167 - DNA, 570 bp, Bordetella pertussis
atgccgataaacgtacccattttcctgacctggctgcggatcgccatgattccgctggtggtcggcctgttctacctgcccgagagctggatgtccgtgcccatgcgcgacaccttcgcggcctgggcgttcattatcgcggccctgaccgactggttcgacggatggctggcgcggcgctggaaccagacctcggccttcggcgcgttcctggacccggtggccgacaagctgatggtctgcgcggcgctgatcgtgctgctggacctgagccgcgtcgatgccttcatttcgctgatcatcatcggccgggaaatcaccatttcggcgttgcgcgaatggatggccaagatcggcgccagcgcgagcgtggcggtgcatcggctgggcaagttcaagacggcggcgcagatggtggcgataccgtgcctgctgtatgaccagccgctgttcggcctgagcagccgcctgatcggcgacgtgctgatcgtggtggcggcggtgctgaccgtctggtcgatgctgtattacctgcagcgggcctggcccgccatccgcgaaaagtcgcag

SEQ ID NO: 15168 - DNA, 1320 bp, Bordetella pertussis
atgagcaatcgcgaaaccgaaatccgcaacttgcagaaagactgggccgagaacacccgctggcagggcatcaagcgcgcctacagcgccgaggatgtgatccgcctgcgcggctcggtggccgtcgagcattcgctggcgcgccgcggcgcgacccgcttgtgggattcgttgcatagcgagcccttcgtcaattcgctgggcgcgttgaccggcaaccaggccatgcagcaggtcaaggccggcctgaaggccatctacctgtccggctggcaggtggccggcgacgccaacctggccggcgagatgtacccggaccagtcgctgtaccccgccaactcggtgccgcaggtggtgcgccggatcaacaacgccctggcgcgttgcgaccagatccagtggatggaaggcaagaacccgggcgaccaggattacatcgattactacgcgcccatcgtggccgatgccgaggccggtttcggcggcgtgctcaacgccttcgaactgatgaaggccatgatcgaggcgggcgcggctggcgtgcacttcgaagaccagctggcttcggtgaagaagtgcggccacatgggcggcaaggtgctggtgccgacccgcgaggctgtgtccaagctggtctcggcccgcctggtcgccgacgtgatgggcacgcccaccatcctgctggcccgcaccgacgccgacgcggccgacctggtgaccagcgacgtggatgagaacgatcgcccgttcatcaccggcgagcgcacggtggaaggcttcttccgcacccgcgccggcctggaccaggcgatttcgcgcggcctggcctacgcgccgtatgccgacctgatctggtgcgaaacctccacgcccaacctggagtatgcgcgcaagttcgccgaggccgtccatcgccagttcccgggcaagctgctggcgtacaactgctcgccctcgttcaactggaagaagaacctggacgacggcacgatcgccaagttccagcgcgaactcggtgcgatgggctacaagttccagttcatcacgctggccggcttccacgcgctgaactacggcatgttcgaattggcgcacggctatgcgcgccgccagatgagcgctttcgtggaattgcagcagaaggagttcgccgccgccgaactgggctttaccgcggtcaagcaccagcgcgaagtcggcaccggctacttcgacgccgtgacccagaccatcgaaggcggccaatcctcgaccacggccctgaccggctcgaccgaggaagtgcagttcgagcagggcgggcaggccgtcaaggcggcg

SEQ ID NO: 15169 - DNA, 1292 bp, Bordetella pertussis
caacatcccaacgtggtactgatcctggccgacaaccttggctggggcgagctggggtgctatggcggcggcgccatccgcggggcgcccacgccgcgtatcgatgcgctggccgcgcagggcacgcagtttctcaacttcaacgtggaaagcgattgcgtgcccacgcgttcggcgctcatgaccgggcgccacccggtgcgcaccggcgccatgcagtcggtgccggccggcctgccgcagggccttgttccctgggagcgcaccttggcgcaggccttctccgagcaaggctacgccaccgccatgtacggcaaatggcacctgggcgacaaggagggccgttaccccaaggaccgcggcttcgacgagtggtacgggatcccgcgcaccaccaacgaaagcatgttcatggaggcggtgggcttcgaccccgacgtggtggaagtgccgtacgtcatggagggccgcaagggcagtccggccgaaaggcgcgaacgctacgacctggaaatgcgccgccgcatcgacgaggtgctcacgcagcgcagctgcgagttcatcggccgccacgcgggcaaggccccgttcttcctctacgtgccgctgacgcagctgcatttccccaccattccgcaccgcgaattcgaaggccgcaccggcaagggcgattttgccgactccctggtggagatggacgcgcgcatcgggcagatcctggatgcggtcgaccagcacggcatcgccgacgataccgtcttcatcttcgccagcgacaacggaccggagtaccgccggccctggcgcggcagcgccggcatgtggaccggcacctatcacacggcgatggaaggggcgctgcgggtcccgctcatcgtgcgctggcctggcaaggtgccggccggcagaccaacgagatcgtgcacgtggtggacctgttccccacgctggccggcatcgccggcctgcaggtgtcgcaagaccggcccatcgacggcgtcgaccagtccgccttcctgctgggccgcgaggagaaatcggcgcgcgagggctttgtctactacatcaagaacgagctgcgcgcggccaaatggcgcgactggaaaatgcacgtcgtctgggaggtggagcccaatgtcgggcccaaccacctggagacgccttatgtgttcaacctgatgcaggaccccaaggaagaaaccgacgtcaacaccatgcaaggctgggtgcgcggacccatacgccgcatggtcaatgcgttccaggcctcgctcaagtcctatccgccgatt

SEQ ID NO: 15170 - DNA, 1479 bp, Bordetella pertussis
atggccggcgcatgtttcgccacttcttttatggagatggcgcagtccgccgagcggccgcgcccctatgcctttatgacagccaacgctacgcgtcccgtgcgcacccgcttcgcgccctcgcccaccggtttcctgcacctgggcggcgcccgcaccgccctgttctcctgggccttcgcgcgccatcaccagggcgtattcgtgctgcgcatcgaagacaccgacgtcgaacgctccacgcccgaggccgtgcaggccatcctcgacagcatggactggctgggcatgcagcccgacgagggcccgttctaccagatgaagcgcatggaccgctacgccgaggtgctggccggcatgctcgaggccggcacggcctaccattgctattgctcgcccgaggaggtggacgccatgcgcgaagccgcccgcgccaagggcctgaagccgcgctacgacggcacctggcgccccgagcccggcaagaccctgccgccggtgccggccgaccgcaagcccgtgatccgcttccgcaacccgatcgacggcgccaccagctggaacgacatggtcaagggcccgatcagcttcgacaacggcgagctcgacgacctgatcatcgcgcgcccggacggcacgcccacctacaatttctgcgtggtggtcgacgactgggacatgggcatcacccatgtgctgcgcggcgacgaccacgtcaacaacacgccgcgccagatcaacatcctgcgcgcgctgggcgccaccctgcccgaatacggccatgtcccgatgattctcgggccggacggcgaaaagctgtccaagcggcacggcgcggtcaatgtcatggaatacgacgcccagggctacctgcccgaagccatggtcaactacctggcccggctgggctggagccacggcgacgatgaattgttcacgcgcgaacagctggtcgagtggttcgacacccgccacctgtcgaagtcggcctcgcaatgggacccgaagaagctgaactgggtcaacgcccattacatcaagggcatggacgacgccgagctggccggccgcgtggcgccgcgcgtcgaacgccgcggcggcaagccgcaggccgccgacctgccggccatcatggggctgctgaaagaccgcgccgaaaccctggagcaactggccgaggacgccatgctgttctgcggcgaataccagcccgcccccgccgagctggcggcccagcacctgaccgaaacggcgcgcgccgccctggccgatttcgccgcccgcgcacgcgacaccgaatggaaccgcgccgccatctccgccctgatcaaggccgtgctggccgaccgcggcctgaagatgccgcaactgggcattccgctgcgcgtcgcggtgacgggccgggcccagaccccggcggtcgacgccgtgctggaactgctgggcaaggaaaccgtgctggcgcgcctgcaggcgctc

SEQ ID NO: 15171 - DNA, 348 bp, Bordetella pertussis
atgaatgcagaacaagccgtttcctccctcggcgccctggcccatgcgcaacgcctgagcgtgtttcgcgcccttgtcgtcgcgggcccggcggggctcacgcccagcgtcatggccgacgggctcggcatcgcccgcaatgcgctgtcctttcacctcaaggagctggcgcacgccggcctggtcagcgtcgagcaacagggccgcaatctgatctaccgcgccgatttcttccggatgaatgcattgctcggctatctcaccaaacactgctgccagggcgcgacctgcgaggtgtccgattcccgaaagaacacagccggttgcgacgccggcgccaggcgggcc

SEQ ID NO: 15172 - DNA, 2925 bp, Bordetella pertussis
atgcagactacgatcgcctctgtgacccggcccacggccgtgccgcccgcccaatccgagacgtccaccgatcccaacagcggccaatgggccagctacaacatcatccgccgcaatggctcggtggtggggttcgaacccagcaagatcgccatcgccatgaccaaggcgttcctggccgtcaacggcggccaaggcgcggcgtcggcgcgcgtgcgcgagctggtcgaacagctgaccgcgcaggcggtcagcgcgctggtgcgcaaccgccccgccggcggcaccttccatatcgaagacgtgcaggaccaggttgaactggccctgatgcgctcgggcgagcacgacgtggcccgcgcctacgtgctgtaccgcgagcgccgcgcccaggagcgcgccgccgccgccgaagtgctcgagaagagctcgccggccgccgcccaggaaccgaccctcagcgtggtcgacaacggcgtgcgccgtccgctcgacctggctgcgctgcgcgccaccatcgaagccgccggcgaaggcctgacgcaatacacggacaccgaagccatcctgaaggaaacggtcaagaacctctacgacggcgttccggtcgacgaagtgttcaagtccgccatcctggccgcgcgcgcgctggtcgaaaaggatccggcctacagccaggtcaccgcccgcctgctgctgcacacgatccgcaaggaagtgctgggcgaggaagtgtcgcaggccgacatggctacccgctacgcggaatacttccctgccttcatccagcgcggcatcgaaggcggcctgctcgacgccaagctggccgaatacgacctggagcgcgtggccaaggcgctggacggccgccgcgacctgcaattcggctacctgggcctgcagaccctgtacgaccgctacttcctgcacgtgcgcggcacgcgcatcgagctgccgcaggtgttcttcatgcgcgtggccatgggcctggcgctgcgcgaagccgaccgcgaagcgcgcgccatcgagttctatgaaatcctgtcgtcgttcgacttcatgagctcgaccccgacgctgttcaactccggcaccctgcactcgcagctgtcgtcgtgctacctgaccacggtgtcggacgacctcgaaggcatctacgacgccatcaaggaaaacgccctgctggccaagtacgccggcggcctgggcaacgactggacgcccgtgcgcgcgctgcgcagccacatcaagggcaccaacggcgaaagccagggcgtggtgccgttcctcaaggtggtcaacgacaccgccgtcgcggtcaaccagggcggcaagcgcaagggcgcggtgtgcacctacctggaaacgtggcacctggacatcgaggagttcctcgaactgcgcaagaacaccggcgacgagcgccgccgcacccacgacatgaacacggcgaactggattcccgacctgttcatgaagcgcgtgatggaaaacggcgaatggacgctgttctcgccctccgactgccccgacctgcacgacaagtacggcaaggccttcgaacaggcctatgcgggctacgaagccaaggtcgccagcggcgaactgaagctgttcaagaagatgccggctgtctcgctgtggcgcaagatgctgtcgatgctgttcgaaaccggccatccgtggatcaccttcaaggatccgtgcaacatccgctcgccgcagcagcacgtgggcgtggtgcacagctcgaacctgtgcaccgagatcacgctgaacaccaacgccaccgaaatcgcggtgtgcaacctgggttcggtgaacctggtggcgcacatgaagcccaacgccaacggcggctacgagctcaaccacgacaagctcaagcgcaccatcggcgtggccatgcgcatgctcgacaacgtgatcgacatcaactactacgcggtcgacaaggcgcgcaactccaacgagcgccatcgcccggtgggcatgggcatcatgggcttccaggattgcctgcacgtgatgcgcgtgccgtatgcgtcgcaggacgccatcgacttcgcggatcgttcgatggaagcggtgtgctatcacgcgtattgggcgtcgagcgaactcgcgcaagagcgcggccgctaccagtcgtacgaaggttcgctgtggtcgcgcggcatcctgccgcaagacacgcttgcgatgctgcgcgaagagcgcggcggcaatgtcgacgtcgatgattcgagctcgctggactgggatacgttgcgttcacgcatcaaagaacacggcatgcgcaattcgaactgcatcgcaatcgccccaactgcgacgatttccaatatcattggtgcatctgcgtgcatcgaacccactttccagaacttgtacgtcaaatcgaatctctccggcgagttcacggtcgttaacgattatctcgtgcgtgacctgaagaaactcggtctctgggacgaagtcatggtcgccgacctcaagtacttcgacggcagcctgtcccgtatcgatcgcgtaccttccgaacttcgcaagctctacgccaccgcgttcgaagtcgaaccgagctggctggtggagtgcgcctcgcgccgccagaagtggatcgatcaggcccaatcgctcaacatctacatgtcgggcgcatcgggcaagaagctggacgacacctacaagctggcgtggcagcgtggcctgaagaccacttactacctgcgcaccctcggcgccaccagcgccgagaagtcgacgggccgcggcggcgaactgaacgccgtcagcgccggcgaccacggcgcgggctcggccgtatccgcagcacccgttttgccggaacccgaaatcgtcggggcggtttgcaccatgcggccgggagaccccggcttcgaagagtgcgaagcctgccaa

SEQ ID NO: 15173 - DNA, 1194 bp, Bordetella pertussis
atgcttaattgggaagaagagaacatcgccaccaaacccgccacctcgcccgcgcccgcgggcgggcgggaagccgcgcccgccgtgcgggccgcgaccggcgtgttcggcgacgcagccctgcctacgcccaccgcgccccagcacgcagccagcctgggggcctcggatgccaccgccggccgcgtgaaggtggccgacaagcgcatcatcaacggcgagaccgacgtcaaccagttggtgccgttcaagtacaagtgggcctgggaaaaatacctggccacctgcgccaaccactggatgccgcaggaaatcaacatgtcgcgcgacatcgccctctggaagaaccccaacgggctcaccgaggacgaacgccgtatcgtcaagcgcaacctgggcttcttcgtgacggccgactcgctggccgccaacaatatcgtgctgggcacctaccgccacatcacggcgcccgagtgtcgccagttcctgctgcgccaggcattcgaagaagccatccatacccacgcttatcagtacatcgtcgaaagcctggacctggacgaggccgagatcttcaacgcctataacgaagtcccgtccatccgcgccaaggatgagttcctgattccgttcatcgacgcgatcgcggacccgaacttccataccggcacgcccgaagccgatcagaaactgcttaagtcgctgatcgtctttgcatgcctgatggaaggcctgttcttctatgtcgggtttacgcagatcctggcgctgggccgccagaacaagatgaccggcgccgccgaacagtacatgtacatcctgcgcgatgaatccatgcactgcaatttcggcatcgacctgatcaacaccatcaagctggagaatccgcatttgtggacgccggagttccgcgaagaaatccgcgaactcttccgcaaagcggtcgaactcgaatacgcttacgccgaagacacgatgccgcgcggcgtgctgggcctgaacgcccccatgttcaagtcctacttgcgcttcatcgccaatcgccgttgccagcagatcggtatcgaaccgctgttcccccaggaagaaaaccccttcccgtggatggcggaaatgatcgaccttaagaaggaacgcaacttttttgaaactcgcgtgatcgaataccagaccggcggtacgttgagctgggaa

SEQ ID NO: 15174 - DNA, 1461 bp, Bordetella pertussis
gtgcgcggcatgtatttcgatctacgcagtttcgaattcgtttccgatgcccgcggcgggcaggccgacgcggtggtcggcagcgatcgcgtgctgacatggcaggcgttgcgggaagaggccggccagtgggcggcgcgggcgcgcgcccacggtatcgggccggacgtgccggtggtgatccacggccacaaggaggcggccttcttcgtcgccatggcgggggccttgctggccggcgcgccgttcgtgcccgtcgataccatctacccgcccgagcgcgtgcgccgcatcgtggagatcgtgcgcgcggccgcggtgtacgacacgcaggcggatgtcttccggcccggcgcggccgagcccgccgcgctggccgaacggggcctggcctacgtcatgttcacctcgggcagcacgggcgatcccaagggcgtgcagatcgggcgcgagagcgtggccttgctgggcgattggctgcgcgatggcctcgcgctgggcgaggcgccggtattcatgaaccaggcgcctttcagtttcgatctgtccatgtacgaggtgttcggcactctggccgcgggcggcacctgcgtactgaatgcgcgcgagcagatcgccgcgccccagcagtggctggggcgcctggccggatccggcgtgacggtctgggtgtcgacgccatcgttcgcccatcagcagctggtcaaccgcgatttctcgccgcagcagctgcgggcgctgcgcacattcctgttctgcggcgagccgctgcccgtggcgctggcgcgcaagctgcgccagcgcttccccgaggcggcgattctcaacacgtacggtccgaccgaggccacggtggcgaccaccgcgctggtcgtcgacgatgcggtgctggccgaacacgaccccctgccggtcggctacgccaagcccgccagcctgctgtacgtcgccgacgatgaaatctgcatcgtcggcgattacgtgatgcgcggctatctcaatcgccccgacctcaaccaggccaagctgttcgtgcatcatgacggacgccgcggctttcgtacgggcgacctgggacggatgcgcgaggatgggctgctgttctgccgcggccgcatggacgaccagatcaagctcaacggctatcgcatcgagctggcggaaatcgacgcggccctgcatgccctgccgggcgtggcgggcggcgcctgcgccgtgctgcgccggcccgacggcaccgcggtgcgggtgatcgggttcgtggcgcaacgtacgatggaacaggccagcttccagttgccggcggcgctgcagcaatggaaagcgcaactgacagggcggctgccttcctatatggtgccgtccgaactggtggcctgtccggatttgcccgtatcgaacaaccacaagatagaccgcaagaagctgctggaaatctacgcagcgattccggcggcggcg

SEQ ID NO: 15175 - DNA, 2931 bp, Bordetella pertussis
atgtcgctattactagtactcgccctgccgtttctcggcagtctgtgtgccgctttgctgccggccaatgcccgcaatgcggaagcctggctggctggcctgatcgccctggcctgcaccttgctggtggccagcctctatccccagatcgccgccggcggcgtgatccgcgccgacctgccgtgggcgccggcgctggggctgcagttcaccctgcgcatggacggctatgcctggctgttcgcgctgatcgtctcgggcatgggcgcgctggtcgtgctgtatgcgcgctactacatgtcgccggaagacccggtgccgcgctttttctcgttcttccaggcgttcatggccgccatgctgggcgtggtgatgtccggcaacctgatccagctggtcatgttctgggaaatgaccagcctggcctcgttcatgctgatcgcctattggcaccaccggctcgacgcccggcgcggcgcgcgcatggccctgacggtcaccggcgccggcggcctgagcctgctggccggcgtgctgatgctcggccacatcgtcggcagctacgacatggaccaggtgctggccgcgggcgatatcgtgcgcgccgacccctggtatccggcggtgctggtcctgatcgcgctgggcgcgctgaccaagagcgcccagttcccgttccagttctggctgcccaacgccatggccgcgcccacgccggtgtcggcctatctgcattcggccaccatggtcaaggcgggcgttttcctgctggcgcgcttctggcccatgctggcgggtaccgacgaatggttctggatcatcggcggcgccggcctgtgctcgctggtgctgggcgcctacgcggcgattttccagcaggacatgaaaggggtgctggcctattcgaccatcagccacctggggctgatcacgctcatgctgggcttgaacagctcgctcggcctggtggcggcgatcttccacatggtcaaccacgccaccttcaaggcctcgctcttcatggccgcgggcatcgtcgaccatgaaaccggtacgcgcgacgtcgggcgcctgagcggcctgtacggggccatgcccatcacggccacgctggccatggtggcggccgcctcgatggccggggtgccgctgctcaatggcttcatctccaaggagatgttcttcgccgagaccaccttcgtcagcggcgacgtgctggtgcggtggggcctgccgctgatggcgacgctggccggcgcgttcagcgtgacctattcgctgcgctttatcctgcaggtgttcttcggcccgccggccgaagacctgccgcgcgcgccgcacgagccgccgcgctggatgctgctgcccagcgccttgctggtcatggtgtgcctggtggtgggcgtgctgcccggcgtgacgctggggccgatcctgcacctggccgccagcagcatcctgggcgagcacatgccgcagtacagcctgtcggtgtggcatggcttcaacctgccgctggccatgagcttcgtcgcgctgactgccggcgtgctgctgtacctggcgctgcgggcgcgccagcgcgcccatccggggctggtgccgttcatctatcgcttcgacggccggcgtaccttcgagtacctgctcgatgcctccagcgtggcggccgcctggctgctgcgctacctggcgtcctcgcgcatgcaggtgcagatgctggtcatcgtgctgggcaccctgtgggtggcctggctgccgctgcgcgcgggcggctggctggcgggccaggcgcgcctgacgccggccgaccccgcgttcgcgatcctgtgggtggtcggggcggcctgcgcgctgggcgcggcctaccaggccaaataccaccggctcgcatcgctgacgctgtccggcggcgcggggctgatcacctgcctgaccttcgtctggttctcggcgcccgacctggcgctgacccagctggccgtagaggtggtgacggtggtgctgctgctgctgggcctgcgctggctgccgcggcgcattcagaccggcggcgacgaagaccgtcccgacctgcgcgcgcgggtgcgccgcctgcgcgacctggggctggcgggcgtggccggcgcctgcatggccgcgctggcctacgcggtgctgacgcgtccggtgggcgacacgatctccagcttctttaccgagcgcgcgctgcccgatgggggcgggaccaacgtggtcaacgtgatcctggtcgatttccgcggcttcgataccctgggcgaaatcaccgtgctcggcatcgtggcattgacggtctacgcgctgctgcgccgcttccgtccggcgcccgaaagcgtcgagctgccgcatcagcaacgcgagcaggacggcatgccgacggtcgacgagaccggcgagcggccggcgccggacaccaagtcgccgttgccggccgggccgatgatgattccggccgtgctggtgcggctgctgctgccggtggcggtgctggtgtcggtctacctgctgctgcgcggccacaacctgcccggcggcggctttgtcggcggcctggtcatggccaccgcgatcatcctgcagtacatggtcggcggcgtgtactgggtcgagtcgcgcagccgcctcaatccgcagcactgggtcggcctgggcctgctggccgccggcggcgccgcggtctcggcctggctggcgctgcggccgttcctgtcggcgctggcctgggacgtggcgctgcccgtcgtcggccatgtgcatctatccagcgtgctgctgttcgacctcggcgtctacatgctggtggtcggcgccacggtgctggtgctggtggcgctggcccaccaatcgttgcgcgcgcagcgccaggcggccgtcgaggcccaggcggtcgcgcaaaccgggagtcctgcc

SEQ ID NO: 15176 - DNA, 1344 bp, Bordetella pertussis
atgtttgaaaagatcctgatcgccaatcgcggcgagatcgccctgcgcatccagcgcgcctgccgcgagctgggcatcaaaaccgtcgtcgtgcactccgaggccgaccgcaccgccaagtatgtgcgcctggccgacgagtcggtctgcatcggcccggcgccgtcgcgcgagagctacctcaacatgccggccctgatctcggcggccgaggtgaccgacgccgaggcgatccacccgggctacggctttctggccgagaacgccgattttgccgagcgcgtcgaaaagagcggcttcgtcttcatcggcccgcgtccggaaaccatccgccagatgggcgacaaggtcagcgccaagcgcgccatgatcgaagccggcgtgccggtcgtgccggggtcggagggcgccttgccggacgatccgcaggagatcctgcgcatcgcgcgcgaagtgggctatccggtcatcatcaaggcttccggcggcggcggcgggcgcggcatgcgcgtggtgtacaccgaagctgcgctgctgaacgcggtcaacatgacgcgctcggaagccggcgcggcgttcaacaatcccgaagtctatctggagaagttcctggagaatccgcgccacgtggagatccaggtgctggccgacggcggccgcaacgccgtgtggctgggcgagcgcgactgctcgatgcagcgccgccaccagaaagtcatcgaagaggcgccggcgcccggcattccgcgccggctgatcgaacgcatcggcgatcgctgcgccgacgcgtgccgcaagatgggctaccgcggcgcgggcacgttcgagttcctgtacgagaacggcgagttctatttcatcgaaatgaacacccgtatccaggtcgagcacccggtcaccgaactgatcaccggcgtggacgtggtccagcagcagatcctgatcgccgccggcgagaagttcacgctgcgccagcgcgacatccagttcaagggccatgccctggaatgccggatcaacgccgaggatccgttccgtttcgtgcccagcccgggccgcatcaccaactggcatgtgccgggcggccccggcgtgcgcatcgattcgcacgccttcaacggctacttcgttccgcccaactacgattcgatgatcgccaaggtcatcacctatggcgacacgcgcgaacaggcgctggcgcgcatgcgcatcgccctgtccgagatggtggtcgagggcatttccaccaacatcccgctgcatcgcgaactgctgcaggatgcgcgcttcatcgagggcggcaccagcatccattatctggagcacaaactggcgcagcggccc

SEQ ID NO: 15177 - DNA, 447 bp, Bordetella pertussis
atggacctccgaaaactcaaaaccctgatcgacctcgtggctgaatcgggtatcgccgagcttgaaatcaccgaaggcgaaggcaaggttcgcatcgtcaaattctcgcaagccctgcagccggttgcctatcacatgcccgaggccgtcgccccggcggccgctcctgcggcggctgccgcgcccgccgccgaggcggcgcccgcggcgccgcagggccatgtggtcaaggcgcccatggtcggcaccttctaccgcgcgcccaatcccggcgccgcgcctttcgtcgatgtcgggcagtcggtcaaggaaggcgacccgctgtgcatcatcgaggcgatgaagctgctcaacgagatcgaagccgacaaggctggcgtgatcaaagaaatcctggtcgagaacggtgagccggtcgagtacggccagccgctgttcattattggc

SEQ ID NO: 15178 - DNA, 861 bp, Bordetella pertussis
atgaccctgccggcctctccgccccgctatgccgtcatcggcaatccgatcgcgcacagccgctcgccgcagatccacgccatgttctcggcccagaccggccgcccgctgcgctacgagcggctgctggcgcccgtggacggcttcctgcccaccgtgcaggccttccgcgagagcggcgggctgggcctgaacgtgaccgtgcccttcaagctggaagcctacgcgctggccgaggcgcgcctgtccgagcgggcgcggctggccggcgctgtcaataccttgtcgtggcgcgacggcgcctggcacggctgcaataccgacggcgtcgggctggtcaacgacctgctgcgcctgggcgtggcgctggccggcgcgcgggtgctgctggtgggcgccggcggcgccgcgcgcggcgtactgcagccgctggccgcggccggctgcgcccgcatccatatcgtcaaccgtaccgccgcgcgcgccgccgagctggcggccgcctggcgcgccgcggcgccgcgcaccggcacgcaggtcagcgccggcgccctggcccaggccgccgaacccggcggctgggacgtggccatcaacgccacggccagcggcctgcagggcgcggcgccggacctgcccggcggcctgtacgcgcccgacgccctggcctacgacatgatgtacggcgcgcggcccaccgccttcatgcgccaggccgaggccgacggcgcggcgcgctgcgccgacggcctgggcatgctggtcggccaggccgccgagagcttccatatctggcacggcgtgcggcccgaccccgggccggtgctgctggccctgcgcaccgaactgctggccgcgggc

SEQ ID NO: 15179 - DNA, 819 bp, Bordetella pertussis
atgatgcagcactactatgagcgcgacggcgtgcgcttgagctattacctggacgactataccgacccctggacgcaggcacccaccttgctgctgctgctgcacggcgccatggccaatgcccagcgcttctactcctgggtgcccggcctgagccgcgattaccgcgtggtgcgcgccgacctgcgcgggcatgggctgtccgacgtgccgccggcggacaagcccttggacctgcaggtgctgaccgaggacatcctggccttgctcgatcacctgggctgcgagcgcgtgcacctggccggcaattcggccggcggctacgtgggccagcatctggccatgcagcacccgcaacgcatcgagaccctggcgctgttcggttcggcgccaggcctgcgcaacagccaggcttcgacctggctcgaacgagtggccgaaaagggcttgcggcaattcctggccgacaccatcgacgatcgcttccctccggagctggtcggcacgccgcgctgcgagcagttcctcgatgcgctgtccgatcacgacatggcctatatcggcaggttcgtcggctacatggcgcaacaggagtggggcgatcaattgcaccgcatcacctgcccgacgctggtggtgattccgggggccggccgcatcggcgccatggacgcctaccagcccatgcgcgaccacctcaagcgggccgagatcctggtctacgaaggcgagcggcacagcatctgcgagtacctgccgcaacgctgcgtggcggacctgcgcagcttcctggcccgccacggcggaccggcctggcct

SEQ ID NO: 15180 - DNA, 1350 bp, Bordetella pertussis
atggcatttgatttcgatttgtacgtcatcggcgccggctccggcggcgtgcgcgcggcgcgcttcgcggccggctacggggcccgcgtggcggtggcggaaagccgctacctgggcggcacctgcgtcaacgtgggctgcgtgcccaagaagctgctggtctacggcgcgcatttccacgaagacttcgagcaggcggccggcttcggctggaacccgggccgcccggagttcgactggcccacgctgatcgccaacaagaaccgcgaaatcgaacgcctgaacggcatctaccgcaacctgctggtcaacagcggcgtcgcgctgcacgaaggccacgcccgcatcgtcgacccgcacaccgtcgaaatcaacgggcagcgccacagcgcgcaacacatcctggtggccaccggcggctggccgttcgtgcccgacatcccgggcaaggaacacgccatcacgtccaacgacgccttcttcctgcccgagctgccgcgccgggtgctggtggtgggcggcggctacatcgcggtggaattcgcctccattttcgatggcctgggcgcgcagaccgtgcaggtctaccggcgcgaactgttcctgcgcggcttcgacggcagcgtgcgcgagcacctgcgcgacgaactggtcaagaaaggcctggacctgcgcttcaataccgacgtcgaacgcatcgacaagcgcgccgatggcgtgctggcggtcacgctgtccgacggctcggtgctcgaaaccgattgcgtcttctacgccaccggccggcgcgccatgctcgacgacctgggcctggagaacaccggcgtgcggctggccgagtccggctacatcgaggtggacgacgaataccgcaccagcgagccgtccatcctcgccatcggcgacgtgatcggccgcgtgccgctcacccccgtggcgctggccgaaggcatggccgtggcgcgccgcctgttccgcccgcaggagtaccgcaaggtcgactacgacctcatccccaccgccgtcttcagcctgcccaacatcggcacggtcggcctgaccaccgagcaggccctcgaacgcggatttcgggtcacccgctacgaaagccgcttccggcccatgaaactgaccctgacccagagccaggaaaagaccctgatgaagctggtggtcgacgccgacagccagaaagtgctgggctgccacatggtaggcccggacgccggcgaaatcgtccaggggctggccgtggccctcaaggccggcgccaccaagcaggtcttcgacgacaccatcggcatccaccccaccgccgccgaggaattcgtcacgatgagaacggcaacc

SEQ ID NO: 15181 - DNA, 2733 bp, Bordetella pertussis
atggtttctctgctcaaaaaactcattggtagtcgtaacgaccgcttgctgaaggaatatcgcaagcaggtagctcagattaatagcctggagcccaagatttcggctctttccgatgaggaattgtcggcaaagactcaggagtttcgcgatcggcatcagcagggcacgtcgctggacgacctgctgccggaagccttcgcggtggtccgcgaggcgggcaagcgcgtgttcgggatgcgccacttcgacgtccagatgctgggcgggatcgcgctgcacaacggcaagatcgccgaaatgcgtaccggcgagggcaagacgctgatggccacgctgccggtctacctgaacgccatcgccggcaagggtgtgcacgtcgtgacggtcaacgactacctggcccgccgcgacgccgagtggatggggcggctgtaccgcttcctgggcatgtcgaccggcgtggtggtgccgcagcagcccaacgacgagaagatcgccgcctacgctgccgacatcacttacggcaccaataacgaattcggcttcgactacctgcgcgacaacatggagtatcgcgtcgaggaccgccgccagcgccgcctcttctacgccatcgtcgacgaagtggactcgatcctgatcgacgaggcgcgcacgccgctgatcatctccggccaggccgaggaccacaccgagctctacgtgcgcatgaacgcggtgccgccgctgctcaagcgcatggcgtccgaacccaagccgcacgagcccgagcccgaaggcgactactgggttgacgagaagagccagcaagtctacatgtccgaggccggccacgagagcgccgagaagatcctcacgcgcgtgggcctgctgcccgagggcgagtcgctctacgacccgcgccacatcgccctgatgcaccacatgatggtggcattgcgcgcccatacgctgttcttccgcgaccagcagtacgtggtgcaggacgacgaggtcgtgatcgtcgacgaattcaccggccgcctcatggttggccgccgctggtccgatgggctgcaccaggccgtcgaggccaaggaaggcgtcaagatccagcatgagaaccagacgctggcctcgatcactttccagaactacttccgcatgtacgacaagctgtcgggcatgaccgggaccgccgataccgaagcgtacgaattccaggagatctacaccctggaaaccgtcatcatcccgaccaacaagccgatggtccgcaaggaccagaacgaccaggtcttcaagacgacgcaagagaaataccaggcgatcctcaacgacatccgcgactgccacgagcgcggccagccggtgctggtgggcaccaccagcatcgagaactccgagctgctggccggcctgctacgccaggccaagctgccgcacgaggtcctcaacgccaagcagcacgcgcgcgaggcggagatcgtcgccgaggccggcaagccgggccacatcaccattgccaccaacatggccggccgcggcaccgacatcgtgctgggcggcagcgtcgacaagcaggtcgacctgatccacgccaacgaggcgctgagcgaggccgagaaggaggcgcgcatcgaaacgctgcgtgccgagtggaaaccgctcaacgagcgcgtcaagcaggccggcggcctgcgcatcatcggcactgagcgccatgagtcgcgtcgtatcgacaaccaactgcgcggccgcgcggggcgccagggcgacccgggctcgtcgcgcttctacctgtcgctcgaagacccgctgatgcgcatcttcgccggcgaccgcgtgcgtgccatcatggagcgcctcaagctgcccgagggcgagcccatcgaggccggcatggtgacccgttcgatcgagactgcccagcgcaaggtcgagggccgcaacttcgacatccgcaagcagctgctcgaatacgacgacgtggccaacgaccagcgcaaggtactgtattcgcagcgcaacgaggtgctggaagccgcttccatcggcgcgaccgtcgagggcctgcgcgatgccgccgtggccgaaatgttccgtggcttcatccccgaggaatcggtcgaggagcaatgggacgtcgccgggctggaaaaggcgctggcgggcgactggcacatccagctgccgctgaccgatatgctggagcaggagcccaacctgaccgacgaggaactgctcgagcgtgtggtggcggccgcgcgccagatctacacggccaaggtggagcaggtcggggccgagtcgtgggcgcagttcgagcgctcgatcatgctccagtcgatcgatacgcattggcgcgagcacctgtctgcgctggactatctgcgccagggcatccacctgcgcggctacgcccagaagaaccccaagcaggaatacaagcgcgaggctttcgagctgttctcgggcatgttggaccgtatccgcgacgacgtggtgcgggtgctgatgacggtgcgggtgcagtcggccgagcaggtcgagcaggccgaggccgatgcggcgcaaccccacgtgcagaacgtgcagtaccaccactccgactacgacgaggcgctggccgacgatggccagccgcagggcgcgcagccggtgcgcaatgtgctgcccaaggtcggccgcaacgaaccctgcccgtgcggcagcggcaagaagtacaagcattgccacggccagttggcc

SEQ ID NO: 15182 - DNA, 921 bp, Bordetella pertussis
atgttccgacagcgcagtattcaaaatctcgtacgcacgataggcgtgggcgtccattcgggtcgccgggtcgaactcaccctgcgtccggccgaggcgaataccggcattgtcttccaccgcgtcgacctgccccaggtcgtggacctgccggcctcggccatcggcgtgggcgacacgcgcatggcgtcggtgctgcagcagggcaacgtgcgcgtttccaccgtcgagcacctgatgtcggcactggccggcctgggcatcgacaacctgcatgtcgacctgacggccgaagaagttcccatcatggatggcagcgcggccacgttcgtgtacctgctgcgttcggccggcatcgtcgagcagaatgcgcccaagcgcttcatccgcgtgttgaagcccatcgaggtgcgcgaaggcgagggccgcaacgaaaaatgggcccgcctggagccgcacgagggtttcgcgctggcgttctcgatcgacttccgccatccggccatcgattccacggccaatttcgccgaaatcgatttcgccacccattcgtacgtgcgcgaaatcgcgcgcgcgcgcaccttcggcttcgtcaacgaggtcgaggccctgcgctcgatgggccttgcgcgtggcggcagcctggacaacgccatcgtcatggacgagttccgggtgctcaacagcgacggcctgcgctacgatgacgaattcgtgaagcacaagatcctggacgccatcggcgacctgtatctgctgggcaagccgctggtggcgcgctacgttgcctacaaatcgggccatgccctgaacaaccagctggcccgcgccttgctcgaacagcaggatgcctgggagctggtgacgtatgaatcccaagccgaggcgccgcaggcgttccggcacgaatggaagctggcc

SEQ ID NO: 15183 - DNA, 1182 bp, Bordetella pertussis
atgatgaactttgagatgcttgagaacaacgccaaggggaccgtaatcaaggtcgttggtgttgggggcgcgggcggcaacgccgtcgcgcatatgattcgcagcggtgtcagcggcgtggacttcatttgcgccaataccgacgcgcaggcgctggcggctaccaatgcgccggtgcagatccgcctgggccgcaccggcctgggcgcgggcgccaagcccgagcagggccgtgcttcggccgagacggcgcgcgaggagattcgcgcggcgctcaacggcgcgcacatggtgttcatcaccgcgggcatgggtggcggcaccggcacgggcgccggccccgtggtcgcggaagtggccaaggagctgggcatcctgaccgtcggcgtggtcaccaagccgttcaccttcgaaggcaacaaacgcctgcgcatggccgaagacggtatcggcgagctgggcaagcacgtgcattcgctcatcgtggtcctcaacgagaacctctacgagctgatggacgacgacgccacgcaggaagactgcttcaaggcggccgacgacatcctgcacaacgcttgcgcgggcattgccgagatcatcaatgtcgagggcaacgtcaacgtcgacttcgaagacgtcaagacgatcatgggcgagcagggccaggccatgatgggcacggccgcggccagcggtgcggaccgcgcgcgcgtggcggcggaaaaggcgatcgcctgcccgctgctcgaaggcgtggacctgaacggcgcgcgcggcgtgctggtcaacatcaccgccagccgcacgctgaagatgcgcgaaacgcgcgaaatcatggaaacgatccgcagctacgcttcggacgacgccaccgtgatcttcggcaccgcctacgacgagcagatgggcgaagagctgcgcgtgaccgtggtggccaccggcctgggccgcgaggccgtccgtccgcaactggtgcagcacaccagcgaggcgttgcgtaccggcaccgacaacatgccggtgggcaacatgctggctggccagcagggcgattaccgcgggctggacatgccgtcggtgatgcgcaacccgcgcagccaggcttcggcccaggtgcgcgcgttggaaagctccgggatggaccacttcgacattccggccttcctgcgcaagcaagccgat

SEQ ID NO: 15184 - DNA, 1224 bp, Bordetella pertussis
atgacccgtgacatcaaggaccttatcgtcgccctcgatatcggcaccagcaaggtggtggctgtcgtggccgagatcttgcccgaagggcgcttcgaagtgctgggcctgggccagcatgaatcgcgcggcatgcgcaagggcgtggtcgtcaatatcgaaaccacggtcaactccatccagcgcgccctcgaagaggccgagctgatggccgactgcaagatccgcgacgtgtacgccggcatcgccggcagccatatccgcagcttcaattccagcggcatggtggccgtcaaggacaaggaagtcacagccaccgacgtcgcccgcgtgatcgaaaccgccaaggcggtgaacattcccaccgaccagcaggtgctgcacgtgctgacgcaggagttcatcgtcgacggccaggaagacatccgcgagcccatcggcatgagcggcctgcgcctggaagtgcgcgtgcacatcgtcacgggcgcggtcagcgccgcgcagaacatcgtcaagtgcgtgcgccgctgcggcctggaagtgcaggatctgatcctgcagcccctggcctccagcctggcgtgcctgaccgccgacgagaaggagctgggcgtggtgctggtcgatatcggcggcggcaccaccgacgtcgccatcttcaccggcggcgcgatccgccacacggccgtgatcccgatcgcgggcgaccagatcaccaacgacatcgcggcgatgctgcgcacgcccacgcccgatgccgaggaaatcaagctgcgctacggcgtggccaagcaagtgctggcgcgtcccgacgaggcggtcgaagtgccgggcctgggcgatcgcggcccgcgccaggtcaagcgccaggccctgggggcggtgatcgagccgcgcgtcgaggaattgttcacgctgatccagcaggtggtgcgcgactccggctacgaggatctgctggcctcgggcgtggtgctcaccggcggttcggcgcagatgcccggcatgatcgaactggccgaggacgtgttcctcaagccggtgcgcgtggcggtacccgaatatgaaggcagcctggccgacgtgatgcgcaacccgcgcttctcgacggtgatgggcttgctgcaggaagcgcgcatgcagcgtctgcgcggccgcaaggtggcggcgcagaccggcaacttcaagaccctgctggcgcgcatgaaggaatggttcatgaac

SEQ ID NO: 15185 - DNA, 819 bp, Bordetella pertussis
gtgtggaacgacgctcgcaccatcaacctgatcgccaacacgctggccgtgctggcggtagccgccatgctgttggccggcgtggcgtgggtggcgcagcgtccctatttcacgttggcggccatcgagatcgagtccatgcccgagaccgagatgcactatgtctcgaccggcgccgtgcgcgcggcgatcgcggggcgcttcgggggcaatttctttaccgtcgacctggacgaagcccgcgaggcgttcgagtcggtgccctgggtgcgccatgccacggtgcggcgcatctggcccaataccttgcgcgtgcgcgtcgaggagcagcagccgctggcgctgtggaacgagaaccagatgatcaacacctggggcgaagcgttcaccgccaacacgggcgagctggccgacgacatggtgctgccgcacttcaccgggccggaaggcacggagagcctggtggtgcagcgctacgccgagctggcgcgctggttcgcgccgctggacatgcatgtgcgcgagctggtgctcaacccgcgctatgcgtgggccgtgacgctgtccaacggcatgaagctggacctgggccgcgatccgggtgccgatgcgcccgatccgcacggcctgcccggcgccttgccgttcgccgcgcgcattcagcgcttcgtgcaggcctggccggtggtcagcagccggctcgaaggacgcacggtgacgcaggccgacctgcgctacccaaccggatttgccctggcgctggcgccgctgccgcccgagcatgcatcacattccaaatcgaaacctgccaagaaacgc

SEQ ID NO: 15186 - DNA, 1053 bp, Bordetella pertussis
atgaaactctcgattgcccaagccatcgcgttcggccagcgcctgctggccgcccagggggtgccggacgacatcgcccgcgacgtcgccgagcacctggtcgagtcggaccgggtcggctacaccagccacggcctgtccatcctgcccaattaccgccgcgtgctggccgaaggcttcgtcaaggccgacggccgcgccaagctgctcaacgaccgcggcgccatgctggccttcgacggcgacaacggcttcggccagcacgtcggcaaagcggtcatgcagcaggccatcgagcgggcccgccagtacggccagtgcatcgtcacgttgcgccgcacgcaccacctggggcgcatgggctactacggcgaaatggccgccgaggccggactgatcctgctggcgttcaccaacgtcgtgaaccgcccgcccacggtggcgccctacggcggcgcgcaggcctgcctgaccaccaaccccctgtgcttcgccggtccgctgccgggcggctgcccgcccttcctggtcgacatggccaccagctcgatcgcggtcaacaaggcgcgcgtgctggcggccaggggcgagccggcccccgacggcgcgctgatcgatgcgcagggcaacccgaccaacgacccgaacgcgctgttcgccgacccgcccggcgcgctgctgccgttcggcggccacaagggctacgccatgggcctggtcgccgagctgctggcgggcgtgctgtcgggcggcggcaccatccagccggaacatccccgcaatggcgtggcgaccaacaacatgttcgccatcctgctggacccgcaagtggatttcaacgccgattggcgcacccaggaagtcggcgccttcatcgactacctgcatgcgtgtccgccgcaacccggcgtggaccgcgtgcagtatccgggcgaatacgaggcgatgaaccgcgcgcgccatgccgaggccatcgagttcgaaggcgccatctgggacagcctggccaagctggcgcaggacctgggcgcggccgacgccctgccgcgcgcc

SEQ ID NO: 15187 - DNA, 786 bp, Bordetella pertussis
atgcgtatgaactttgtccggtcggccctgctggcgtcggccttcctgctggccggcggcgccgcccaggcggaaaaactggtcgttggcgccacccaggtgccgcacgccgagatcctcgaggtcgtcaagccggccctggccaaggaaggcgtggagctggacatcaaggtgttcaccgactacgtccagcccaacctgcagctggccgacaagcagctcgacgccaatttcttccagcaccagccgtacctggacaccttcaacaaggaccgcaagaccaacctcgtgtcggtgggcctggtccatgtcgagccctttggcggttattcgaagaaaatcaagagtttggctgagctcaaggacggcgccaccatcgccatcccgaacgatccctccaacagcgggcgcgccttgctgctgctgcagaagcaggggctgctcaagctgaaggacccgtccaacatcgtcgccaccccgatcgacatcgccgagaaccccaagaagctgaagttccgcgaactggaagccgccatgctgccgcgttcgttcgatgacctggacctcgcgctgatcaacaccaactacgcgctggaagcgggcctggtgcccacgcgcgacgccctgttcatcgaaggtgccgactcgccctacgccaacctggtggccgcccgtcccgacaacaaggacgccccggcggtgaagaagctggtcaacgccctgcattcggaagcggtgcgcaagttcatcatcgagaagtacaagggcgcggtcgtcccggccttc

SEQ ID NO: 15188 - DNA, 948 bp, Bordetella pertussis
atgagcaagcaattcggcaaagtcggcgtgttgtacggcggccgttcggccgagcgggaagtgtcgctgatgtccggcaagggcgtgcacgaagccctgctgagcgccggcgtggacgcgcacctgttcgacaccggcgagcgcagcctggcggacctcgccgcggcgggtttcgagcgcgtgttcatcgccctgcatggccgctatggcgaggacggcacgctgcagggagcgctggagctgctgggcattccttacaccggcagcgggccgctggcctccagcctgtcgatggacaagatcatgaccaagcgggtgtggctgcagcacggcttgcccacgccggccttcgaggtgctgggcggcagcaccgaactgcgcctggtgcccgaccgcctgggcctgccgctgatactcaagccgccgcacgagggctcgaccgtcggcatcaccaaggtggcgggctattcggacatgaaggcggcgtacgagctggccgcgcgtttcgacgccgaggtgctggccgaacagttcatcacgggccgcgaactgaccgtcgccgtgctgggctcgggcgccgcggcgcgcgccttgccggtgatcgagatcgtcgcgcccggcggcaattatgactacgaacacaagtacttctcggacgacacgcagtacttctgcccggccgacctgcccgcggacgtggccgcggacgtggccgccgtcgccgagcgcgcctacgccgcgctgggttgcgagggttggggccgggtcgacttcatcctggaccgggagaaccggccctggctgctggaaatgaatacttcgcccggcatgaccggccattcactggtgccgatggcggcgcgcgcggtgggcatgagctatgccgacctgtgcgtggccatcctggccgaggccgcgtgcaaagtgcgcagcccggcgcgacaagat

SEQ ID NO: 15189 - DNA, 1404 bp, Bordetella pertussis
atgaaacatcgcatccaacacatacactttgtcggcgtcggcggctcgggcatgagcggcatcgccgaggtattgctcaacctgggctataccatcagcggttccgacctgaacgaatccgccgtgacgcgccgcctggccgagctgggcatgcgcatcgccatcgggcacgaccgcgccaacgtggccggcgccggcgccatcgtcacctccaccgccgtggccggcgacaacccggaagtcctggccgcgcgcgccgcgcgcatcccggtcgtgccgcgcgccgtgatgctggccgaactgatgcgcctgaagcgcggcatcgcggtcgcgggcacgcatggcaagaccaccacgaccagtctggtggccagcgtgctggcggccggcggcctcgatccgaccttcgtgatcggcgggcggctgacctcggccggcgccaacgcgcgcctgggccagggcgagtacatcgtcgtcgaggccgacgagtcggacgcctcgttcctgaatctgctgccggtgatggccatcgtgaccaacatcgacgccgatcacatggatacgtacggccacgacgtggcgcgcctgaagagcgccttcatcgaattcacccagcgcctgccgttctatggcagcgccattctttgcgccgacgacgccaacgtgcgcgagatcatgccgttcgtgtcgcggccgatcaccacctacggactcagtcccgacgcgcaggtgtgcgcccaggacgtgcaggccgacggcacccgcatgcgcttcacggtgcagcggcgcgaccgcgacgtggtactgcccgcgctgcaggtcgagctgaacctgcccggcctgcacaacgtgcgcaatgcgctggcggccattgccgtggccaccgagctgggcgtggacgacgccgcgatccgcgaggcgctggccgccttcaagggcgtcgggcggcgctttacccaatggggcgacctgccggtgccggccgcgcatggcggcggcatcttcacactggtcgacgactacggccatcacccggtggaaatggcggccacgctggccgcggcgcgcggcgcctggccgcagcggcgcatcgtgctggctttccagccgcaccgctatacccgcacgcgcgactgcttcgaggatttcgtgcgtgtgctgggctcggccgacggcgtgctgctgaccgaggtctacgcggcgggcgaggcgccgctggtggcggccgacggccgcgccctgtcgcgcgcgctgcgcgtggccggcaaggtcgagccggtcttcgtcgaggacgtgggcgaattgccgcaggccatcctcgatttcgtgcgcgacggcgacgtcgtggtggtgatgggagcaggctcgatcagcaagacgccggccctcgtgggagaactggca

SEQ ID NO: 15190 - DNA, 1071 bp, Bordetella pertussis
atgagcgcaccgaccatcctcatcatggcgggcggcacgggcggccacatcatgccgggcctggcggtggccgaagtgctgcgcgagcgcggctggcgcgtgctgtggctgggcaatcccgacaagatggaaggccggctggtgccgccgcgcggcatcgaactggttcccctgcgcttccagggcgtgcgcgggcgcggcgccgccgcgctgctgaaactgccgttcctgttggcgcgcgcttgcgcgcaggcctggcgcaggctggccgatatccggccggacgtggtgctgggcatgggcggctatgtggctttcccgggcggcgtcatggcagcgctgcgccgcacgccgctggtcgtgcacgaacagaatgcggtggccggcacggccaaccgctggctggccaggctggcgcgccgcgtgctcagcggttttcccggcgtgttgccgcgcggcgaggcgctgggcaacccggtgcgcgccgatctgtgcgcgctgcccgagcccgccgaacgctatgccggccgcagcggcgcgttgcgcgtgctggtggttggcggcagtctcggcgcccatgcgctgaacaccaccgtgccgcaggcgctggcgctgttgccggagcaggcgcggccccaggtggtgcaccaggcgggcgagcagcatctgcccgccttgcagcaggcctatgcgcaagcgggcgtgcaggccgattgccgcgccttcatcgacgacatggccgacgccatggcccaggccgacctgctgatctgtcgcgccggcgccatgacggtgtcggaagtggcggcggccggcgtcgcggccctgttcgtgccgttcccgcacgccatcgacgaccaccagaccgccaacgcgcgcttcctgagcgacgcgcaggcggcctggctgcagccgcaagccagcctgacgccgcagtggctggcgcagtggctgggccagcgtacccgacaagaactccaggccgtggccggccgggcgcgcacgcatgcgctgccgcgcgccgcggcccatatcgccgacgtttgcgagcaggcagcgaggcgggcatca

SEQ ID NO: 15191 - DNA, 1191 bp, Bordetella pertussis
atgagcctgttcgccgaactcaccgccagtgtgaacgccgtacggcccggccgcacgcgcatgcgcaattacgacatgccgctgatcgtcgccgcgtcgaccctgctgctgctgggcttgttgatggtgtattcggcttccatcgcgttggccgacgggccgcgctacgcctcctacggccgctattacttcgtgatccgccacgggctgttcctgacggccggcctgctggccgccgccgtcgtgctgagcgtgccgatccgggtatggcagcgcctggccgtgccgctgttcatgttcgcgctgatcctgctggtggcggtgctgattcccggcatcggccgcgaggtcaacggcgcgcatcgctggatcccgctgggaccgctgaatttccagccctccgaattgatgaagctggccgctctcctgtatgccgcggactacaccgtgcgcaagcaggagcacatgcaggcgttctcgcgcggcttcctgccgatggcctgcgcgctgggcggcgtgggcatgctgctgctgctggagccggacctgggcgcgttcatggtgatcgtggcgatcgccatcggcatcctgttcctgggcggcatcaacggcaagtatttcagcagcctgctggccgtgctggtgggcaccttcctgatgctgatctgggtgtcgccctggcggcgcgcgcgcctgttcgcctacctggacccctggaacaaggccaatgcctacggcagcgcctaccagttgtcgcattcgctgatcgccctggggcgcggcgagtggttcggcgtgggcctgggcgccagcgtcgagaaactgcactacctgccggaggcccataccgacttcctgatggccgtggtgggcgaggagctggggttcgccggcgtcatgctggtgatcacgctgttcgcgatcatcgtctaccgcggtttcgacatcggccggcaggccatcgcgatggagcgcacgttcgccgggctggtggcgcacggcgtggccatgtgggtgggcgtgcaggccttcatcaacatgggcgtgtgcctgggcctgctgcccaccaagggcctgaccctgccgctgatgagctacggcggctcgggcatcgtcatgaacctgtgcgcgctggcgatgctgatccgcgtggacgtcgagaatcgcgtcatgatgcggggaggccgggta

SEQ ID NO: 15192 - DNA, 1530 bp, Bordetella pertussis
atgaatacgactgaaacctcccgtgccgccgcaccgcttgtcctgatcctcggattgggcgagacgggcgtggccgccgcgcgctggtacgcccgccagggttcgcccctgcgcgtgacggactcgcgcgcgcaaccgggagggctggccgcgctgcaagcggcgctggccgatgccacggtcgaataccggctgggctgcggcgagcagttccccccggacctgctcgacggtgtggcgcagatcgtgctgagcccgggattggtgccgcacgagtcgcctacccgcgaactgctggagcaggcccgtgagcgcaacgtggaagtggtgggcgagatcgagctgttcgcccgcgcgctggccggcctggccgaatcccgagagtatcgtccgcgcgtgctggcgatcactggcaccaatggcaagaccaccgtcaccgcgctgacccggcagctgatcgaggcaggcgggatgagcgcgcgcgcggccggcaatatcagccccgccgcgctggccgcgctgatggatgcgctggaccaggatgatctgcctcaggtgtgggtgctggaactctccagcttccagctggaaaccacgcggacgctggcgcccgacgccgcggtcgtgctgaacgtgacccaggaccacctcgactggcatggcgacatgcaggcctatgcgcaagccaaggcccgcatcctcaagccggcgcgcctggccatcgtcaaccgcgacgatccgttggcggtcgccatggtcgagagcctgcaagccttgaatgtacgcagcttcggccgcgacgtgcccgccctggtcggtgacatgggcctggagctgggtcagggcgttgcgtggctgaccgcctgcgaatccaacgatttcgacgagccggcgccggcgccgcgacgcaagaaggacgcgccgccgcccacccgcgccggtggccgcatgagccgcctgatgccggtggatgccctgcgcatccgtggcgtgcacaatgccctcaatgccctggccgcgatgcagctggcccgctcgctcgacctgggctggggcccgatgctgcgcaccctgcgcgactatgccggcgagccgcatcgcgccgaactggtgcgctcgatcggcgatgtcgactacatcaatgacagcaagggcaccaacgtgggcgccaccgtggccgccctggaaggcctgggccagcaggtcgtgctgatcgctggcggacagggcaagggccaggatttctcgccgctggtgccggtggtgcgccgccacgcgcgcgccgtggtgctgatcggcgtcgacggggcggctatcggcaaggtgctcgagcccaccggcgttccctgcgcggccgctgccgacatgcgcgaggccgtgcgccgcgccgccgagctggcgcagcccggcgatgccgtgctgttgtcgccggcctgcgccagcttcgacatgttccgcaattacccgcaccgtggcgaagtattcgccgcggaggtgcgggaactcgcgctcgaccggggagaggtggca

SEQ ID NO: 15193 - DNA, 1167 bp, Bordetella pertussis
atgctgcttgagatcgcccggtggctgtccgacgacgtgcgcgccattggcgtattcgagtacatcacgctgcgcgccgtgctggcgtgcgcgacggcgctgctgatcggcctggtggcggggccgcgcgtgatccgccgcctgaccgaaatgaagatcggccaggccgtgcgcgcctacggcccggagtcgcacctggtcaagacgggcacgccgaccatgggcggcgcgctcatcctgatcgcgatcgccatcagcacgctgctgtgggcggactggaccaatcgcttcgtctgggtggtgttgctggtgacgttcggctttggctggatcgggtggatggacgactatcgcaaggtcgtctaccgcgatcccgaaggcatgccggcccggcagaagttcttctggcaggcgaccatcgggctggtcgccgccgtgtatctggccttcgccgtctcggcacccgccaataccgaactgtggccgctcttcaaggcatgggtgggtagcgggttcacgatgccgctgccgacgcgggccgacctgatcgtgccgttcttcaagtcggtcagctatccgctgggcgtgctgggcttcgtggccctgacctgggccgtcatcgttggcaccagcaacgccgtcaacctgaccgatggcctggacggcctggccatcatgcctacggtcatggtcggcagcgccctgggcatcttcgcctacgtggttggccgcgtcgattattccaagtacctgctgttcccgtacattcccggcgcggccgagctgatggtgctgtgcgccgccatcgggggcgcgggcctggccttcctgtggttcaacgcctatccggcgcaagtgttcatgggcgatgtcggcgcgctggcgctgggcggcgcgctgggcaccatcgcggtgatcgtgcgccaggaaatcgtgctcttcatcatgggtggcgtgttcgtggtcgaaaccctttcggtcatggtgcaagtcacctggttcaaatacaccaagcgcaagtacggccagggccggcggatattccgcatggcgccgctgcatcaccatttcgaggtgggcggctggaaggaaacccaggttgtcgtgcggttctggatcatcaccatgatgctggtgctggtcggcctttccacactgaagttgcga

SEQ ID NO: 15194 - DNA, 1437 bp, Bordetella pertussis
atgccccacactctcgacgaacgcaagcgctggctggccctcatggtgctgtgcctgggcgtgctgatgatcgtgctggacacgaccatcgtcaacgtcgccctgccgtccatcaaggccgacctgggctttaccgaagcgtcgctggtgtgggtggtcaacgcctatatgctgaccttcggctgcttcctgctgctgggcggacggctgggcgacctgctgggccagcgccgcatgttcctcgccggcctgacgctgttcacgctggcctcgctggcctgcgggatggcccaggggcaggccatgctggtggccgcgcgcgcggtgcagggcctgggcggcgcggtcgtctcggccgtggccctgtcgctgatcatgacgctgttcaccgagccggccgagcgcgcccgcgccatgggcgtctacggtttcgtctgcgccggcggcggcagcatcggcgtgttgctgggcggcctgctgaccagctcgctgagctggcactggatcttcctggtcaacctgcccatcggggcgctggtctacgcgctgtgcctgccgctgctgccggccagccagggcccgacgggccatccacggctggacctggccggcgcggcagccatcaccgcctcgctgatgctggccgtctacgcggtggtcaacggcaacgaggccggctggacctcgccccaatcgctcgggctgctggcgctggcggtcgcgctgctggcgctgttcctgcgcatcgaggcgcgcgtgccggcgccgttgatgccgctgtcgctgttcgcgctgcgcaacgtcgccaccgccaacatcgtcggcgtgctgtgggccgcggccatgttcgcctggttcttcatctcggcgctctacatgcagctggtgctgggctacacggccatgcaggtggggctgggcttcctgccggccaatatcatcatggcggcgttctcgctggggctgtcggccaggctggtgatgcgcttcgacatccgcgcgccgctggtgtgcggcctgctggtggcggcgctggggctggcgctgttcgcgcgcgcgccggtcgcaggctcgttcgccgtcgacgtgctgccgggcatgctgctgctgggcctgggcgcgggcatcgcgttcaaccccgtgctgctggccgccatgagcgatgtggaccccagcgaagcgggcctggcatccggcgtggtcaacacttcgttcatgatgggcggcgccctgggcctggcggtgctggccagcctggcggcgggccgcagcgccagcctgcgcgccggcggcgccgacgtgctgacggcgctcaacggcggctatcacgctgccttcgcggtgggcgccgtgttcgccgccctggccgcgctgctggccggcgtgctgctgcgccgcccgcagcccggcgcgagcgccccggccgccgacgcgcat

SEQ ID NO: 15195 - DNA, 1719 bp, Bordetella pertussis
gtgcctttcttcgacaatcccgtgctgcgcgggcagctgcccatgtggcgcgcccgtctggtgctgatactgttgttcggcggctttgtcgtgctggccgggcgcgccctgttcctgcagggcctgtcgaccgagttcctgcagcagcagggcgagcgccgctacgagcgcacgctgaccctggccgccacgcgcggcaagatcctggatcgcaacggcgtggtgctggcatccagcgtgccggcgcgcgccatatgggcgattcccgaggacgccaagccgatcccgcccgagcaggtggccgcgctggcgcaactgcttcagacgccggtggccgagctgcgtcgccggctggccgacgaagaccgcaatttcgtgtacctgaagcgtcaggtgccgatggacgttgccgacaagatcaagcaaatggccctgcccggaatccaccagcagccggagtcgcgccgctactacccggaaggcgaggtcacggcccacatcgtgggcttcaataatgtcgaggaccaggggcaggagggcgtcgagctgacgttcaaccagcaattgtcgggccagccgggctcgcgccgtgtcatcaaggatcgcctgggccgcgtcatcgaggacgtgcaggcggtgaccttgccggtcgacggccgcgacctgcgcctgtccatcgacacgcgcctgcagtacctggtgtacaaggaactgcaggacgcgcgcgtcgcgcaccaggccaagagcgcgacggccgtggtgatcgacgtgcataccggcgaggtcctggcgctggtcaacctgccctcgttcgatccgaaccatcgcgagacgttccaggtctcgacgctgcgcaaccaggcgatcaccgatacattcgagccgggttcgatcatgaagccgttcaccgccgcgctggcgctggatctgggccgcatctcgaccgcgaccatgttcgagaccggtaacggccgctttcaataccagggcagcacgatcagcgatgtcagccgcaacggcacgctggatctggccggagtgctgctgaagtccagcaatatcggcatgaccatgatctccgagaagctgcagtcgcgcgagatgtgggatctgttcacagggctggggctcgggcaggcgccccagctgggctttcccggtgctgcgcccggccgcctgcgtccgtgggaccgctggcgcctgatcgagaaggccaccatagcctacggctacgggctgtccgtgtcgctgctgcaggtggctcgtgcctataccgttttcgcgcgcgatggcgacatggtgtcgctgacgctggtcaagcgcgaaagcgcgcccaccagcgtacgggtctacaaccccaagaccgccgccaccgtgcgcgccatgctggaggccgcagccgggcccgacgggaccaagcgcgcccaggttcagggctaccgggtggccggcaagagcggcaccgcgcgcaagattgtcgacggaaagtacagcgctcagcgccaccgcagctcgttcgtgggttttgcgcctgtctccaatcccaagatcgtggtggcggtctcgatcgacgagccgcaggtgggcggttattacggtggcgccatcgccgcgccggtgttctcgcgcatcgtgggcggcagcctgcggctgatgggcgtgcagcccgacgcgccgttcgagtcgaccatcgtggccggcaatccggagggcgcgcga

SEQ ID NO: 15196 - DNA, 1092 bp, Bordetella pertussis
atggaattcgaacatcggcccgtgctgctggagccgacggttgacgcgttggtgctgccggatttcggcggcaagggcgcccaccgtcaggccggcgagccggggccggatgcggccacgcgcctgcagcacggcgtcttcgtcgacggcacgttcggccgcggcggacacagccgtgcgctgctggcccggctgggcgcgcaggcgcgcctggtggtgttcgacaaggatccgcaggcgatcgcggtggcccgggaactggccgccggcgatgggcgggtggaagtggtgcatggcggctttgccaccatggccgaggaattgacggcgcgcggcatcgagcaggtcgatggcgtgatgctggatctgggcgtgtcatcgccccagattgacgatgccgaacgggggttttcgttcatgcgggacggtcccctcgacatgaggatggatacgacccgcggccccacggtggcggattggctggcgcaagccagcgtggatgagatgcgggaggtcatagcagattatggcgaagaacggtttgcttttcaggttgcaaaagcgattgctgcttgccgcgcaacacggccgctgcacaccacgctccagcttgccgagtgcgtcgccggcgccgtccgcacgcgcgaaaaggggcagcatccggccacacgcacctttcaggctctacggatttacatcaatcgggagctcgaagagctcgctcgcgccctcgcgtcagctctagacctgcttggcccgggggggaggttggcggtgatcagttttcattcgctggaagatcgcatggtcaagcaatgcatcgcggcggcggctcgtccggccgccgcgcacgcgcgcctgcccttgcgtgaaagcgaattgccgcaaccgctggtgcgctcgctgggcaaggttgtcgccgacgacgtcgaagtggccggcaatgcgcgcgcccgttcggccatcctgcgggtggccgaacgcacgggcgagccgctgccgcctggcggcggggctggtttcgtcaaggccggccgggtgcccggcgagccggtgcgcggcacgcgcgccggttccaaggggaggcgtcgc

SEQ ID NO: 15197 - DNA, 1125 bp, Bordetella pertussis
gtgggcgagccgccgccgcgggcgccggggcttgcgcgcggcgaggccggcgggcggcgatgcaggcagcgctgggcctgggcggcgcgggcggaaggccaggcgggtggcggtgtcggtcatggcggtcgtcgcaaggggcggtgcagggctacactggcacagttttcaccgtcgcagcaccatgcaatgaatcaagatgtcctatcgccggcccagggcgacgcctggagccgggtggctgaccgggtggccgcgcagcactggccggcggccaccttgtacgtgatcgccacgcccatcggcaacctcggcgacctgggcctgcgcgcgtggcaggcgctggtgcgcgccgatgtgatcgcggccgaagacacgcgcgccagccgcacgctgctggacgcctggggcgtgagcacgccgctgatggcggcgcaccgccacaacgaggccagcgccgcccaggcgatctgcgaacggcttgcccagggccagcgcgtcgcgctggtgtccgacgccggcgcgccggcggtcagcgatccgggcgcgcgcatcgtgcgcgcggtgcgcgaggcgggctacgccgtggtgccggtgcccggccccagcgccgtgatcgcggcgctgatgggcagcggagcgacctcggacgagaatccggcgttcgcgttcgccggcttcctgcccgccaaggcggtggcgcgccagcgctggctgcgccagtggtgcgcgctgccggcgccggtggtgatgttcgagtcgccgcatcggctggccgccacgctggccgacctgcgcgaggccggcggcccggcgcggctgttgaccgtggcccgcgagttgaccaagcgcttcgaggaaatcgccacgatgccgctgggcgaggcggcggactggctggccgccgacgcgcaccgcggccagggcgaattcgtgctgatcgtgcaccaggcgccgggcgcccaggacgacgaggccgatccggccgacccgcgtaccgatgcgctgctcgacgcgctgctggagtcgctgtcggtgcgcgatgccgcgcgggtggccgccaaggtgaccggcctggcgcgcgatgtgctgtatgcgcgggcgctggcgcgcaaggagcagcca

SEQ ID NO: 15198 - DNA, 570 bp, Bordetella pertussis
atgaatccgcccagcgcacaggccacggatatcctctattgcgacaccgatacgccgctggggccgatgcggctggccgcgcgcgggcaggcgctgtgcggcgcctggttcgtcgaccagcgcgattgcccggccgccgcgggctggacgctggacgccgcgcacccggcgttgcggcaggcggccgccgagctggagcaatggttcgcgggccggcggcgcgctttcgaggtggccatgcagcccgagggcacgccattccagcgccaggtctggcaggcgctgctggaactgcctttcggcgcgaccatcagctatggcgagctggcgcggcgcgtcggccggcccaaggcggcccgcgccgtggccggcgcggtgggcaggaatccgatttccatcctgatcccctgccaccgcatcatcggccatgacacatcgctgacggggtttggcggcgggctgccgcgcaagcaggcgctgctggcccacgagggacaccgttatctgagccgcgccgcccgtgcgcgccgggtttccaccacgcagatggaactgcctctcggcgcggcc

SEQ ID NO: 15199 - DNA, 426 bp, Bordetella pertussis
gtgttccagggaagcagcgcactcacgttggatgctaaggggcggatctcgattccgacccggcatcgtgacgcgctcatggaccgtgccgaaggccggttgaccctgacccgtcatcccgatggctgcctgttggtgtatccgcgtcccgagtgggaagagaagcgcgcgcagatcgcggcgtttcccatgtcggcgcgtgcgctgcagcgtctgctgttgggcaacgcgcaggacgtggacatcgacgggtcgggtcgggttctgatcgctcctgagctgcgcaacgcttccggtatgacgcgcgatgtgatgctgctcggtatgggcgcgcacttcgagctctgggatgccgcttccctggcccgccgagaggcagaggacctggctcagggaatgccggatgtgttgaatcagttttcgttc

SEQ ID NO: 15200 - DNA, 1806 bp, Bordetella pertussis
atggccctcgcttcccttattacgcttaccgacgttcaactggcctacggccaccaccccttgctggaccacgccgatttcgccatccaggaaggcgagcgcatcggcctgatcgggcgcaacggcgcgggcaaatcttcgctgctgcgcctgctcgatggccgcacgcagcccgacgacggcgacatcgcccgcagttcgggcctgcgcgtggccacggtcgagcaggaacccgcactggatgaaaccggcacggtgttcgacgtcgtgtgcgacgcccatgcccatcccgaagactggcagcggccggcgcgcgtacgggccgcgctcgaacgcctgggactgccggccgaagcggcgatcgccagcctgtccggcggcatgcgcaagcgcgtcgcgctggcgcgcgccctggtcgacgaacccgacctgttgctgctggacgaaccgaccaaccacctggacttcgacggcatcgcatggctggaagccatgctgcgcaactggaagggcgcggccgtcatcatcacccacgaccggcgcttcctcgacgcggtggcgacccgcatcgtcgagctcgaccgcggccgcctgctcagctttcccggcaatttttcgcagtggcaggagcgcaaggcgcagtggctcgaagccgagcgcctggagcaggcccgcttcgacaagctgctggcccaggaagaagtctggatccgcaagggcatcgaggcgcgccgcacccgcaacgaaggccgcgtgcgccggctcgaacagctgcgcgtcgaacgcgccgagcgccgcgaacgcgtcggcaacgtcagtctggcgctggcccaaggccagcgttcgggcaagctggtcgccgaactccaggacgtcggcaaggcgttcggcgacaaggtcgtggtgcacgactactcgaccaccatcctgcgcggcgaccgcatcggcatcgtcggccccaacggcgcgggcaagactaccctgctcaagctgctgctcggcgaactgccgcccgacagcggcacggcgcgccagggcagcaacgtctcggtggcctatttcgaccagatgcgcgcccagctcgacgagaacgcgacgctggtggacatcatcagcccaggcagcgagtgggtggagatcggcggcgcgcgcaagcacgtgatgagctatctcggcgacttcctgttctcgccggcccgcgccggctcgcccgtcagcagcctgtccggcggcgagcgggcccgcctgctgctggcgcgcctgttcgcgcgcccggccaacgtgctggtgctcgacgaacccaccaacgacctggacatcgaaacgctggaactgctggaagaactgctgcaggaatacgccggcacggtgctgctggtcagccacgaccgggccttcctgaacaacgtcgtcacccagaccatcgccgccgaaggcgacggccgctggcgcgactacgtcggcggctacgacgaatggcaggcgcaacggcccgcccaggccgccgcgcccaaggccgagaaacccgccgaaaccgccaagcccgccgcggcgcgccccaagccggtgcgcgcggcacggctgagcgcctgggatctgcgcgaactggaagccctgcccgatgccatcgccaccatcgaggcccgtcaggccgaattgagcggcaagctggccgacggcagcctgtaccgcgacgcgccggacgaagtcgaacgcatcaacgcggaactggccaccctggaaagcgaactggaagaaaaattcgcgcgctgggaactcctggaagcgcgtcggggcgactccgcc

SEQ ID NO: 15201 - DNA, 1689 bp, Bordetella pertussis
atgccgcattctgttgcctgcctggaccttcgtgtgatcgccctgctcgaagccaagcgcgccggcctgctgcgacgcgcccattggctgcccaatattgtctccggcctgatcgtaggggtcgtggcgctgccgctggccatggcctttgccatcgccagcggcgccaaacccgaacaaggcctgtacaccgccatcgtggcgggcctgctggtctcgctgtgcggcggcagccgcgtacagattgccggccccaccggcgccttcatcgtcatcctggccggcatcaccgcccagcatggcgtggcgggcctgcagctggccaccctgatggccggctgcatcctgctggcgctgggcgcggcccggctgggggccatcatcaagtacatcccagcgccggtcatcgtgggcttcaccgccgggatcggcgtcatcatctgggtaggccaatggaaggatttcttcggcctgccctccccggccggcacgcacttccatgaaaaactgtggcagctcgtgcacagcctgccgcagctgcacctggccaccaccgcactggccgcgctgtcgctggcgctgctgctgctgaacaaccgcttgccctacctgcgccgcgtgcccggtccgctggtggcgctcgtggtggccaccacgctgcaggccgcgctgggcctggacggcgtagccaccataggcagcgctttcggcggcattccgcagggcctgcccagctggcagtggcccgagatcaccgtgtcgcgcgtcatcgaattgatcggcccggctttcgccatcgccatgctgggcgccatcgaatccctgctgtcggccgtggtggccgacggcatggccggcacccgccacgattccaaccaggaactggtcggccagggcctggccaatatcgtcgcgccgctgttcggcggctttgccgccaccggcgccatcgcgcgcacggccaccaacatccgcaacggcggcaccagcccgctggccggggtcgtgcattgcatcaccctgctgctgatggtgctgctgctggcgccgctggccgaaaacgtgccgctggccgcgctggccgccatcctgttcgtggtggcctggaacatgagcgacgcgcctcacttcgtcaggatgatcaagcgcgcgccgcgcgccgacgtcgccatcctgctggtcaccttcgtgctgaccgtgttcgccgacctggtggtggcggtcaacatcggcgtggtgatcgccatcctgcacttcctgcggcgcatggcgtccagcgtgcaagtgcaggcgcagagcccggccgagctgggcgacgaactgggccaccgcggctacgggccgctgccggacgacgtgctggtctacgcggtcgaagggccgctgttcttcggcgccgccgagaacttcgagcgcgccctggcggccacgcacaccgatccgcgcacgctcatcatccgcctgcgctgggtgccgttcatcgacatcaccggcctgcaggcgctcgaagaggtcatcaccgacctgcagcgccgcggcgtgcgggtcatcctcagcggcgccaacccgcgggtcaaggccaagctgcatcgggccggcctggtgggcctggccggcgccgacaatgtattcgaccgcttcgaggacgcggtgctgtcctgccgcgcgccggccgccccggccacggcc

SEQ ID NO: 15202 - DNA, 1062 bp, Bordetella pertussis
atgtccaaccaacacgctacagaacttaccatcacccgcccggacgattggcacctgcacctgcgcgatggcagcgccctcgaggcggtggtgctggatacggcgcggcagttcgcgcgcgccatcgtgatgcccaacctccgcccgccggtgaccaccaccgagcaggcgctggtctatcgcgcgcggatcgaagcggcgctgcgcaaggcgggtggcgatacggctgccttcacgcccttgatgacgctgtacctgaccgacaacacgccggccgaggaaatcgtgcgcgcgcatgagtccgggcaggtcgccgcggtcaagctgtatccggccggggccaccacaaactccgatgccggcgtgaccgacctgctgggcaagtgcggcgccgcgctggctgcgctggagcgctgcggcatgccgctgctggtgcacggcgaggtgaccgatccggcgatcgacgtgttcgaccgcgaagcggtgttcatcgaacgtgtcatgcagccgctgcggcgcgcgtatcccggcctgaaggtggtgttcgagcacatcacgacccgggaaggcgcccactacgtgcgcgacgcggaaggacccaccgccgcgaccatcacgccgcagcacatgctctacaaccgcaatgcgattttcacgggcggcgtgcggccgcattggtattgcctgccgatcctcaagcgcgaggtgcatcgccaggccctggtcgaggcggccaccagcggcagtccgcgtttcttcctgggtaccgacagcgcgccccatgcgcgcggcctgaaggaacatgcctgtggttgcgcgggctgctatacggccctgcatgcaatggagctttacgccaccgcgttcgacgcggtcggccgcctggatcggctggaaggctttgccagcttccacggcccggatttttacggcctgccgcgcaatacgggtacgctcacgctgcggcgcgaagcctacgaaattccggcggaggtcgcgttcggcgatacgaccctggtgccgctgtccggcggcgagtcgctcggctggcgggccctggcc

SEQ ID NO: 15203 - DNA, 399 bp, Bordetella pertussis; identical to SEQ ID NO: 14923

SEQ ID NO: 15204 - DNA, 410 bp, Bordetella pertussis; identical to SEQ ID NO: 14924

SEQ ID NO: 15205 - DNA, 1443 bp, Bordetella pertussis
gtgctgtctgtgcgcatccccgggcctgtgcgccaggcctgggctatcgtcgaacaacgaccatggcttgcgcgccgcccgttcattatccatggacctccgtggcgcctggccagccaacaggaggatgatgtgttcaaactgatgtctcgttcagccgtgaaaatggttgagcgctatttgcccgacccttacgtattcgtggtgctgctgacgctggtcgccgccggcgcggccatgatcatcgaaggccagacccccatggccgtcgtgcgctggtggggcaacggcttctgggggctgctgactttcgcgatgcagatgctgctggtgctggtcaccggctacatgctggccagcacgccgctggtcaagcggatgctggcgcggctggccagcctggccaccagcgccggcggggcgatcatcctggtcagcgtggtgtcgctggccgccagctggatcaactggggcttcgggctggtggtgggcgcgctgttcgccaagcagatcgcccgccaggtgcgggtcgattaccggctgctggtggccagcgcctattccggcttcatcatctggcacggcggtctggccggctcgattccgctgaccatcgcgaccgaggggcatttctccgccgacaagatcggcatcattcccaccggcgatacgattttcgcggtattcaacctggtgatcgtggtggcgatgttcatcctcgtgccgctggtcaaccggctgatgctgcccgacgagaaggaaagcgtctatgtcgatccggcgcgcctggaagaggcctcggtgccggcctcggacgacgacaagcgtccggccgcgcgcctggagaacagcaggctgctggcctggctgatcgccgcgggcgggctggcctacatgttcgactactacgtcgtgcgcggcgccggcctgaacctcaatgtcatcaacttcagcttcctgatcctggccatcctgctgcacggcacgccgcgccgcctgctggccagcctggacgaagccatcaagggaggcgcgggcatcgtgatccagttcccgttctatgcgggaatcatggccatcatgatggactcggggctggccgccaccttgtccgagtggttcgtgtcgatcgcctcggccgccacgctgccgttctggaccttcatcagcgccggcatcgtgaacatcttcattccgtcgggcggcgggcaatgggcggtgcaaagccccatcgtgatcagcgcggcgcaggcgctcggcgcggatatgccgagggtggcgatggccgttgcctggggcgacgcctggaccaacatgctccagccgttctgggccttgccggtgctggcgattgccggcctgaaggccaaggacatcatgggctattgcatcatccagctgctggtgaccggcgtcatcatttcggtgggactgagcttcttc

SEQ ID NO: 15206 - DNA, 1581 bp, Bordetella pertussis
atgcgcccgccgcgcgacggcaagcaatcgtcacggcgccacaacgacatcaggagacaaaccatggatctatccgacctgaaaaaattgggcctggatgtggcctacccgttcaaggaacagtacgagaactacatcggcggccaatgggtggctccggcaggcggggagtacttcgacaatctgtcgcccattaccggccagccgttttgccgcgtgccgcgctcgggcgcggccgacgtcgaactggcgctggacgcggcgcatcgcgcgtgcgccgcgtgggcgcgcacctcgcccgccgagcgggccaacatcctgctgcgcatcgccgaccgcatcgagggacagttgcccatgctggcggtggccgagtcgatcgacaacggcaagccgctgcgcgagaccaccgcggccgacctgccgctggcgatcgaccatttccgctatttcgcgggctgcatccgggcgcaggagggcgccatctcggagatcgacgccaacaccgtggcctaccacttccacgaacccatcggcgtggtggggcagatcattccctggaacttcccgctgctgatggtggcttggaagctggcgccggcgctggcggcgggctgcgtggtggtgctcaagccggccgaacagacgccggcctcgatcctggtgctggccgaactgatcggcgacctgctgccgccgggcgtgctcaacgtggtcaacggctatggcaaggaggccggccaggcgctggccaccagcaagcgcatcgccaaaatcgccttcaccgggtcgacgccggtgggcaagcacatcctgcacgcggcggccgacaacctgatccccgccacggtggagctgggcggcaagagccccaacatcttcttcgacgacgtgatggaccacgacgacgagttcctggacaaggcgctcgagggcctggccatgttcgcgctcaaccagggcgaggtctgcacctgcccgtcgcgcatcctgatccaggagtcgatctacgagcgcttcatcgagaaggccatcgcgcgggtgcagtccatcaagaccggccatccgctcgatgccggcaccatggtgggcgcacaggtctcgcaggtgcagatggacaagatcctgtcctatatcgatatcggccgccaggagggcgcgcaatgcctgaccggcggcgcgcgtaacgacatgctgccgggcgggctggaccagggtttctatgtccagccgaccatgctgctgggcaagaacagcatgcgcatcttccaggaggaaatcttcgggccggtcgcggcggtggccaccttcaaggacgaggaagaggccatcgccatggccaacgacacgttctacggcctgggcgcgggcgtctggagccgcgacggcgcgcgggcctaccgcgtgggccgcggcatcgaggccggccgggtgtggaccaattgctatcacctgtatccggcgcatgccgccttcggcggctacaagcagtccggcatcgggcgcgaggcggcgctgtcgaattaccagcagaccaagtgcctgctggtgagctacagcgccaaggccctgggcttcttc

SEQ ID NO: 15207 - DNA, 1191 bp, Bordetella pertussis
atgtccaagctggattccctgttcaccgccgcgctggagcaggccgcgcagcgccaggtgcgccgccgcctgcgccacgccgccgcgacgccccccggccggctggccctcgatggccgcaccctggtcaatttctccagcaacgactacctgggactggcgcgccacccgctgctggccgagcgcgccagcctgtgggccacccggcacggcgccggcgcgcaggcctcgcggctggtatgcggcaacctggacctgcacgaacaggtcgaagccaagctggcgcgcctgaaaggcaccgaggccgccttgctgctggccagcggctggcaggccaacgccgcggtgctgccggccctgttcaaggccgcggccgcgcagggcgagccgcaggtctacaccgaccggctcaaccacgccagcctgcaccatggctgccaggccgccggcgtgcgccagatccgcttccgccataacgacctggcgcacctggaacacctgctggccgaacgggccggcgccccgggcgcgcgcttcatcgtgaccgagagcgtcttcagcatggatggcgaccgcgccgacgtgccggcgctggccgcgctggcggcccgccaccatgccttcctgtacctggacgaagcgcacgcgaccggcgtgctggggccgcgcggcatggggctggcgggcctggcgcccggcggcgtcgacctggccatgggcaccttcagcaagggcctgggcagcttcggcgcctacgtggccggctcgcgggcgctgtgcgactacctggtcaatgcctgctccggtttcatctacaccaccgcgctgccgccggccgtgctgggcgccatcgacgcggcgctggacctggtgccccggctggaccaggcgcgcgccaccctgcagggccacggcgaacgcctgcgcgccagcctggccgcgcagggcatcgattgcggcgcatcctcgacccagatcgtgccggccatcatcggcgacgccggccatgcgctggccctggccgccgagctggagcggcgcggcctgctggcggtggcgatccgcccgcccacggtgccggccggcaccagccgcttgcgcatcgccctgagcgccgcgcacggcgaggccgagctggaccagttgatcgaggccctggccgccggctggcgcgccgtgcggcaggcggca

SEQ ID NO: 15208 - DNA, 2199 bp, Bordetella pertussis
atggcggcggaaaaggcccctgccaagactgcggtgaaggtcgccaagcccgctgccaagacggccgccaagaagacggccaccaagacggtcgcggccaagacggctgccgccgacaagccggccaagaccaccaaggcgcgcgccaagaaggccgaagacaagctggccgacctggtcggcgccgcgcgtccggcgcccagcggccgccgtcccggccgccccgcgaagaacgccaacaacgatagcgatgctttcgacgactccatggacggcgaaggcgaagtgctgcccgacctgaagccgcccaagcgcggcggcaagcgcggcaaggccgatcccaaggatctgatcgcccgtggccccgtctcgcccgaagaatacgaagcgcgccgcaatcgcctcaagcagctgatcaagctgggcaaggaccgcggctacctgacctacggcgaaatcaacgaccacctgcccgacgacctggtcgacgccgaagcgatcgacggcatcatcagcaccttcagcgacatggggatcgcggtctatgaccaggcccccgacgccgaaaccctgctgatgagcgagaacgcgccggttgcctcgaacgacgacgatgtcgaggacgaggccgaggctgccctcaccaccgtggactccgacttcggccggaccaccgaccccgtgcgcatgtacatgcgcgaaatgggctcggtcgagctgctcacccgcgaaggcgaaatcgaaatcgccaagcggatcgaggacggcctcaagcacatggtgatggccatctcggcttgtcccaccaccatcaacgaaatcctcgcccacatcacgcgcgtgcgtgaaggccaggcccagatcgacgaagtggtcgatggcctggtcgaccccgaagacggcgaggaatacgccggcgccggcgtgaccgccgacgaggacgaaggcgatgacggcccggccggcggcatgtccagcaagcagctggaagacctgcgcgtcaaggccctggccaagttcgacgaggtgagcaagcagttcgagaagatgcgccagtcctatgagaaggaaggctataagtcggacgcctatctcaaggcccaggacatcatccagaccgaactcatgggcatccgcttcacggccaagatggtcgagaagctggccgacaccctgcgcgcccaggtcgaggaagtacgccagctcgaacgcgcggtgctgcatacctgcgtcgaccgcgccggcatgccgcgttcgcacttcctcaaggccttccccggcaacgagaccaacctgcagtgggtgttggacgaagtcgccgccgcccatgcctacagcgaaaccctcgaacgccagatcccggccgtacaggaactgcagcagaagctgatcgacctgcagacgcgcgtcgtgctgccgctgaaggacctcaaggacgtcaacaagcgcatggccaccggcgaagccaaggcccgcaaggccaagcgcgaaatgaccgaggccaacctgcgcctggtgatctccatcgccaagaagtacaccaaccgtggcctgcagttcctggacctgatccaggaaggcaacatcggcctgatgaaggcggtggacaagttcgaataccggcgcggctacaagttctcgacctacgccacgtggtggatccgccaggccattacgcgctccatcgccgaccaggcgcgcaccatccggattccggtccacatgatcgaaacgatcaacaagatgaaccggatcagccgccagatcctgcaggaaaccggcgccgagccggatcccgcgaccctggcgcagaagatggacatgcccgaggataagatccgcaagatcctgaagatcgccaaggagccgatctccatggaaacgcccatcggtgacgacgacgactcgcacctgggcgatttcatcgaagacaccgccaccctggcgccttccgacgcggcgctgcacggctcgatgcgcgatgtggtcaaagaagtgttagactcgctcaccccgcgcgaggccaaggtgctgcgcatgcgtttcggcatcgaaatgagcaccgaccagacgctggaagaggtgggcaagcagtttgacgtcacgcgcgagcgcatccgtcaaatagaggccaaagcgctgcgcaagctgcgccaccccagccgcgccgacaagctgaagagcttcctcgaagggcag

SEQ ID NO: 15209 - DNA, 633 bp, Bordetella pertussis
atggtgccgcccgcgaatttgcgggaatccgttattgcgcaattgcgttcccagatcgtgtcgggcgcagcggcgccgggcatgatctattcggttcccagcctggccaacgagctgggtatctccaccacgcccgtgcgcgaagccttgctggaattgagccgctcgggcctggtcgaacccctgcgcaatcgcggcttccgggtccaggccattacgctgcaggacctggagaaccacttcgacgtgcgcgtcatgctggaatccggcgcactggccaccctggcgcgccagggcctgaccgacaccgcgccgctggtcgcgctggccgacgaggtcgcccaggcggtcaaggaccaggacgtggggcagtacatcgaatccgaccgcagcttccacgaggccctggtctcgcgcgccggcaaccccttgctcacccggatgatcatgcatctgcgcgccgacatgcggctctacggcatcaattccgaagagggccgcgtgcgccagcgcgcctcggtggaagagcactacgaaatgatcgacctggctgtcaagcagcaacccgacgccatcgtggcgctgatcacccgccacatcgaatcgtggaaaccgctgttcgccgcggcgctt

SEQ ID NO: 15210 - DNA, 2502 bp, Bordetella pertussis
aagcgaattgtgattggcctggtggtgttggttgtcgtggccgtcgtcggcctggccatctttttgctgacattcgatcccaacgcctacaagtacaagctggaagaggcggtgcaggcgcgttatgagcgcacgctgaacatcgaaggcgagatcgaactgtcgctgtttccgcgcataggcctggcggtgcagggggtatcgctgtccgaaccgaacagccccgacgtcttcgcctccatcgacagcatgcggctggcggtggcggtgtggccgctgctgtcgaacagcctggtggtcgatcacgtcaccatcaacggcttcaaggcgcgcgtcatccgcggcaaggacagccatttcaacttcgagaacctggtcggcggctcggtccagagcaccgacgtgcccggcaacgccgccgaggccaccgccggcgcgatcaccggcacggcgcaggccatcgtcaacggcaccgtcagcacgcccaagagcatgcagatcgatatcgccggcctggacctgaaggatggcgagatccagctgcaggacgccatgagcggcatggccgtggccatcaccaagctgaacgcggccaccggccgggtgacctataaccagccgttcgacgtcagcctgtcggcgcgggtcgagggcggcaacccgcgcctggacgccggcctcacgggccaggcgcaactgacgctcgatccgctggccaagcgctatgcggcgcagaggctggacctgcgcatggaagggcggctgcccggcgcgcaggccaagagcctggccgcgcgcggcaatgtggcgttcaatggcatgacctcgtcgctcgacgtggccggcctggaaatcctgttccagggcgatatcgtcgacacggccaccaagctgaccaatgtcgaggccagcgtggcgatgcccaagctggccgtggacccgcacaagaccgagctgcagatcgacaagctggcggtgcgcgccaagggcgccatgcccggcggccccttcgagctggcggtcgacgcgcccgcgctgaacatttcgcccaccaacgccagcggcgacgccttgagcggacgcgtgcgcacccaggaactggacgccagtttcggcctgaacggcatcagcggcaacgctggcgagctcgacatcaaggaggcgaagctggacagtacgctcaagcagggcgagcgggtggtcaagtcggcgttcgcctcgccggtcacgctgaacctgctgcagcgcagtatcggcctgtcggcgctcaagggcgacgtcaacatcaccgatcccgggttgcccaagggcagcctgcagatcccggtcatcggcagcgtcaatgccaacctgctcaaggaccaggccaatgccaggatcaacgccgtgctcgaaggcggcaagttcgacctgagcgccgatatcgtggcgttgtcggcggtgccgcgcgtgaccttcgcgctggccgtcgatacgctggatctcgacaagctggcgccgccggcaggcgccagcgcgccgcccaagccggccggcgatggcaagcaggacgaatccaagccgccggccaagccgcagcccgcgccggcgccggccgcggccgatgacagcatcaacctgtcgggcctggtggggccgaccgccagcggcaccatcaagatcggccagctcgtgatgcgcggcctgaaggccgagcaggtggcggcgaacatcaagctggaaaagggcaagctggacatctccaccctgaccgcggcgctgtacggcggcaagctgggcggggtgatgtcggtggacgcggtcaacggcaaccagctggtggcgaagatgtcgctggccggcatcgccatccagcccctgctttccgacctggccggcaaggacaccctcagcggcacgggcagcctggcgttcgacctcaagacggccggcgccaatacctacgccatgaagagcggcctggccggcaccatgcaggtgcggctgcgcgacggcgccatcaagggcatcaacgtggcgcagacgctgcgcgaattgaaggcgatgttccgcggcgaggcgcacgaccccaccgtgcaggacgaccagacccggcagaccgatttcacctcgctcgaaagcgacctggtgttcaacaagggcgtggccaccgtcaagcgcctggacatggccgcgccgctgctgcgcgtcaaccagggcaacccggccaacatcgatttcgtgcgcagcgagctggatttcgtggcacgcgtgcgcgtggtcaacacgtccaccggccaggacggcaaggacctggccgaactgcgcaacctgaccatcccgctgctgatcaccggcccgttcgacaagcccgtctacacgctgcagtggcgcgaagtagccggcgaagcgctcaagcgcggcctggaaaagcagctcaaggaagcgctgaccggcggcgaaggcgcgtccggcagtccggcgaagaatatcgacaaggcactcaaggggatcctgggcaaa

SEQ ID NO: 15211 - DNA, 249 bp, Bordetella pertussis
atggccctcaagatcaccgaagaatgcatcaattgcgacgtttgcgagccacagtgcccgaacgaagcgatttccatgggcgcggactattacgtcatcgatcctgatcgctgcaccgaatgcgtcggccaccacgacgaaccgcaatgcaaggtggtctgcccggtggagtgcatcgaactgcatccccaatggcaggaagggcaggaacaactgatggccaagtaccgtcgcctgaccggtgccgca

SEQ ID NO: 15212 - DNA, 2028 bp, Bordetella pertussis
ttgattccagaatcattcatccaggatttgctcgcccgggtcgacgtcgttgacgtcgtcgggcgatatgtgcagctgcgcaagggtggggccaacctgcttggtctttgcccgtttcacaacgaaaaaagcccgtcgttcactgtcagtccgaccaagcagttctatcactgtttcggttgcggcgcccacggcagtgccatcaccttcctgatggagcatacgggcgcgagtttccccgaggccgtacgcacgttggcggccgccgtggggctcacggttcccgaagaaaaccacagtcctcgccagcaggccgaatcggcccgccgcaaggccgaggtgtcgcgccatacgcaggtgctcgacgccgcgcaggcgcactacctgcgccagttgcgcggctcgccgcaagccattgcctacctcaagcagcgcgggctgaccggcgagatcgccgcccatttcgggctgggctggtcgggcaccgaccgccatggcctgtcccatgtgttcgacaactacgaggatcccgtgctggtggaagccggcctggtgatcgagtcggaggacgggcggcgctacgaccgcttccgcgaacgcgtgatgtttcccatccgcaatgcgcgcggcagcctgatcggctttggcgggcgcatcatcggcaagggcgagcccaaatacctcaactcgcccgagaccccgctgttttccaagggccatgaactctatggcctgtgggaggctcgcctggccatacgccaggagggccaggtcgtggtggtcgagggctacatggacgtcgtggggctggcgctgcagggcatcgccaacgcggtggccacgctgggcacgtcgaccacgcccgaccatgtgaagaagctgctgcgcgccagcgacaaggtgattttcagcttcgacggcgacgccgccggccggcgtgccgcctggcgggccctgcaggcctgcctgccggtgctgcgcgacgatatcgccatccgcttcctgttcctgcctgccgagcacgatccggactcgtatgtgcgagagctgggcgccgaagcgtttcgtacccgcctgggcgaagccgtggcgctgtcgcgctttctgctcgacgagctggcctcgcgccataccatgggcgaggccgaggggcgggccagttgcctgcacgaggccaagccgctgctggccgccatccccgagtgcgcgctgcgcgtgcagatcgaacgcgagctggcgcgcctggtgcagctcacgcccgaggaaatggcccaggtgctggcccagcaacccgcccggccgctcgcttcggccgccgcgccggcccaggcgtccgcgccggctgctggccgcgagggcgggccggggcatgccgacgaggcgccgccggactgggcgttcgagccggtgcacgacttcgaacccgatgcctattccgttggcgccgtcgacggggagccgagcatgccggccgcgggcggctggcaggagcgcaagggcaggcagggcggcgactggaagggcaagaagggcgactggaaaggcaagaagggcgactggaaggggcgccgcgacaatgatacgggtggttacgaaggccgccgtaccatgccgtcgctggccaggcggctgctgtgcctgctgctggcccaccccgagctggtcgataccatgggtgaccagcagcttgaagttatcgaccatggcccccatttaggactggtaagggacctgatcctgctggcgcagaccagtggcgcgcgccatgtgggcgcgctgatggaggctgccgacccggattccgatctctacgtggtgctcaagggcctgcgcgccgatgtcctggcccaggaagacctgccgcacccgcagaccgaatgggacgacgcgctgcggcgcatggagttcgacgcggctcgcgccgaaatggcgaaactggccgaaagcggcctggcgaccgacgaggcgcgccgtcgctacctggaactgtcgagcagaatcatggtcttaaagaatgccggggcacag

SEQ ID NO: 15213 - DNA, 210 bp, Bordetella pertussis
atgcctatcgttcgactgaaggaaaacgaaccgtttgaagccgcgctgcgtcgcttcaagcgcaccatcgagaaaaccggcttgctcaccgaactgcgttcgcgcgagttctacgagaagcccacggccgagcgcaagcgcaagcacgccgccgcggtgaagcgccactacaagcggattcgtagccagcaactgcccccgcgcctgtat

SEQ ID NO: 15214 - DNA, 1794 bp, Bordetella pertussis
gtggcttgcaccatcctccaatgccggattattcatcgatttgcgcattgcagcaaattggaagaggcgatagtgcacggcgccggccttgccctcgcgcagcagctcgaatccggccggcggcgccggcgcggtttcggactcgacatagaccagtccgtcctcggccagcacggcgggcagcagtggccacaggcgttccagccagccctggccgaacggcggatcgagcaggaccaggtcgaaacgcgaggcgtccatgcgctcgatcacctgcatggcgtcgccggcatggatgcgcaccgcgcccgcctgcagcttgtcgcgcagcgtccgcaaggcggccgccgcgccgcggtcgcgctcgaccatctgcacctggcccgcgccgcgcgaggccgcctcgaaacccagcgctccgctgccggcgaacaggtccagcacccgcttgtcggcgaattcgccgccccacaggtggttgagccagttgaacagggtctcgcgcacgcgatcgggcgtggggcgcaggcccggcgcgtcggcaacgggaatgagtgtgcggcggtaaaggccgcccacgatgcggatgggtttgctgcccgggcgggatggtttcaagaacggggacctcctgggcgcaatagtagcgtcccccgcggggacggatgtagggaaacgaatatacttttgcccatgttcagcttcttcaagaaaaaatcccctccgcccgccgcgccggcccagcccgcgccgccgccggaggcagtggacgcagggtcagccgcacctgcgcagcctcaacccgccgagccgcagcccgagccgcagccgcaacaaccgcccgagccgcagccaccggtcgcggccgcgcccgaggcgccccgcaaggcctcgtggctgagccggctcaaacagggcctgtcgcgcaccggccagaacatcggcgggctgttcgtcggcgtgaaggtcgacgagaacctgttcgaggaactggagtcggcgctgatcatggccgacgcgggcatcgaggccaccgagaaactgctggccgcgctgcgcgcgcgcgtcaagaaagagcgcatcgacgatccggcgcaggtcaagacggcgctgcgccaattgctggccgaccatctgcggccgctggagcggtccttcgacctggggcgggcccagcccctggtggtcatgatcgccggcgtcaacggcgcgggcaagacgacctcgatcggcaagctggcgcataccttccagcgccagggcgccagcgtgctgctggcggccggggacaccttccgcgcggcggcgcgcgagcaattggtcgaatggggcagccgcaacaatgtgaccgtgatctcgcaggatggcggcgatccggccgcggtggcgttcgactcggtcaatgccggacgtgcgcgcaacgtgggcgtggtgatggtggatacggccggccgcctgcccacgcagctgcacctgatggaagaattgaagaagatccgccgcgtcatcggcaaggccgaggccagcgcgccgcatgaagtgctgctggtggtcgatggcaacaccggccagaacgcgctggcgcaaatccgcgccttcgacgccgccatcaccctcaccggcctggtcgtcaccaagctggacggcaccgccaagggcggcacgctggcggccgtggccgccggcagccagggcgtgcggcccatcccggtctattggatcggcgtgggcgaggggttggaggacctgcagcccttcgtggccgacgagttcgccgccgccctgctggccgac

SEQ ID NO: 15215 - DNA, 1293 bp, Bordetella pertussis
atgagcaagaacgtagttgtgatcggcacccagtggggtgacgagggcaaaggcaagatcgtcgactggctggccgagtccgtgcagggcgtggtgcgcttccagggcggccacaatgccggccacacgctgtggatcaacggcaagaagactattctgcgcctgatcccgtcgggcatcatgcatgacggcgtcacgtgcttcatcggcaatggcgtggtgctgtcgcccgaagcgctgctcagggaaatcgaagagctcgaggcggccggcctggacgtccgttcgcgcctgcaggtctccgagatctgcacgctgatcctgccgtaccacgtggccgtcgacaaggcgcgcgaggcgcgcaagggcgagggcaagatcggcaccaccggccgcggcatcggcccggcctacgaagacaaggtcgcgcgccgcgccctgcgggtgcaggacctcttcaacccggcgctgttcgacgagaagctggccgaggtgctcgattaccacaacttcgtgctgacccagtacctgggcgccgagcccgtgtcggccaacgaagtgcgcgatcaggccatggccctggcgccggccctcgcgcccatggtgcgcgatgtctcgagcaacctgttcgcgctccagcaggaaggcaagaacctgctgttcgaaggcgcgcagggcgcgctgctcgacgtcgaccacggcacctaccccttcgtcaccagcagcaactgtgtggcgggcgcggcgtcggccggcgccggcgtcggtccgcaagcgttgcagtacgtgctgggcatcaccaaggcctacacgacccgcgtcggatcggggccgttccccacggagctggtcgacgagatcggcgcgcgcctggccaccatcggcaaggagttcggttcggtcaccggccgtccgcgccgttgcggctggttggacggcgccgcgctgaagcgctcggtgcgcctgaacggcatttccggcctgtgcatcaccaagctggacgtgctcgacggcctggaaaccatccagctgggcgtgggctatcgcgtcaacggcgaattccgcgacgtgctgccgtacggcgcgcacgccgtggcgcaggcgcaggcggtgctcgaagaactgccgggctggaccgagtccaccgtcggcatcaccgagtacagcaagctgccggtcaacgcgcgccgctatctcgagcgcgtggccgaagtgtgtggcgtgccgatcgacctggtgtcgaccgggcccgaccgcaacaaaaccatcgtgctgcgccaccccttcaagggg

SEQ ID NO: 15216 - DNA, 1302 bp, Bordetella pertussis
atgtctcgaatcaccaaactcttcaatctgaatgaccccggctggggccgtggcaacaataacggcaacggctccgagccgccgcgacgtccacagggcggcggcgacggtccacccgatctcgacgaggtctggcgcgacttcaacaatcgcataggcgcattgttcggccgcaagggcggagggggcaacaatcgtcccaacaaccgcggcggcatgacgccgccttcgccgcgcggcgcccgcatcggcctgggcatcatcgccctggtgctggtgctgctgtggctggccagcggattcttcatcgtccaggaaggccaggtcgcggtcgttacccagttcggcaagtacaagagcaccgcgccggcgggcttccagtggcgcatgccttacccgatccagaaccacgaaatggtcaacgtgtcgcagctgcgcacgttcgaggtgggttttcgcggcggttcgcgcaacaaggtgctgcctgaggccttgatgctgaccaccgacgagaacatcgtcgacatgcaattcgtggtgcagtaccgcctgcgcgccgacggcgcgcccgactacctgttcaagatgcgcgacccggacgagtccgtgcgccaggcggcggagaccgccatgcgcgaaatcgtcggcaagaagccgatggacttcgtgctctatgaaggccgtaccgaagtcgccaccgaagtgcagaatctcatgcagcagatcctggaccgctacagcgccggcatccagatcagcacggtcgccatccagaacgtccagccgcccgaacaggtgcaggccgcgttcgacgacgccgtcaaggcgggtcaggaccgcgagcgccagatcaacgaaggccaggcgtacgccaaccaggtcgtgccgctggccagcggccaggcctcgcgcatgatcgagcaggccgagggctacaaggccaaggtgatcggcgatgcgcagggtaatgcctcgcgcttctcgtccatcctcaacgagtacgagaaggcgccccaggtcatgcgtgaacgcctgtacctggaaaccatgcaggaagtcttcactcgcgccagcaaggtcatggtcgatactaagggcggcaacaacatgttgtacctgccgctggacaagatcatgcagcaggccgcgcaagacgccggcaagccgtcctcctccagcctgggcctgcccggcgcgaaccagccggcgattccgcaggcgccggcgcgcggttcgaccagcggccagtcttcatccggcagcagcaccagcaacacgctgcctcgcgaccgcatgtcgcgc

SEQ ID NO: 15217 - DNA, 651 bp, Bordetella pertussis
atgagcccgcaactgatcgatctgcttatcacgtcgctgcatgagaccctgctgatggtcggcgtgtccggcgccatttcggtggtggtcggcattccgctgggcgtgctgctcatcgtcaccggacgcggcggcatgctgcagaacctggcggtcaaccgggtgctggcggccgtcgtcaacggcacgcgctcggtgcctttcatcatcctgatggtggccatcatcccgttcacccgcctgctggtgcagacctccatcggcaccaccgcagccattgttccgctggcggtggcggcgattcccttcatggcccgcgttgccgagaacgccatgcgcgaagtggatccaggcctgatcaccgcggcgcgcgccatgggcacctcgcccttgcagatcatctgcaaggtgctgctgcccgaggccctgcctggcctggtggccgccaccatcgtcaccatcgtcagcctgatcggctactcggccatggccggcgccatcggcggcggcggcctgggcgatctgggcatccgttatggctaccagcgcttcctgcctgaagtcatgctggctgtcgtggtcgtgctgatcgcgctggtgcaggtcgtccagagcctgggcgactggctggtgcgccgcatgtcgcaccgc

SEQ ID NO: 15218 - DNA, 690 bp, Bordetella pertussis
atgagcgccgttcccgatatccccggcggccccgcgcagcggctggcccaggcctgcgatgcgctgcgattgccggccgacgccggccagcagcagaagctgctgcgctatatcgagcaaatgcagcgctggaaccgcacgtacaacctgactgccatccgggatccggggcagatgctcgtgcagcacctgttcgacagtctgtcggtcgtggcgccgctggagcgtggcctgcccgccgccgggtccggcgcgcgcgtcaagctgttcgacgtcggctccggcggcggcctgcccggcgtggtgctggccatcatgcgcgcccattgggacgtcacatgcgtggacgcagtcgagaagaaaaccgcattcgtgcgacagatggccggcgcgctcggactgcccaatctgcaggccgcgcatacccgtatcgaacagctcgaaccggcgcaatgcgacgtggtgatatcgcgtgcgttcgcttcgttacaggacttcgcgaagctggccggccgccacgtgcgcgagggtggtaccctcgtcgccatgaagggcaaggtgcccgatgacgaaatccaggcgttacagcaacacggccactggacggtcgaacggatcgaaccgttggtggtgccggcactcgacgcgcaacgctgcctgatatggatgcgacgcagtcaaggaaacata

SEQ ID NO: 15219 - DNA, 597 bp, Bordetella pertussis
atgatcgagcccctgtacgtcgccggcgccagtttcctgcaccgcctgccggccgggctgaagctggcggcgttggcgctggcgggggtagggttgttcctgctgtccgactggcgcgcgctggcggcggtgttggccggcgccgcgctgctggtctggcgcagcggcgtcggcgcggccgcctggtggcggcagacccgcggtctggcgttgatcgtgctcgcggtcggcctgttcaccggcctgatgcagggctggccgcacgccgccgtggtggtactgcgggtggcggcgctgatcggcctggccatggccgtgacgctgaccacgccggtgccggccctcatcgacgcgtgcgagcgcgcgctgcggccggccgaacggctgggcctgctcaatgccgcgcaggtggcgctggccctggccctggcgctggccttgcgcttcatccccgaaatctggcgcaattatcaggaaatccgggaggcccaggccgcgcgcggcctgggcgcccatccgctggcgttgctcgtgcccttggtggtgcgtacgctgaaacgtgccgaggaagtggcacaggcgatcgacgcgcgcggt

SEQ ID NO: 15220 - DNA, 987 bp, Bordetella pertussis
ttgaatacccccacgcccgttttcaccgattacctgcgcgcgcaccagttcctgggtatgcagccggggcccaggttgctggtgctgggcgcggtgcacggcaatgaagtctgtggcacgcgcgccatcgaacgcatcctggccgagctcgaaagcggcgcgctggcgatcacgcgcggccagctgacgctgctgccggtgaccaatcccctggcctaccgcaaaggcgagcgccagggcgaccgcaatctcaatcgcaacctgcgcgtatgcgcgacgccgaccgattacgaggaccgtatcggcaatgccctgtgcccgctgctgcaggcgcacgacgtgctgctggacctgcattccttccacaccggcggccagcccttcgcgatgctgggcccgcgcgacaaccaggaggcgctcgagcctttcgcgcatgcccgggaggaggcgcggctggtggcgcacctggggccgcgccgcgtggtcgagggctggatgcaggcctacgagcgcggcgtgcggcgccggcgcgagcagaaccccggcgcgcccgcggccttgctggacgcggcctatggcgtgggctccacggagtatttccgcgcgcatggcggctatggcgtgacgctggaatgcggccagcacgacgacccggccgcgcccgaggtggcctaccgcgccatccgccagacgctggcgctgctgggcctggccgatatcgcgctggagccgccgcggcgcgacttcgagaccttgtgcctggtcgacgtggtggaccgcgaggccgacggcgacgccttcgcgcggccctgggccagtttcgacccggtgcggcagggcgagctggtgggcacgcgcgccgatggccggcaggtgctggcgccgcgcgacggctatgtggtgttccccaacccgcgcgcgctggcgggcaacgagtggttctatttcgccgtggccagcgaccgcctgggcgaggatgcaggaaat

SEQ ID NO: 15221 - DNA, 462 bp, Bordetella pertussis
atgagccgacatcgaggtgccaaacaccgccgtcgatatgaactcttgggcggtatcagcctgttatccccagagtaccttttatccgttgagcgatggcccttccattcagaaccaccggatcactatgtcctgctttcgcacctgttcgacttgtcagtctcacagtcaagcacgcttatgccattgcactatcagcacgatttccgaccgtacctagcgtaccttcgaactcctccgttacgctttgggaggagaccgccccagtcaaactgcctaccatgcactgtccccgatccggataacggaccaaggttagaaccgcaaacaaaccagggtggtatttcaaggatggctccctcgaatctggcgactcgagttctgcgcctcccacctatcctacacaggccggttcacagtccaatgcaaagctacagtaaaggttcatggggtctttccgtc

SEQ ID NO: 15222 - DNA, 411 bp, Bordetella pertussis
atgggtttgcgtagatcggtattcggcgtggccgccagtctggtcggactgacgcgtacacgcctcgaactactggcgctggaagccgccggcgaaaagatccgcctgatcaaactgctgggcatggccttcggcgcgctgttgttcctgacgctggcggtcctggtattcaccatcacgatcgcggtggccttctggcctaccgagtcgcgctacgccgcgctgggctggctggcgggcggctatggcgtgatcgggctggtgctgttcttcctggtccggcgcgacctggtcgacggtcccgtgccgttcgccgccacgctcgaggagctcggccgcgatacggacatgctggaacgggtgcgcgatgcgcaacgcgccagcgacgggcagcgcaacgcggaggacgac

SEQ ID NO: 15223 - DNA, 1311 bp, Bordetella pertussis
gtggcggcgccggtagacgccgttgttcatggagattgccgattgagccatgtagttatccttgctcgtgcatcaggcctggcggccctcggccctggacaggcgcaccagcagcattttcgagaaagccagcacgacggtggtgatcaggaacaggatcaggcccagttcgagcagcgccgatttctggatgccgcctgcctcgttgaattcgttggccagcgccgaggcgatcgagttgcccggcgagaacagcgagcccgaccagcggaaggcgttgccgatcacgaaggtcaccgccatggtctcgcccagcgcgcggcccagccccagcatgatgccgccgatgacgcccgacttggtgaagggcagcacgacgcgccacatgacttcccaggtggtactgcccaggccgtaggcggactccttgagcatggggggcaccagctcgaacacgtcgcgcatgacggcggcgatgaacggaatgatcatgatcgacaggatcaggccggcggtgaagatgccgatgccgaacggcgggccggcgaacaggccgccgatgatgggcacgctgcccagcgtggcgatcagcgcaggctgcacgtattgctggaacaccggcacgaagacgaacaggccccacataccgtagatgatggacgggatggccgccagcatctcgacggcggtgcccagcgggcggcgcagccaggtgggcgccagctcgatcaggaagatggcgatgccgaacgacaccggcacggcgatcagcaaggcgatgaacgaggtcagcagcgtgccgatgatgggcacgaccgcgccgtagttctgctggaccggatcccagtcgttcagccacaggaacgacaggccatacttggccagcgattcgcggctgccatagatcagcgagatcatgatggcggccagcaggatgaacaccaggaaggcgaaggtccgggtgaggttcttgaacagcgcatccatcagcgcgttattgttttgcttcataggcgaaggcgtgccggtagtggtcgaatcggccgtggaggacggcagcggcacactattatccattaccgcgctcatggacaggctttccttgagatagggccaggggtcggcgcaatggcggggcgcccggcgccccgcgaagtcaggacggcgatcgctcgccgttcactggtccggccagggcggacagcgccctggccgatacgggcttactgccacacggccttgccgtcggcgcccttgacttcaccccaggcggcgcggatttccgtggtcacggcctcgggcagcggcacg

SEQ ID NO: 15224 - DNA, 947 bp, Bordetella pertussis
tccatgggtgctgccgcccgcgtccagcccgacgacgtcatggattccgtgcagcgcctgcgcgccgaggccaggaaggccggcacgctgagcagcaacaagcagcagaaagtcaccaccaccgaaagcgccggcaagaccgtcgtggtggtcgagccggccgatccgcaagtggtctacgttcccagttacaaccccaccgtggtgtacggcgcctggccgtatccggcctatccgccctattactatccgccgccgcccggctcggccttcgcgaccgccctggtcagcggcatcggcttcggcctgggcgtggcggcggtcgacgccatgtggggcggcttcgactggggccacaatgacgtcgatatcgacgtcaatcgctacaacaacgtcaatatcaaccaccgtatcgacaccagcaacacgcgggtggactggcagcacaacgccgccaatcgcggcagcgcggcctacgccgacagcgccagccgccagcgcttcgacgcgcagcgccaggccggccagcagcgccgcgcgcaggccggccagcgcgcgggcggagggtcgatcgacgccgagcggcagcgcgccgcgcaggcgttcgaaggccataccggccatgccgtcgccggttacggcggtcccggccatggcggcgagcgcgccggggcgcctgggctcgacgcccggccgaccggcagccggccgggccaggcgggcgccgggcagcgccaaccgggccagcacaatccggctcacgcggacggcatgcaacgccagcgcgccgaccaggccgcggcgcgcgagcgagccgagcaattcaaccgcacgccggcgctgcacgacgccggcgacggcgcgcgcatgcgccagcagacccagcgcggcgacttcgcgcaacagcgcggcggctttggcggccgcggcggcacgggcggcggcgc

SEQ ID NO: 15225 - DNA, 654 bp, Bordetella pertussis
atgaaaatggattcatctcaagtccccaaccccgtgctggtgctggtcggcagtccgcgccgcgacggcaacagcgccctgctcgcccaggccgtggccgagggcgcgcgccagtccggcgccgccgccacgctgctgtttctcgacgactacatcgcgggcttcctgacggacgagaaagaggccgatgcgcggcgccccgacgaccgctacggcgaactgttcttcgaccacttcctgcccgcgcgcgccgtggtgctctgcacgccggtgtactggtacggcatgtcggcccaggccaaggccttcttcgaccgctctttcacctattactcggccagccatccccgccacgccgaggtgctgcggcgcatgacgggcaagcggctggcgctggccgtatcctccgaggaaacctaccccggcgcggccctgggcatcgtgcaccagttgcaggagttcacgcgttacacccactcgcagttcgtcggcatggtgcacggggcgggcaaccgccgaggcgaagtggcgcacgatccgcgccgtccgctgcaagccgcgcaccggctgggccacgacctgttgtcgctgccctactccgactatcgcatcgacagcccgcgcgatcaccaggtctggcccggcgcgccggcg

SEQ ID NO: 15226 - DNA, 681 bp, Bordetella pertussis
gtgaccaccaagccgcgcctttgcactgccctcctgaccctggccatcgccgtatcggccagcgcccccgtgctggcgcaatcgatggccggcggctcggccaagaaccgctacgccaaccagaccaagctggacccctacccgcccgaaggcggctggcaggggctggccaacctgctggaggccgccaagcccggcgtggacacgcgcctggaccccacgccctcgcagatcaccgaccgcatcgaggagctgctcaaccgcggcgccaacgaagaggccctcagcctgatcgagcggcgcgaggccgccatcaagggccagcgcggcgccgacgtgcagctgatgttccagcacgcccgcgcgctggccgcgctgggtcgcgccgacgaggccattgcggtatacagtgacatgacgacccaattcccggagctgcccgaaccctggaacaacctggcggccctctatgcctcgcgcggtgaactcgaacgcgcccaggacagtctacagatggccctgcgcgcgaatcccgactacgccgccgcgcgcgccaacctcggcgacatccagctgatgatggccctgcgcacctaccgccaggaggaggctcgcggcgtcccgggcatgaaggctcgcgtcgaggaaatcgaatccctgttgaaggataaacagcctaaa

SEQ ID NO: 15227 - DNA, 981 bp, Bordetella pertussis
ttggccgatcggccgaattgctttaggcttggatggtcgtggcggcgcggcggcgccttgccctggggcaggcgccgctgttcgcgcctaccgcatcgccagcggcagcgcggtcacgatcgccggaaatatcgtgatgatcgtcgtggccagcaccagcagcaggaagaacggaaaggccatgcgcaccagctcgaacaggtcgcgtccggtaatgccctggatcacgaacaggttgaagcccaccggtggggtgatctgcgccatttcgaccaccaggatcaggtagatgccgaaccagatcgggtcgatgtccgccgcctggatggccggtatgagcacggcggtggtcagcacgacgatggatatgccatcgaggaaggcgcccatcaggatgaagaagacggtcagcaccgcgatcagtccatactggctcaggcccagcgacgagatccactcggccaggttggccggcaggccggtgaagctcatcgcgctggtgagataggccgcgcccagcaggatgaacgagatcatgcacgaagtccgggtcgcgcccatcaggctgtcgatgaacgacctgcggttgagcgacttgccccaggcggcgatcgccagggcgccgatggcgccgatcgtggcggcctcggtggcggtcgcgatgcgggcgtagatcgaaccgatgaccccggcgatcaacgccaccaccggcagcagcaggcgcaggcgggccagcatggtgagccagggcaccgcgggctcgcgcggcggcacccgcgcggggttgcgcagcgaccatacgccgatgtagccggagaacagcgccatcagcagcaggccgggcaggatgccggcgatgaacagcttgatgagcgagacctgggccgccacgccgtagacgatcatgacgatggaaggcggtatcagcaggcccagcgtgccggcgccggccagcgacccgcgatggccaggccgtcgtcg

SEQ ID NO: 15228 - DNA, 2523 bp, Bordetella pertussis
ttgcggattgcgtccgccacctgcgcatgcaggggcgttgcgccggaacggtccagcgcaaagggttcaatggcggacaacgccatgcgatcagcctccagtcgtggagcgcgcagtttcccatacttgatgccaacccggcgccagctgcgccgcgcgctcggcggccagcaccaggctgtcctcgcgcgatgcccttgccggcgatgtcgaacgcggtgccgtggtcgaccgacacgcgcaccaccggcaggccaccgtgatgttgacgccgtcgtcgccatagaccgacttgaacggcgcatagccctggtcgtggtagcaggcgatgacgaatttccacttgccgcgcacggcctgcggaaacagcgcgtcggccggaatcgggccggccgccaggatgccctcggcattgttggcctgcgtcaccgccggcgccaggatctcggcgtcctcggtgccgaagatgccgttctcgccggcatgcgggttcaggcccgcgaccgccaccggatggtcggcgcggcccagcgcgcgcgcgaacgagccggccaggcgcagcaccgcgcgcatgcgctgcggattcacatcctcgatggcctggcgcagcgacacatgggtggtggcgtggaagatatacaggtcgccggccgacagcaccagcgagaaggtcttgacgccgaactcgtgcgccagcagttcggtatggcccggccatttgtggccggccatgtgcatggcggccttgttcagcggcgcggtgacgataccgtcgatcaagccgtcgcgcgccagcgcgcaggccgtggtgacgtagcgcaccgagccgtcgccagcctcggcgctcaactggcccggcggcacgtgcgccagcgacgggccggcctggatcacttcgatgctgccgggctggttggtggcctcggccggcgtcgcgatgacgcgtacccgcgccggatcgccccccacggcctgcacggcctgggccagcacggcggcgtcgccgaccaccagcagccgggcgcgctggcgcagctcgtcgtggccgagcagcatcttggcggtgatttccgggcctatgcccgccacgtcgcccagcgtcaccgccagggtgggaatgcgggagggggtagcgtcttgcgtcatttcgtgaatctccgttcccggatcgcctgcgcggcccggatcaatacatcctgctcgccaaagccgccggccttggtcacgaccggcagccctgccgcctggccaccggtcagggtgcccagcggtacgccgccggtgacttcgtcgaccagcgcaataccgctggcctgcaatgccgccagcacggcgctggcgccgtcgccgccggtggccaccacgccggccgcgccgtgcgccagcaccaggcgcgcggccagctcgcccagcctgcgcgcgacgctgtctgcgtccagcccggccaggcgcccttcgggcgccagcagcatcagggcgtcgaccgccggcatgccgtgctcggccgcctcgacctcggcggtccaggccgcccagttgcggtcatcggccagttgcgccagcgtcggcgcccaggtgcgcgcgccggcctgctgcagcgcggcggcctgctggcgcgccgcgctgtgctgcgaagtcacgaccaccagcaccgggccggccgcctgcccgccggcccatacccacgccagcggcgcggccagcccgcccgagccgacgggcacggcgcgctggcccagcacgccgatggcgcgcgccagccgctgcacatcggcgtcgtccagggcatcgaccacgaccaccggagcggcggcggcgatgcgccgcgccagttcggccggggtttcccccgcctgcgccgccagctgggcacagcccaagagggtgggaatgtgcgactcggtcaccggcgtcacggggtcggtggcggccgaggtctcggtgaccggccgatcgctcacgtacagcacgccctggcgcaccgtgcggccggtgacgggaaacgccgggcagaccaccgcgatggcaccctcgccccaagccagccgcgcggcgtcgatctcggccttgaaggcgccgcgcaaggtcgaatcgaccttcttgtacaggcgctgcacgccggcggcgcgcagcctctcgacctcgccgcgcaccacggcggcggcatccgccgccgccaaggggcggctgtgcgtcgtgaccgccagcacctcggcctggcgcacggccggatcggccagcgcctgctcggcgccgcccaccgacagctgggtcgcccagccggcccgcacgaactgcaccgcggtgtcgcccgacccggtcagatcgtcggccacgatgcctatgtacggcccgcccattcagaggctcacttcggcgggctggccggtgcgctcgtcctgcggctcctgctccaccggcttgagttcgccggcgcgcttgaggaagtacgacgccagcaccggcgcaagaatggagctgatcagcacgcacgcggccacctgggcggtcgcggtcgcgaca

SEQ ID NO: 15229 - DNA, 2748 bp, Bordetella pertussis
atgcgcctgccgcttctgtcgcgccgcctgaatgcattgttagtgtcgtcgttcctggctttccaggccggcgccgcgtcgctccccgcgggcgtctcggaagtgtcctcgatcgagggcattaccgaataccgcctggccaacggcctgcgcgtgctgctggcgcccgacgcgtccaagcccaccaccacggtcaacatgacgtacctggtgggatcgcgcaacgagaactacggccagaccggcatggcccacctgctcgagcacatgctgttcaagggcacgcccgccatccgcaacgcgctgggcgagttctcgcgccgtggcctgcaggccaacggctccacctcgtcggatcgcaccaattacttcgccagcttcgcggccaatcccgaaaccctcaagtggtacctgggctggcaggccgacgccatggtcaactcgctgatcgccaaggaagacctcgactccgagatgaccgtggtccgcaacgagatggaaagcggcgagaacaacccgttccgcgtgctcatgcagaagatgcaggccgccgcctaccagtggcacaactacggcaagagcaccatcggcgcgcgcagcgacgtcgagaacgtggacatcgcgcaattgcgcgccttctaccacgagtattaccagcccgacaacgccgtgctgatcgtcgcgggcaagttcgatccgcagacggccctggccgatatccagtcctcgctgggcaagctgcccaagcccaagcgcaccctgccgcccgaatacaccgtggagccggtccaggacggcgagcgctcggtgacgctgcgccgcgccggcggcaccccgctggtggccgccatgtaccacctgcccgccgccggcagccccgatttcgtcgggctggacctggccgccaccatcctggccgacacgccgtcgagccgcctgtaccacgcgctggtccccaccaagctggcgtcgggcgtattcggcttcaccatggaccagctcgaccccggcctggccatgttcggcgcccagctgcaacccggcatggaccaggacaaggcgctgcagaccctgaccgctacgctcgaatccctgtccagcaaaccgttcagccaggaggaactggagcgcgcccgcagcaagtggctgaccgcctggcagcagacctatgccgatccggagaaggtcggcgtggccctgtcggaagccattgcctcgggcgactggcgcctgttcttcctgcagcgcgaccgcgtgcgcgaggccaagctggacgacgtgcagcgcgccgccgtcgcctacctggtgcgcagcaatcgcaccgaaggccgctacattcccaccgaaaagccgcagcgcgcgccgctggcgcagcgcgccgacctggcggccgtcttcaaggactacaagggcgacccgaacttcaaggccgtcgaggccttcgatccgtcgccagccaatatcgacaagcgcaccctgcggcgcacgctcgacctgcccaacggccaggtcgaactggccttgctgcccaaggccacgcgcggcgaccgcgtgcaggccgaactgctgatccagttcggcgacgccgaagcgctgcgcggccagcgcgtgccgctggccgccgcggccgccctgctcgaccgcggcaccgacaagctgtcgcgccaggccatccaggaccgcctggatcagctgcaggccgaagccaccatcaatggcagcggcaccaacctggtggtcaacatctccacgctcggcaagaacctgcccgacgtgatggcgctggtgctggatgtggtgcgcaacgccagcttcccgcaggaccaggtcgaggaatacaagcgccaggccatcaccatggtgcaggacgcgatgaccgacccgaccgcgctggcctcgcgcgccctggcacgccacaacaatccgtggccggccgacgacgtgcggtacgtgcccaccttcgacgaagccctggagcagctgcgcagcctgtcgcgcgacgacctggccgcggtcagcggcaagctgtacggcgccggccggatcaagttctcggccgtgggcgaattcgatcccgccgcggtcgaggccgtgctgcgcaagggcctggacggctggcgcagcgcacccgcctatacccgcctgccggatccctaccgcgccgtgcccgcgcagcaattcgacatcgccacgcccgacaaggccaacgccttctacatctcgcgcatgccgctgcagctgcaggacaccaacgccgactaccccgccctgtacctggccaacttcctgctcggcacctcggaaacctcgcgcctgtggcaccgcgtgcgcgaaaccgaaggcctgtcgtacaacgtgcgcagcaacctgtcggtgtcgtcgtacgagccgtccgcgaactggacgatctacgccatctacgcgccgcagaaccgggcacgcctggaaaaggccatctcggaagagctggcccgcgccctcaaggacggcttcacggaccaggaggtccgcgacggcgtcgtggcgctgctgaactaccgcaacctggcgcgcgcccaggatgacgtgctggccgatacctgggtgaactacatgcagaccggccgcagcttccagtggtcggccgacatggaccgcaaactcgaggcgctcacgcccgaccaggtcaacgccgcgctgcgcaagtatctcaagcccgaggcgttcagcaccgccgtggcgggggatttcaccaagaaatccacccct

SEQ ID NO: 15230 - DNA, 897 bp, Bordetella pertussis
atgtactttcccattgtcgccctgatcggcagataccaggacaccggcctggacgcaccgctgaccgcgctggcgcaaatgctgacgcaggccggccgccgcgtgctggtcgaggccgagacggcgcgcaacgccggcgtcagcggctatcccgtggccgactgggatgaaatcggccgcaccgccacgctggcggtcgtgatgggcggcgacggcaccgtgctgggcgcggcgcgccacctcgcgccgtacggcgtgccgctgatcggcatcaaccacgggcggctgggcttcatcaccgacattccgctgcaggatgcccacgacgcgctgggccgcgtgctggaaggcaactaccaggccgaggaccgcatgctgctgcaaggcggcgtctggcgcggcgagcagcagatgtactcggcctcggccgtcaacgacgtggtgctcaaccgcgccggccgcggtggcatgatcgaagtgcgggtcgaactcgacggcgccttcatgtacacgcagcgcgccgacggcctgatcatcgccacgcccaccggctccaccgcctactcgctgtcggccaacggccccatcctgcatcccggcatgaatgccatggtgctggtgccggtcgcgccccagaccctctccaaccgcccgatcgtcattcccgacagcggcgtgctcaacatgacgctgacggccatggggcgggtggaaatcggcgccagcgtgcatttcgacatgcagacctggtccgacctgcagccgggcgaccgcatcacggtgcagcgcgccccgcatatcatccgcttcgtgcaccccgaaggctacagcttcttctccaccctgcgccgcaagttgcactggaacctgatgccgcaggccaccgacaaccttgag

SEQ ID NO: 15231 - DNA, 2496 bp, Bordetella pertussis
gtggatggcgggcgccgccccggccggccggggcggtttgtaacagaagggcggcggccctcaggcggcgtgctcgatgaccagctgtaccgacaccatgccattccagatgttctgctccagccggtaggcggcctggatgcgctcgggcagggactggtcgtggccgaaccagatggcgtcgaagcgctggtggccgcgctcgagcgccagcttcaggtgcttgccgcccaccaggcgctggctgcgcacggtgaattcgtccaggaacagcggggcggcgaaccccgcgccccagacctgctgctgcagcaggccggccacttcggcattggcgtagccgctttcgagcgagccgtcggtttcgagcagcggctcgaagcggtcgcgcccggtgagctcgcgcaccgcggcgtcgaaggccggggcgaaggcggcgaaatcgccgctgcccagggtcaggccggcggccatggcgtggccgccgaacttgcgtatcaggcccgggtggcgcttggacaccaggtcgagcgcgtcgcgcaaatgcacgtcggggatcgagcggcccgagccgcgcagctcgtcctcgccggccggggcgaaggccagcgtggggcgccagaacttctccttcaggcgcgaggccaccaggccgaccacgccctggtgccagccggggtcgaatacgcataccgtggcgccggcggcggcgtcgggcgcctccatggcggccagcgcctggtcgcgcatctcggcttcgatggtgcggcgttcgcggttgatgttgtcgagctcgcgcgccatttcgagcgtctgcgcctcgtcgtcggtggtcaggcaggcgatgcccaggctcatgtcggccagccggccggcggcgttgatgcgcggaccgagggcaaagcccaggtcgaagccgctggcggtgcgcggctcgcgcccggccacggcgaacagggcgcgcacgccgggctgcatgcggccggcccgcatgcgctgcagcccctgcgtgaccagcagccggttgttggcgtccagcttgaccacgtcggccaccgtgcccagggccaccaggtcggacagcgcatccaggcgcgggccgccatccggcgcgtagacgccgcggcggcgcagctcggcgcgcagcgccagcatcatgtagaagatgacgccgacgccggccaggtgcttggagccgaaaccgcagccgggctggttgggattgacgatggccagggcctcgggcagcgtgtcgccgggcaagtggtggtcggtgatgaccacgccgatgccggcggcgttggcggcggccacgccgtcgacgctggcgatgccgttgtcgaccgtgatgatgatgtcgggcttgccgcgccgatggcggcaggccagctcgacgaccgccggcgagaggccatagccggtctcgaagcggttgggaaccaggaaatccacgtcggcgcccatggccgacagggcgcgcaggccgaccgcgcaggccgtggcgccatcgcagtcgtagtcggccacgatgagcaggcgcttgccctgctcgatggcgtcggcgagcacggcggccgcgtgggccgagtgggtcaggcggtcgggcggcagcagcgcgggccacgccatacgggtctgctcggggtggatgacgccgcgcgccgcccacaggcgcgacagcagcgggtggatgccggccgcttcgaggtgctggcaggcttgcagatcggcagtacggataatcagacggggcgagaccaccaggcgttccagttgtgcttgggcgcgggcagccatcgggccagccccgcgcgtggtttgagggtgagggcggcgcggcggtcatcgcccagcagcagcagttgcaagggctggaccggccggccgtgcgggccggccagcggcgccaattgcgccgcgtccagcatggccagcgcgtcgagccaggcggcccagtcgccggcgcgctgggtggcggccagttcgtcgcagactcgcgccggcgccggcgcgccggccggccacggcgtggcgccgccatacagccacagcgcgttgatcggcgcggcgccgcgcgcggcgcgcgcttcattgacaggatgctcgtaccagaccatctggatttcgttgagcaggcggcgccacgggcgcatggcgacgtcctgggtccaccaggcgcgcagccgctggccggccaccgccgcgggactggccgtttgcggcgccatgccggcgggcagcgtcaggcgccagcgcgccgcatcgatgggcgtggcgccgaagccgctgtcggcaaacagcggcgcggccgcctcgaacaactgcgcgctttcgtcggcgcgcaggtcgagcagggcggggtcgagcagggcggcctggtcggcccccagcatcaggtgcgccaggtcggccagccagaccggctggccgggcgtaccgccggcggcgcgcagcgggccgaggccggcgcccaacggcaggccgggctggggttgg

SEQ ID NO: 15232 - DNA, 453 bp, Bordetella pertussis
atgacgcgcatcgacttcgccttcggcgctccggaccgcctgcgcgcggcctgccgcaccgcgcgcaagcgcttccaggcgggccagcggctggtggtctactgcgccgacggcggacgcctggccgccttcgaccggatgctgtgggccctggaggacgtctcgttcgtgccgcatgtgctggccaacgacgcgctggcggccgacacgccggtcctgctgaccgcgggcgaccccgccgccgccctggcgctggccaccaccggcgacagccgcccctggctgctgaacctggatgacggctgcccgcccaacttcgatggctacgagcgcctgctggaaatcgtctccgacgacccggccgaccgccaggcggcgcgccagcgctggcgcgactatcagaatgccggccatgcgctgcacagccatgacctgagccgcgcgggcgaggcc

SEQ ID NO: 15233 - DNA, 462 bp, Bordetella pertussis; identical to SEQ ID NO: 15221

SEQ ID NO: 15234 - DNA, 987 bp, Bordetella pertussis
gtgcggcggctgctacagcttcgatggcggcagattgatcttcttgacgacctcggcccacttggcgatttccgcgcgcatgaaactgtccagcgcggcggatgtgccgccggtcggctccagtcccgcggcggagaactgcgccaatacgtcttgggacttcaggcccttgttggccgcggcgttgagcgtttgcacgatcgcggccggcgtgttcttcggcgcgtacagcgcgacccacgaggccgacgcgaacccggggacggcttcggccacggtaggcagttccggcaccagcgccgaacgttgcggacccgtcacggccagggcgcgcaggctgccagccttgacctgcggcagcgacgagggcatgttgtcgaacatcagctggacatggccgccgatcaggtcggtcagcgcgggagcgctgaccttgtagggcacatgttggatatcggtcccggtcatcagcttgaagagctccagcgtcaggtgcagcgagccgccagtgccggtggacgcataggattccttgcccgggttggctttcaggtgcgcgatcaggccctggacgtcccgcaccggggacgatgggttgacgaccaccagcagcgggctggatgccacggcggcgatcggttcgaaactgccggtcgcgctgtacggcaggttggcgtaggtgctggggttcgttccatgggtcgcgctggtgccgatcaacagcgtgtagtcgtcggcgggcgctcgcgccacataatccgagccgatgatgccgcccgcgcctgcgcggttctccacgatcaccgactgtttcagctcctcgctcatggcgcgcgccaggccgcgcgcggcgatatcggtaattcctccgggcggatagggcactaccagcctgatcggcttggtcggataggcgtcggcgtgtgcggcgccaagcacccccaaagtcagcacgcccgtggcgagggaaatgagtactcggtgcaa

SEQ ID NO: 15235 - DNA, 357 bp, Bordetella pertussis
gtgagggcggtagtcgccgccttcgcttttcgttctttaggaaacgccatgaaaaaccaaaagatccgcatccgtctgaaggctttcgattacaagctgatcgatcagtccgcagcggagattgtcgacaccgccaagcgtaccggcgctgtcgtgcgcggtccggttccgctgcccacgcgtatccgtcgttacgacgtgctgcgttcgccccacgtcaacaagacgtcgcgcgaccagttcgagatccgtacccatcagcgcctgatggacatcgtggatcccaccgacaagaccgttgacgcgctgatgcgtctggacctgccggctggcgtcgacgtcgagatcgcgttgcag

SEQ ID NO: 15236 - DNA, 294 bp, Bordetella pertussis
atgaatgccgaacgcttgatgcaagtcattctggcgccgatcgtgaccgaaaaggccaccttcgttgccgagaaaaatcagcaagtcgctttccgtgtcgtggctgacgctaccaagccggaaatcaaggctgccgtcgaactgctgttcaaggtgcaggtcgaatccgtgcaggtcctcaaccgtaagggcaaagtcaagcgctttggccgcttcgttggtcgccgccgcaatgagcgcaaggcctacgtcgcgctcaaggacggccaggaaatcgactttgcggaggtgaag

SEQ ID NO: 15237 - DNA, 1388 bp, Bordetella pertussis
tcgatgcaacggcggctgacgctgtggctgggcgtcatcgccctgctggcgtccagcctggccggagcgctgctgttctggacgctgaaacaggaagtgcagcgccaggaaatcaccgaggcgcgcggcaaggccgaactcatcgagcacctggtgggcatgcagtcccatacgtcgcgggcgctcagcgacatgctcgacggcatccaggccggccatggccacctgggcatctggatcaccagcccggacggcacgctgcgctatggcaacgccacgcccgaggtgctgagcgtcacggacgacgacgaagtgctgctgcgcaacgcagatgacacccgcatgcgcggcgtgcggctgaccctgccgggcccgcccgaggccggcgccacgctgaccgtggcggtcaatacgctggccaacgcgcgctttctctatgcctatggcaccgcgttgctgctgatctgcgcgctgtggatcggcgccaccgtggtgctggcggcctgggccgtgcgccgcacgctggcgccggtgcggcggctctccggccaggcggccagcatccagcccgagcacctggacgtgcgcctgccggtggtgggcatcgaccgggaattgagcgacctggtggcctcgttcaaccgcaccctggaccgcctgcaggaggcgtaccagaagatggagggcttcaacgccgacgtcgcgcacgagctgcgcacgcccctggccaccctgatcaacggcgcccaggtcacgctgtcgtcgccccgctcggccgaagagctgcgcgaagcgctgacctccaacctcgaggagctcgaagacctcaagacgctggtcaacgacatgctgttcctggcacgcgccgaccgcggcgagcaggccgccgacctggcgcccgcacggctcgaacaggaagccctgcgcgtggcggagtatttcgaagccacgctggaggcgcaggcgctgcacgtggcggtgcaaggcagcgccacgtgcgccgccaaccctgggctggtgcgccgcgccctggccaacctgctggccaacgcgatacgcgccacgccgcgcggcgccaccatcaccgtgcgctgcgccgccctgcccgacggcgcggcgcgcctgacggtgcacaacccgggcccgcccatcccggccgcggacctgccgcgcatcttcgatcgcttcttccgcagcggcggcgcccggccgccgcgcggcgaaggccacggcctgggcctggccatcgtgcgcgccatcgcgcgcatgcacaacggcggcgtgacggcggccagcggcccggcaggtaccgagatcggcttttccctcggggcgaggcccgcgcaagatgacaaacgcgtaatccgggcgacagactgaggtcagtc

SEQ ID NO: 15238 - DNA, 273 bp, Bordetella pertussis
atgtcacgttcgatcaagaaaggcccgtttgtcgacgcgcacctgatcaaaaaggtggatgcggctgtcgcgggcaaagacaagaagccgatcaaaacctggtcgcgtcgttccacggtcctgccggaattcatcggcctgacgattgccgtccacaacggccgccagcacgttcccatttacatcaacgagaacatggtcggtcacaagctgggcgagttcgcgctgacccgtacgttcaagggtcacgccgcggacaagaagtcgaagagg

SEQ ID NO: 15239 - DNA, 327 bp, Bordetella pertussis
atggaaactactgccattatccgtggtgttcacatctcggctcagaagacccgtctggttgcggacctgatccgcggcaagtcggtggctcaagccctgaacatcctcaccttctcgcccaagaaggccgccgtcatcctgaagaaggctgtcgagtcggctatcgccaacgccgagcacaacgacggcgccgatatcgacgagttgaaggtcaccaccatttttgtggacaaggctcaatcgatgaagcgtttctcggctcgcgccaagggccgcggtaaccgtatcgagaagcagacctgccatatcacggtcaaggtcggagct

SEQ ID NO: 15240 - DNA, 414 bp, Bordetella pertussis
atgctgcaaccctctcgcaggaagtaccgcaaagagcagaaaggccgtaacacgggcctggcttcgcgcggcacgcacgtttcgttcggcgagttcggcctgaaggccaccggccgtggccgcctgaccgcgcgtcagatcgaagccgctcgtcgcgccatcaaccgtcacatcaagcgtggcggccgtatctggatccgtattttcccggacaagccgatctcgcaaaagccggccgaagtccgtatgggtaacggcaagggcaaccccgagtactgggtcgccgagatccagccgggcaaggtgctctacgaaatggaaggggtcagtgaagaactggcgcgcgaggcgttccgcctggccgctgccaagctgccgatctcgaccacgttcgtcgcgcgtcatatcggtgct

SEQ ID NO: 15241 - DNA, 189 bp, Bordetella pertussis
atgaaagccagcgaactccgttccaaagacgccgccgagctcggcaaagagctcgagagcctgctgaaggcacaattcggtctgcgtatgcagaaggccacgcagcagcttgccaataccagccagctgcgcaacgtgcgccgcgacatcgcgcgcgtgcgtaccttgctgaccgagaaggcagggaaa

SEQ ID NO: 15242 - DNA, 279 bp, Bordetella pertussis
atgagcgaaactcaaaacactcaggttgccaagcgccagcgtacgctggtcggcaaggttgtcagcaacaagatggacaagacggtcgtcgttctggtcgaacgccgcgtcaagcaccccatctttggcaagatcatcatgcgttcggccaagtacaaggcgcatgacgagtcgaaccaatacaacgaaggcgataccgtcgaaatcgcggaaggccgccccatctcgcgctccaaagcgtggcgtgtggtgcgtctggtcgaagcggcgcgcgtcatc

SEQ ID NO: 15243 - DNA, 318 bp, Bordetella pertussis
atgaacaacatccgtaaaggcgacgaagtcatcgtcctgaccggccgcgacaagaagcgtcgcggcaccgtgctggcccgcgttgacgccgaccatgtgctggtcgaaggcgtgaacgtcgtgaagaagcacgtcaaggccaacccgatggccaacaatcctggcggcatcgtcgaaaagaccatgcccatccacgtttcgaacgtggcgctgttcaacccggccaccggcaagggcgaccgcgtcggcgtgcaggaagtggacggtcgcaaggttcgcgtgttccgttccaatggcgccgtggtcggcgccaaggcg

SEQ ID NO: 15244 - DNA, 303 bp, Bordetella pertussis
gtggctaaactctccctcatcaatcgtgatatcaagcgcgccaagctggctgacaagtatgccgccaagcgcgccgaattgaaggcgatcatcgacgaccagtcgaagaccgacgaagaacgttaccaagctcggctcaagctgcaacagctgccgcgcaatgccaaccccactcgccaacgcaatcgttgcgtggttaccggtcgtccgcgcggcgtgttccgcaagttcggcctgacccgccacaaattgcgtgaaatggcgatgaagggcgaagttcccggcatgaccaaggccagctgg

SEQ ID NO: 15245 - DNA, 183 bp, Bordetella pertussis
atggctcagaagcagatcaaagttacgctcgtgcgctccgtgatcggcaccaagcaatcccaccgcgacaccattcgcggcctgggcctgcgccgtatcaacagcagccgcgtgctggtcgacacgcccgaggtgcgcgggatgatccacaaggtgggttacctcgtctccgtctcggaagcc

SEQ ID NO: 15246 - DNA, 1437 bp, Bordetella pertussis
atgccccgcagatgcggggcattgtctttggcaggccttgcgggtgcgtcagggcagcgtggactcgccctggtacagcgactccagcgtttcgcgctggcgcacgatgtagtggcggttgccgtcgaccatgacttcggccgcgcgcacccgggtgttgtagttgctggccatgaccatgctgtaggcgccggccgactccaccgccagcacgtcgccggcctggatcgccagggcgcggccgcgcgccagccagtcggcgctttcgcagaccggcccgacgacgtcgtactcgatccgcttgtcggcccgcggcgtgaccggctgcacgccgtggtaggcctcgtacagggccgggcgcagcaggtcgttcatggccgcgtcgacaatggcgaagttgcgcgcctcggcgtgcttgaggtattgcaccgtggtcagcagcacgccggcattgccggccagcgagcggccgggttccagcacgatatgcaggtgccccaggccgcgcgcgttgatgcgctcgaacacccggtcgagcaaggccttgggcgagggcgggatttcgtccgtgtagcggatgcccaggccgccgccgaggtccaggtgcttgatggcgatgccgttctcggccagctgctcgatcaggtccagcagcttttccagtgcgtcgaagtacgggctgatgtcggtgagctgcgagccgatatggcaatcgacgccaaccacttcgacgccgggcaggcgagccgccagccggtatgccgccggcgcggactcgatggcgatgccgaacttgttttccttcaggcccgtcgagatgtagggatgggtctgggcgtcgacgtcggggttgacgcgcagcgatacgcgcgcgcgccggcccatggagacggcgacgtcggacaggcgctcgagttcggcctcggactcgacgttgaagcacttcacgtcggcttcgagcgcggcgcgcatttcccaggcctgcttgcccacgccggagaacacgaccttggcggggtcgccgcccacggccagcacgcgcgccagctcgccgccggacacgatgtcgaagccggcgcccaggcgtgcgaattccttcagcacggccaggttggagttggtcttcatgccgaagcacaccagcaccgggcgctcgccgatggcgtcgcgataggtctcccaggccgagcgcagcgcggcgcgggaatagacgtacagcggcgtgcccaactgggcggccaggctgtcgagcggcacgtcttcggcgtgcagcacgccgttctggtagcggaaatggggcgagccagccaggtcgggctggacggaaacggcggtcatggcagggacggagcaggggggatggaggagggcggcgtttgctgccccgtgggcgcgggctggccgggctcgggcggcggcagatacaggggacccttg

SEQ ID NO: 15247 - DNA, 708 bp, Bordetella pertussis
atggctcttgacggtggccacggacgtgccgacctcgcggctgatctcgcgcatggtcttgccttgcaccatcaagcgcagtatctgttcctgccgctgggtcagctgcatggcgccgcgcaccggcgtcgcgctggcctgcaccggcagcgggtagcattggccgccggccatcaccaggctgatcgccgcgcccagcgcgtcggggctgagcgacttggccacatagcccgccacgccggcgcgcgcggccgccgtgagcaccgccagatcgagttcgaggtacagcagcagcatgttgcgcggcgccagcgtcgcgataacgcgcgtgagcatcagctggtcgtgctcgctcacgcccgaacagcccaggatcgccagttccggcggccgctcgacgctgctcgccacggcctccagttcggcggacgcgagcgcccgtacctgtccggcgccgcgcccatgctccagcacgtgctggatggcgattcgcaacaacgcatagtcttcgatgagaacggtcgtcatgcgcacgggcctttagcggcgagtccgggttggacccgcgcatgcccatgcgcacctgcgatacgacgtatgcatggtcgaggccgacggcctgcgggcgcttgcgcgggaatctccatctgtcacccgcgccacgcgtggcaccccgctgccggggccacgcaggcgtgtgtatgcaga

SEQ ID NO: 15248 - DNA, 801 bp, Bordetella pertussis
atgccgctgttcgtgaaccttttggccgacgtttcgtctattgaccccatggaatcctacgcagtctggattgctgcccaccccatcatcatcttcgtcgccgcgccggtcctggccgcggcaggcgcgctgttgctgtggcaactggtcgccggcctgcccgcgggccgccgccgcaccatggtcttcgccgtgctggcgctggtggcggtgggggtgttcggcgcgctggccgcctcggtcgagcaccagggcggcatggtcgcgttcgaccaggcgctggcgcgcgcgctggggctgtccatgccggccgcgttgctgtgggtgctgtcctggttcacgcatctgggcgatcgaaccttgctgaccctggtggcggtgggcatgacgctgacgctgctgtggcggcggcgctgggtgctggccggcgcctgcgtggccgcgacggggggcgcgggcgcgctgaactggctgctcaagcgcgcgttccagcgggtgcgcccggaccatctccacggctacacgctggccgacggctggagcttcccgagcgggcatgcctccgcctccatggccgtctatggcattgcctgctacctgatgttgcgcaccttgccggcgcgctggcgttcgtccgcgttggccggcgtggcggccctgatcgtcgcgatcggggtcagccgcgtgctgctgcaggtgcacttcctgagcgatgtggtggcggggttcgccattaccgccgcctggctggccctgtgcgtggccgtcaccgaatgggcgctgcgcgtcaacgcgcgagca

SEQ ID NO: 15249 - DNA, 549 bp, Bordetella pertussis
atgagttcccattcccaagaacccgtcggcgaagaaaatttcgacgattccgaatacgaccgccccaacaaatcccaggtcaagcgcgaaatgcacgcgctgctggacctcggcaaggagctggtcgagctctcgcccgaacggctgcgccagctgccgctcgaagaacggctgtacgaggcgatccgcgaagcccagcgcaccaccggccgcgaaggccgccggcgccagatccacttcgtgggcaagctgatgcgcagcgcgccggccgaggccatccgcgcccagctcgatacctggcgcaatggctcgcgcgaggaaaccgccgccatgcaccgcctggaagcgctgcgcgagcggctgctcacggacgacgacgccctgaccgccgtgctgcagcgcaaccccgacgccgacatccagcacctgcgcgcgctgatccgcgccgcccgcaaggaagccgccgccaacgccgccctgtcgcagggccaggaaccgcagcgcaaacagtaccgggccctgttccaggccctcaagaacctttcggcc

SEQ ID NO: 15250 - DNA, 1239 bp, Bordetella pertussis
atgcctgttgtccaattgaaaatcttcgccgttcttgccctgttgatacctgcgctggcgctggtcagcaaaggcgggggcgtcgccgtgttctacacgctagccgtactgacgtcgctcgcaatcatggtctacgccggccgtggtcgcgcacagccgtcctggcgcgacctggcctggcccggcgcggtgctggcggtgcccttgctgtcgatgctggtcaccaacgcctacctcggtatctggagcggttccgagttcgagaaactgctgcggttcgcgctggcgcttcccctgttctgggtactgctgtgcgtgccgcgcccatggctgcaacagatccagtggagcctgctgttcagcgcctatgccggcgcgatcatgctttatgtcatcgtcggctggtacggcgggcgcatgcaggtcagcttctacggcgccgagtacaacgccgtggccttcgccaatctgacgctgttcttcggtttcgcctcgctgttgacgctgggctggcggctgacgccctggcccggcctggaagcgctgttgaaggtgggggcggcatgcgccgcggtgtatgcggcccatgtatcggagacgcgcagcagctggatgctgctgccggttttcgggctggtgttcctcatgtcccgccgtgtctggagcctgcgcaggaaactggccgtgggcctggtgctggtcgcggcgctggcggtgctggcgggggtgatgctgtcctcgcagggaaaccggatgcacaagatcctgacggatctacagcgctataccgtgcagaacgatcgcaatacgtccgtgggcatacgcctgcagctgtggcatgcctcgtggatgatcttccaggaggcgccggtgctgggggtggggccgcgcaatttccgtgccgagctggccaagctgcgcgaccagggcgtggtcacgccggaggtcgccagcgggtacggcgaaccccacaatgatttcatggcggccatggccggctacggcctgctcggcctgctgagcatcctgttgctgtatctcgcgccggcctgggtgttcctgcgccgcatggccagcgacgaccgcgtcatacggacgggcgcgcagatcggcctgttgttctgcctcggttattgcgctttcagcctgaccgagatgatgttccgcaacatgcgcagcgtgcccatctacagtgccacgctggtgctgctgctggcgctgaccgcgccgcgcgcagcc

SEQ ID NO: 15251 - DNA, 1251 bp, Bordetella pertussis
gtgcaccaggaaatagccctgggcgtcgttcgggtggtcgtgcccggtggacttgtccggctccccgttcttgtcgtagacctgctgctccagcgcttcggtcagcgtcggacagcggtcggtgttcaccagccagcgccgcgcgccctcgtcgttgagcagcatgccgttcacggcgttgatgcggtccttcacggacgggtttcggctgttcacgcgcaccgtgaagccggccttgcgcagaatgctcaggtccgactcgctcgcgttcttgctgctggtgttgccgccgctggcgtccggatagatcgtgacgccgtgccccttgtccttgaaccgttccttcagcatccgagccatttccggcgtgtccctgaccttcgtcagctcgcccaccgtcagcggcaggccggcccgtatcacgttgacagtggccgtcatgttcagcacgttgaagtccatgccgatgtgcagctcttcgtgcggctcctcggccgcgtccgtgtggtgcaggcgccggtcgaagttggcgtagacgctaccgctggtcaggttggtgaactgcccacgcaggtacgccgcgatgagctgcggcgggtagctcgcgcgcagcgacgggatgtagtcttccggcaggttcttgccgttctcgtaggtgctggcctgcaccaggccatacagcgcggccagctcgggccgctcgcggacctgcttgacgaactgctggtagacgaacttgaagccctcgggcgtcgtggtcacgtccacgccgttgagcagcccgggcgcggtgtggcgcaggcgggcgatgatcttgcgccaggccagcgcagccttgtccgccttcatcacgtccagctcgtcgatcagccctttgccgatcttgaagcccacgatgtcgccaggcttctccatcgaacggcagattaccgtgccgcggtacttgcggccggcgaacagatggacttccttgttcgactcgttgatcttggcggccaggccccagtcgtgggccacctcctcgatcgtcgggtagaagatgtcccggatctggccgtaggtcggcgcgaagtaccccgagttgacccgggggaactcccaggcgtgacggcacaggcctgctccgccaacccaggtcttgccgctgccgaagccggcgacgaacgcgcggaacttgtgcggcagcgccaggaagcgggcctggggctggttaagcgtcggcatcagggatgctcgtgttcaccacttcaa

SEQ ID NO: 15252 - DNA, 843 bp, Bordetella pertussis
atggaacaagtacttttcatcgtatggcgcgaaagcgtcgaggccctgctggtggtgggcattctctatgcctggctgcgggccacgcccgccgggcggcgcggcatgccctacctgtggggcggcgtggcggcgggcttggcgttggcgctcctgctggcgctggtgctgctgggcgtctcctcgtggctgagcgacgaaggccaggagtggttccaggccggcatgtcgctggtggcttgcgcgctggtggtccagatggtgatctggatgaagcgccatggccgcacgctcaagcgcgagctcgagggcggggcgcgcgcctccatcgaacgcgacaactggtggggcctgctggtgctggtcatgatcgccgtggcgcgcgaaggcagcgagacggtggtgttcctgtacggcaccgtggccgcggcggccgggcaggccggggatgcggcgttgctggtcctggccggcgcggcgggtttcctgatcgcactgctgacgttctggctgctgcaattgggtggcaagctgatcacctggcggcgcttcttccgcgttaccgaaatcctgctgctcctgctggccggcgccttgctggtgggcggcctggaccatctgatctcgctggacgtgctgcccacgctcatcgatccggtctgggacagctcatggctgctcgacgacagcagcgggatgggcaaggtcctggccgatttcgccggctatcgcgcctatccggccttgatctcggtattgctgtggctggcctattggctggtggtatggctgctgctgcgccgcgccgatggcgcagcggcgatttcggcgcgttcggccgcc

SEQ ID NO: 15253 - DNA, 432 bp, Bordetella pertussis
atgaaaatcggcgaactggcccgcacggcgggcaccacggtggaaaccgtgcgctattacgagaaggaagggctgttgcccgcgcccgagcgcggcctgaacaactaccgcagctacggcgaggcccatgtcgagcggctgcgcctgatccgcaattgccgcgcgctggacatgacgcaggacgagatccgcaccgtcctggccctggcggacaaccacgaggccggctgcgctccgatcaaccaggtgttcgacgagcacatcgcccacgtggacgcccgcatcgccgagctgacccagctgaaggcccagctgggcgagctgcgccagcgctgcgcctcggcccgcccggacgccgaggactgcggcatcctgcacggcctgagcgagatgcaggtcgaagagcgtcccgagcgccacacccacctcggc

SEQ ID NO: 15254 - DNA, 504 bp, Bordetella pertussis
atgacgcaggatcccgcttcggccgcttcgcccgccgcaatcgctcccggtgccgcggcgcctacggtgggttcggcgctgcgggcgctgcgccaggccaaggggtggtcgctcgaagaggtctccagccgcatcaagttctcgacgcgcatgatccaggcgctcgaagaagagcgctgggaatccctgcccaagggcgtgtcgctgcgcggcctggtgcgcaactacgcccgcatgctgggcgccgacgcccaggccgtggtcgattcgctcgatctcgaggcggcacgcacgcccgcgccggcccggccggcgccgcgtggcggacaaggcctgcgtccggctggcgtcaacatctccgtcgacgacgagcgctcctccggctcctggggatggctgctcgccatcctcgtggtggtcgccgccgcagtggcctatgctttttggcaaggctggctgccgcaggagtggctgccggcgcaatggttttctccggtgacccag

SEQ ID NO: 15255 - DNA, 111 bp, Bordetella pertussis
atgaaagtaatggcatcggttaagcggatctgccgcaactgcaaagttatcaaacgtcacggcgtggtgcgtgtcatctgcaccgacccgcgtcacaagcagcgtcaaggc

SEQ ID NO: 15256 - DNA, 462 bp, Bordetella pertussis; identical to SEQ ID NO: 15221

SEQ ID NO: 15257 - DNA, 2835 bp, Bordetella pertussis
atgagcccgacgaatcgcctgaacgccgtgcaacggcagcacctggaccaggcgctggcgtggctgcgcggatgcgtcgccccgacggccgatctgcgcctggattcgcgcgagatcgagccgggcgatgtgttcgtcgcctgccccggcctggtcagcgacggtcgccaattcatggatcaggcgctggcgcgtggcgccagcgccatcctgtacgaaaccgaaggcgcgccggtcgcgcccgcgggcgcgcaggccttgccggtcgcgcagctgcgcaccttgcttggcgcgctggccgatgaatggtatggccgtccgtcgcaggacctgagcgtggtggcgataaccggcaccaacggcaagacctcgtgcacccaatggctggcgcaggtgctcacgcgcatgggcaagccgtgcggcagcatcggcaccctgggcgcgctgctgcccgacggccagtcgctgggcggcagcctgaccacgccggatgtgctgaccatgcaccgcacgctggcccggatgcgtgccgcgggcgcgcgcgcggtggccctggaggcctcgtccatcggcatcgagcagggccggctggaccatatccgcatcgcggtggcgggttttaccaacctgacgcgcgatcatctcgattaccacggcaccatgcagcgctacgagcaggccaaggcggcgctgttccaatggccggacctgcaggccgccgtcgtcaatgcggacgatcccgccggcgaacggttgctggcgtccctgccggccgcgctgaagaccggctactcgctgcaaggggctcccgccgacgtccacgcgcgcgacctgcaggccaccgcgcatggccaggtgttcacgctgacgctgcccgatggcgaagtgcagatcgtcacgcgcctgctcggccagcacaatatctccaatctgctgttggtggccggcgcgctgagcaagctgggctggccgctgccgcagatcgcgcgcgaactggcggcgatttcgccggtcgacggccgcctgcaggccgtgacgccggtgccgttgcagcacctgaccgcgggcgcccaaggggcgctggtggtggtcgattacgcccatacgcccgacgccctggcgcgcgcgctgaccgccttgcgcccggtggcgcaggcgcgcggcgggcgcctggtgtgcgtgttcggctgcggcggcgagcgcgaccccggcaagcgacccgaaatgggccgtatcgccgtcgagcgggccgaccgggtggtggtcaccagcgacaatccgcgcagcgaatcgccgcaggacatcatcgaccagattctggccggcatccccgccggcatgcgcgcggcggtgcagcctgaccgcgcgctggccatcatgcagacgctgtggagcgcggctcccgacgacgtgatactgctggccggcaagggacatgaaacctaccaggacatcggcggccgcaaattgccgttcgacgatcgccagtgggcccggctggcgctgttgctgccgcatgcgggcgcggtgtcgaccgatacgcgccgcatcggccgcggcgagctgttcgtggccctgtcgggcgaaaatttcgacggccacgactatctgccgcaggcgcagtcggccggcgcctgcgccgccgtggtggcgcatcccgtggcggatgtggcgctgccccagctggtgctgggcgatacgctggccgcgctgggccgcatgggcacggcctggcgttccagtttcacgctgccggtcgtcgccgtgacgggcagcaatggcaagaccaccaccaaggaaatgatttccgccatcctggcgcagtggcagggcgacgacggccgcctggcgacggctggcaatttcaacaacgagatcggcgtgccgctgaccctgctgcgcctgcgcgcgcggcatcgcgccgccgttttcgagctgggcatgaaccatcccggcgagatcgaacgcctggccgcgatggcggcgccgacggttgcgctggtgaccaatgcccagcgcgaacaccaggaattcatgcataccgtcgaggcggtggcgcacgagaacggcgcggtcatcggcgccttgccggaggacggcgtggccgtctatccgggcgacgaaccctacgccgccatctgggacaagctggcgggcgcgcgccgggtgctgcgcttcggcctgcaaccgggcctggatgtctacgccgagcgtgtcgtgacgcaggcgcatggcacgcaatgcggcgtggtgaccccggccggcagcgccgggctggacctgcccgtgccgggcctgcacaacctgcgcaatgcgctggcggcgattgcttgcggcctggcggccggcgcgcccctgcatacctgcatcgcggcgctggccggtttccaggccgtcgccgggcgcatgcagcatcggcaaatgagtgacggaaccgtgctcatcgatgacacctacaatgccaatcctgactcggctcgcgccgccatcgacgtgctggcgcggctgcccgcgccgcgcgcattggtgctcggcgacatgggcgaagtcggggacaacgggcccgccatgcatcgcgaggtgggcgattacgcgcgcgagcatggcatcgacgcgcttatcacgctaggcgaggccagccgggatgccgcacacgcattcggtccggcggcgcgcgcctgcgcatcggttgacgaagtcgtggccgcgttgcgcggcctgcgcccgtccagcattttgatcaagggttcgcgctttatgcgcatggagcgggtagtgacggctttcagcggcaacaatcaggcgccttcggggcagggggacaagcatgctgct

SEQ ID NO: 15258 - DNA, 378 bp, Bordetella pertussis
atgtctaataccagcatagaaaccgttaccagtaccgctgaccggatcaagctcgggttggcggttctcgtcgttattgctggcatcgttgggttttccatgctcgacgcgcagcccatggtggcgcgtatcggcgtgtttgtcggcggcctggtcgtcgcggcgttgcttgcgtggttcagcgaacccggccgccgtaccctcagctttgccggcgagtcgtacaacgaagtcaagcgagtctcgtggcccacgcgcaaagagacgatccagatgaccggtatcgtcttcgccttcgtcgcggtgatgggtcttctgatgtgggtgctcgataaaggcatcgagtgggttctctacggcctgttgctgggctggaaa

SEQ ID NO: 15259 - DNA, 522 bp, Bordetella pertussis
gtgagtctcaatcgccaagagaaagcggtggtaatcgaggaagtctcggcacaagtggccaaggcgcaatcgattgttatcgccgagtaccgtggtctggacgtcgcctctgtcaccgtactgcgcaaaactgcgcgtgaatcgggcgtttacctgcgtgttctgaagaacacgctggtccgtcgtgcggttgctggcacggctttcgagccgctgtccgagcaactcaccggtccgctgatctatggtattagcgctgatccggtcgccgcggccaaggttctcgctggtttcgcaaaaagcaacgacaagctggtcatcaaggcgggctcgctgcccaacagcctgctgacccaggatggcgtcaaggccctggccacgatgccctcccgcgaggagttgctctcgaaactgctgggcaccatgcaagccccgatcgcgcaattcgtgcgtacgctcaacgaagttccgaccaagttcgcccgcggcctcgctgccgtgcgcgatcagaaagcggcggcc

SEQ ID NO: 15260 - DNA, 381 bp, Bordetella pertussis
atggcacttagcaaagctgaaatccttgacgccatcgctggcatgtccgtgctcgagctgtccgagctgatcaaggaaatggaagaaaagtttggcgtgtcggctgctgccgccgccgtggccgtggccgccccggccgctggtggcgctggcgccgctgctgctgaagagcagaccgagttcaccgttgtgctgctggaagccggcgcgaacaaggtcagcgtcatcaaggccgtgcgcgagctgaccggtctgggtctgaaggaagccaaggacctggttgacggcgctccgaagcccgtcaaggaagcgctgcccaaggctgacgccgaagccgccaagaagaagctggaagaagctggcgccaaggtcgaagtcaag

SEQ ID NO: 15261 - DNA, 237 bp, Bordetella pertussis
atggaaagcatcgaacagcgcgtcaagaagatcgtcgctgaacaacttggcgtgaacgaagccgagatcaagaacgagtcctccttccttgacgacctcggtgccgattcgctcgacatggtcgaactggtcatggcgctcgaagacgaattcgagaccgagatccccgacgaagaggccgaaaagatcactaccgtgcagcaagcgattgactacatcaattcgcacggtaagcag

SEQ ID NO: 15262 - DNA, 879 bp, Bordetella pertussis
atggctgctcccagcggcgcgtcgcctcagtccgagtacattcagcaccacctggtgcatttgaacaatattggcgaaaagcaaagcgtcatcgcccagttcaacgtcatcaactatgactcgctgttctggtcgatcctgatgggcctgctggtcgtattctgcctgtggctggccgcgcgccgcgccacggcgggagttccgggccgcttccagggtttcatcgaaatgatcgtcgacatggtcgacgaccaggccaagtccatcgtcaccaacgccaagagccgtctgttcgtcgcgccgctggccctgaccgtgttcctgtggatcatcctcatgaacgcgctggacctgctgccggtcgacctgctgccctcgatctggcgcatgaccggcctgggcgccgagcacggcgacccgctgtactaccaccgcattctccccaccgccgacctgaacgtgcccatgggcatgtcgctgggcgtgctgctgctgatgttctattacggcatcaagatcaagcacccgggtggcttcgtcaaggagttgttcaccgcgccgttccacgcgcacggcctggcctcgctcgtgctggccccgttcaacctgctgctcaacctgatcgaatatgccgccaagtcggtgtcgctgggcatgcggttgttcggcaacatgttcgccggtgaactgatcttcatgctgatcgcgctgctgggcggcgcctggacgggctttaacggcgccagcatcggtttgggcattgggcatgtgttggccggttcggtgtgggcaattttccacatcctgatcgtgctgctgcaggctttcatcttcatgatgctgacgctggtttacatcggccaggcgcacgaagggcat

SEQ ID NO: 15263 - DNA, 240 bp, Bordetella pertussis
atgaccaacgtcgctttcgttgctctcgcttgcggtctcatcatcggcctgggcgccatcggcgcttgcatcggtatcgcactgatgggcggcaagtacctggaagcttcggctcgtcagcccgaactgatgaacgccctgcaaaccaagatgttcctgctggcgggcctgatcgatgcggcgttcctgatcggtgtgggtatcgccatgctgttcgccttcgccaatccgttcgtcggc

SEQ ID NO: 15264 - DNA, 468 bp, Bordetella pertussis
gtgaatctgaacgcgacgatcttcttccagatgctcgtgttcttcgttctgggctggttcacgatgaaattcgtgtggccgcctctgacgaaggcgatcgatgagcgccgccaaaaaatcgccgacggcctggccgccgccgagaaggggaaagccgatctggctcaagcccaagcgcgcgtcagtctgatcgaggcttctgccaaatccgaaactcacgcccgcatcatcgaagccgagaaacaggctgcttcgatgattgagcaggcccgccgtgaagcggaagccgaacgcgcccgtatcgtggcccaggctgcccaggacgccgcgcaggaagttcaacgcgcccgtgaagcattgcgcgacgacgtcgccgcgctggccgtcaagggtgccgaacagatcctcaagcgcgaggttgacgcccgcgcccatgccgagctgctcaaccagctcaaggcgcagctt

SEQ ID NO: 15265 - DNA, 537 bp, Bordetella pertussis
atggctgaactttccactgttgcccgtccctacgccgaagccctcttcggcgcagcgcgcgacgacaaggccggtctggcggtgtgggccgacctggtcagcgagatggcgcaggtcgccgccaatcccgacgtgcgcgaggcgatggccgatccgcgtctggacgacaagcagcgcagcgaggtcttcaccggcctcatcaagtcgcagctgcctcaggccgcccgcaatttcatcgagctgctggtcaagaacgaccgcttgctgctgctgcccgtcatcgccacgcagttcgtcgcgctgaagaatcgtcacgaaggcacggcgcaggcggaaatcaccagcgcattcgaactcagcgacgctcaggtaaaagagctgattgccgcgctcgaactcaaattcggtctcaagctcaagccgcacgtgtcggtcgatcaggaactgatcggcggtgtgcgcgtggctgtcggggaccaggtgctcgatacttccgtaaaagcccaactggcccgcttgcgcgatacgctggccgca

SEQ ID NO: 15266 - DNA, 504 bp, Bordetella pertussis
atgtcagaacaagaattgaagctgcacgtcccggcggcggcgcgggcggcggtgcagcagcagatccagcagcggcaggccgcgcgcatccgcctgcacgccatgtatttcgacacccccggccgcgagctggcgcgcgcccgcatcgcgatccggctgcgccaggaagggcgcgactgggtgcagacgctgaagatgccgggcgccaatgccatcagccgcgtggagatcaaccacccgcgccccgggccggtgctggacctgtccgtctacgccggcaccgaggcgcaggccgcgctgacggccatcaagggcgagctggggctgcgctacgaaaccgacgtgcaacggctgttctgcaaggtgcgcggccggcatggcaccgtcgagctggcctacgacacgggcgtgctgcgcgccggcgcgctcgaactgccgatctccgaactggagttcgaactggtttcgggccggcccgcggccatcttcgccatggcgcgcagc

SEQ ID NO: 15267 - DNA, 1677 bp, Bordetella pertussis
gtcccgacccctgtcatcctgagcgtaccgatcatgcctgccacccatcccgctcccgacccgctctggtacaaggacgccgtcatctaccagttgcacgtcaagtccttcttcgacgccaacgacgacggcgtgggcgacttcgccggcctgctggccaagctggactacatcgtcgagctgggcgtcaataccatctggctgctgccgttctatccgtcgccgcgccgcgacgacggctacgacatcgccgactatcgcggggtgcaccccgactatggctcgctggccgacgcccggctgctggtgcgggcggcccacgcgcgcggcctgcgcgtcatcaccgagctggtcatcaaccacacctccgaccagcacccttggttccagcgcgcccgcgccgcgcggccgggttcggcgcaccgcgcctattacgtctggtcggacgacgacaaggcctatgccggcacgcgcatcatcttctgcgacacggaaaagtccaactggacctgggacccggtggccggcgcctatttctggcaccgcttctattcgcaccagcccgacctgaactacgacaatccgcaggtgctgcgcgaagtgctgggcgcgatgcgctactggctggacatgggcgtggacggcctgcgcctggacgcggtgccctacctggtcgagcgggaaggcaccaacaacgagaacctgccggaaacccacgccatcctgcggcgcatccgccgcgtcatcgacagcgagtatcccggcaggatgctgctggccgaggccaaccagtggcccgaggacgcgcaagagtacttcggcgccggcgacgaatgccacatggcgttccactttcccctgatgccgcgcatgtacatggccatcgcgcaggaggaccgcctgcccgtcaccgacatcatccgccagacgccgtccatcgcgccgcaatgccaatgggccattttcctgcgcaaccacgacgagctgaccctggagatggtgaccagccgcgaacgcgactacctgtggaacgtctacgcggccgagccgcgcgcgcgcatcaacctgggcatccggcgccgcctggcgccgctgctcgagcgcgaccggcgccgcatcgaactgatgaacagcctgctgctgtccatgccgggcacgccggtgctgtactacggcgacgagctgggcatgggcgacaacatccacctgggcgaccgcgacggcgtgcgcacgcccatgcaatggtcgcccgaccgcaacggcggcttctcgcgcgccgaccccgagcgcctgccgctgccgctgctgatggggccgctgtacggctacgaggcggtcaacgtggaggcgcagcagcgcgacccgcattcgctgctgaactggacccgccgcatgctggccaagcgccgccagagccatgtgttcggccgtggcgaactgtcgttcctgtatccgggcaaccgcaagatcctggcctatctgcgcacctgggaagacacggtggtgctgtgcgtggccaacctttcgcaggcggcccagccggtcgaactgcacctgtccgagtacgccggccgcgtaccggtggaaatgctgggcggcaccgcctttccgcagatcggcgagctgccctatctgctgacgctgccgcctttcggcttctactggctggacctgagc

SEQ ID NO: 15268 - DNA, 795 bp, Bordetella pertussis
atgcaagcgcttgcggccatgccagccccggtagccgcgtcggtacgcatcgtactgaccgacatcgacgacaccctgaccacggaaggccgcctgccggccggcgcctacgcggcgctggagcgcctggaacaggccggcatcgtcgtggtgccgatcaccggccggcccgccggctggtgcgaccacatcgcgcgaatgtggccggtgcgggccgtcgtgggcgaaaacggcgcgttctactacgcgtacgaccgctcggcgcgccgcatgaacgcgcattactgggccgacgccgccacccgcgcggccaaccggcaggcgctgcaggccatccgcgaacgggtactgcgcgaagtgccgggcaccgccgtggccagcgaccaggattaccgggtggcggacctggccatcgatttctgcgaagacgtcccggccctgcccgacagcgcggtcggccgcatcgtcgagatcttccacgaagccggggcgcaggccaaggtcagctccatccacgtcaacggctggttcggcgactacgacaagctgaccatgacgcgcaccctgttcgagcgcgaattcggcctgagcatcgattcggccctgcaacacaccctgttcatcggcgattcgcccaacgacgagccgatgttcaagttcttcccgatctcggtcggcgtggccaacatccagtcgcagctgcatcgcatccagcatcgcccggcgttcgtcgcggccgcgcgcggcggcgacggcttcgtcgaaatggccgagcgcctgctggcgaaccgggga

SEQ ID NO: 15269 - DNA, 735 bp, Bordetella pertussis
atggccagcaatctccaagaggacgccggggcatcgccgggccgttgcaaacggcagggccgccaggaagaatcgcgcgagtctagggccgcacccggcgccgcgcaagaccgcgcccgcggcgattggacgccgcgcctgtggcccgcacgccacagcgcgcgggccgccgcagccctctcccgccgccctaagcccttagcccagcacggctttttgacttttccacaggcgcggactagaatcgtcgattcggtctttggccgaattgcgcctggattgcccgcaccgcacggtgcctggatgggcattactgggaaacacgcgggtgcgccggccaagccttgcgcaccttgcgagagccagtgttgcaccgcaggccatgcaaatgcctgcaatccacatttcaatttaaggatatatcccatgtacgcggtcataaaaaccggcggcaagcagtatcgcgttgccaccggcgaaaaactcaaggtagaacagatacctgctgacattgggcaagaaatcaccctggaccaagtgctgtccgtgggcgaaggcgaccagctgaaagttggcacgccgctcgtctccggcgccgtggtcaaggcgacggttcttgcacatggccggcacgacaagatcaagatcttcaagatgcgccgtcgcaagcactaccagaagcaccaaggccaccgtcagaactacaccgagatccgcatcgaagccatcacggct

SEQ ID NO: 15270 - DNA, 1209 bp, Bordetella pertussis
atggccgcttgcgagggactgcattgtagtgaaacttcgcgccgcagtctttcggacaggctacttgacgatggtcagatgcggccgcttgggttcgtcgccgtcgccatcgtcgccagccggcgaggcggcggcatcgccggcctcggccgactcgggcggcgggggggcggcgtccgcgtgctcgggcgcttcgtaggcttgcacctcgaagcccatgccggcgccggtttcgcgcgcgtagatggcgctgacggcgcccaccggcacgtagacgttctcggtgacgccgctgaagcgggcctggaattcgatgaattcgttgcccagcgacagcttgttggtggccagcgtgccgacgttcagggtgatctgtccatcgcgcacatgggcgacgggcaccatggtgtgctcgtcgacctgcacggtgatgtacggcgtgtagccgttgtccgtgcaccactcgtgcagtgcgcggatcaggtacggtttggtcgaagtttcgcccatggacttcctttagcggcgcatgactttttcggaaggcgtcagcgcttcgatataggccgggcgcgagaagatgcgttcggcgtacttctgcaggggcgcggcgttcttgggcagttcgatgccgtagtggtccaggcgccacagcagcggggccacggccacgtcgagcatcgagaattcatcgcccagcatgtacttgttcttcagcagcatcggggccagctgcgcgagacggtcgcggatgctctggcgggcctgcaccatcttcttgtcgtccggcttggcgctgcggtcttccagggcgcagacgtgcacgaacaactctttctcgaagttgtacaggaacaggcgggtgcgcgcgcgcatgaccgggtcggccggcatcagctgcgggtgcgggaagcgctcgtcgatgtactcgttgatgatgttggactcgtacagcaccaggtcgcgttcgaccagaatgggcacttgaccgtacgggttcatgaccgaaatgtcttcgggtttgttgtacaggtcgatgtcgcggatttcgaaatccattcccttctcgaacagcacgaaacggcagcgttgcgagaacgggcaggtggttccggaatagagcaccatcatggcgataagtccttgtatgaaaagcgaaaggccagcgccgccaaattagcaggcgctggccccgattgccaggcggga

SEQ ID NO: 15271 - DNA, 1083 bp, Bordetella pertussis
atgatgcagaccgaatccaatcccctggccgaacgcttcattgcgcgcaacctgctcgacctggccatccgcattaccctgatcggcgggctgaccgtctggtgctaccgggtcgccgaacccttcatcggcatgctgctgtggtccatcatcctggcggtcaccctggcgccgctgcacatgcggctgacccgcttgctgggcgcgcgcccgcggctggccgccgtcgtgctgacgctggccaccatgctggtgctgctggtgcccggcgccatgctgaccgcgtcgctgggcgactcgctggtgaacatcttccatcactccaccggccggatcgtgcgcatcccggcgccgccggacttcgtgatcgaactgccgctgatcggcgtacgcctgcacgaaatctggctgcaggcgatgaccaacctgcaggacgtgctcaagcccttgcaaccccacctggccaccgccggccgctggctgctggcgggcatggccagcgccggcctgggcatcgccgtcttcctggcctcgatcgccatcgcgggcgtcatcctggtctatgccgacccggccaagcgcgccgcgcacgcgatcggcgtgcgcatcgccgggcccgaacagggcgtcgcgctggcgcagctgacggccgccaccatccgggccgtggcccagggcgtgatcggcgtggccctgatccaggccgtgctggccggcctgggtttcctgctggccggcgtgccggccgccgggctgtgggccatcgtggcgctgctgatctgcatcgtgcagctgcccctgttcctgctgatggtgcccatggtggtgtacgtcttcctgaacaacacccccacggtcgccatcgtgttcgccgtctggtgcctgctggtgtcgctgtgcgacaacgtgctcaagccgctgatgctggcgcgcggggtcgacatccccatcccggtcatcctgatcggggccctgggcggcgtgctggccgctggcatcgtcggcctgttcctgggatcggtggggttcgggctgggctatgtcctgttcatgcagtgggtgcgccagcagtcgccggccggc

SEQ ID NO: 15272 - DNA, 690 bp, Bordetella pertussis
atggaatttccccaatgggtcgtcgaccgcgtacaggcgcgccagggctgcctgcatccctacgatagcctgcccggcccccgcaccgccgccgtcgtcatcgacatgcagcgctacttcaccctgcccggctaccagggcgaatgcgcggccgcgcgcgccatcgtgcagcccatcaaccggctgtgcgccgcggtgcgcgccgccggcggcagcgtggtctgggtgcagaccgcctccgaccatgccgactcgttctggtcgcaccaccatggcgtgatgctgacgcccgaacgcagcaagcgccggctggagacgctcaagcgcgacagcgagggctacgcgctgcaccccgacatggacgcccgcgccgaagacgtacgcgtgaccaagcgcttctacagcgccatggcccccggctcgtcggagctggagccgctgctgcgcggccgcggcatcgacacgctgctgatcgccggcacggtcaccaatgtctgctgcgaatcgaccgcccgcgacgcgatgatgcgcgacttccgcaccatcatggtcgacgatgccctggcggcggtcacgcccgccgagcacgaaaacgccctgcatggctggatgctgttcttcggcgacgtgctgtcggtggacgaggccagcgccaggctggccgcggcggacgagacgcgccgcatcgcc

SEQ ID NO: 15273 - DNA, 1746 bp, Bordetella pertussis
atgcaagacgacaattcctttcccgacaatgaatccccggtggcgcagccgcccgttgacgagtccgccgcatcaggcgaggccggcgacggcgagggcggagcccgggcgcgtggccgcaagctgcgcacgccgtttcgccgccgtcgcggcgacgcggccgccgctggcgaagccggcgccgacgaggcgggcagccagcccgccgcccagtccgagggcgatgcccgcgccagcgagcgcgatgccgaccaggcgctggcctacctggacaacgcggcgcgcatcgagcagcgcctgggcaagtacctgaacagcgaggcagtgatgcccaagctgcacaaggtgctggccgatgccggaatcggttcgcgccgcgaaatggaagaactgatcgtggccggccgggtgtcggtcaacggcgagccggcccacatcggccagcgcgtcgctcccaacgaccaggtgcgcgtcaacggcaagccgattgcgcgccccaacgccaagaagccgccgcgcgtcatcctctatcacaagccggccggcgagatcgtcagccatgatgacccgggcggacgcgccagcgtgtttgccaggctgcccaagctgcgcaccggcaagtggctgtccgtggggcggctggacctcaataccgaggggctgctgatcttcacgacctccggcgacatggccaaccgcatcatgcatccgcgctacggtaccgagcgcgaatacgcggtgcgcgtcctgggcgagatggacgacgcgcagcgcaagtcgctcaccgagggtatcgagctggaggacggcaaggcggctttcggttctttcgaatacctggggggcgacggcagcaatcgctggtatcgcgtcaccttgcaggaggggcgcaaccgcgaggtgcgccgcatgttcgaggcggtgggtgtgaccgtcagccgcctgatccgtacgcgtttcggcgatatcgtgttgccgcgcaacctgcgccgcggccgctgggaagagctcgacggttcgctggtgacggccctgatggttcagctgggcctgctgcgcgacggggacgagtccgaagggcggcgcaaatcgcgccagccccagtcgcatgacagcgcgctgccgccgggcttcggcacgctggagcgcaatggcatgaacggcgcccgtatcggccgtcgcggcaagctgcagggcggccgtcccggcagcgcggccgcgtgtccgtccgacccgttcggaacgggcttgatgatcaccggcggttatgccaacggccacccgctgggcaacgacagcgcggcggggcggggcggcaagggcaagcctgccaagggcaaggcgggcggcgacaagccgcagcgcggccagggccgcaaggcggcgggcgcgcaggctggcggccagggcgcggcggccaagccggcgggcgcgcgtggcggcaagaaggcgggcggccgcgcggcggcgcctggcgccaagggtgcgggtggccgcgccggcggcaacaaggcagccagcgcgggcggcaaggcggccggcgtggccaagccggcctcgcccacgggcaatcgcggtccggccgcacccaagccgcaacgcgcgcgtcgcggcggcggcggtgccggcggtggtggcggtggtggcggtggtggcggtggccggggcgacgactggcagcccaagggcgccggcgcccacgagtcccgtctcgggttcatgggcgggcggggcgggcgcggacgt

SEQ ID NO: 15274 - DNA, 900 bp, Bordetella pertussis
gtgccccacgtccggcccagtaacgcctggcgcttcctgcggacgctgtggctgggcgcgtggctggcgggctgggcgctgctggcgcaggcgcagcagctggcgccggtgccggagttcggcgcccgcgtcgtcgaccaatcgggcgtactggacgcggcgcagcgccaacggctggaggcccagctggcggcgctggaacagcgcaagggcgcgcaggtggcggtgctgatcgtgccgagcactgccccggaaaccatcgagcagtacgccacgcgcgccttcgagaagtggaagataggccgcgacaaagtggatgacggcgtgctgttgctgatggccagcgacgaccgcgcgctgcgcatcgaggtgggctacggcctggagggcgcgattccggactccgcggccggccgcatcatcaatgaatacatcgtgccgcgcctgcgcgccggcgactggcccggcgcggtgcaggccggcgtcacggcgctcgagcggcgcatcgaaggcgaggagttgccgccgcccgccgccagcgggcgcgacgagggctcgcggctggccggcatacgcggctggctgggcgagaacggcatcgcggcgctggtggtgctgctcatcctgccggggccgatcgcggcggcgctggccggcgtgggcgtggcgatctacatgcagagcatttccgccggcctggctatggcgctgctggtgctgggcatcaaggtcatcatcaaggccttgcccagcggcggtggaggtggaggtggcggaggcggcggcagcggcgggggcggtttcggcggctggcgcggcgggtcgggcagcggcggcttcggcggctttcgtggcgggggcggcgggcgcagcggcggaggcggcgcctcgggccgctgg

SEQ ID NO: 15275 - DNA, 1837 bp, Bordetella pertussis
atgaacacgaacctgtacaggctggtcttcagccatgttcgcggcatgcttgttcccgtgagcgagcattgcaccgtcggaaacaccttctgtgggcgcacgcgtggtcaagcgcgaagtggggcccgcgccacgagcctgtccgtagcgcccaatgcgctggcctgggccctgatgttggcgtgtacgggtcttccgttagtaacgcacgcccagggcttggttcctcaggggcagacacaggtgctgcagggcgggaacaaggttcccgttgtcaatatcgccgacccaaattccggcggcgtctcgcacaacaagttccagcagttcaacgtcgccaaccctggcgtggtcttcaacaacggcctgaccgacggcgtgtccaggatcggcggggcgctgaccaagaaccccaacctgactcgccaggcctcggccattcttgccgaagtcacggacacttcgcccagtcgcctggccggtacgctcgaagtctatggcaagggcgccgacctcatcatcgccaaccccaacggcatcagcgtcaacggcctgagcacgctcaacgccagcaacctgacgctcacgacggggcgtcccagcgtcaacggcggccgcatcggccttgatgtccaacagggcaccgtcacgatcgaacgaggcggcgtcaatgccaccggcctgggctatttcgacgtggtggcgcgcctggtcaagctgcagggtgccgtgtcgagcaagcagggcaagcccctggccgacatcgcggtggtcgccggcgccaaccggtacgaccacgcaacccgccgcgccacgccgatcgccgcaggcgcgcgcggcgccgccgcgggcgcctacgcgattgacggcacggcggcgggcgccatgtacggcaagcacatcacgctggtgtccagcgattcaggcctgggcgtgcgccagctcggcagcctgtcctcgccatcggccatcaccgtgtcgtcgcagggcgaaatcgcgctgggcgacgccacggtccagcgcggcccgctcagcctcaagggcgcgggggtcgtgtcggccggcaaactggcctccggggggggggcggtgaacgtcgcgggcggcggggcggtgaagatcgcgtcggccagcagcgttggaaacctcgcggtgcaaggcggcggcaaggtacaggccacgctgttgaatgccggggggacgttgctggtgtcgggccgccaggccgtccagcttggcgcggcgagcagccgtcaggcgctgtccgtgaacgcgggcggcgccctcaaggcggacaagctgtcggcgacgcgacgggtcgacgtggatggcaagcaggccgtcgcgctggggtcggccagcagcaatgcgctgtcggtgcgtgccggcggcgccctcaaggcgggcaagctgtcggcgacggggcgactggacgtggacggcaagcaggccgtcacgctgggttcggttgcgagcgacggtgcgctgtcggtaagcgctggcggaaacctgcgggcgaagcaattggtctccagtgcccaacttgaggtgcgtgggcagcgggaggtcgcgctggatgacgcttcgagcgcacgcggcatgaccgtggttgccgcaggagcgctggcggcccgcaacctgcagtccaagggcgccatcggcgtacagggtggagaggcggtcagcgtggccaacgcgaacagcgacgcggaattgcgcgtgcgcgggcgcggccaggtggatctgcacgacctgagcgcagcgcgcggcgcggatatctccggcgaggggcgcgtcaatatcggccgtgcgcgcagcgatagcgatgtgaaggtct

SEQ ID NO: 15276 - DNA, 2541 bp, Bordetella pertussis
atggatatcggttttctcgtgtttggactggctgggctgctgacgctggtctgtttcatgccgccgcttgccggccgcctcaagctgccctattcggtgctgctggcgctggtcggctgcctgctgggcatcggcgtgcatttgcacggctgggccccgcccgtgctgggcgacctgctcgacaccatcgagcatttcgagatttcatccgaaaccttcctgatggtgttcctgccggtgctgctgttcgagaccgcgttgtcgatgaacgtgcgccggctgatcgacgatatcggtccaatcctgatgatggccatcgtggcggtcgtggtgtgcaccctggtggtgggtttcgcggtcgacgccgtttcgtcgtatggcctgatcgtctgccttctgctgggcgccatcgtggccacgaccgacccggccgcggtggtgggcatcttccgcgaagtgggcgcgcccaagcggctgaccacgctggtcgagggcgagagcctgttcaacgacgcggcctcgatcgccttgtattcagtgctgctggcggcgctgggcggcagcggcgagctgtcggtgggcgcggtcttcaacgatttcattttccatttcgtgggcggcgggttggccggtttcctgatggggcgcctggcatgcgcgctgtttgcctggctgcgcggctttccgaccgccgaaatcaccctgacgctgacgctggcttatctgtcgttcttcatttccgagcattacctgggcgtgtccggggtggtggccaccgtgatcgcgggactggtggtggattcgaccgggcgcacgcgcatgtcgcccaccacgttcgagttcctgtccagcgcctgggggcagttcggcttctgggccaattctctgatcttcctgttcgcggccatgctgattcccaagctgatggccgaggcggactggcaggagctgctgctggtgctggtggtgttcgccgccaccctggccgcgcgcgccatcgtggtgttcggcctgctgccgctgctgcgggtggcgcgcatcggcgccgaggtcagcaacccgtacaagagcgtcatgtggtggggcggcctgcgcggcgccgtgtcgctggcgctggccctggcggtgaccgagcagagttcggtgcccgagcaggcgcgccagttcgtggccgtggcgaccaccggtttcgtgctgatgaccctgatgatcaacggcgtgagcctgcgtccgctgatccgcatgctgggcctgaaccagttgtccccggtggagcgcaccatccgcaaccaggtattggcggccgcgctggaggacctgcagggccgcaccgaggagatcgccaaggtcgaccatgtcaatcccgaggcgcgcgaccgcatccgggcgatgttcgatgccagcctgaccagcgtgcacgacgggcaggtcggccagatgacgctggaccagcgggtggcggtcggcctgtccatcgtggcccggcgcgaagaggaaatgttcttcgatatcctgaaggcgcagatcgtcgactggcgcctggccgaaggcctgctggcgcgcgccgagcgcctggaagacgcggtgcgcgccggcgggctggccggcttcgaggcgggcatcgttgccgacgtgcgctattggcggctgttccgcatggccttgcggacgcactacatgttcggcttccagggttggctggcgcgcgagctgggcaagcgtttcgccagcctgctgaccaagcggtcggtggcgcgggacctgatgaagttcgcgcgcgaacaggtggcccccctgctgggcgaagaggccgcagaccgcatcatcgccgcgcaccagcgccgcctggacctgatcgagaacgcgctgcaggcgctgacgctgcagtacccgtcgtattcgctctggctgcaggaaagccacctgggccgggtggcgcgcgagctggagcgccggcgctatcgcgacatgctggaacagttcctcatcagcggcgaagtctatgccgacttgatggcgcagttgaaagcccgctggcagcacatcgacaagcatccgccactggacatcgagctgggctcggccgaactggtcaagcgcgtgccgctgttcgagggcctgagccaggattcgctgcgcgcgatctgccgcctgctcaagccgcgcctggccctgcccgaccagcatatattgaccgagggccgccatggccaggagatgtgcatcgtggcgtccggggccgtggtggtgcatctgcccgaccacaccaccatcgaactgggcagcggggagttcttcggcgagctcgccctgctgggcgaggagcaactggtgcccgatgtcacgtcgctgggctacagcaagctgctgatgctgtcggcgcgcgatttccatgccctgctggcgcgcgacgagcacctgcacgagcgcatccagaccgttgccaagcagcgcatgcgcgccatcgaggtgtggaagcaatactcgcaagccgcggcggcggccgccgccagcacggcctcggaggattcggcgccggcg

SEQ ID NO: 15277 - DNA, 738 bp, Bordetella pertussis
atgtccctgccccgtttctactgcgacgcccgcctggcgcccggcgagtgcgtggcgctgcccgaagcgctcgcccatcacgcggtgcgcgtgctgcggctgcgcgccggcgcggcgctggtgctgttcgacggcgccggcggcgaatatcccgccacgctggaaatcgagggcaaggcggcctgggcgcaactgggcgcgcatgtgccgcgcgaagccgaattgccgggccgcatcacgctggtccagggcctgccggccggcgacaagatggattgggtggtcgagaaggcggtcgaactgggcgcctggcgggtcagccccatcgcggcgcagcgcagcgtgctccagttgaacggggcgcgcgccgaaaagcgcctggcgcactggcagcggatcgcccaggcggccgccgaacaatgcggccgcaaccgcctgatggccgtggacgcgccgcaggccctggcggcctggctggcacaggcgcccggcgcggcgctgcgcctgctgtgccaccccgaggccgagctcgatctggccggcgcgctggcgcggcacgccgcgcacgacgacatctgcctgctggtgggaccggaaggcggctggtcggatgaggagctggagcaggcgcgcgcggccggcgtgcaggcggtgcgcttcggcccccgggtgctgcgcaccgaaaccgcgggcatcgccctaatcgccgcggtcagcgccatcaggggctggaacggc

SEQ ID NO: 15278 - DNA, 630 bp, Bordetella pertussis
gtgaattttctgacccatcgtgactccttaagctccgaccttgaccgtgatatggcaggtctgcttctcgatacggttaccgcggcccttggcgcgagccgagaaacgcttcatcgattgagccttgtccacaaaaatggtggtgaccttcaactcgtcgatatcggcgccgtcgttgtgctcggcgttggcgatagccgactcgacagccttcttcaggatgacggcggccttcttgggcgagaaggtgaggatgttcagggcttgagccaccgacttgccgcggatcaggtccgcaaccagacgggtcttctgagccgagatgtgaacaccacggataatggcagtagtttccatcgcttacctcttcgacttcttgtccgcggcgtgacccttgaacgtacgggtcagcgcgaactcgcccagcttgtgaccgaccatgttctcgttgatgtaaatgggaacgtgctggcggccgttgtggacggcaatcgtcaggccgatgaattccggcaggaccgtggaacgacgcgaccaggttttgatcggcttcttgtctttgcccgcgacagccgcatccacctttttgatcaggtgcgcgtcgacaaacgggcctttcttgatcgaacg

SEQ ID NO: 15279 - DNA, 645 bp, Bordetella pertussis
atgaaaaaggcggctcatgcgagccgcctttttcattgcacgccggttcggtcaggcggtcggcggcatgctgtcgacgaaggatgggcgtgccgacagcttttcatacaggcgggccaggttggcgtgatcggcgcgccagtccaggtccgcaaagcgcaagttcagatagcccagcgcgcagcccacggcgatgtcggccaggctgtagttcacgcccatgcagtgggcgttttcgcccaggctgtggtccatggcgtccaggctggcgcgcaccttgccgtactggcgctcgatccattcggggctttgctgcgcggccgggcgcaggcgttcgcgcacgacggtgacgcaggcgtcgagcaggccgtcggcgatggcttcccagcacttgacggccgcgcgttcgcggcccggctgcggaatcagccgcgccaccggagacagggtatcgaggtattcgacgatcacgcgcgaatcgaacagcgcgccgccgtcttccatgacgaggcagggtaccttgcccagcgggttgtacttctgtacctgcgaatcaggcgaccagacgttctccagctcgagctggtagtccagcttcttttctgccataacgacccgcactttgcggacgtaaggactggtaag

SEQ ID NO: 15280 - DNA, 3507 bp, Bordetella pertussis
atggcggccgcagatcgagcagtacgccagccaggcgctgggttcgcgggtggcgacagcctgagcgccgactggagcggcctgaatccgcgcctgaacctgtccggggtgcgcatctacgatcaccaggccgacccggtgctcagcctgccctcggtggcggcggtgctgggctggcgcagcgtgctcaagctgtcgcccacgttgcagagcctgcgcatcgacggcgccgatctgctggtgcggcgcgattccgccgatcgcctgtgggtcgccgggcaatcgatcgacctggctgcgccgtccgatcacgggttcaccgaatcgccggcgctgcgctggctggcgcgccagcgcgagctggccctgcacggcgtgacgctgcgctggcaggacgaagcgcgccaggcgcccgagctgcggctcgatggcctggacctgctgatgcgcaacggggtgttgtcgcatcgtttttccctgcgcgtgcgtccgcccgcgcagctggcggccaaggtatcgctgcgcggcgagctcaaccgcagcctgttcgcgcgcgacggcagcaatccggccagctggagcggccagctgtatgccgaggtgcaggacgccgagccggcggcctgggcgccctgggtcgcgataccggcggcccagggccgctatgcggcgcgcgcctggctgcaactggatcacggcaagttcaccgacctgacgatggatgcggcgctgcgcgggctgaactggcgcgccggccagagtgcgtcggtcagcgtggacagcgcccagtggcgcctgcagggcgccccgggcgacctgctgcagttttcggacctgccgctggcgcgcagcgccgacggcgccggcgtgtcggtcacggggcaggcggatggcctgtggctgaacctgcccgaaatattcgaacacccgctggcgctggaccgggcgcaactcgacgccaccctgaccgagccggcggggcagccgctgaccctgaacctgcgccgcctgcagctggccaatcccgacctggatgcgaccctgcacggcgcctggcgccagcaaggcaagtcggcggccggcacggcggacctgcgcggcagcctggcgcgcgcgtcgatgccggccatccaccgctacctgcccctggaggtgaacgaggatgcccgcctgtggctggcgacgggcctgcctgcagggacggttcatgacgccgccatcaccctggcgggagacctggatgattttccgttctcggagccgggcgcgcaggggcagttccgtatcgcgggacggtaccaggatgccgtggtcgattacgcgccggccgagggcaagcgcaaggcctggcccaggctggagcaattgtcgggcaacttcgccgtggacaaggtgagcctgagcctggacagcgccggcggcggcctggtgcgcaccgccgcagaccaggtggtgagcctgggggcggtgaaagccgcgattcccgacatggaagaccacgcgcaattgcacgtggaaggccagagttccggcgcggtgccggcgtatctggcgctggccgccaattcgccgctgggcgaactgctcgacggggcgctggccgaggccgagggcaccggccagtgggaggtgccgctggcgctggatgtgccgctgctcaatgccgaagacaccaaggtcgaggggcgcatcgtattcgccggcaacgcgtttcgcttcatgcccgagatgcctatgctgacgcaattgcgcggcgagctggcgttctccgaactgggcatgagcgccaaggaaatccatgcccgcttcctgggcgggccggcgcgtatctggggcgtgctggagcagggcagcgctccgctgcgcttcgaaggcacgctgacggcggcgggcctgggcgaagtgagcaaggcgccggcgctcaagcgcctgtcgggccagagcgcctaccgcgggcagctcaactacctgaagggcggggcggtcgatatctcgatggaatcgaacctggacggcctggcgatcgacatgccggcgccggtgggcaagcctgcgcgcggcgccatgccgttcaagctgcaatgggggccggccaacgaccgcgggccgcgcggccggcgctggctgtcgggcagcctggccgagaacatcaatgtgctgctggagtacgatccggccgatgcctcgcgggcctatttcgcgcgcggcgcgctgggcgtgaaccgggccgccagcctgccgcagcgcggcctgaccgtggccgcgaccctgcccgaactggacctcgacgcctgggacgccatgaaggccgatttcgacgagccttccagcggccggcggcagccgtcgcgcgtgccgctgctgccgcagccggatcagatcaacctggccgccgaccgcttgcgcgtggccggctataccctcgatgacctgaaactggcggcccagcggccgaccgcctcgcagtggcgcgtgacggtggactcgcgccaggcactgggcacgctggagtggacggaggcctcgggcgccatcgccggccgcgtgaccggccgtttcaagcggctggcgctggcgggcgaggaggacacgcgccaggaagaggacgcgctgtcggctggcaacgatctggaggatattcccgccatcgatctgcaggccgaggagttcagcctgtacggcaagcagctgggcagcctgcagctgatcggcaccaacatggagcgtggccgcctgtggcggctggacaagctgcagatcgccaacgacgccgcccggctcgacgccacgggcaattggcgcctggacggcacgcagcgcggcctgaccgtgcaggccaatgccgagttcagcgacctgggcaagttcctggaccgggtcggcctgcctcagaccgtgggcgggggcaagggcagcctggagggcaccgtcacctggcgcaatctgccctggtcgtacaacctggccgagctggaaggcaaggcgcgcgtcagcctggacaatggccgtttcctgcatgtgaattcgcgcgccgcgcgcctgctggaactgctgtcgctgcagtcgctgcagtcgctgcagtcgctgcagcggctggcgcgcctggacgccaacccgggcgggttgctgcgcgaagggtttccgttcgacacgatccgcggcgacatgtcgctcagccagggcgtgctgacgaccgagggctacaagctgagcggtcccgtggccgggatcgtcctggccggcaacaccaatatcgtggacgagcgctgggacatgcgggcggtggtggtgcccaacctggacgccagcggcgcggcggcggtgacggccgcgctggtcaatccgctgatcggcctgggcgctttcgtgacgcagtggctgctcaagcagccgctggcgcgcgccatgtcttccgagtatgcggtcaccggcacctgggacgatcccaaggtgacgccggtggagtcgcgcgcgccgacgcgccagcaggagccgcagcccgagcac

SEQ ID NO: 15281 - DNA, 621 bp, Bordetella pertussis
atgcccgaacatggaacacgaacggagccgggtggcagtgacgaaagcaagagcgcgctggtgctgggcattattcaaggcaagaccatcgtggccgaggccagcccccagtacgacctgtcgccctcggaagtcgagcagtacgaatgtcatctcaaagaccttcaagaagcgtacggcgaggcgatgctggagccacgcgcgagaaaaaactgcagtccctgctggacgaggacgagaagtgatcgagacgatccgccagggactgcaagccgacggcatcaccgtctcgatcgccaagctgtgccgctggttcaacgtgccgcggcgcacggtctactattcgacaacgggttggtctgcacgtctcgcagctataccgcgttggtgcgaggctacgggctgcgccaggatttcatcacgccgcattgcccgcagcagaacggcatgatcgaacgcgtgatccgcacgttgaaagaacaatgcgcacatcggcatcgcttcgagaccatccaccacgccagccgcgtcgtaggggactggatacgcttttacaaccgccggtgcccgcaccgggcgcttggcatgaagactccggctcaggcatttgcattagccgct

SEQ ID NO: 15282 - DNA, 1287 bp, Bordetella pertussis
atgcgagtcagcatatcggcgatgggatcgctcatgctcatattcgttctcctaccagctggccttggtcatgccgggaacttcgcccttcatcgccatttcacgcaatttgtggcgggtcaggccgaacttgcggaacacgccgcgcggacgaccggtaaccacgcaacgattgcgttggcgagtggggttggcattgcgcggcagctgttgcagcttgagccgagcttggtaacgttcttcgtcggtcttcgactggtcgtcgatgatcgccttcaattcggcgcgcttggcggcatacttgtcagccagcttggcgcgcttgatatcacgattgatgagggagagtttagccacgtcatcagccccttagttacggaacgggaagctgaaggccgtcaacagcgccttggcttcgtcgtcagtcttggcggtggtggtgatgctgatgttcagcccacgcagcgcgtcgatcttgtcgtattcgatttcggggaagatgatttgctctttcaccccgatgttgtagttgccacggccgtcgaacgcacgacccgagatgccgcggaagtcacgcacgcgcggcagcgcgaccgcaaccaggcgatccaggaattcgtacatgcgctgaccacgcagcgtgaccatgcaaccgatcggatagttttcgcggatcttgaacccggcaatagccttgcgggtcttggtcaccacgggcttctggccggagatcttggtcaggtcggaaacagcgtgctcgatgaccttcttgtcggcgaccgcttccgagacacccatgttcagggtgatcttggtgatgcggggcacttccatcacgcacttgtagccgaacttggcctgcaggtcggcaacgaccttgctcttgtaaaactcttgcaaacgagacatgtctgtcgccccttacgccttggcgccgaccacggcgccattggaacggaacacgcgaaccttgcgaccgtccacttcctgcacgccgacgcggtcgcccttgccggtggccgggttgaacagcgccacgttcgaaacgtggatgggcatggtcttttcgacgatgccgccaggattgttggccatcgggttggccttgacgtgcttcttcacgacgttcacgccttcgaccagcacatggtcggcgtcaacgcgggccagcacggtgccgcgacgcttcttgtcgcggccggtcaggacgatgacttcgtcgcctttacggatgttgttcatcgcgggctccttacagcacttccggggccagcgacacgatcttca

SEQ ID NO: 15283 - DNA, 336 bp, Bordetella pertussis
atgcccaatcaagctgcccagctcagccaggtcttccaggccttgtccgaccctacccggcgcgccgtactcgagcgtctgtgccaggggtccgccgccatgagcgaactggcgcggccattcaacatggccctgccttcgttctcgcagcatctggacgtcctcgagcgctgcggcctggtgcgatcccggaaaagcggccgcgtgcgcatctacacccttgcgccgcaaccgctgggcatggcggaacactggatgacccggcaacgcgcgatctgggagcgccgcctcgaccaactcgacctgtatctacaggatctgaaggagcagaagcga

SEQ ID NO: 15284 - DNA, 1461 bp, Bordetella pertussis
ttgatcacgtcgcgccattgggtggtcttggactgtacgagcttgccgccgatcaatagcgacttcgctcatttctctgctcctcacactgcttggaatgcggcccggcgggccgtgttggacaggcgctgccggcgccgctcgcgcggcgcgcggcaccggaccggtttacttcttgaccagcgggcaggtcgactcggccagcggctggaaggcctcggcggccggaatggtggccaccagcttggaatagtcccagccgcccttggactcggcaggctttttgacttcgtacagatacatgtcgtggatcacccggccgtcgggccggatgctcgcgttgcgcatgatcgggtccttgatcggcagttcgcgcatcttgtcggccacgaccttgccgtcggtactgccgctggcggcgaccgcgcgcaggtaatgcagcacgctcgaatagacgccggcctggaccatggtgggcttcaggccgcgaaacgccttctcgaagcgcgccgaccactggcgcgtcgcgtcgtcatagtcccagtagaagccgtccacataggacaggccctgggcgttgtccagccccagcgcgcgcaggtcggacaggaagaccagcagcgaaacgagccgctggccgccttcgacgatgccgaactcgcgcgcctgcttgaccgcgttgaccgtatcctggccgccattggccagcgccacgacctgggccttggagctttgcgcctgcagcaggtacgaggcgaaatcgggcgcgttcaaggggtggcgcacgctgcctgccaccgtgccgcccagcgcctggacggccttggcggtatcggcctccagcgagtggccgaaggcgtaatcgacggtgatgaagtaccaggacttgccgcccgcccgcaccgtggccttggccccgccggccgattgcgaataggtgtcgaacatccagtgaaagcccagcggcgagcaatcctggttggtcagcgccgtggcggccggcccggagaacatcacgaccttgttcttctcgcgcgcgataccctgcaccgccagcgccacggccgagttggtcaggtcggcgatggccgtgaccccatcgcggtcgaaccactcgcgcgccttggccgccccgacgtccgtcttgttctggttgtcggccgagaccaggtcgattttcatgcccttgcattcggcggccaggcaatcgtcgatcgccagttgcgccgccgcgaccgaaccaggcccgcccatgccggcataggtgcccgacatatcggtcaggatgccgatcttcaccggcggcttgtccgccgccatcgcctgacccaccaacatggcgcccaggcacaagcctgcggcaaacccgcgtgcgcgcgatttcatgaatctgtctcctgtggtttttctaggtcctgcacgggtgcgcccaaggcgtccgcccgtcctagtgtagatgtg

SEQ ID NO: 15285 - DNA, 972 bp, Bordetella pertussis
ttgctgcgcctcggtgtaggcgcgcgccgcattgtggacgtgctgggtggccagcagcgaggccagttcgccgttgccggcgatcacggcattgaggatctgcgcgtgttcgtcccagttctgcttggcgcgtcgcatgttgctgggcgcgaacagcaaggcggtgcggtcgcgcagcgagcgcatcaggtcggtcagcaccacgttgccggcgatggtggccagcatctcgtggaactgcgaattgagcgccaggaattgctgcaggtcgtcgctgcgcgccgcttcggtcccatcgtcgaggaacttgcgcagccgcgtcacggtggcgtcgtcgcggcgctgcgcggccagcttggcgttcaggccttcgagcgtggcgcggacttcgaccatgtcgtaggcgatggcctcggacggcaccgccaccgacgcgccgcggcgcggctcgatcgtgaccaggccttcggcggccagggcgcgcagggcttcgcgtaccgggatgcgcgacacacccatgtcgtcggagagccggccttcgatcagccggtcgcccggcgtgaactcgccgctgaggatgcgctcgcgcaatttgtcgcgaatgacggcgaacaaaggcatgtgctgctcgccgattttcagcgaaggggcggaatggccggcgtcgagcggatacgtgctgggaccagaaattgccatggcgttgtgcgagcagatgggacagtgaatacagtgtccattgtattactctgctacaccgtccgtgcaagccgcccggcggcggcccggccgcgccttcaggcgcccagcgcggcgcgcgccagcacgacgagcgcgccgatggcgcagatgcccagcaggatgcggcgcacggtggccggccgcatgcgctccttcaggcggctggagcaggagaagccgagcagcaggaacggcagcaggccgacgctgagcaggaactcgttgacgccg

SEQ ID NO: 15286 - DNA, 972 bp, Bordetella pertussis
atgaccccaccccttattcgaagcgaccgttcggcgcctccctcgcccgccacccaggacaaccgcaaggccctgggcctggcggtactggtgcacctgctgctgttgctggtgctgatcttcggtgtgaactggcgttcggaaaaccccgggccggtgcaggtcgaactgtgggccgacggcgactcgccagtcaacccgccgcccgacgaagtcaagccgcagcccaagccggaaccgcagccggaacctgaaccgcaaccgcagcccgagcccgagccggagcccgaaccgccgccgccccctccgcccccccctccgccgcagccggaagtccagcccaaggaacagccggacccggagatcgcgctggaagaagcgcgcaagaagcgcgagcaggaagaaaaggcccgccaggccgccgaggccgccaaggaaaaggcgcgcctggaagaagagcgccgccaggccgagctgaaggaaaagcaacgcctcgaacaggagcgccgcgcggccgagaaagccgcggcggagaaggccgccgccgagaagcaggccgccgagaagaaggccaaggaagaggccgccaagaaggccgccgccgacaaggccctgcgcgatgccttccgcaacgacgccctgggcgcggccggcatcccgggcggcacggccgaccgcaaccaggccggcggcggacgcgacagcggctatggcgccaaggtgcgcgcctgcgtgcagccaggcgtggcctatccgccgccgccgcgcgccggctcggccaatcccacggcacaataccgggtacagttgggttctgatgggaaggtcaatggtgtcacgctgaccagttcttcgggcaacccgggtttcgaccgggcggtcgaaaccggcatccgccgctgcaaccctttccccaaaccatcgaccggccgctacgagcccattatcgatgttgtgtaccgcatgtacgat

SEQ ID NO: 15287 - DNA, 369 bp, Bordetella pertussis
atgccgcgcgccacgctccctgcggaggcgcgattgcatcgcccctccgagtttgccgccgccctcaaaggccggcgactggcccgaggggctttctttattgtcagcgcctcgccctgtgcccctgctgatgaccagccggcgcgcgcgcgcctgggcctggtgatcgccaagcgttttgccgcccgcgccgtgacgcgcaataccttgaagcgggtcatccgcgaagcgttccgggctcgccggcttgccctgccggcccaggattacgtggtgcggctgcacagcaagctgacaccggcaagcctcacggccctgaaacgctcggcgcgcgccgaagtagatgctcacttcacacggatagcgcga

SEQ ID NO: 15288 - DNA, 1896 bp, Bordetella pertussis
atggcggcgctccgctttttcgggctcaaggtcggttacttcagggcgctggtcacgccaccgaggatgccgcccagcaggccgccgcccgctgcgccgctaccgaccgcgccggtgacgccgcccagcaggccgcccagcaggccaccgttggccgcgcccggtgcgccgcccgagccgcccgagccgcccgagccgcccgagccgcccgagccgcccgagccgcccgagccgcccgagccgcccgagccgcccgagccgcccgagccgccgccggtcacgccgcccagcagaccacccagcagaccgccgttgggggcggcgccgccgcccaggttaccggtcacgccggccagcaggccggtgacgggagccagcaggccgccgttggcgccgccgccggtgatgccgcccagtcccaggccgccggtcagcgaggagaccgcgctggtggcatgggccagggtgttgcccagggggttggtgttgcccggcgtggcgtgcagcaggccgccggcgctggctaccgcgccgcccaggccgccgagcacgccgtccaggccgcccactggcaggccgccgggcagctggccgcccgcgccggcgagcgtgccgcccacgctggtcagcaggccggccaccggcgcgcccaggttggtggtggcgcccaccgtttgcgtgagattggtgacggcgcccgcgaccgggctgatggccggatcgaggccggcgcgcgccgatgccgtccagcgcctcgcccaggcccagcgacgcaacgttgtccgcggcggtgccggtgttggtcagcgcgggctgcaggatgggttgggtcgggccgtcgaggacgccgccggcaatgccgcccaccagttggttgacgggattgagcaggccgccctggccgcccagcgcgccggtcagcgcgcccacggcgccggtggcgttgcccagcacggcggtcagcggctcgggattgttggcgtcggcatggagcaggccgccggtgctggccacggtcttgcccaggccatcgaccaggccgcccaggccggtgctcagcccgccgggcaggcccgtgccggctaccgtgtcgcccaggccgctgaccgtcccgccgacttgcgtcagcacgccgtcgaccggcgcgcccagtccggtggtggcgccgatctgctgcgtcaggccgacggtcgtgtcgaccaccggcttgagcgtcggatccagggccttgcccaccgcgcccagcgcgttgtcggcgcccagcggcagcaggctgtcggtcgcgccgccggtgttgcccagcgtggtttccagcaggcccgcgcgtaccgggtccaccggcgtggtcggatccggattgccgggggtgccggggccgccagggccgccggggttgccagggccgcccgggttggtgggagtgacgggggcggacgcgcgcttgctgctgctgttgccgccgccgccgcaaccggccagcgcggccaccatgatggccgtcaacaggggaaccgcgaaacgggtcgggcggtggtgggtcttggtcttggcgtacatgatccgtgctcctcagggttggaagttcaggccccctcattggcccgatgccccataccaagcacaaaccgtgccagcttttttcaagacgtcgcgaaatccgcccgaagcccttcggagataaaaaataatttcattgttttcatcgagttgcgagcgtttcttgcatattcgcaagtgctcagcaaccgcaaaatccggacatcaggccgtctgcgaatgttgttttttcgcgaatatcggcccgatgttacggctggcgttacggcgacgttacgtaacgttccgcagtgttgcccatgtttcagagcgcgtcatagaacagcgagtagttggcgt

SEQ ID NO: 15289 - DNA, 678 bp, Bordetella pertussis
atgcacactcaaaataccgccaagaataccgcagccgcgctgcgcgcgcgattgcggcagtcccgggccgagctgaccagcagccagcgcagccgcggggcgctgttgatgcgcggacgtctgttcacctggctcaacctggcctgcgaacaggccgccgcccaaggccgccccctttcccgcgtggccgccttctggcccatggaagacgaacccgacctgctgcccctgctggagcaatgggtcgaatccggcatcgccgtctgcctgcccgccgtccaggagcgcgacgccccgctggtgtttcgggactggacgcccgacagcgccatgcgcaccggcgcgtatggcgtccaggagcccgcagccggcccggcggtggtgccggacgtggtgctggtgccgacgctgggctacaccctggacgccgctcgcctgggttacggcggcggctactacgaccgcacgctggctgcctggcaggccgccggcgcgtcgccgaccaccatcggcattgcctggtcggaagggctgctgccggatgactaccaggctgccgcgcacgacatcgccctggacgccattctcacgcccgacggctgggtgccgggcgctcccctggtggccagcggcgccgcggccggccaccgcagcgccggcagccgtttcctgctgcgc

SEQ ID NO: 15290 - DNA, 858 bp, Bordetella pertussis
atgcaattcgtgaacctagaccacgccgggcgcgcgatggccgccgtggcgcaccctcatggctatgtcctgctgcccggcccggaaaacggcgactcgcccgagctgggcgagcgcatacgccgggaagaagacctgcccgcgctcggcgcgcaggcgctcgccgccggcacgccgcttgtcgccggctcggccgccgtgctcgcccccctgctgacccggcccggcaagatcatctgcctgggcctgaactactacgatcacgccagggagggcggccgcgacaagccgacgtatccatggttcttcctgcgcgctcccagctcgctggtggcccacgggcaagccgcatggctgccccgggtctcgggtcatttctattacgaagcggagctggccgtcgtcatcggcaagcgggccaggcacgtcatgccggaacaggccctggacatggtgctgggctacgcctgcttcaacgacatgtccgtgcgcgactaccagaagaaaacaccgcaatggaccgtgggcaagaatttcgaccgtaccggcggcttcggcccggcgctcgtcctggccggcgaccttccgccgggcggacgcggccttggcatcacatgccgggtgaatgggcggacggtgcaggaagccaacacggacgacatgattttcgacgtcgcggaggcgatcggcatcgttaccgaatgcatgaccctggaacccggcgacgttctggtaatgggaacgcccgccggcgtcggcatggcgcggactcccccgctctggctcaagccgcaagacacggtcgaagtggagatcgagcgcgtcggccggctgtgcaaccccgtcctggccgagccc

SEQ ID NO: 15291 - DNA, 258 bp, Bordetella pertussis
atgagcaggcttacggaattgcagcgggctcgtctgcgttggcgagcacgacgtggcctgctggagaacgacctcatcatcacccggtatctggatgcctgcgaagaccagcttaccgacgaagacgtaacggcgctgacgcagctcttcgagcttggagacaacgatctgcttgatctgctgctggcgcgcaaggagccggagggagcgctggacactccccggctgcgcgccatcattgaccggatgcgagagctc

SEQ ID NO: 15292 - DNA, 1224 bp, Bordetella pertussis
ttgcagcagcagccgcagcgcgacgcgcgctgcggcggcctgcgcgccgtcgccctgcatggcctgcaggcgcgcggcggccgcgcccacgtagccatcgaccgagagcgcggccaggtcggccgcatccggctccagcaccagtccggcgctgtcggcgaccagcgcgcgcacgcgtgccgcggcgcgctcgacatcgcggcgcaatgcgtcccagcgccgcgccagcgacagcgcgccgtgcagttccaggcgcagcacgtcgccggcctgcaggccggccaaccggtggcccagatcctcggcatcggaagccaggtccagccgctcgacccagtgcgaccagcgatatttgccgacctccagctggcgcacctgcggcggcgcgcctggcgccgccacctccacgagcagcgcatatcccggggcattgccgcgaaagcggtcgggctcgggcgtgccggcataccaggtgcgttcgtcgatgcgcaggcagccgtgccagtcgcccagcgccagatagtccagccgggcgcgctgcgcgcggtccggcgcgatcgggttggcggcatcggcctgctcgggcagccggtcggccacgctgccgtgcgccagccccacgcgcaccaggcccgcggcgctgtccatggtgtcgaacgcggcagtcacatcgtcataggtatggcgctgggtcagcggcgcggccagcacggccagccccgccagcggcagctcgaccgcggccgtgtcctggggaacgtggacgttggttccgatgcactcgagccggcgcgcgcgcgaccagacgctgtcggccagcgccgcatcgtggttgccggcgatcagcacccacgggccctcgtaggcctgcatggcgccgaacaggcgccggatcgtgcgatccgaaacgctttgcgtatcgaagacgtcgccggccaccagcacggcgtcgacggccagttcgctggcctgggcggcaatgcgggccacgggctccagccgcgcctcggccagcacggccgcgtcatcgctgtcgaactggccgtactggcggccgatctgccaatccgcggtatgaatgaatcgggtcacgaagctccggtcgggcgcgcgccgcgcctgtcgtcatgcccggattgtggcacaggcgccggcgcgcgccgacggctcaggcggcgttgtgctgcgcgcgccacgccgccgccagcctgcccgcccgcgccg

SEQ ID NO: 15293 - DNA, 1392 bp, Bordetella pertussis
gtgcgtcaggaagatgatgtcggcgccgccgatgcgcgcgggctgctggatcatcgaaccgatggaaatcgagcggtcggccaggatgcgcgcgatgtcggccagcacgccgggctggtcgtcgacccgcatgcgcaggtaataggaggtgctgacttcctcgatcgacaggatctgcaggtcggacagcgcatcgggctggaaggccaggtgcggcacgcggtggccggggtcggccgtgtgcaggcgggtcacgtcgaccaggtcggccaccaccgccgacgcggtgggctcttcgccggcgccctggccatagtacagcgtgggccccacggcatcgccgcgcaccagcacggcgttcatggcgccctcgacattggccagcaagcgctcggccggcaccagcgtcggatgcacgcgcagctcgatgccatcgacgcgccgcttggtgatgcccagcagcttgatgcgatagcccaggcgctcggcgtgggcgatgtcctcctgggccagttgcgtgatgccctcgacataggccttgtcgaactggaccggcacgccgaaggccagcgaggccagcagggtcagcttgtgcgcggcgtccacgccttcgatgtcgaaggtggggtcggcctcggcgtagcccaggcgctgcgcctcggccagcacgtcggcgaacggcagcccgcgggcgcgcatttcggacaggatgaaattggtggtgccgttgatgatgccggccacccattcgatgcggttggcggtcaggccttcgcggatcgccttgatgatgggcacccctccggccaccgcggcctcgaacgccaccatgacgccgcgggccgaagcggcggcgaagatctcgttgccgtgcttggccagcagcgccttgttggcggtgacgacatgcttgccctgggcaatggcttcgagcaccagctcgcgcgccagcgtatcgccgccgatcaattcgaccacgatgtcgaccgccggatcgcgcaccagggcaaagccgtcggtcgaaatctcgacgccatccccgacgcggctgcgcgccttggccacgtcgcgcacggcgatgcggctgacttcgatgcgccgtccggcgcgccgtgcgatttcttcggcattacgcgccagcaccgcccaggtgccgccgcccaccacgcccaggcccaacaggcccaccttcatcggattcatttaagcaaaccgtccttgcggaacatatccttgatgccgcgcaccgcctgccgggtgcgctgctcgttttcgataagagcgaagcgtacgtactcgtcgccatactcgccgaagccgatcccgggggacacggccaccttcgcatccgacaggacacgcttggcgaactccaaagaacccatcgccctg

SEQ ID NO: 15294 - DNA, 855 bp, Bordetella pertussis
atgctgggccagcgcatcatcaccgccgccgtattgcttgccgtcctggccctgacgctggcgctggccaacccgtggtggttcgtcgccttgctggcgctgggcgcggcctgcgccgcctgggagtggctgcgcctgacggtgcgccagcccctctcgggtgcgctgtgcgtcggcctggcggcggcgctgctggcggcgatgctggccatggcgcaggcctggatccagggaggcgtgtccggcctgcggctcgaggtctgggtcggctactggctcaccccggcggtcgtggccgtctggctgctgggcgcgggcacggcggtcgcgcgcggccgcgccgacgcgccggcggccagcctgggctggacgctgttcgccattcccgccgtgctggccgcctggtcggtgttggcgctgatgtatctgtcgcgcggcggcgcctatgtggtgtcgctgctggcgctggtgtgggtggccgatatcgccgcctatttcgccggccgcgccttcggcaagcgcaagctggcgccgcgggtcagcccgggcaagacggtggccggcgcggtggccggcgtgctgggcgcggtcgcgtggatcgccctgagcagccaatgggatggaacttatggccaggcgctggtcgaacgctggtcctggtggctggcgttgccggcggccgccttgctgggcgtcgtctccatcgtcggcgacctgttcgagtccttgctcaagcgccgcgccggccgcaaggattccagcgcgctgctacccggccacggaggcgtctatgaccgcatcgacgccatcctgccggtggcgccgctggcgttgctcatgtctggagtgttgttt

SEQ ID NO: 15295 - DNA, 513 bp, Bordetella pertussis
gtgggcgcttggcggcgctctgcggtcgtggcgttgctcagcgctgcgttggctgctggtgcagcttggactgcgcagggctggcgcaaggatgccgcaatcgcccgccaggcggcggctttcgcgctggagcgcgaccgccaagcgcaggccaccgttgccgcactcgaagcggttcgagaggagggcaggcggcgcactgccgctgtggagaaagctcgtgatgacgctcaagaattggccgccgctgcggccgctaatgctgttggcgctcgtgctgagcgtgaccggctgcgcacccacgcaaacgcgctggctcgcgccgcagtcgcccgagatcccgatgctgccgatggaagcccgacaggggccagcgccatcgatctgcttgcctacatgctcagcagggttagcggccgagctgaagcgcttgcaggagttgcggaccgtgcccgcatcgccggattgacctgcgaacgcgcctacgaggcggtgcgcggcaacgtgcgccct

SEQ ID NO: 15296 - DNA, 165 bp, Bordetella pertussis
atggccaaagatatccgcgaaaagatcaagctcgagtcgactgccggcacgggccacttctacacgaccaccaagaacaagcgcaacatgcccgaaaagatgctgatcaagaaatttgatcccgtcgctcgcaagcatgtcgactacaaagagaccaagctgaag

SEQ ID NO: 15297 - DNA, 957 bp, Bordetella pertussis
gtgccatatctgtcgggtctcatgcggcgcagcggccgcctgttcttaactttggtcaaggtcatgctgcctgtcatgatcgccgtccaggcagcgcaggcgtggggctggatcgatatcctgggccaggcgttcgctccggccatgggtttgctgaatctgcccgccgaggccggcatggtatggatgacgggcgcgttcgtggggatctacggcgccatcgcggcgctgatcagcttggcgccggcgctggagctgaccggcggccagttcagcgccctgtgttccatgctgctgttcgcccatgctctgccggtggagcaggccatcgtgcggcgcgccggcgccagtttctgggccacggcggcgctgcgcgtgggggcggcgctgggctacggcgcggcggtctcgtggttctgccacgccaccggatggctcgatgagccggtgtcgctgcaatggctgcagtcaaccgcgctggccggcgagcaggccggcggcatatgggcctgggtgcgcggcaccgccgtgtcgctgtcgttcacctacctcatcatcctggcgctgctggtggcgctggacgtcatggaacgcaccggcattacccgcgccatcacggtggcgctcacgccggtgctgcgcgtttcgggcctggacccgcgcgtcacgccggtcaccatactgggcgtgctgctggggctgtcctacggcggcgcgctcatcatcgaagaggcggagaaacagcaactggaagcccggccgcgctttctggcgctggcctggctgtcgctgtcgcattcgctgatcgaggatacggtgctcttgatggcgctgggcgccaacggctggatcgtgctggtcggccgcctgctggtgacgctggtggtcgtggccatcctggcgcggatgctgggcgggggcggcgcggcgcgccggcccctgggcgcgccggcaggc

SEQ ID NO: 15298 - DNA, 321 bp, Bordetella pertussis
atgaacactctggagctcagcgcccgcgttctcgaatgcggtgccatgcgccacactcccgccggattgcctgcgttggaattgctgttggtccacgagtccgaggtcgtcgaagcggggcatccgcgccgcgtcgaactcacgatctccgccgtggccctgggcgatctggcgttgctgttggccgataccccgttggggaccgagatgcaggtgcaaggttttctggcaccagcccgcaaggactcggtaaaggtcaagctgcatttgcagcaggcacgcagaatcgccggcagcatgggacgcgatccgctggtgggt

SEQ ID NO: 15299 - DNA, 4452 bp, Clostridium acetobutylicum
gtgaaaaaaagaaatattgccattctaggaatgtttatgatgacagcatctttaggtatttctaaaaatcatgtcttcgctgatacagtaaaagcaagcaattcgggtgttcaaatacaatttgctgatacaaatactagtacaaccatgaatactattgctcctaaatttaaaatcacaaataatactggagcacctttagatttaacaactttaaaattaagatactattttacagctgatggtactcaggatgaaaatttttggtgcgaccatgctggtatgcttaatggttataactaccaaacaattacaagtaatgtagtgggtacttttgtagctatggataatgcaacagctactgctgatcattatcttgagataagcttctcaaatggagcaggacaacttgatgcaggttcttcacttgaagttcaatgcagagttgcaaagaatgactggagtaattatgatcaatcaaacgattattcatttacttctaatgcaagtgattttactgactgggataagataacaggttatgttaatggagatcttgtattcggaaatccaccagtagtagacccagttattactccaactactgctacatttgatacagctaatccaactgatgtaaatgtagctatgcaattaaacggatttacattatcaggattaacagatgagaacggaacagctgttgatgctgcaaattatacaatatcaggaagtaacttggtattaagcaaggcttatcttgcaaaattagcattaggcaaacatagctttaattttaattttgctaaaggcactacaactataagtaaaccattagcacttacagttacagatacagcaggtataacagtagatcctgcaagtgtagtatttgataaagtagcacctcaagatgagaatgttgctcttaaattaaatggacatacacttggtgatgtggtaggacctaaaggaaaccttgtaaaaggaacagattatactgtagcagatgatggaactgtaacatttagtaaagcatatctttcaactcttccactaggtgatcagacaataacatttaaagctagtgatgattctactaaaacagcagcagtaacagttacagtgaagaattcaaatgctacaaatgttactgttggagatgttacaggagcaaaaaaaggagatactataaaggttcctgtaagtgtaagtacagtaaaaacaccaataggattaatagatatggaaataaactatgatccaacagagttaactgcaaaagatgtagttcctacagatttagtaaaggatactgataactatagctttatagtaaatacatcaactccaggtaagattagtattacatttacagatccaactcttggaacttatccaataggtacagatggaatatttgcatatttagaattccttgtagctggtgaaaaagcaggaaaatatgatttgaaagtaaacccaactacattaatacttgcagatgaaaatgataatgatatagattgtaacccaccaaaggatggaagtgtaactgttataggtactccagttgtaactccatctcaaataaatgttgaacaaggttcagcaactgatcagccagttaaaatagatttaaatggtaacacacttaaagatgttgttgatcaaagtggtaagactcttgttcaaggaacggattatacagtaacagatactggaatcacattaagtcaatcttatcttgcaggtttagccttaggtcaatacactctaacacttgattttaatggtggaggagcatcacagacaataactattaatgttgtaaagaatgaaactgtaaaattgtcagttggaacagtatcaggaaatccaggggatactgtaaaggtgcctgtaactataagccaggtatcaacaccagtaggtttaatatgtatggatataagctacgatgcaagtaagtttactgttaaggatgtacttcctaatacagatcttgtaaaggatactgataactacagctttatagtaaatacatcaactccaggtaagattagtattacatttacagatccaacacttgcaaactatccaataagtgtagacggaattcttgcatacttagactttattataaattcaaatgcaacagcaggagatagtgctttaacagtagatccagctacattaatagttgcagatgaaaatgataaagatataaaagatgcagcttctaatggaaaaataacagttacaggttcagcaccagttgttcaaagctcagtagtaaatacttcaagtgtaacttatgatcaaaatgcaccacaggatcaagctgttagtattactttcaatggcaatacagttaaggatgtaaaggacgcaagtggcaatacacttaaggctggaagtgactacacagcaacaagtgatggaattacacttagccaaagttatcttgctactttagcagcaggaacttacacatatacaattgattttagtgcaggaaatgcagggacatttactgttgttgttaaaggaaaaacagtagtaggtagtgcaactactttagcagtaggaactgtatcaggaaaagcaggagatactgtaaaggtacctgtaactatcagtaaagtaacaacaccagtaggtttaatatgtgcagaaatagactatgatgcaagcaagtttactgttaaggatgtacttcctaatacagatcttgtaaaggatactgataactacagctttatagtaaatacatcaactccaggtaagattagtattacatttacagatccaacacttgcaaactatccaataagtgcagatggaattcttgcatacttagactttatcataaactcaaatgcaacagcaggggatagtgctttaacagtaaatccatcaggatttatcattgcagatgaaaatgataaagatatacaggatgcagcttctaacggaaaaataacagttacaggttcaacaccagttgctgaaaattcagtagtaaatacttcaagtgtaacttatgatcaaaatgcaccacaggatcaagctgttagcattaccttaaatggtaatacaattacagatgtaaaagatgcaagtggtaatacacttaaggctggaagtgattacacagtaacaagtgatggaattacacttagccaaagctaccttgctactttagcagcaggaacttacacatatacagttgattttagtgcaggaaatgcaggaacatttactgttgttgttaaagcaaaaacagtagtaagtagtgcaactactttagcagtaggaacagtatcaggaaaagcaggagatactgtaaaggtacctgtaactataagtaaagtaacaacaccagtagggttaatatgtgcagaaatagattatgatgcaagcaagtttactgttaaggatgtacttcctaatacagatcttgtaaaagatactgataactacagctttatagtaaatactgcaacagcaggaaaaatcagtattacattcacagatccaacacttgagaaattcccaataagtgcagatggaattcttgcatacttagactttatcataaactcaaatgcaacagcaggggatagtgctttaacagtaaatccatcaggtttcattgttgcagatgaaaatgataaggatgtagatcatgcatcaacagatggaaaaataacaatcacaggttcagcaccagttgttgtaaattcgtctgtaaatacttctagtgtaacttatgatccagcagcaccacaggatcaagctgtcagtgttacacttaatggcaatacaatcacagatgtaaaggacgcaaacgctagtgttcttaaggctggaagtgattacacagtaacaagtgatggaattacactaagccaaagctatcttgctactctagcagcaggaacttacacatatacagttgattttagtgcaggaaatgcaggtacatttactgttgttgttaagggaaaagcagtagtaaataaaactactttagcagtaggagctgcatcaggaaaagcaggagatactgttaaggtgcctgtaactataagtaaagtaacaacaccagtaggtttaatatgcatggaaatagattatgatgcaagtaagtttactgttaaggatgtacttcctaatacagatcttgtaaaagatactgataactacagctttattgctaatacgacatcagcaggaaaaatcagtattacatttacagatccaacacttgagaaattcccaataagtgcagatggagttatagcaaatatagattttgttgtaaattcaggtgcagcaactggtgatagcgatttaacagtaaattcatcaggtttcattgttgcagatgaaagtgatacagatatagatcatgtatcaacaaatggaaaaataactgttgaataa

SEQ ID NO: 15300 - DNA, 1236 bp, Clostridium acetobutylicum
atgaataggagagttgttataacaggaattggagcagtaacacctgttggaaataacgctgacagcttttggtgctcaatcaaagaaggaaaatgtggtatagataaaataaaagcttttgatgcaacagattttaaggtgaagttagcagcagaagttaaggattttaccccagaagattttattgacaaaagagaagctaatagaatggatagattctcacaatttgcaatagtagcagcagatgaagcaataaaggattcaaagcttgatcttgaaagtatagataaaaatagatttggagttatagtaggttcaggtataggcggtattggtactatagagaaacaggatgaaaagcttattacaaaaggaccaggcagagtatcaccaatgactataccaatgattattgcaaatatggcatctggaaatttagctataagatatggagcaaaggggatatgcacaactatagtaacagcatgtgcttcggctaataattccataggagagtcttttagaaacataaaatttggatattcagatgtaatgataagtggtggtagcgaagcaggaataactccgctttcacttgcaggttttgcatctatgaaggctgttacaaaaagtgaagaccctaaaagagcatctattccatttgataaggatagaagtggttttgtaatgggcgaaggttcaggaattgttatccttgaagaattagaacatgcacttaaaagaggagctaaaatatatgctgaaatagtaggttatggagcaacttgtgatgcatatcatataacttcaccagcaccaaatggcgagggcggagctagagcaatgaaacttgcaatggaagaggacaatgtaagaccagaagatatttcgtatataaatgctcatggaacaagtacagcttataatgatagttttgaaactcaagctataaaaactgttttaggagaatatgcatataaggttcctgtaagttcaacaaaatcaatgacaggtcatttacttggtgcagggggagcagtagaagcaatcatatgtgctaaggctatagaagaaggatttattccaccaactattggatacaaagaagcagatcctgaatgtgaccttgattatgtaccgaacgaaggaagaaacgcagaagttaattatgtgttatccaattcacttggttttggcggacataatgctacacttttgtttaaaaaatataaataa

SEQ ID NO: 15301 - DNA, 1176 bp, Clostridium acetobutylicum
atgagaaagttatttacatctgaatcagtaacagaagggcatccagataaaatctgcgatcaaatatcagacgctattttagatgccatattggaaaaagatccaaatggaagagttgcttgtgaaactacagtgactacaggaattgttaatgttatgggagaaatatcaacaaattgttacgttgatattcctaaaatagtaagaaaaactgtaagagagattggatatactagagctaaatatggttttgattgcgatacatgtgcagttgtaacatctattgatgaacaatcagctgatattgcaatgggagtagatgaagctttagaatctaaaaaaggtgaaatggataaaattgatgcagttggtgcaggagatcaaggtatgatgtttggttatgcgacaaacgaaactaaagaatttatgcctatgcctattgcgcttgctcatagattatctagaagattagcagaggttagaaaagacggtactttggactatctaagaccagatggaaaaactcaagttacaatagagtatgaagatgataagccagtaagggtagatgctattgtaatatcaacacagcatggacctgaaataggacatgagcagattgaaaaagatttaattgaaaaagtagtaaagtatgttatatcacctgaacttttagatgaaaatacaaaatattatataaatcctactggaagatttgttgtaggtggacctcaaggagattcaggacttacaggaagaaagataatagttgatacttatggtggatatggaagacacggaggcggtgctttttcaggaaaagatccaactaaggttgatagatcagcagcttatgcagcaagatgggttgcaaagaatcttgtagcagcaggaattgctgataaacttgaaatacagcttgcatatgcaataggagttgcaaaaccagtatctatttcagttgacacttttggtactggtaagatagaagaaagtaagattgttgaaatagtagaaaaagtttttgatttgagaccaggagctataataagagatcttaaccttaagaggccaatatacagacaagtagcagcttatggccactttggtagattagatgtagaattaccatgggagcagttggatagagttgaagcgataaaaaaatatttataa

SEQ ID NO: 15302 - DNA, 693 bp, Clostridium acetobutylicum
atgactattggaattattggagcaatggatgaggaattagaaatccttttaaaggaaatggaaccacaaaggcaggaaaaaaaggctgaaatgatatttaacttgggaaaattaagtggaaaaaatgtagttatagtaaggtgtggtataggcaaggtcaatgctgctatatgtactcaaattttagcagatgactttaatgtggattttataataaatgtaggtgtagcaggtggaattggaaaagatattcttccaggagatattgtaatagccaatagtcttgttcagcatgatatggataccacagcttttggtgacagagtaggacaaatacctaggttggatacttttgattttagatgcagtaatagattagttgaacttgctaaaaaagtgtgcgagagttttgataagcaaaaggcttatataggtagaatagcaactggtgatcaatttgttgcagatatagataaaattaaatggctcagcagtgagtttgatgcacttgcatgtgaaatggaaggtggaagtatagctcatactgcatatttgaataatataccatttgttgtaataagatctatatcagataatgctaacaatggtgctcatatggattatgagaaatttttgcctattgctataaaaaattcttctacaatattaaagaatatgataagcttgttataa

SEQ ID NO: 15303 - DNA, 1353 bp, Clostridium acetobutylicum
atgtcagagtgttttaagttagaattgaaaaatacaaaaccataccttcaagatgaagaattaaagaatctaaagccagcggtagcagctgctcatgaggcgatacataatggaacaggtgcaggtaatgactttttaggatgggttgatctacctgtgaattatgataaagatgaatttgaaagaataaaaaaatcagcagaaaagataagaaacagtgtggatgcatttattgtaataggaataggtggttcatatttaggagcaagagctgctatagagatgttttcacattcctttagctcaagtatttctaaagaagaaagaaagaaccctgaaatctttttctgtggtaacaatataagttcaacttacctagctgatctacttgaagcaatagaaggaaaagatattgcagttaatgtaatatcaaagtcaggaacaacaactgaacctgctattgcatttagaatatttaaagaattacttgaaaagaaatatggaaaagaagaagctaaaaatagaatatttgccacaacagacgctaagaagggtgctttaaaaacactatcagataatgaaggctatgaaacttttgtagtacctgatgatgttgggggaagatattcagtattaacagctgttggacttttacctatagcagttgctggaatagatatagatgaaatgatgaaaggtgcagctaaagctagagaagtatattcagaacctgatcttgaaaagaatgaggcttatcaatatgccgcagctagaaatgcactttatagtaaaggtaaatctatagaaatggttgttaattttgaaccatcacttcattatttcggagaatggtggaagcaattatttggagaaagtgaaggaaaagatggtaaaggattattcccagcagcaggagatttttcaacagatttgcattcaatgggacaatatatacaagaaggaagaagacaattaattgaaaccttcattaatgtagttaatcctaagaaagaagttacaatacaaaaggatgctgaaaaccttgatggattaaacttcgtagcaggaaaaactatggattttgttaataagcaggcatttatgggaactgttttagcacatcatgatggaggagttccagtaatggttgtaaatgttccagaacttacagcatattattttggatacatggtttatttcttcgaaaaggcatgtggaataagtggatatttattaggagttaatccatttaatcaaccaggagttgaagcttataagaaaaacatgtttgcactattaggaaaaccaggttatgaagatttagctaaagagcttaacaataaattaaaatag

SEQ ID NO: 15304 - DNA, 1161 bp, Clostridium acetobutylicum
atgaaaaagaagaaaatcatggctttagctatggcggcagctcttactggagctagtgtaattaatatttgttcaagaggtgtaaaggcggaatctttacaaataattaataatgtgggagtttcttaccaagcacatgtacaaaatgtaggttggcaaactgcagttacagatggagctgaagcaggaacagatggaaaaggtttaagagtcgagggattaaaattaagtttgacaaatgcacctgtgggagctagtattctctatcaaacacatgtacaaaatgtaggctggcagccttggttttccgatggacaggaagcaggaacagttggaaaaggcttaagagttgagggattaaaaataaaactaaacaatatgcctggatacagtattcagtatagaacacatgtacaaaatgtaggctggcagaactgggtatccgatggagaggaagcaggaacagttggaaaaggattgagagttgaagctttagaaataaaaattgttaagatttcagacaactcaactgtaggtgtaacgtatgctgggcatgtacaaaatgtagggtggcaaaatgaagttcaaaatggtcaaatatcaggaacagagtcaagagcacttagacttgaaggcttaaagatgaatcttgtaaatgcacctgtaggagcaaagatagattatcaggcacacgtacaaaatataggttggcaggcacctgttagtgatggagctgaagcaggaacagacggaaaaggacttagagttgaggcatttaaagtaaaacttgaaaacttacctggattaagtgttcaatatagggcatacgtgcaaaatataggttggcaggattgggtagctgatggacaagaagcaggaacagatggtaaagggctacaagtagaagctgtagaaataagaatagttaatgctgcaggaggtgttactccagcaccagcgccaacagcaccaacaacggaaacagaaccaacaataccaacagcgccaacaacggaaacagaaccagcaggaacaacgacagcaggaacaacaacgacagtaataacaccaacaggaacaacaacagtaataacaccatcaggaacaacaacaacaggaacaacaccaacagatataggagcaatatatgtagatgattaa

SEQ ID NO: 15305 - DNA, 960 bp, Clostridium acetobutylicum
atgataaaccacggtaaaaatataaaaatattcacaggaaactcttatccaagtttggcagaagaaatagctgatataattggcgttcaagttggagattcaagagtaggaaagttcagcaatggagagacagcggttgatatcaatgagacagttagaggtacagatttatttttaattcaaactttatgtgaacctgttaatgatagtataatggaacttttaattatgttagatgcttttaaaagagcttctgcaggaagaataacagctgtaattcctaattatgcttatgcaaggcaggatagaaaagcaaaggcaagacaacctattacagcaaagttaatggcagatttaatacatacagcaggtgcagatagggtactcactatggatcttcatgcaccacaaattcaaggattttttgatataccagtggatcatttagaaggagtaccgattttagctaagtactttataaatcaaaattcgaatacagatgatttaatagtggtttcaccggatataggtggagttaaaaggacaagaaagtttgcagagaaacttcatgcaccaattgccataattgataaaagaagacctaaacctaatgtttcagaagttatgagtattattggtgatgttaaaggtaaaaaagctatattagttgatgatatgattgatacggcaggttcaattgtaaatgcagctgaagcattagttaagatgggagcaaaagaagtctcagcttgctgcacacatggggttttatcaggtcctgcaatagaaagacttgaaaattcaccattaaaggaagtagttattttgaatactattccaatagagggggataagagaattgataagataaaggttttatcagttgctccgatatttgctgaagctataagaagaatttatgaagacatgcctgtaagtaaaatatttcaagaagaatag

SEQ ID NO: 15306 - DNA, 462 bp, Clostridium acetobutylicum
atgcttagtataatagctgcattaaatgaaaattatgtaataggaaatgaaaataagcttatatggcatatatctgatgatttaaaaaggtttaaaaaattaactacaggaaaaacaatcataatgggaagaaagaccttcgaatctcttcctggtgttctgcctaatagaaaacatattgtaataaccaaaaaccttaattactctagagaaaatgtatcaatagtacacagtatagatgaaataatagaactcaaagatactaccgaggaaaattttataataggtggaggggaaatatacagagcacttatcccgtattgcagtattctctatttaactaaagttcattctaatcaaactggagatgcttttttcccaaaatttgatgaaaatgactattcaataattgcaactgaaaaacatggagactatgactttgtaacatttaaaaggaggtaa

SEQ ID NO: 15307 - DNA, 1182 bp, Clostridium acetobutylicum
ttggatatgtatagaatctttaatgaaggtcaaataaatgttttaaaagatataaaaagggcatgtaaagaaaaaaaaattaaggcttatataattggcggtgcagttagagattccatattaaatgtgaaaagcaaggacattgatgtgtgtgttgaaggagatccgttaattataataaaggaattaaaatctttaaaggattatgtttattatgaaaagtttcaaacttcaaccatatattttaacaatggagttagtgttgatttaatcagatgtagaaaagagacatatttaaaagatggcatgctcccaattgttgaaccttcatctataaaagatgatatttacagaagagattttaccgtcaatgctttagcttatgatattgtagatgagagaattatagatttttatggtggaattgatgatataaataataaggttataaaatctattcataaaaactcctatagtgaggattgtactagaatatttagggccattaaatacagcataagatatggattcgaaattgaagatgactttgtttttaatagccttattggaaataatatatttaatacaataagtttcgaaagatacataaaggagctatatttaatttgcggtgaggataaatggattcaaatgttaaaaaaatgctgcatgtatggaattatagatttagattgtgatatgttaggagacagcatacaattctcagagcagaatattaattttttaaatatggtctattgttctagggataaaatattaaatagggctcttgtggaaaattcttttctgaaaaaggaacttttgaacccaataagaaagtttatagtaggaagaaaagaattggagcataaacttttaaactccaagagaaattatgatatatataaggttttcaatggcatgacaaaatatgagcttgttttattctcttggaataaggaattgaaatataaagtttataattatacgaaaaatattcttaactttaaaactgtaataagtggaaaagagataaagaatttaatagaaagagatggaaaaatagtagggttaataaaagaaggcattttaaaaaggaatgtaaatatgcttatgaattttgattattcaacaaaaaatatgggagagattttatatgacattgaacataaatatagataa

SEQ ID NO: 15308 - DNA, 2646 bp, Clostridium acetobutylicum
atgaaagaatttgatgaaatggcaaaaacatatgatccgaaggaatttgaagatagaatatataaatggtgggaggaggaaggtttttttacgcctaaagtagataaaaataaaaagccttatacaataatgatgcctcctccaaatataacgggaaaacttcatttaggtcatgcacttgattgtgctcttcaagattttatgataagagctaagagaatgcagggatatgaagcactatggcttccaggacaggatcatgcaagcattgccacagaagtaagggtggaaaaagagatcctaaaggaaggtctaaacaaaaaagaaatgggaagagaaaaatttcttgaaagagtatgggattggactaaggaatacagagagagaataaagggacagcaaaaaaaacttggtgtttcagctgattttacaagagaaagctttactatggatgaaaagcttaataaggctgtaagaactgttttcgtaaagctttatgaagatggtttaatatatcaaggaaacaggataactaattggtgtcctaaatgtcaaacagctttatctgatgctgaaatagagtataaagaggatcaaggattcttctggcatataaaatatcctgtagagggagaagatagttttattgaaatagctacaactagaccggaaacaatgcttggagatacagctgttgctgtaaatccaaaggatgaaaggtataaagaatttataggtaaactgttagttctacctcttttaggtagaaaaatacctgttgtagcagatgactatgttgatatggagtttggtacaggagccgttaaaataacaccagctcatgatccaaatgattatgaggtaggtaaaagacatgaccttaaagaaattgttatgttaaataatgatggaactataaaagaaggttttggaaagtattcaggaatggatagatatgaagcaagaaaagcaatagtatcggatttgaaagaagaaggatatcttgtaaaaataaaagaacatgttcacaatgttggaactcatgatagatgtggaaatataatcgagccaatggtatcaaagcaatggtatgttaaaatggaatccttagctaaacctgctatagaagcagttaaagctggaaagactaaatttgtacctgagagatttgataagatttactttaactggatggaaaacattcaagattggtgtatttcaagacaattgtggtggggacatagaattccagtatggtactgcaaagactgtggagaaataatagtttcagagaaagaaccaaaagcttgctcaaagtgcaatagtgaaaatttagaacaggataaggacgttttagatacttggttcagttctgctttatggcctttctcaacactcggatggcctgataaaaatgaggacttagagtatttttatcctacagatacacttgttactggatatgatataatattcttttgggtagctagaatggtattttcagggatttataatatgggagaagttccattcaaacatgtttatatacatggacttgtaagagatgctgagggaagaaagatgtcaaaatctcttggaaatggagtagatccattagatgtaatagatacttttggtgccgatgctcttagatttatgcttataacaggaaatgctcctggaaatgatataaggtataagacagaaaaagtagaagcagcaagaaattttgcaaataagatttggaatgcttcaagatttgttcttatgaacttagacaaagaaataatggataaatacaaagatttagaggaatatagtcttgctgataggtggatactatcaagatgtaattctcttgttcgtgaagtaacagataacatagaaaaatttgaacttggaatagcatctcagaaggtttatgattttatgtggaatgaattctgtgattggtatattgagcttgtaaaacctgttatgtatggagaggatgaaaaagcaaagggaattgcttataatgttctatacaaggttttaacagtaggacttcagttgcttcatcccgtaatgccatatataactgaagaaatctatcaacatctcggcggtgagtataaggctatagcaatttcagcatggcctacatacgaagaaaagttaaagaacgaaacttcagaaaacgctatgaatcaaattattgaagcaataaaatcaattagaaatgtaagagctgaaatgaacgtacctccgtcaaagaaagctaaggttatgattttcacagaagctgaaaataaagctgcttttgagatgggagagcattattttgaaaagcttgcatacgcttcttctgtaagtttcttgaaatcaaaagatgaagcaccagaaaatgctgtatcgtctgtaacaaagggagctgaactattcatgcctcttcttgatttaatagatgtgactaaggaaattgagaggttgagtaaggagaaggataagcttaaggcagaaatacaaagggtagataaaaagctttcaaataagggctttgtagataaggcgccagaaagcgtagttgaagctgaaagagttaaaggggaaaaatataaaaaaatgcttgaggctgttgaggaaagaatagcagcacttaaatag

SEQ ID NO: 15309 - DNA, 1998 bp, Clostridium acetobutylicum
atgggtaataagatatttgccgtacttcaaaaaatcggtaaatctttaatgcttccagtatctgttctaccggcggctggaattctattgagacttggacagccagatttgcttaatatgccttatgttcaagcagcaggaaatgctatttttaataatttacctttaatttttgcggttggagttgctataggtttttcaggcggagaaggtgttgcagcacttgcagctgtaattggagaactaatacttgaggcggttgaaaaaacagcaggtgatacggcagcagcagctttagcaaaaacagcggcagcttcacatcatatgacgcttgcagcatttcaaaaaactcaagaatacagtaacattgtaactaaaacaactattagtatgggtgtttttggcggtataataatcggtcttacagcagctattttatataataagttccatgatataaagatgcctcaagttttgggtttctttggtggaaaacgtttcgttccaattataacttcaatttcagctcttattattgcaactataggagtaaatatttggttgccaatacaagctggaataaattcactagcagcatttgcaactacatcaccaattggacctgcaatgtatgctggaggaaaaagacttttaattccactaggacttcatcacatttattatccattgttcttatatcaatttggtcactttgtttcaaatggagttacttatgtaggagatacagcaagatacttccatggggatcctactgccggaaacttcatggcagcagagtatccaatactaatgtttggtcttccaggagctgctctagctatgattgcagctgctaaaaaagaaaagagaaaagaaatggctggaatgatgatttcagcagcatttgtagcatttgtaacaggtattacagagccaattgaattctcattcatatttgttgctccagtattatttgtgttccacgtacttgctgcattcgcatctggtcttattacaagttatttacacataagattagggtatactttctcagcatccttcatagattatgttttaggattcaaatatgcaggtcatccattacttatatggcttgtaggtatagggttctttgtattgtactttgttgtattctacttcacaattaaagcaatgaacattaagacaccaggtagagaagatgatgatgcagaaggtgttaagaagataaatgtaaaaggaaaagctaaggcagctaaggtgcttgaagctataggcggaaaagataatataaaagtacttgatgcatgtataacaagattaagacttaacttaaatgatccttctttggttgataaagctacacttaaagctcttggagcagctggagtaatgacagcagaagatagtgttcaagtagtttttggaactgaagctgaaagaataaaagatgacataaaagcaattatacaaaatggtggatatgttgaagatgattcagataaggaagaagaagttcaagaggataagcaaatttctaaaggtgcacacgaacttttaagtccagctgatggagaagtagttggtattgagagtgttccggatagtacatttgctgaaaaaatgcttggagacggttttgcagtaataccttcaggaaatgaagtacactcaccagctgatggagaagtatcagttttattcccaactaagcatgcatttgcaataacaacagaaggcggacttgaacttttaatacatgttggaattgatactgtagcattaaatggtgaaggtttcacagcacatgtaaaacaaggagataaagttaaaaaaggagatttgattttaactttagatactgagtttataaagagcaaaggtaaaaaccttataactccagtgattgtaactaacatggatgttgtaggaaatatagatgttaaattaggaaacgttaaaaattccgagaaagctgcggatgttaccgtaaaataa

SEQ ID NO: 15310 - DNA, 1185 bp, Clostridium acetobutylicum
atgaatggaagatttggaaaatttggaggacagtatgttccagagacattaatgaatgcaataaatgaacttgaggttgaatttaataaggcaataaatgatgaaaaatttatgatggaatacaagtattatcttgaaaaatatgttggaagagaaacaccactatattttgctgaaaacatgacaaagaatcttggtggagcaaaaatatatctaaaaagagaggatttaaatcatacaggttcccataagttaaataatgctttaggacaagtacttttggcaaagagaatgggaaaaaagagagtcatagcagaaacaggagcaggacagcatggagttgctacggctacagcagcagctttgtttggattagaatgtgaagtgtttatgggagcagaagatgttgaaaggcaagcgcttaatgtgtttagaatgaagatattaggagcaaaagtgaattcagtaaaatcgggcactaatactttaaaggatgcaataaacgcagctatgagagattgggttacgaatatagacaatacttactatgtaataggttcagtaatgggtccgcatccgtatccaactatagtaaaagactttcaaaagattataggagaagaggctagaaagcagatattaaaagcagaaggaagacttccagactatgttgttgcatgtgtaggagggggaagtaactccatgggtatattttatccttttattaaggatgaaggagtgaagcttataggtgttgaagcagctgggctcgggattgatactccaatgcatgcggcaacgcttacaaaaggaagtgtaggtataatacatggaatgatgacttatgtgcttcaagacgaagatggtcaaataactccagcatattcagtatctgcggggcttgattatccaggagtgggaccacagcattcttacttaaaggaaaaagaaagagcaagctatgaggctgtaactgataaagaagccttaaaggcgtttttgtatttatcggaaaaggaaggaataatacctgcgcttgagagttctcatgcagtagcctatgctatgaaactggcacctagcctatcaaaagatgagattgttattataaatctttctggaagaggagataaggatgtaaatactgtaatgaaaaatatggaggaaaataaaaatggcaaataa

SEQ ID NO: 15311 - DNA, 1035 bp, Clostridium acetobutylicum
atgaggttatcaaaaactatagctcaaagtatagtagaagaaatgatgaatttaattccctacaatataaatgtaatgaatgaagaagggataataataggaagtggagatttaagtcgtataggaaatttacatgaaggggcattagaagcaattaaagagaagtctttaaatgtaatatatagtgaaaaaaatagtgttaagcctggagtaaacgaacctataataattgatgggaaggttattggggtgataggtataactggctattctgatgaagtgaaaaaatttataaagcttgtcagagtaacggcagtgctgttaatagaacaagcagaggcaaatgaagaaagtcaaaatagaaatcttaaacgtgagaggttctattatgatcttataaatagaaaaacaccttatgatgaaaaattctctaaaatagcacaggactttggcttcgacatttcaaaaaaacatagagcaattttagtgtatggtaataatacttcaaagaaattttatgaccttaaaaagaaatatatttttaattatgatttagatattaataaaactgcattttttatctctgatgattacaaatataagcttctaattgatgaattaaagcactataaggacatagagaaaataggaataggtgaaaaagaggatattgcagcaatatcacttgaaaattctaaaaagggtgtagagcttggaaagaaaataaaacctaattcaaagatatatgaatatgaagaattaaaattttttatacatttgcaccataagaataaagaagaaattgtaaatttgatttcaagtatagataaatcagaatataagcttgaactaattcaaacaatacaaatttatgtggaggaaaatgggcaaataaatgatgcagcattaaggcttaatattcatagaaatactttaaattatagacttgaaagaattaaaaagattacaggaaaagatcctaagaatttttttcagctttttgaacttttctgtgggcttatttggagggaataa

SEQ ID NO: 15312 - DNA, 1317 bp, Clostridium acetobutylicum
atggctaaaccattagttacaatagttggaagacctaatgttggaaaatcaactttatttaataagcttgctggaaaaagagtttcaattgttgaggatactccaggagttacaagagacagaatatacgctgaatcagagtgggtaggaaagaaatttactataatagatacaggtggaattgagcctgaaaacaatgacataatacttacacaaatgagaagacaggcacagatagcaattgaaatgtctgatgttatcatatttatggtggacggtaagcagggacttacagatacggataatgaagttgcgataatgcttagaaaaagtaaaaaacctatagttttagttgtaaataaaattgataaaaatgttgaagaaaataatatatacgaattttataatctcggcataggagatcctgtttccatatcatcatcacagggacttggcataggagatatgcttgatgaggttgttaacaaatttaaatctgaaggagaagatgaagaagaagaagaatatataaagattgcttttgttggaaaacctaatgttggaaaatcatctcttacaaataggattttaggagaggaaagggttattgtaagtgatatacctggaactactagagatgctattgatagttttcttgaaacagactttggtaaattagttcttatagacacagcaggacttagaagaaaaagcagaataaaagaagaaatagaaagatatagtgcagtaagaacaatggcagctattgaaagatgtgatgtttgcactcttatccttgatgcaactgaacctattagtgagcaagacgaaaggataataggctatgcacatgaaaacaataaggcaattttagttattgttaataagtgggatttaatagaaaaagatgataaaaccatggaaaacttcaaaaagaatctagagatgaaattttcatttatggcatatgcaccattcttgtttatatcagcaaaaacaggtcaaagagtacataaggttctttctgagataaaaaaatgctatgacaattacagcaaaagaattgctactggagttttaaatgatgttataagtaatgctgtacttatgaaggaacctccagttgtggcatttaagagacttaagattttttacgttacacaaacggatataaaacccccaacttttatattctttgtaaataatcctgagctccttcacttctcctacaggagatacttagaaaataaattaaggcagagctttgattttgagggaacaggaataaagatgatatttaaggaaaggaagaactaa

SEQ ID NO: 15313 - DNA, 960 bp, Clostridium acetobutylicum
atgaaaacaatagctgttttaacgagtggtggagatgcaccaggtatgaatgctgctataagagcggtagtaagaactgccattgaaaagggtattaatgttaagggcatacaaagagggtacagtggccttataaatggcgaaatatttgatatgaatagacacagcgtatcagatataatacaacgaggaggcactattttaagaacagcacgttgtccagaatttcttaaagaagaagttagacaaaaggcagcaaatgttttaagggtttttggtatagatggtctcgttgtaataggtggaaatggttcttttatgggagcacaaaagctttctaagcttggagtaaagacggttggacttccgggaacaatcgataatgatcttccatatacagattacaccataggttttgatactacacttaatactgtattagacgcaattaataaacttagagatacttctacttctcatgaaagagtaagtataatcgaggttatgggaagagattgcggtgatatagctctgttttctggaatagctggaggagcagaaagtgtaataatacctgaaattggttatgattttaatgagctttgtaaaaacatcttagaaggaaaattaagaggaaaaatgcataatcttataatacttgcagaaggtgttggaggagcagctgagcttgcaaaaaaagttgaagaagttactggtatagaaaccagatccacaatacttggtcatattcaaagaggaggaagtccatcagcctttgatagaatgcttgcatctagaatgggagtaaaggctgtagaagtcttaatggaaggaaaaacctctagagttataggtattaaagaaggaaaaataatggatcaagatattgatgaggctttagcagttccaagaagttttaataaagagttatatgatatagcaaatatgctttcaaaatag

SEQ ID NO: 15314 - DNA, 597 bp, Clostridium acetobutylicum
atgaaaaagacattaaagatattagcaggatttgtagctgttgtaattattatagcattaggaatttttacttctcgaaagttgtaccaaaatcatgtggataaaataaatcatattggtaaagttatggatagctacaaaggagtaaaggtatattataacgggaaaaaatatgctgaaagccatggcaaaaactatagtaaggatggatattactatggatataagtggcaatgcgttgagtacataaaaagattttattatgaagcaaaaggacacagtatgccaaacggatttggcaatgctaaagatttctttgacccaaaggtagggcagggaaaattaaataaggatagaggtttatttcaatataaaaatggagaaaatgaaaagccaaaggcagatgatattttggtgtttacggacacaaaatatggacatgttgtaatagttacaaaagttacagatgatacagttgaggttattcagcagaatatgggtaacaaaactagagatcagtttaaattggaatatgagaatggaaagtattttgtttgtgggaaaagaaaaccgaaaggatggcttagaaaaggttga

SEQ ID NO: 15315 - DNA, 1368 bp, Clostridium acetobutylicum
atgagtatactactaagtaagaccttaagggaattgatattttggatggcatggattataataccactaattatggagataatccccgctttcggaggcttttttatattggttaaaaagagttttaactctaatagagaaggcttcattggaacgcttccagaaataactttgataatacctatatacaattctgaagctaccttaaagggatgtatagaatctatatataattgcagttaccccacaagacttatagacttaatccttgtaaataacatgagcagtgatgacagctttcaggttttttctcaatgtcaaaaagagttttgtggactttctatgaggtatatgaattcaaagcagggaaagtcaaaagctcttaatatggcactttttaatagtgcaggtaaatatataattcatatagatagtgatggaaaacttcattatgatgcaataaaaaacatgatagttcgctttgagaaaaatccgaatattcactgtatgactggagcaattttaagtgatatagaaggaatagaaaaaactcataaaaggtttttaaagttaataaggagatgcgaattctttgagtatgctcaggcatttttagcgggaagaaacttcgaatcagagataaatagtatatacactctttctggtgcgttttcagcctttagaaagtctactattttaaaaacacagctctataacagcaaaactgtttgtgaggatacgcatataacctttcaggtgagaaggcttttaaaaaagaaggtgtatctttgtgaaaattctatattttttgtagatccaatagagaatttaaataagctttatacgcaaaggcagaggtggcagaggggagaaattgaggtttctcatatgttttttaaaaataaaatgaattctcctttaggtttttttcataattttatgataagggttgttatgtatgatcatacctttgctttccctagaatgatatggtattttgctataatatttttattttttatgaactacccagtgaagcttgttgtaggatctcttgtaataatatatatgctctacgtactgtctacatttttgttttatttaaatgtgaggatatatcttaaggaatataaaagtataagagaatattataaagctagatggggctatatatttttaatgcctatttataattttgtggtgttttggatacgttttgcaggaataattaacagcataaaaattaagagtaagtggaaaacacttactcttaatgatgaatggactgcgtttttaaaggttatacaatcagattttagaatgataggtaaaggaataaataaaataaggcgtttggtgaatgattga

SEQ ID NO: 15316 - DNA, 276 bp, Clostridium acetobutylicum
gtgaataaggctgaattaatcactagtatatcagagaaaagtaaattaacaaaaaaagatgcggaagttgcattaaaagcatttatagaaagtgttgaagaaactttagagaaacatgaaaaagttcaattagtaggtttcggtacttttgaaactagagaaagagcagagagaaagggaagaaatcctagatcaaaagaggagatagtaataccagcttctactgttccagtttttaaagcaggaaaagaatttaaggaaagagttaataaataa

SEQ ID NO: 15317 - DNA, 981 bp, Clostridium acetobutylicum
atgccacaagataaagtattacttgaagtaaaaaatttaaagaaatggtttcctgtaaagaaaggcttctttggaggaaaggtgagtaatgtaaaagcagtggatgatgtatcttttactataaataaaggtgaaactttaggcttagttggagaatctggttgtggtaaaactacaacaggaagaacagtgttaaagctttatgagccaacttctggacaaataatatatgatggaaaagatattgcaaagttgagctataaagaaatgcttccatatagaagaaaaatgcaaatgatttttcaagacccgtatgcatcgctaaattcaagaatgacagtaggggatataattggagaatcaattgatattcataatttatcaaagggaaatgaaagaaaagagaggatagagtatcttcttaaaaaggttggcttaaatggagatcacataaatagatatcctcatgaattttctggtggtcaaaggcaaagaataggtatagctagagctttagctgtagaacctgagtttatagtatgtgatgagcctatatctgcgcttgatgtttcaatacaggcacaagttgtaaatatgcttgaggaacttcaagaagagcttggtttaacttatctattcatagcgcatgatttatcaatggttaagcatatttcaaccaagataggagttatgtatttagggaatcttattgaagttggagagagttcagagctttacaataatccacttcatccgtacacaaaagcacttttgtctgcggtaccagtaccagatccagatgaagcagcagcaaggcaaagaataatacttgaaggagagattccgtcacctatagatcctccaaagggatgtaagtttagaggtagatgtaagtatgctaagcctgaatgcggagaagctacaccagcgtttaaagatatgggcaataatcattctgtagcttgttatttgtatcaataa

SEQ ID NO: 15318 - DNA, 1326 bp, Clostridium acetobutylicum
atggaatcagataggaatctaaattatattaacttgtttatgatttttgtaaaccttatcattatagtttttacttcagaaattatgactataactttatataaaattagttctgaatttatggcaagagattttttagaccaaattacagttataccttggaaaccacaaaatataactatagtgtctataggcgcttatataatattaatcatactaattacggtaaaaaagaaatatgcaaaattcctaaacaagtgggaaatagctgctttattattatgtgagattttttttagtgttgcaataatgacggcattgaatatgagttataatggaatcatactgtttattattgctgatttagtaacaaacaccaaagataaaagtaacaaaattatatttttgattcttatgataattatatatatatttagtgtttatgatttcatatcacttaaaataaagatggtttcttttgaaaattttctttactactatactgctaacagacgaagctatttaatggagttaaagagtatattgaattctataaatattatagtatttatattgtatatgattgtgtttattcaagttcaaatgagagaaaatgaaaagattacttcattaaacaaaaaactaaatttagctaatgaaaaattagaggttatgaatgtacaattaaaagagtatgctgtaaagataggatcaatggctgagactagagaacgtaatcgtatggctagagaaattcatgataccttgggtcatgcacttacaggaatatcggtggggattgatgcttgcttaacaacaatagacgtttctaaagagttaactaaaaagcagttgaatataattgcagatgtagcaagagaagctattaaagatgtaaggcgttccgtaaaaaaacttcgaccagatgcactggaaaattctagtttgcaagatgcattaaataatatgatttcacgcataagtaaggctacaaaaacaaaagtttttttaaatgccaatataaaattattgaaatttggtcatgatgaagaggacactatttatagaattatacaagagggaataacaaattcaattcgtcacggacaagctgaagaaatttatatagatatgataaggagggataaacaattaaatataacaataagagataatggcaagggatgtgctaatgtagaagagggctttggattaagacatatagaggaaagagttaagttattaaatggaactgtagaatatgatggcagcgatagttttttaataactgtaaatattccaattagatggggagatggaagttga

SEQ ID NO: 15319 - DNA, 1809 bp, Clostridium acetobutylicum
ttgaaaaaaatttctagtgctacggtctggattgtagtgtttttagtggtcatttttactattttgatgctagtgcaaggtggtaaggctactaatactgtaagctttgatcaatttcaaaagcagtatatgggaaataatataaaaagttttgaaatgaaagacgataagatgacagttgatggtaaatataaagatggttcatcttttgaaactatcgtgcctttagaaagactcaatcaatttcttgcggatcatcctactaatggtgaaataggtgaatcatatgccgcaccagccaatatacctgtttggataagttggatgccaactataataatgattttggctatggttgtaatattagtgcttttcatgcagcaaacacaaggtggtacaggtaaaggcgtaatgggctttggaaaaagtagagcaaaaatgtcatcacctgatgatttaaagcaaaaagtcacctttaaagatgttgcgggggctgatgaggaaaaaggagaattggaagaaatagttgattttctaaaacagcctaagaggtatattgaaatgggagctaggatacctaagggagttcttcttgttggtcctcctggaactggtaagacacttttagcaaaagcagtttcaggtgaagcaggtgtgccatttttcagtatatcaggttcagactttgttgaaatgtttgttggtgtaggagcttctagagtaagagacctatttgagcaggcaaaaaagaattctccatgcataatttttatagatgaaatagatgcagttggaagacaaagaggagcaggactaggtggaggacatgatgaaagagaacaaactcttaatcagcttcttgttgaaatggatggttttggagtaaatgaaggtataataatacttgcagctaccaatagacctgacatattagatcatgcactcttgagaccaggtagatttgatagacagattcttgttggtgctccagatgttaaaggaagagaagaaattcttaaagttcattctaaaaataagaatttagatgattcaatacgtttagatgttttagctaagagaacacctggatttacaggtgcagatcttgagaatttaatgaatgaagcagcacttttggctgtaagaaataaaaagcctataattggaatggaagaacttgaagaagcaactacaagagttattgcaggaccagaaaagaagagcagggtaataagtgaagaggatagaaagatcacagcttatcatgaggcaggtcacgctgtattgatggaacttttaccttactctgacccagttcatcaaataagcatagttcctagaggtatggcaggtggatatacaatgcatcttcctgaaaaggatagttcatacatgtctaagaataaacttaaagatgaaatggttgggcttcttggtggaagaatagctgagaagttagtaataggagatattagtactggtgctaaaaatgatatagatagagctactagtatagctagaaaaatggttatggaatacggaatgagcgacaaacttggaactataacctttggaaaggatcaagacgaagtattccttggaagggatcttggaactagtagaaactttagtgaagagattgcagctaagatagacaatgaagttaaggaattaatagatgaagcatatactaaagctgagaatctattgaaagataatatgtcaaaacttgatgcagtagctaaggctttacttgaaaaagaaaagttagaagctgatgagtttaaagaaatatttgaaaatgcttaa

SEQ ID NO: 15320 - DNA, 498 bp, Clostridium acetobutylicum
atgagaatagatcctagcacattagatcttaaagaaaaggttgtattcataaacagagtagctaaggttgttaaaggtggtagaaacttcagattcactgcattagtagttgttggagatgaaaatggccacgttggcgttggtactggaaaatcagctgaaataccagaagctataagaaaaggcatagaagatgctaaaaagaacttagttgaagttgcaattgttggaacaacagttcctcatgaaatatatggagaatttggtacaggaagagttttaataatgcctgcatcagaaggaacaggagttatagctggtggtccagttagagccgtgcttgaattagctggattaaatgatgtaagagccaaatcattaggttcaaataacccaagaaatatggttaacgcaacaattaatggtttatcaagattaaggactgttgaacaaatagcagccttaagaggaaaaactgttgaagaaattttaggatag

SEQ ID NO: 15321 - DNA, 453 bp, Clostridium acetobutylicum
atgaagatactttttgtttgtactggtaatacatgtagaagctgtatggcagaagctatgtttaatagtatgtgtaatatagatggtatagaagctttttcagcaggtgcatctgctattcatggaagcaaaacttccttaaattcggctgtggtagttagggagaacttaggcaaagatatatcaaatagaaaggctatacagttgactacttttttagttgatgaatgtgatttagttttaacaatgacatctttattaagtgacgtgcttagaagtcaaatggagaagaactctaataagatatattcattaagtgaatatacaggtgtagagggtgacattactgacccatatggtagaagtgtagagatctacagacaaacttataaagacattgaaaagaggctaaaaatacttattaaaaaactaaatgaagatagaagtatttaa

SEQ ID NO: 15322 - DNA, 411 bp, Clostridium acetobutylicum
atgtatattttaaaaatagaacatagctttgatagcgcacacttccttaataactataatggtaaatgtgcaaacattcatggacatagatggagagtagaaattgaaatacaatctgaaactctcattgatgatatgattgaagattttacaattcttaagaagaggattaaagaagtccttgatttttatgaccatgctttaataatagaaaaaaatagtcttagaaaattaacctttgactgccttatagaagatggctttaaaataatagaattggactttagaccaactgccgaaaacttttcaaaattcttttttgatgaaataagaaaattaaattatgatgtaagaaaaataacagtatatgaaacaccaaataacagtgcttcatatgtaaaagaggtatag

SEQ ID NO: 15323 - DNA, 888 bp, Clostridium acetobutylicum
atgaatttcttaagtaagtttatatttgatgtagaaacaggtacagtacaattacaaaaaatgaagtttaatgtatacaatgtctttgaattagtaataagagtactagttgttatagtgatgatgtatattatagtaaaattggtcaataaatttattgataaaactttaaagaagcaagaagattttagattttctcttgataaaaaaagaagtaaaactataggtgcaatactcaaaagtgtagttaaatatggtgtgtacttttttggcatcacggtaatattaaccttaatatttggcagcaagttattttcagctgttagcttaacttttgctagtataggtggagttgcactgggctttggttctcaaaatctagttaaagatgttgtaaacggattttttatattatttgaagaccaatattcggtaggtgattatataacaataggtaaaagttctggtattgtagaaagtatagagcttagagtcacaaaaataagaagctttaaaggagatcttcatataataccaaatggaaatatatcagaggttacaaatcattcaagaggtcccatatctataaatgtaaatgttagtatagcatatgaagaaaatattgatgatgcaacaaaagttattaatattgcttgtgacgagttttctaaggataatgaagatatagtagaaaagcccaaagtagttggaataacagaacttggatcaagtggtgtaaatataagggtatcaggaaaggtaaaacccatgaaacaatgggcaaacgaaaatcagttaagaaagtatgtaaaggaagctttggataaggctgaaatagaaataccttataataaacttcaatttataggaggagagaaaagtgaataa

SEQ ID NO: 15324 - DNA, 1563 bp, Clostridium acetobutylicum
atggttatgattgatgtaaaaaagcttcctcttgatataaaaataggacaaatgataatggcagggtttacttcaaagcattacgattcttctttggaaaaactgattacagatgataagataggaaatttcatattgttttcgagaaatatagaagagaaaaatcagctcacaaggcttacagaggatattcaaaaaggactagaaatcaatattaaaattccaggaattatttctgttgatcaagaaggtggaatggttacaagaataaattcagggactacaatatttcctggaaatatggcttttgcagcagcaaatcatccacatagcacttttagacagggaaaaattgagggagaagagcttagaggtttgggtgtaaatatgaatctagcaccagttatggatgtgaactgtaatcccagtaacccagttataggagttaggtcttatagtgatagtcctgaaaaagtagcagaactgggtttggaattaataaaaggtttaaaagaaagtaaggtagttccagttgcaaagcatttcccgggacatggagatacggatgtggattctcaccttagtttgcctgtagtaaagcattctattaaaaggcttcgtaaagtcgagcttcttccatttaagactgcaatagaaaatggaattgatgcaataatgtcagcacatgtgctctttccagaaatagaacccaaaaggcttcctgctacactttcatatagggttcttacagatttattaagaaataaaatgggttttaagggcattataataacagattgcatggagatgaaggctatagcagagttctatggcagtgataaggcagcagttatggcaattaaagcaggagcagatttaatttgtatatcccatagtgcggcggtacagaaagcttgtatacgtagaattaaagaagcagtaataaataaagaaatctctgaagagagaataaatgaatcagtaaaaagaattctagaaataaaagagaaatatagcatttcatttaatacagtcaaaagaaactatgatataaataatagtcttttcgcagaagaaataagtgataaaagcataacacttctaaagaacgataaaagtttaatcccacttaaaggaaggattgtatccatatctacaaaagcagtagcacttactggggctgaagataatatgagcctaaacaattctttttgtcataaattaaaagagaactttggtggcagtgaatttcaaataccaattaatccccataaagaaataatagataaaatattagaaaaatgcctagatgcagatagtatagtaataggtatttataatgcatacaatcatgaaggtcaaagaaaacttgtgaatgaaataagtaaggttaatcctaatatagtactggtatccttaaggaatccctatgattttttatattttaaggaagtttcagcttatataaatgcctatgaatacactaatttgtcagtaaaaagtgtaattaaagtattatcgggaagagtagaggctcaagggatttcaccagttagactttag

SEQ ID NO: 15325 - DNA, 642 bp, Clostridium acetobutylicum
atgatgataattggaattaatggaagcccaagaaagaatggaaatacaatagaaatgcttaaaagtgcacttgatggtgctaaagcacagggggctgagactgaacttataaatctttatgactataactacaaaggctgtgttagttgcttttcctgtaaattaaagggaggtagaagctacggaaaatgtgcattaaaggatgatttaaaacctatacttgaaaaaatagaaaaggcagatgcgtttattttagcatcaccaatatactttgggatggtaactggggaaatgaggtcctttatggaacgtttattatttcagtacttagtatatgataaagatcattcttctctttttaatagaaaaataaagacaggctttatatatactatgaatgttccagagacttatttggatagtgtagggtacaataagctatttgagagtaatgaagctactcttaagaggatttttggagcttcagagtatattttaagcacggatacctatcagtttgatgattactcaaagtatgaagcttctatgtttgatgttgaggcaaaaaagaaaagaagagaagaagtttttccagaagattgtaaaagagcatatgaaatgggtgcaagctttgttaagtaa

SEQ ID NO: 15326 - DNA, 1239 bp, Clostridium acetobutylicum
ttgaatattcagaatatctcaaatcagctaggtagaaaaaagagaatccaagaaataatatttcctgtgctagatgttagtttaaatggagttaattacttttttcatatatttgtaagttggtatcttattccacgggattatggaagacttaattcgcttttatcattgatatcaattcttactgttttaggagtatcctttcaaacttatacagcaaaatatatttcaaaaggagaagataaggaacctgacataaaaagtatactcaattgttcattaatatgttttttaattattgttgtttttatgcttgttttttcttcagtcattattaaggctacaaatagcgattttttcagtcttattataataattcttacacttggttctaatattatattgagtgttataagaggtatttttcaaggaatgaaaagctttttcatgcttaatataagtttttatattgaagtaatatctaaaattgcagtattatttgtgctactgaaaaatagtagaaatatacattcggcgctgttagctatattacttggtatggtgttttctttatttcatggaatgtataaggtgagaaagctaataaattttaagcaaaaagctaggatttctaaaagaattatgaaaaaggttgcaaatatttatatagcaaatttcttttttaacttctttacttcagttgatatgataatggtgaattattatttgccagaaaattctggaatatttgcagtggttttaaaatataatcaacttttaacttttgcctcttccagtatatttacagtatttattccacttctaactgagagactttgtgacagaaaaaggtttaataactgcattagaaatttgtttttaataatgatagctataagtgttttaactcttggattttacaaatttgtaatgccatacacggtagcaatgttttttggaaaagcatatgcatcagccaaaaactacttgtttataggaatagtatcatatatttttttgagttttattttcatgatagtaaatatctacatgataattgaaaaatggatgcattttgtaactctgtttgtagcagctgttatatttgttattataatagctttatttcataaaagtataagttcaattatatatattgaaattggattctacgctgtattattttttatattattagcaggaattcttaagcaaaacctaaaagaaaggagagagtag

SEQ ID NO: 15327 - DNA, 966 bp, Clostridium acetobutylicum
atgaaggtaggtaatcttagttttgaaggaaatgtgtttttagcaccgatggcaggagtaacagatatagtatttagaaagatatgtaaaggtatgggagcagatcttacatatacggaaatggtaagtgcaaaagctctttactatggaagtgaaaatacagaagaactcatgaagatatcagatgaagaagagtatgctgcagttcaaatgtttgggagtgaaccagatataatggcaaaggcatgtgaaaaattcaatgaagatgataaaatttgcattatagatataaacatgggatgccctgctcataaaatagttaaaaatggtgaaggatctgcacttatgaaaagccctaagctagcatatgagattgtaaaagcagttaaaaaagcttccaataaacctgtaaccgtaaagtttagaaaaggtttcgatgaagataatataaatgctgtagaatttgctaaggtaatagaggatgcaggagcagacatgataacagtccatggaagaacaagagctcagatgtatgaaggaaaagcggattgggatataataaaggcggtcaaaaaatcagttagtatacctgtaataggaaatggagatatagtatcaggagaagatgctgttagaatgttagaatatactaattgtgatggtgtgatggttgctagagctgcaatgggaaatccatggatatttagagagataaaagctgcgattaattcaacgcaaatcataaaacctactccagttgaaaaattagatatgtgtatatttcactataaagaagcagtaaaatattatggtgaaaaaaaagcagtacgtgaaatgcgaaaaaatatagcatggtacataaaatcactaaaaaattgtacagatataaaatgtttaataaattcagaggaaagcagtgatgaggttattggtattcttgagcagtatagaaaagattttctttaa

SEQ ID NO: 15328 - DNA, 1344 bp, Clostridium acetobutylicum
atgaaaagaaaaataatatctttgttactaataggagcgctttcagcaacaattttatctggttgtgctcaaagtaaggcaagtgcctctgagtcaaaaactgtacaaataactttttggcatgctatgagtggtaaaaatggtgaggctttaaacaagatggtggaggattttaataattctcatagcgatattaaagtaaaggcagaatttcagggaaagtacgacgaagagctcaataaactaaaaagcgcagaaaagggaggggaggctccagatattgttcaggtgtatgacataggtacaagatttatgatagatagcaaatgggcagagcctatacaaaactttattgataaggataaatacgatacatcaagtttggagcctaatttactagcatattatacagtaaataataaactctactccatgccttttaattcatctacaccaatactttattataacaaaagtgcattcaaggaagctgatttagaccctaataagcctccaaagactttctctgagttagaaagatattcaaaggctcttgctaaaaaggattcctcaggtaatgtaacaagatatggtttttctatggctatatatggatggctatttgagcaatatttagtaaagcaggggaagaattatgttaataatggaaatggtagaagttcagcagccacaaaggtggattttgatagtaatggaggcgggctgaaatttctaaaggaatggaaacaacttgtggattccggatatgtaggcaatttaggcagaaatgaagatgatacagaaaatgcatttattgctggaaaaacagctatgtatatagaatccactgctgaccttaagcatgatttgaattctattggaggaagatttgagcttggaacagcaccactgccttcctttgatggaactagtgacggaggagtttcaatagggggagcttctatgtggatattgaaaaataaggatgcagaaaagcaaaaggcggcttttgagtttataaaatatatggtatcatctaaacagcaggcttattggagtactgagactggatattttcctgtcactaagaaggcatatgatgaggatataatgaaggaaaacttaaagaaaagtcctcaatttaaaacagctatagatcagctttacgcatcgcctaagactgctgtaggagctcttatggctgtatttcctgaagctaggcaaactatagaagcaaatatagaggagatgcttcagaaaaaagaatcgccagaagaggctataagtaactcctcaaaacttataaatcagtccattaaagattataatgataaaaataaatag

SEQ ID NO: 15329 - DNA, 1293 bp, Clostridium acetobutylicum
atgaataataaaattaaaccgtcgattttgccgggatttatggaacttttaccaaaagaacagcttgtattcaatgatattgtttcaaaaataactggtgtttatgagcaaaatggatttttacctatggataccccaataattgaaaaggaagaggtacttcttgcaaaatcggcaggagaaactgaaaaacaggtatatcgtattgataatgaggatagaaaacaagttttaagatttgatttaacagtgccgttttcaagatttgcagctcaatatatgagcgatttaacttttccgtttaagagatatcagctgggaaaggtttatagaggagaaagaaatcaaaaggggcgttatagagagttttatcaatgtgacgttgatgttgttggaaatggaaatctaagtataaaaaatgatgcatttataataaacatggcatctaaagcattaagaaaaataggacttgatagctataagttccaaataagtaatagaaaaatacttacaggggttttagaaggacttaacattactaatatgcaggaagtaatgattctcatagacaaatatgataagattacagaagaacagtttttatctgaactaaataagcttataggtgaagagaaggctaaggttattagtaaggtaataaaaataagcggttcaagtgatgaggttgtagaaaatcttaaaaaagtagaaataaaaaatgaaatgcttgaaaaaggaatagaagaagttgaagaggttataaagtatttaaagctatttggagtagaagacagtgagtatgctataaaccttaaaataataagaggtcttgattactatactggtactgtatttgaaacacttctaacaggaaatgaatcctatggttctatatgttcaggtggaaggtatgataatttagcacaaaactatactgaaaatgttcttccaggggttggtatgtctattggaataacaagacttttctttgtacttagagaaataggatttatagaaaattataacagcagtttaaatgagaaatacttaatagtacctataggagatacctttgagtactgcactaaaattttaaacaagttacttgtaaacggaaaaagtgctgaaatatattttgaagaaggaaaactcaaaaagaagcttacatatgcaaataaacttgatataaaatatgtaattttaattggagaagatgaagtaacgaataaggagctagttataaaggatatgataactggtgagcagaaaaaacttaatatagaagagatatag

SEQ ID NO: 15330 - DNA, 1692 bp, Clostridium acetobutylicum
atgaatgaaaatttaaagcaagacaaggattctgaaatttcaaaaaccgaagatgaagagagtagtatgaatacagctgagttggttgtaaagtgcttagaaaatgaaaatgtagagtatatattcggtataccaggtgaggaaaatttggcactcataaaagcgcttactaaatcacctataaaattcataactacacgtcatgaacaaggggcggctttcatggcagatgtatatggaagattgactggaagaccaggagtatgtctttctacattgggacctggtgctacaaatttaatgactggtgttgctgatgctaatcttgatggagctccgcttattgcgataacaggacaggttggaactgatagaatgcatatagagtcgcatcagcaccttgatttagtagctatgttcgcacctgttactaagtggaataaacaaatagtaagaccagatactgcacctgaaatagttagaaaagcttttaaaacagctgtagatgagaaaccaggagcatgccatatagatcttcctcaaaatatcgcagatatgcctgtacaaggaaaaccgttaagacatacagttacggataagagctttgctgcttacagtagtatagaaaaggctgctatagctatatcaagagctaaaagcccactaatactttcaggaaatggagcaatacgttcaaaggcaagtaaggcagttttagatatggctgaaagattaaacattccagttgcaaatacctttatgggaaaaggaataattccttttaatcatcctctttcattatggagtatgggtcttgcacaaaaagattatattaatagaattttcgaaaagacagaccttgtcattgctataggatatgatatagtagaatattcacccaaaaaatggaactcaaagggagaaattaggataatacatataggcgagaaaaaagccgaagttaataatagttatcttcctgaggttgaggtaataggtgatatttcagattcgattcaagaaataataagacgttcagatagaatagagacaccaaaacaagcacttaaaataaaagaagatatgcataaaaattatgaggaatatagtgatgatcagagctttccaatgaaaccacagaaggtactatacgacttacgaagagttatgggcgaggatgatatagtaatatctgatgtaggagctcataaaatgtggatagctaggaattatcattgttataagcctaatacatgcataatttcaaatggttttgcatcaatgggaattgctattccaggagctttagcggcaaagcttgtaaatccagataaaaaggtagttgcagttacaggagatggtggcttcatgatgaattcacaagagcttgaaactgcacttagaataggaaccccattcgtaacattaatatttaatgatagtaattatggacttataaagtggaagcaggaagaaagatacggagaatcagcgtatataaactttacaaatccagattttaaaatgtacgcagagagtatgggactaaaaggatatagaattactaaagctgaagagctcatacctacattagaagaggcgtttagtcagaaggttccatcagtaattgattgtgcagttgattatagcgaaaatcttaaattgtcccataaattagaggaactaaaatag

SEQ ID NO: 15331 - DNA, 753 bp, Clostridium acetobutylicum
atgcataaatttttcgtgggagcagagaatatatgtgataatactgcgtacatatatggtgacgacgttaaacatatatataaagtactaagacttaaggttggagaaaaggttagcataaatgactgtaatagtcatgaatttcttggagaaatagaacaaataaataaagaaaacgtaaaggttaaaataatagaaaaccttgatataaataatgagagtccgctaaatgtgtacctttatcaaggatttcctaaagcggcgaaaatggatataatagtacaaaagaatactgagcttggaataagggaaattatacctttaattacacaaagagtagttgtgaaaaatgaaaaaagtgaattaaaaaaggttgatagatggaatagaatagcttttgaggctgccaagcaaagtaagagaagcgtaattcctaaagttaaagacatagctagtttcaactctgccattgaggaattaaaggagatggatttagtacttgtgccctatgaaaatcaagaaaaagtagggatgaaaaaagttgctgctgccattgaaaaaaataaaattaaaaatgtagccatagtaataggtcctgaaggtggatttgaagaaacagagatagaagaattgaaaaaaattggagcttacataattactcttggtcctagaattttaaggactgagactgcaggtcttgtatgtacatccttagttatgtatgaattgtccgatattggaggaataatataa

SEQ ID NO: 15332 - DNA, 1014 bp, Clostridium acetobutylicum
atggtaattatatttaaacaaaatactgaaaaatcagaaattgaaaaaattaagagggcaatagagggtgatggctgtgaaacaacagtatcacatggtaaagactacattgttgtaggagtaataggagatacgagtaaagtgaatattgagagaattcaggcaaatgaaaatgttgataaagttgtgagagttcaggaaccttataaaaaggctggaagacactttcatccacaggatactatagtggatgtagatggaagcaaaataggaggaaaaagacttgctgttatagcaggaccttgctcagtagaaagtgaagagcaaatagttgaaattgcgaaaagagtaaaacaaagtggggctaattttctaagaggaggagcttttaaaccaagaacttcaccttacagttttcaaggattggaattagagggtttagatcttcttaaacttgctaaaaaagaaacaggacttccaatagtaacagaaatcatgagtgcagattttattgatagatttgtagaggatgttgatgttatacaggtaggagcaagaaatatgcaaaacttcacacttctaaaggaattgggaaaaactagaaaaacaatattattgaaaaggggattaagcgcaacaattgaagaatttcttatggcagctgagtatattatgtcagaaggaaatgaaaatgtagtattgtgtgaaagaggaataaggacatttgaaacttacacaagaaatacacttgatttaagcgttgttcctgcaataaagaaattaagtcacttgccagtaattattgaccctagtcatgctgctggaatgtggtggatggttgaacctttagctaaagcggcggttgcagttggagctgatggacttatgatagaagttcataatgatcctgctaacgctaagagtgatggacagcaatcaataaagccagataaatttgatgaaatcatgaagaaagttagagctattgcagaaatagaaggaaaacaagtataa

SEQ ID NO: 15333 - DNA, 1464 bp, Clostridium acetobutylicum
atgaactttgttactaaaataactaaaaatcatattatcaatacaataattatagctattgctgcaataatattattagttagtctttccataaatccaattataggaaaacacgataatggtgattttggaaggctaatgatatacggcggtattgataacctatctaacgcttacaaagatatttatgatggctttcttcacattaaatattcaacaaaccctttgaatgttcttttattattctataatgactggacttcatgttctatacctgtaaaaatatcagttattctttttcttatacttcataagtttactggaaatttatttgatataaggtatttatcctttgtttacagcatactatttttgatgggactatatttgataataaatttcaaaaaattatctacttctttaaagataatttgtggttcatacatgattttatttttcacaagtacctgctatgttgaatattttaattctttttttgaagaagcaggaactatagtgtttttcctcttatgcataggtacttatttaaatttaatagaaaaatcaaagcctcaaaaaagagattttgtatacttttttgtagcatcagcattttttctcacggctaaagctcaaaatctgccgatggtaccatttatgcttataatctacttaagcctatacctagtatacaataagaaaaaattaatacttataagctcaatatttgtgatttttctttgtataatttcatatttttctctcacaaaggtcatgaatgaaaacaatatatatcaatcagttttttccggagttttaagagattcaaaaacacctactaaggatttaacagaattagggctagataagaaacttgtggtattcaaaggacattctttttataataagaataatggactggatcctttaagcaataatatgcttaaaaatttttatcccaacatttccaattggaaaatactctttttttatctaaaacatcaggacagaatgtggcaaaaaattgttgatgcttccaactcaaattataggcttgataaaccctatagtggaaactttgttaaaggacagtactccaagaataaacacttaaacacttttagaagctatttaattagcaaatttccttatatacatcataatgtttacttatttattattttctcgcttatatactttactacatctgttatttacgcaataaaaagtaaagatgtttcaataaagctcctgaatttaatgttaatttttattttaataacaggttcttcccaatttatacttcccgtaataggtgcggggcatggagatttttcaaagcatctttttttactcaatttttcttacgatattatgtttggagtagctttactatggttttcacacattatttcaaacatttttttatttcataaacacaataactactttacaaataagtaa

SEQ ID NO: 15334 - DNA, 1587 bp, Clostridium acetobutylicum
atgatggatagtaaatttgaaattaataagcttcaagaacagcttaaaagagatccctttgaaaagtatgaagaatatgaaatacgcataagaaatgtaaagtctgtaattgtaggaaagggaactcttgaagaggagagctacgataaagattatgggttttgctatataaaaattgagtggtatggaattaattcagtggaaaaggtaaaaagcgaatattttttttgtatgataagcaaaaggaatttaaatggagatgttgattttaataacaaatatgacgtgagttgtaaatttgtatccataggtgaaaaggtatatattgataatgaaagtttaaatataagtattaatggagaaaattataagatatattgtgtaaatctttatagacaagcttttgaaagtaatgaggagtttaaaactagaataacaaatataaagcatataccaattggaagagtaaaatttaataaaaataattacgatataaaaacatactcgggtatagttggaaatgaatggaatgtaataaaggaagtaaggatacctaaaatatacagtctttttacagctatcgataatgtggctataaaggaaatatgtaaagtagatgttgaatatgttttgtatgggaagcttatgttaatagataaagctataagtatagatatgggaagtttatttataatgattaacaataagtctgttcccatatattcaatttgccttaatagtatgtatttttatgatgtaaacaagtttaaaaacaatattgagcatatatctatgataagtgcagggaaggtaagaatgaatccatctaagtatgattttgaaagtagtacttttcttgtagatgtaatatggaaaaagtgggctgctccttttgtaaatgacttatgttcattttctataagcatatcaaaagaagatgcaagtattctttacaaaggagggggcgtatatgatgtttatataaactttgaaatccaggaagataaaatttctgtagatagcattaatgttattacctttagtaaaaatataaaacttgaatatgaagttcaaagtagtgaaagtgtttcacaagtgatagataatggagtacagatacaaaatgatttaaatcaagatatgaatatggaatttaatttgatgagatatataagtgataaaggtaagtatggatatatggatagttcaaagagaaagattttaatagaacctaagtatgattatataggaagcttttatgagggccttgcgagggtcaatataaatggtagttgggggtttataaatttaaatggtgatattgttatagaacctaaatttagtatggtaaaagattttcatgatggacttgcagcctttagtttgaaaaaatttggcacaaagaggtggggatatgttaatttaagtggtaaaattgtaattgaggctaagtattcagaagctggagatttttacaatggggttgcaagtgttagacttcaagggatttttgcttctaaaaagaatatatatataagcagtgatggtaaaatagttaattacaaacaaatgcttagtgttaaataa

SEQ ID NO: 15335 - DNA, 1005 bp, Clostridium acetobutylicum
atggcaaagatagctattaatggttttggaagaataggaagattagctttaagaagaattcttgaagtacctggattggaagttgttgcaataaacgacttaactgatgcaaaaatgttagcacacttatttaaatatgattcatcacaaggaagattcaatggagaaattgaagttaaagaaggagctttcgtagtaaacggaaaagaagttaaagttttcgctgaagcagatcctgaaaaattaccttggggagatcttggaatagacgttgttcttgagtgcacaggtttcttcacaaagaaagaaaaagcagaagctcacgtaagagcaggcgctaaaaaagttgttatatcagctccagctggaaacgacttaaagacaatagttttcaacgttaataatgaagatcttgatggaacagaaacagttatatcaggtgcatcatgcacaactaactgcttagctccaatggctaaagtattaaatgataaatttggaatagaaaaaggattcatgactacaattcatgcgttcactaatgaccaaaacacattagatggtccacacagaaaaggagatttaagaagagctagagctgctgctgtaagtatcatccctaactcaactggtgctgctaaagctataagccaagttattcctgacttagctggaaaattagacggaaacgctcaaagagttccagttccaactggttcaataactgaattagtttcagttcttaagaaaaaagttacagttgaagaaatcaacgctgctatgaaagaagctgctgatgaatcatttggatacactgaagatccaatcgtttcagctgacgtagtaggaatcaactacggatcattatttgatgcaactttaactaaaattgttgatgttaacggatcacaattagttaaaacagctgcttggtatgataatgaaatgtcatacacttcacaattagttagaactttagcttactttgcaaaaatagcaaaatag

SEQ ID NO: 15336 - DNA, 585 bp, Clostridium acetobutylicum
gtgaaaaagttaaacattatagcagctacacttatatcatcaggagttatattaataggctttaccctaggtgcaaaatattggacataccataaacagaatagcatgataaatgcttatgaaaagaaaataaaaaatataaaacactcaaataataagaaagtaaaagcagcagaaattaaagatacaataaaagatggcactattggcattttaaaaattcctaaaatagacttaaaggttgcgataggagaaggcactgaccttaaaacactgaaatatgcagtaggacacttcaggaatacctctatgcctggacagaacggcaatttttgccttgctggtcacagaagttatacttttggtgagtactttaacagattaggtgaaataggctccggtgatgaaattgatgtagaaactgtgaatggcacttttaagtacaaggtttacagtactaaggtagttcttcctagtgaagttcatgtactggatcagactaaagatccaactatgaccttagttacctgtactcctataagaatagctactcatagacttattataaaagctaaaagaatttaa

SEQ ID NO: 15337 - DNA, 1032 bp, Clostridium acetobutylicum
atgaaaaagaaagtggctatattatttggaggacaatcaacagaacatgaggtatcaagagtatcagcagcttcggttctaagaaatatagatacatcgaaatatgatctattccctataggaataactaaaaagggtgaatggtttgaatatacaggaagtgcagataaaatagagaacggagaatgggaaaaagatgaattttacaaaagcccaaatggccaagcaatattatttaataaggaggtagatgttgtatttccagttatgcacggtttatatggcgaagacggaactatacaaggtctatgtaaactcgtaggtgtaccatgtgttggacctagcgtactatcatcttcagtctgtatggacaaagtatatacaaaatacgtacttgaacactttaatataaaacaagcagattatgtagttgtacatgcacatgaatataaaactagtaaagaagagataataaaagaaatagagaataaattaggatatgcagtatttataaaaccttctaatagtggatcttctgttggaataacaaaagcacataataggaaagaacttgaagcaggacttgaagaagctatgaaatatgatagaaagattcttgttgaagaagctcttaatgctagagaaattgaagttgctgttcttggtaacgaagaacctaaagcagctattcctggtgaaatagttcctgcaaaagaattttatgattatgaagcaaagtatgaaaatgcagcatcaaagcttttgatacctgcaaacttaagcaacgaaaatcttgaaaaaataaagaatattgctatagaggtttataaagcacttgattgttctggaatgtctagagtagattttcttgttgataaggatacaacagagatgtatcttaacgaagttaatacaattccaggatttacaagtatcagtatgtatcctaaattatgggcagcagcaggaaaagattacagtaagcttattgatgagttaatagagcttgcagcaagtagaaataacgcttaa

SEQ ID NO: 15338 - DNA, 1062 bp, Clostridium acetobutylicum
atgaatcaggaattcatccaggcacttaaagaaattgtggaggaaaaaggaataagcgaggagctccttttttcaaccattgaagatgcattagtcgcagcatataagaaaaattacgctaaactcacagaaaatgtccataatgttagagtgagtatgaatagagaaaatggagaaatacatgtttattcacaaaaaaaggtagttcaagaaatagaggatagtatatgtgaaatttctcttgatgatgctaaaagtatagaccctaaatatcaattggatgatatagttgatatagaaataactcctaagagtttcggaagagttgcagcgcaagcagccaaacaagttgttattcaacgaataaaagaggctgaaagaagtctattatatgatgaattttcagaaaaagaatttgatataataacaggaactgtacttagaaaggataaaggaaacattttaattgatttgggaagaatagaagcaatcttaggtccatctgagcaaataccaggagaagattacatatataattctaaaataaaattatatattgttgaggttaagaacactacaaaaggagcacaggtggttatttcaagaactcatccgggtctagttaaaagattatttgaattagaagtacccgagatttacaatggaatagtggaaataaagggtatctcaagagaagcaggatcaagaactaaaatagctgtttattcccatgatgaaaatgtagatgctatgggagcttgtgtaggtccaaaaggaatgagagttcaaaatatagtaaatgaacttaaaaatgaaaaaatagatataataaaatggagtaagcttccagaagaatttatatcaaattcacttagtcctgcaaaagtattagacgtatatattgatgaagatacaaaatcagcaagggcaatagtagaagataatcaactatctcttgctataggaaaagaaggccaaaatgtaaggcttgcagcaaaacttacagaatggaaaatagatataaagagtaaatctcaatatgacagcgaagtacatgaataa

SEQ ID NO: 15339 - DNA, 234 bp, Clostridium acetobutylicum
atggtatttgaaaaagttaaggacataatagcagatcaacttggtattgatgcaactgaaataaaaatggaatcctcttttattgatgatttaggagctgattctcttgatatagttgaactgataatggctttagaagaagaatttgatatagaaatgcctgatgaagaggctgaaaaagtttcaagtgtaggcgatgtagttaattacataaaagctcatacagaagagtaa

SEQ ID NO: 15340 - DNA, 1257 bp, Clostridium acetobutylicum
atgaataattatattataggaatagatgttggttcatccaagatttgtatagcattaggaaagttaacgaaaaaaggagaggtccagataataggagttacatcttcaaaatgcgagggagtaaaaaaatctattgttgttaatatagatagtacagctgaatctataaaaaattgtatggctaaactaaaaaaaatggtggaatttgatttggatgatgtgtacgttgcactccatggaagcataagtgagcttatacataacaaaggtgtggtggctgtatcctcagatgatagagcaataaccagtagtgatgttaaaagggttattgaatctactagatttatatcagttgcatctgatagagagattattggagtggaaccccaacagtttattgtagatggttacgataatataaaagaccctgttggaatgagtgggactaaattagaagctgatgtccatgtcattacggtgaattctaatattgtggacaatcttattaaaagtgtgaataaggcggggtacaatgtaaagggtttgtgttttgaacctaaaattgtttctaatgtagttttaagtaaacacgagagagaaagcggatgtgctcttgtggatgtaggtacagaaaatataaatatagctataattaaaaatgataatatagtgtatattgataatgtaccattaggtggagatagtataacgcatgatatagctcttggattaaagataccttttgaagatgctgaaaatttaaagagaaactatgcgaatattgatgcttctattaataatggtgaaaaaattaacattaaattacctgataatcaaaacttaaaagttgattataatttctttaaattaattgtacaatctagaattgaagaattatatgagcttataaggaagaaattaataagtaagagttattataatgaaataacaaatgtggtagttgtaggtggtggtattgctttagtaaaaggctcaataagtgttggtagaagaatattagataaaaatgtaagagtaggttctccgaattttgtgggagcatccaatcctatatatgcttcagcggttggaattgttagtgatatagggtataatatgaaaagtagtagttttagttatgatgatgaaagttctaaaaatgaaaacaaagattcaaggaataaaaatattaagagagatgaagaagagacaaatatcttttctaaggtaaaggagtttattacagatctcttttaa

SEQ ID NO: 15341 - DNA, 747 bp, Clostridium acetobutylicum
atgtttgaagatttagtaggtaaggtagcgcttataacaggttcatcacgtggaattggaaaaagtattgccgaggaaatggcgaagatggggatagaggttgtaataaattataggaatgatgaaaaaggggcgcttgacacactaaaaagtattaagaatagtggtggaattgcagaagtttataaatgtgatataacgtcatatagtgaagtgaaaaatatgtttgaatttataattagcaagtttgggaaaatagacttacttgtaaataatgcgggcatttctaaaattggactttttatagatatgaaagaaaatgactacaatgaaatcatggataatgattttagaggagtttttaattgtactagcctagcagttaagtatatgttagaaagaaaatcaggaagtataataaatatatcatctatatggggaaacgtgggagcttcctgtgaagtattatattcagctgctaaaggtgcagtcaattcatttacaaaggcattaggaaaagaattggcaccttcaggaattagggttaatgcaatttcaccaggtgttatagatacagagatgaatggatctttttcaaatgatgagaagaatgatttagaaaatgaaataccaatgtgcagatttggaaagacttcagaaattgcgaaaattgctatatttttagctagtgaagaagcatcttatataacagctcaagtaataactgcagacggtggtatgctgtaa

SEQ ID NO: 15342 - DNA, 870 bp, Clostridium acetobutylicum
atgaacaataaagtaataaagaaagaagtagaggaatatttaagtagatactttgaaggaaaagataactacaataaaagggtatatgaatctatgaactatagcctaaatgcgggtggaaaaagggtaagacctctgcttttattagcttcgtatgccatatataataaagattacaaagaagtaattgacatagcggcagcaattgaaatgatacatacttattcactaatacatgatgatttaccgtgtatggataatgatgatttaagaagaggaagaccaacaaatcataagatttttggctattctattgctcttttagcaggtgacggccttctgaacgaggcaatgaacataatgtttaagtattgtattggaaaaggtgaagaggctcttaaagcttgtttaatgatatctaaggcagcaagttcagatggaatgataggcggtcaagttgtggatatattaagtgaaggaaagaagataaatgaagatgagcttagatatatgcacaaaaaaaagacaggtgagcttataaaggcagctgtagtcagtggagcaatattagggggagctcctttgcatgatgtggagcttttatcgcaatatggtgataaattaggtcttgcttttcaaatagaagatgatatactcgatattattggagatacaaaaatcatgggaaagacatcgaaaagtgatttggaaaatgataaatgtacctatgttactttgtatggaatagataagtgtaagagtatttgcagagagttaacagatgaatgtttagatataataggcaaaatacaaggcaatacggaattgcttaaagaaataacagaacttttattaaagagaaatagataa

SEQ ID NO: 15343 - DNA, 2598 bp, Clostridium acetobutylicum
atggatgttgataaattaacattaaaagttcagcaagctataaatgattgtcaaactatagctgtaaggtataatcatcaacaaattgatacaatccacctttttatggcaattatatcccaagaagatggacttataccaaacatattaggcaaaatgggtgctgatgtggagactgttaaaagagatacagaagctgaacttgatagaatgcctaaagtacttggagaaggtgcacaaaatgcttctatttatgctacaagaagatttgaagaggtatttgtaaggggagaaaaaatatcaagagattttaaagatttatatataagtgtagagcatgttatgcttgcattaatggacatagatagtggagcaataaagagcattttagataaaaacaatatttctaaaaaagaatttttaaaagcactcagggaagtaaggggaaaccaaagagttgatacttcagatcctgagggtacttatgatgcgctaaataaatatggaagagatcttgttaaagatgcaaaaaaacacaaattagatccagttataggtagagacgaagaaataagaagagttataagaatactatcacgaagaaccaaaaataacccagtgctaattggtgaaccaggagttggtaaaactgctatagtagagggacttgcagagagaattgtaagaggagatgtcccagaggggttaaaaaacaaaataatattttctcttgatatgggatcattggttgctggtgcaaaatacagaggtgaatttgaggagagacttaaagctgtattgaaggaagttgagagaagtgaagggaagataattctctttatagatgaaattcatactatagttggggctggaaaaacagaaggcgcaatggatgctggaaatataataaaaccaatgcttgctaggggagaacttcactgtataggggctacaacctttgatgagtacagaaagtatatagaaaaagacaaggctcttgaaagaagattccaaaaggttcagatagatgaacctacagttgatgatgctatatcaatacttagaggactgaaagaaagatttgaaatacaccatggagttagaatacatgataatgcaatagttgcagctgcaaagttgtctgatagatatataacaggaaggtttttgccagataaagcaatagacttaattgatgaagctggggcaatggtaagaatggaaatagatagtatgccaactgaattggatatgctgaaaagaaaaatatttcaaatggagatagaaaaagaggctttaagtaaggaaagtgataaattttctcgtgaaaggcttgaatccatacaaaaagaacttagtgatttaaaagataaagataaagcaatgacagctaaatacgacaaagaaaaagctcaaatacaaggtataaaggaacttaaaacaaaattagatgaaataagaggtcagattgaaaaagcggaaagagaatatgacttgaataaggcagcagaacttaaatatggtgaggtgccaaagcttgaacatgaaattgaagaaaaagaaaatctgataaaacaaaatgggcaaaatgcaatgcttaaagaagaagtaacagaagaacaagtttctaatatagtttcaaaatggactggaatacctgtttcaaaattggttgaaggtgaaagaaataagttaatgagactttcagatgagcttgaaaaaagagtagtaggtcaaactgaagctgttaaatcagttgcggatgctgttattagagcaagagcagggcttaaagatatgagtaaacctataggctcatttatattcttgggtccaacaggagttggaaaaacagaactcgccaaaaccttagcaagagttatgtttgatagtgaagataatataataagaattgatatgtcagagtacatggaaaagtattccgtgtcaaggcttataggatcacctccaggatatgtaggatatgaagaaggaggacagcttacagaagctgttagaagaaaaccatatagtgtaatactatttgatgaaatagaaaaggcacatagtgatgtattcaatatattccttcaaatatttgatgatggaagacttacagataataagggcaatacaattgattttaaaaattccataattataatgacctccaatataggcagtgagcaccttcttaataataagggggtatcaaatgttgatgaggaaactaaagataaagtcatgaatgaattaaagggtagatttaagcctgaatttttaaatagacttgatgatataattatgtttaagccactatccattaatgaaataggaaaaataattgatatattccttgaaaatataaaatcaaagcttaaagaaaaaaatataaagattgatattgctgaggaagctaaaaaaatcatagcagaagaaggatatgatcctgtttatggtgcaagaccattgaagagatatatagagaatactattgaaactcatatagctaaaatgtttatatcaggagagatttcagagggtgacatcttgaaaatagagggctctgattcgaagcttacaatagtaaaaaaataa

SEQ ID NO: 15344 - DNA, 513 bp, Clostridium acetobutylicum
atgaaaaagaaagtgtataaaaacagattggctttatttttaagtgcaattataattttaacatcttttgttggatgttctgaaagttctacaagtaaaaaatccaatagtaatacagcaaagactatagccaagcctaagcctaaaacagcacaatcagtactagatgaattaaagaaaaaagaatcagcatatatgacaaatataactgttgttacggctgataatgattcaaacaagcttttaggcagacctaaccaatatacggaaaaagtaacatggaaagataatagatctaaggattctcaagtagattgctcaattgagttgtttaaaaataaggatgatgctacagcaagaaaagattatttagaaaaaataataaaatctatgccgatgcttacacagtacatagagcaaaaggataatgtattactaagaatagatggagtgttaacacctgaacaatctaaagaatatataaatatttttaattccatttttaaaaattag

SEQ ID NO: 15345 - DNA, 765 bp, Clostridium acetobutylicum
atgagctttaaagaaataaaaagcactttggaagatatggatgagcaaagtaggctttcagcagctcacgatattatggatgacacaagaaagaacgttaaatctctaggtaaaaagattctaaatgcctatgaaaaaaaacaaaatgaaattgcaagggtaaaaaagctgtatgagtttgataagcaatttggaaacattgttattgcaggtgtagatgaagttggaaggggacctcttgcaggtccgatagtaggtgcagctgtaattttagagttgaatgtagaaaaagatttagaccttatacttggaataaatgattcaaagaaattaagctctaaaaaaaggcaagagctatcggaaattataaaagaaaaagctttggcttgggagattgcatcattggataataatgaaatagataaaaagggaatctcatggtgtaataatgaaatatttaaaattgccataagtaagctaaagaaagtgcctgaacttgtaatatctgatggatatgcagttaaaggaattggaataaaaaatcattacatagtaaaaggcgatgcacaaagtgcaagtatagcttgtgcatcaataatagctaaagtatatagggacaatttaatgggtgagtacgctaaaagctattcagagtatggctttgaaagcaatgttggatatggttccaaggatcatatagatgctataaaaaaatttggaacaacaccaatacatcgtatgagctttttgaaaaatattatataa

SEQ ID NO: 15346 - DNA, 1104 bp, Clostridium acetobutylicum
atgaaggaacttgaagaaataagaaaagaaatagacgaggtagataaaattataacagagctttttgaaaaaagaatgaatttggttatggaagttgctgagtataaagaaaaaaatagtattccagttagtgatagcaaaagagaaaaaaaagttatagataaaaatataggttacttaaagaataaggaatattctgaggttcttaaggagttttatattaattttatgaacctaagtaaaaagttggagagaaaaagaatttataatgaagaaaaaacgagtgttaatacatcaatttatggtcttataggagaaaagttaggacacagccattcatcatatattcataagcttatttttgaaaaggtaggcattaagggaatatataatttgtttgaggttccaaaagaaaagcttaaagaatcagtagatacctttaaaattataaaatgcggtggattaaatgtaacaataccttataaggtggaggttatgaaggagctatatgaaatttcagagaaagcaagaaaaataggggctgtaaatactttgaagttttcacgagaaggcataagtgggtttaatacagattacattggatttggaaaaatgcttagtaaatttagggttgaaataaagaataatatatgtgttgttttaggaagtggtggagcagcaagagctgtgcttcagtatttaaaggacaactttgcaaaagacatatatgtggttactagaaaccctgaaaagacttctgagatttacggagaatttaaagtcataagttatgatgaactttcaaatttaaagggagatgttataattaactgtactccaaagggtatgtatccaaaagagggggaatcgcctgtagataaagaagttgtagctaagttttcttcagctgtagatctaatatataatccagtagaaactttatttttaaagtatgctagagagagtggagtaaaggctgtaaatggtctttatatgttagttagccaggctgcagcgtcagaagagatatggaatgatatttctatagatgaaatcatagttgatgaaatatttgaagttttggaggaaaaaataaaatcatga

SEQ ID NO: 15347 - DNA, 312 bp, Clostridium acetobutylicum
atgtacgcagttatagctactggaggaaaacagtacaaagttcaagagggagatgcaatttacgttgagaaaattgcagctgaagttgattcaacaattgaacttaatgaggttcttgcagtttcaaaggaagatggtttagttttaggaaaacctgtagttgaaggagcaaaagttgtagcaaaagttgaagctcagggtaaaagtaagaaaatcatcgtatttaagtataagagaaagaaagactacagaagaaaaagaggacacagacaggcttatactaaacttgtaattgaaaagatacaagcttaa

SEQ ID NO: 15348 - DNA, 1005 bp, Clostridium acetobutylicum
atgaaaaaaaatcacacaataactcttattcctggagatggaataggaccagaagtaacgggggcagctaaaaaggtaatagaggcagcaggagttagtataacttgggatatagttgaagcgggagcaaaggttatggatgagtatggaacacctcttccagagtatgtgttagaaagcataaaaaagaataaaatagcactcaaaggacctataacaactcctgttggaagtggatttagaagtgtaaatgttgcattaagacaaacttttaatttatatgcaaatgtaagacctataaagacatatgaaggaatacctacaagatacaaagatgtagatctaattatagttcgtgaaaatacagaagatttatatgcaggaattgaacacaaaattggtgattatgcagctgaaagtattaagataataactagagaagcaagtgaaagaattgctgattttgctttcgatatggcagttaaacaaaatagaaaaaaggtaacagcagtacataaggctaatataatgaaattttctgatggactgtttttagattgtgcaagaaaagtagcagaaggttataaggaaaaagaatttgaagatatgattgttgatgctatgagtatgaaattagttcaaaatcctgaaaagtatgatgttcttgtaatgcctaatctttatggagatatactgtcagatatggctgcaggacttgttggaggacttggagtagcgccaggagcaaatataggaaaagaaatttcgatatttgaatcaattcatggttcagcacctgatatagcaggtaagaacatagcaaatccaacagctgctatactttctggagtaatgatgcttagatatataggggaacttgaagcagcagataagatagataatgcaattaaagtggttttaaaagagggaactaaggttacatctgatttaggtggaaatgctacaactgatgaatttgctaatgaagttataaagaatatataa

SEQ ID NO: 15349 - DNA, 2337 bp, Clostridium acetobutylicum
atgaatcaagagaataaagttcttcctttaattcctctaagaggccttatagtatttccttatatggtggtgcattttgatgttggtagggataaatctattgaggctttggaaaaggctatgatgaatgatcaacaaatatttttatcaacacaaaaggatgcaaagatagaggaaccaaatgaagatgatataaattcagtaggaacaatttgtagtataaaacaaatacttagacttccaggtgatgctgtaagagtattggtggaaggaattagtcgtggaaagattgataagtatttaaaacaggagccatttatagaagcagaaattactgaatttaaagatgaagataattacgaagagtacgaaattaaggctttgatgagaattataactaaggaatttggaaaatatgtaaaactttcaggagcagttaccaaagatgcagttgattttttaaaggatataaaagagccaggcaaatttgcagatatagttagttcatatcttattataaaacaagaacaaaaacaatcagtacttaattccattgatgaaaaggaaaggttggaaaacgttttaacagtaattaaagatgaattgcagatattggaacttgaaagaaatataggggttaaggttaaagaaaaaatagataagtcacagagggaatactacttaagagagcaaataaaggttatgcaggatcaacttggtgatgatgatgaagaaaaagcagaaataaaagagtatacacaaaaaattaaaaaaggaaagttaactaaggaagccaaggaaaaagctttgcatgaacttaaaaaattagaaaatgcgggggcatattcacctgagggcgcgggaataaaaacctacctagattggattctttcattgccgtggaaagataaaacaaaggataatcttgatataaaaagagcaagagaaatattaaataaagaacactatggactttcagatgttaaagatagaataatagaatacctcgcagtaaagaaaatgagcaaaagtttaaaaggacctatactgtgtttggttgggcctccaggagtgggaaaaacttcgatagcaaaatcaatagcaaatgctgttaatagaaattttgtacgaatatctcttggtggagtaaatgatgaggctgagataagaggtcacagaagaacatatgttggagctattcctggaagaataatttatggaatgaagcaggcgaagtcaaacaacccacttatgctattggatgaaatagacaagatgagctcaagctataaaggggaatcagcagatgctcttttagaggtacttgatacttctgaaaataataagtttagggataactacttagagttggatttcgatttatctgacgttatgtttgttactacagcaaatacgcttgagactataccgagacctcttatggatagaatggagattattgaggtttcaggatatacctatgaggagaaattccatattgcaaaagaacatttaatacctaagcagttagaagaacataatatgcctgaggataaaaaaataacttttatggattcttctatatattatattatagaaaactatacaagagaatcaggagtaagaagtcttgaaaggaaaatagctgctattataagaaaaattataactgaaatagtagaaaaggataagagtagtattagcgtaaattcaagaactgttaaaaagtacttaggcgaagatgttttttcagctgataagatagataaggaagataaaattggagttgtaacaggaatggcatggacggcttatggtggagatactcttcctgttgaagcagttataatgccgggaaatggaaagcttcaacttacagggcaacttggagatgttatgaaggaatcagcacaggctggttacagttatgttagagctaattcagtgaagtatggaatagacaaagaattttataagaataaggatattcatgtacatgttccagaaggtgcagttcctaaagatggaccttcagcaggtgtgactatgataacagcaatggtctcagcattaagcgataaaaaggtaaaacacaatgtggctatgacaggagaaataacacttacaggaagagtgctagctataggtggacttaaagagaagacactagcggcatatagagctggagtggatactattataatacctaaacaaaatgaaaaagatataaacaaggttcctaaggcgattaggggaaaaattaaatttatacttgcagaagaagtagatacggtattagaaaatgcattgattggtggtattaataatgataattaa

SEQ ID NO: 15350 - DNA, 498 bp, Clostridium acetobutylicum
gtgattaaaattgcaatattaaccatcagcgataaaggatctaggggagaaagagttgatggtacaggcttagaattaaaaaaattattggctaatttaggttacgagattagcttttataaaattatccctgatgaaaggcgtgatatagaaaaagagttaatttacttggctgatgaattaaaagtgaatttgattttaactaatggtggtacgggctttgccaaaagagatgttacacctgaggcaactaaaagtgtgattgaaaaagatgttcctggtattagtgaggttatgagaatgaattctgttaaaattaacagtcatgcaatgctgtcaagaggagtttcgggaataagaaaagattctctaataattaaccttccaggaagtacgaaggcagctatagaaagtttagaatttgtattaccagctattccacatggtattgatatattaaatggttattcacttaattcttcatatatacatagttag

SEQ ID NO: 15351 - DNA, 1932 bp, Clostridium acetobutylicum
atgatagttgttagctgcaaaaatataggcaaaagctacggcattgataaaattttggaaaatataacatttagtataaatgatggtgaaaaagtaggccttataggtccaaatggtgctggaaaatcaacattgtttaaaattttaactttccaactagaacatgacactggtgatttatttatagataaaaccaaaaaactaggatacttatctcagcacttagatcttgatagtaacaatactatatacgaagaactttgtactgtcttcaatgatcttttagaaattgagaataaacttaaggttttagaaataaaaatgggagagccttatgacccctcaaaggatgaatatcataacaaggttataaaggactacaccacttacacagaactttattctgctaaaggtggctacacttataaaggtttaataggtagggttttaactggtctaggattctcaaatgattactttgataaaaaaataagcatattaagtggagggcaaaaaacccgtgtagcactttgtaagcttcttcttaaaaaccccgaaatacttcttctagacgagccaacaaaccatcttgatttagatgccattgaatggcttgaagaatatcttaaaaactacaagggaacagttattttaatttctcatgatagatatttcctagatgctattactaataaaacctttgagcttataaacggtcatgtaaattgttttaacggaaattacacaaaagctttagatttaaaaaagaagcaatatgaaattgaacttaaagcgtatactcttcaacaagaagatattaaacgacaagaaaaaattatagaacgttttagatcctttaatcgtgaaaaaagtattaaagctgctgaaagtagacaaaaggctttagacaaaattgagagagtaaaacgtcctgataaagaaacaggagtaacccgtatagaatttgaaactctaataaagagtggaaatgacgttcttcatgttgaaaatctttcaaagcattttgaagataaaacactgtttgaaaatttggacatggacataaaaaagggagaaaaaattgctttaataggcgaaaatggacgtggtaaaactacatttttcaaaattcttctagataaaataaaaagcgattcaggcatcaaggttctaggaaaaaatgtattcgtaggctactatgatcaggaacaatctgatttacatgatgaaaaaacaattatagatgaagtctgggatgattttccagagcttactacaacagaaataagaaatgctttggctgccttcttatttacaggagatgatgtgtttaaaattatctcaactctaagtggtggagaaaaatgtagaattaatcttcttaagttaatgctttcaaaaaataactttctacttcttgacgaacctacaaatcacttagatatagtttctcgtgaggctcttgaagatgctcttttatcctatgacggaactgtacttgtaatatcccatgatagatactttttaaacaaagtggtctctaaaatattagaattaaaagagaatggtataagcgaataccttggaaactattcttattacatagaaaaaaagaataacccaacaagatttcaagaggaagaagaaaataaaagcttaaaaacaaaaacacaaattaacactgaaaagaagaagaagagagagaatgaaaaacaaaaaagagttagaaaagtcgaactgaaaaatacagaaaaagaaattgctgatttagaaaaagaacttgaagatcttcaaaacaaactctgtcttgaagaagtttattcaaatcctgaaaaaagtgtagaagttaacaataaaattacagaaacccaaaatacactagattcattatatgaaaaatgggatgaattaagcagtattatggaagattaa

SEQ ID NO: 15352 - DNA, 1386 bp, Clostridium acetobutylicum
ttgataaatgatgttatcaataccatagaaaaaaattctatgattaaacaaaacgatagaattgttgtagcagtttcaggaggcccagattcaatttgtctccttcatatactatttaagcttaaggataaatttaatacatccatttgcgctgcacacgttaatcactgtattaggggtgaagctgcagataaagatgaagagtatgtgaaaaaattttgtgagaaactagatatacaattttatgtgaaaagagtagacgtaaataaaatagcacatgaaaaaaagatatcctcggaaatggcaggacgagagattcggtatgcattttttgaggaggttaaagaaaggtttaaggcaaataaaatagctattgcacacaatgcaaacgaccaagctgaaactataatgatgagaataataagaggaacaggaacagaaggaattaagggaataaggcctgttagagatggatactatatacgaccacttattgaaattagaagatcttccatagaaaagtattgtgaagatgaaaagcttatgcctaggatagatgctactaatctcgagagggattataatagaaataaaatccgcttagatttaataccatatatagtgaagaattttaatgaggatatagtgggtgctttaaacagattaggagagcttgttaccattgacaatgattatttagaaaaacttgcaaaatcaaagtataagttgtattgtaatgaatgtgaaaaacaggttataataagtaaagaggcattttcgaatgatacggcaatactatcaagaattataagaagagctgtattttatttagtcaatagtaagtataatcttgagaagaaacacattgacagtattataggatgccagaaaaatactacaggaaagcaaataaatctacccaataatatgagggcatataataactatggtgatatttgccttaggataaaagaagatgaaagctgcataggtaaaaaagagtataatcttcatatggataaacttaattctgtacacgaggaaaatttaattataggaataaggttaatacataattcaaaagatataagactagagggaaacaaaaatgtaaaatattttgatgcagataaagcgggaaaatatataactttaaggtacagatctgaaggagataagtttatgccttttggtatgaaaaataataaaaaactaaaggatatatttataaatttaaaaatacctagagaagaaagaaataagattcctctcatatgttttggtggtgaaatagcttggataacagggtttaaaataagtgaaaaatttaaaatagataacaacactaaaaaaatattagaaataaaaattgaaagagaggaataa

SEQ ID NO: 15353 - DNA, 462 bp, Clostridium acetobutylicum
atggaacttagagttgcgggttttttagataattcaatggtgaatggagagggacttagatctgtattatttttatcaggctgtaggagaagatgcccgggatgccagaatacggatatgcaggattttaaatacggcgaaagtgtttctgcggaggaaatatttaatagaattaagagcaatgttcctataataaaaggggtgactttttcaggtggagatcctttagaacaagctgaagggttaattaatatatcaaaggaaataaagaagctaggtcttaatatatggtgttatacaggatatacatatgaagagattttaaaagaaaaagattccaataagcttgaactactgaaatacatagatgttttggttgatggagaattcaaagctgagttaacagaaaatgcacctaagtacgcaggttcaagcaatcagagaattatcaggttaaaataa

SEQ ID NO: 15354 - DNA, 5460 bp, Clostridium acetobutylicum
atggcacaagaagatatagcagacttagcgatacgtttaagcatggaagatgctagctttactcaaggagtgcaaaacttaaaaagaaatctaactattatagatagtggttttaaggaaagtattgcagggctcaaggattggggaaaaaatgtagatgctttaaaaagtaatgcatcggctcttggagagaaaattgagacacaaaataaaatagttaaaagctatcaggagcaactcgataaaactaagaagtctcttcaagagaactctgaaaaaatgcttgaattaaaagaaaaagttgaatctgcaaaaacagcttgggaagaaagtaagcaagagcttggtgcaaatgccgaagctactcagaagctaaaaaaagattatgatgaattaaacaaagaatatactcagacggaacagaaagtacgaagtgcttctaaatccgtagatggctatactatacaacttagtaatcaagaagcaaaattaaaaaccatgcaagcagaactagctacaacaaataaacatattgcagaacaaaattcagtttggcttgcaacaggtaagcaacttggaactgcatctaaaactctaaaaacggttggcgaaggatttgttagtgtcggatctactatgagcacacactttacattaccatttgtagcaggagtaggactagcaactaaagctgcatcagatttcgaacatcaaatggcagacatacaaaaggaaatagccgctaagggcgaagatgtaaaatctgttatgtcgcaaatgtcaaattcatctttacagtggagtaaagattttggacagtcaactgataacataaacgaaggtctcttaacacttgtaaaggatggctatagtggaagtgaatcgcttgaggcaatgggtatagcattaaatacagcaagaggagcaaatgaagaactcgcacccgtagttgatggcttaggatcatcccttgaagcgtataaaatgaaaaccgataatgcatcggaaacaacatcaaacatggcacatatggctgatacatttgcttatattgcaaaccatactaaagcaagtgtaataagccttagtgaatcttttagcaccgttggacctacggcaagtgcattaaaacaaccaatggctgaaacagcggcagcaataggagaacttcaatcgaatggtatagatgcaggcacagcagctacttcattacaagcaggcttagttaatttaacaaaaccaacaaagaaaatgaaagttgcattggatgaactaaaatttagtgcattcgacagcaagggtaatatgaaagaccttactactatcataaacgaaatgaatggaaaaatggcgggttggactaatgaacaaaagcaggctgctattgcaactattttcggaaaggaaagtttagcaagttggaatgtattactcaataaaggtggcggatacttaaaagatttatccgatcatgctaataatgcaacgggtgaagttaaaaaattgtctgacagtatgaagaatacttctaaaaacaattttaaagaattagaagagtctgtacacgcattaggcgtagcatttggggaagatgttcttccatcggttataccagtagttaaagaagttacgaacggtgttaatgcttttagcaaattagatgatgctactaaaaagaacataatagaaattggtgctttaatagctgtaggtggtccagcactttcccttattggtaaaacaacaaaaggattagggaaaataattaacggattaggcaaactaagtgactggttcggtaaaaagctaatagaaaaaggtttaaaggataatacaaaagcagaagcagaaaatactagttctgtggcaactaatactcagacaattaacaataatacaaaagcagaagcagagaacacagcagctacggaactaaatacaaaagctaaacaaagtaactcaaatacactagaaaattctagatctaaagcaaaagatttagaaaaagatgtagaagaatctactaaaaagacaggtaaagcaacagacgcagtaaaagatttaggcaaagaaacagaagaaactgctggtaaattaggtaatgcggcagagaaaacagaaggtctaggcggtaaaattgcaacaacagcaggcgaagcaggaacagcagcaggaacaatcgaaggacttggagctgcaactggcggagcagcggaagcagcaggaggtttaggagcagaagcaggagcagcagcaggaggacttggggcagcagaaggcggagcaacagcacttggaggagcagcagtaggattagcagcccctatcgctattgcggttgctgcgataggagcacttgggtttgttggctatgaagtccataagaaacttacagataatacaattcctacaatagacctttttgctgatgatgtacaagtaaaaaatggcaatatctctgcttcaagtgcgactatggcaggtcaggttgaaacctccgtaactaaaatttcagactctactaaaaaagctgttggagcgtatgaaaaacttaacgattctgttacaaaaacagaagaagatatgtatataaattctgataaattcacaacacaaacaaagaatacagtaattaaaaattttagcgacatagttaacagttctacaggttttaatgatgaatttaaatctaatagaattaaaatgtttactgatatagttgacaatactaacactcttacagcagaaaacaaggatactatagtaaatgcatacaaagacctattgcaccaaacagatggtctgactttgcaacaaaaggatgcaataataaagaaccttaaggatactatgaccaatagcgttggtataacacagagccaagttagtcaaataaaatccaagtatgaccaaatgactaatatggttaattctgctacagataaaagagcacaggatgaaactaaaactttacagaacttattttcaaagagtacctctatttcaaatgatgaacaacaagcaatactatttaacatccaaagaggtgctagagaccaaaaggctgtaacatccgcttatgaacagcagatactacaaatatatcaaaatgcaagtagtcaacacagaagtgtaaatgctcaagagtggcaacagattaaccaaatacgagatactatgcaaaaaaacggtgttcaaattctttccaaaagcgaagttgatagtaaaattattatgcaacgtttaaaagattataacaagaatataacggagcaacaggcgagtgacactgttcaaaatgcagaaaaggcacgtaaaggtgcggtggatgctgcaaacaaacaatataatgaccaattagcaaatataatacaactacgtgatggtacacatcaaataacagcacagcaagcagatgatatgattaaggaagctaagcgccaaagagacgaatctataaacaaagcagacgatatgaaacaaggtgttataaaaaaagttggtgaaatgaaccaaggtgcaatttgggacatgaacacatcaacaggacaaatgcttagcccgtggcaaaaactagagagagatatttctactacttttgaccagttagggaaagatattgggaatgcatgggatcaaattaataaaacaatacaagacaaaatggttgaggcgcaaaagtggattgataagcatccaataatcgcaaaaattcaaaaaggtgctgttggagcagcgaatgagctatgcaaaatattaagtggagatggctttgcaactggaacagaaaacgcacctcaaggatggcactgggttggtgaacaaggcgctgaattgatgtggttcaatgggggagaacaggtaattcctcataatgatagtcaaaaaattgttgagcaaatgcaaaaaacaggtggttctgcacctgcaatgacagcagatagtgataagctcaagactacagaacaatatggccagaatttaaatactagctttggaaaaggcttaacaaattcgttagattatgctataaatccccttaacaatatgacaaataagcttaatgacacaatgaatgttactgcaactagatatataagctatggaaagaagaatatacagaacttaggggcaggtatcacacaaaacgctggtgttgcaacagagtcattaggaaatttaacagatagattaaatactaatatgagtacatttgccagcaacgctataaatcatggacttaatacagatacaagcataaaaaacggtataaataataagtctcaagatgttgtaaatgctcaaaaaaatataacagatacattaaataataacttaaatacatttgctactaatgcaataactcacggtgtaaagactgattcaagtgttcaaagcgggctacaaaataattccggagcaatatataatgcattaaacaatataacaaatacagcagggaatatgcttcataattttgcaaatagttgttcaaattatggagcagaagcagtaaattcaatcggagcaggtattcaacaatcggagggcaatctcacaaatatagtaaaagatttaaccgataaagttacaaaggcattcaatgagggatttgatatacacagtccttcaagaaagctgttttggactggtaccatggttggtcaagggcttatgaacggtattcaatctaaaaatttaggcggttttataaaaaaatggttaggaaatttaactggaaatgtacaagtagccggtggaaacatatcttctattttagctgcagctcttagtatagatggagagcctttaagttggttgcctgcactagaaatgataacaagtagagaaagtggtaatcctggaacaatgggaactggtgatgcaggattaataaataatattggtgtaggcggagaatttgcaacaggacttatgcaaatgctaccatcaacattcagagagtacgcaaagaatgggtttgggaacattctaaatggcttagacaatgcagttgctgctataagatatattgcagacagatataaaactccattcgcaattccaaattggaataattcatcttatattggatataaaactggaacagacaatgcatccaaaggttggcacctaacaggtgaagaaggccctgagtgggtatatttcaatggaggagaaactgttttaaacaataaaaatacatctagtgtaatggataacttcaagagcttactaaatacaattaaaagtactaaaatatcaataccagatgtatctggtaacacatacaacactactaataattatgtaggtaacactactaacagtggtggttatggacatgctgaaactataatagttaaatcaccaatttatttggatagcagacaaataggagaagccgttacaccagtggttagcaataaaatagcaagaaaattcaaggggatgagatag

SEQ ID NO: 15355 - DNA, 921 bp, Clostridium acetobutylicum
atgacaaatgaaaatatagtagatagtaacttaagaaaaaaaggacttatatttgctgtattagcctcaactctatggggaatatctggtatagctgcgcagtatttatttcaaatggaagactttagtccagaatggcttgtggtaattaggcttatcatttcaggtgttcttttattagcagccacatatgtagctactaaaaaaaatatatttaaagtgtttaaaaatagacatgatatttttagttttattatgtttggcttcgggggtatgttagcagttcaatatacatattttgttgctattaaatacagcaatgcagcaacggctacaatactacaatatctttcaccagtaataattacaatatatttaatagtacatttaaaaaagttgccaagcctctatgaagttataggtataattttagctcttataggaacattttttataattacaaaaggtgatataaaaactataaatatttctggaataacattattttggggaattctttctgcaattgcagctgcagttaatacgttgcagccaagaagaatactagctaagtggggatctaatttagttgctggttggggaatggttataggtggtgttttaatgtcatttgtacacagtcccttccagtttaaagggcatatatcattagtatcaatttcttgtgtagcggttgtggttataattggaacacttattccattttggctttacatggagagtataaagtatataaaaccaacagaagccagtattcttggtgcttttgaaccattgtcagcagcgattttatctttagcattttttaatctccattttagtgttctagaatggcttggaagcggatgtattatacttacaacgataattctttctacggtaaaaaatagtagtaattaa

SEQ ID NO: 15356 - DNA, 621 bp, Clostridium acetobutylicum
atgcctacagtagaagtattcaataaagaaggtaagaaagttgaagacatcgaattgtctgaaaaagtttttggagctaaaattagcgaaagtgcacttcaccaagtagtagttgcacagcttgcaaataaaagacaaggaacacaaagtgctaaaactagaacagaagtttctggaggtggaataaaaccttggagacaaaaaggaactggtagagcaagacagggttcaataagagcaccacaatggattcatggtggagttgtatttgcaccaaagcctagagattacagaatctcaattccaaaatcaatgagaagaactgcaatgctatcagctcttacaagtaaggttaatgataaagaaatgatcgtacttgatgaattaaagatagatgcaccaaaaactaaagaaatagttaaaatgcttaatgcatttgaagcaaagaaagcacttatagttgttgctgaatctgatcaaaatgtatacaaatcagttagaaatatacaaggtgctgcagtaataccagctaataacttaaatgtctatgacatattgaaatatgataagttcatagtaactaaggaagctgtatcaaagattgaggaggtgtatgcataa

SEQ ID NO: 15357 - DNA, 3198 bp, Clostridium acetobutylicum
atgccattagataagacaattaagaaagtattaataataggttcaggacccaataatataggtcaggcagctgagtttgattattcaggtacacaagcatgtaaagctgtaaaagaagaggggatagaaactgtccttgtaaacagtaatccagctactataatgacagattcgcatatagcggataaggtttatattgaaccattaacagaggaagctgtagagaagataatagaaaaggagagaccagatggaattttagctgggtttggagggcaaaccgctcttaatttagctatgaatttaaatgatgctggtgttcttgataaatataatgttagacttcttggtataaatagtgaggctataaaaaaagcagaggatagagaagagtttaaaaatcttatggaagaaatagatgagcctgtacctaaaagtataatagcaactcacatagatgaatgtattgattttgtgaataaatttgggctcccagttataataagaccggcatttaccctaggaggtactggaggcggaatagcttcaactatggaggaacttaaggaaatttgtgacaggggaataaaaatgagccctataggacaaatacttttagagcagagtgttgccggttggaaggaacttgaatacgaagttatgcgtgatgctaaagataactgcataatagtatgtaatatggagaacctagaccccgttggagtacatacaggagatagcatagttacagctccatcacaaacacttacagataaagaataccatatgttaagacattcagctcttaagataataagaaaccttaaaatagaaggtggatgtaatatacaatttgcgcttaatcctaaaagtaatgattatatagttatagaggttaacccaagagttagtcgttcaagtgctcttgcgtctaaggcagctggatatccaattgctaaaatagcagctaagatagctgtaggctacagtttagatgaacttaaaaattatgttactaaaaattcaagtgcgtgctttgaaccagcgctagattatgttgttgtaaaaatacctaaatggccatttgataaattcaacacagcagaaaggcatcttggtactcagatgaaggcaacaggagaggttatggcaattgacagagattttgaaagtgccctcttaaaagcggtaacttctcttgaaggaaaaatatcagggcttagacttgaaaaatttgaatatactacagtaagagagcttcttgaaaaaataaaaaagcaggatgatgagagaatttttgcaatagcagaggcatttagacgtggtgtggatgtaaaacaaattcatgaagttacagaaatagataattggtatcttaacggaataaatagaataatagatatggaaaaggaacttcaagataagaacaataaagataaagataaaagtataattaaagctaaaaaaatgggttttacagttgcagaaatagctaggataactagccttgaagaagggaaaataaaaaatatattaaacgttaataatgttaagcctgtatttaaaatggttgatacctgcagtggagaatttgaagcggaaactccatattactattcttcatatgagaatgaggatgaaaacgaagttactgatgataagaagatagttgtaataggttcaggacctataaggataggccaaggaatagaatttgattactgctgtgttcatggtgtatgggctataaaagaagcagggtataaatcaattattattaataacaatcctgagactgtaagtacggattttgatacggctgataaactttattttgaatccttatatatagataatgtaatgaatattatagaaaaggaaaaaccagaaggggtaatagttcagtttggggggcagacggctataaacttggccgataagctttataaaaatggagtgaaaatactgggaacttcatttgaatcaatagatctagcagaggatagagaaaaattcagtgagctcctaaaagaactaaatattccacaagcaaagggaatggcagtaacaagtatggaggaagcgtacgaggctgttaaggaaataggctaccctgttattgtaagaccttcttatgtaataggaggaagagcaatgcaggtagtttatgataaactggctcttcaaaaatatatgactgaggcagtaacactttcaacggaacatcctgttttaattgataaatatataaagggaacagaaatagaagtggacacaatttctgatggagaaaatatactaatacctggaattatggagcatattgaaaggacaggagtacattctggagatagtataacaatgtatccttatcatacattgccaaaagaagttgttgataaacttgttaagtatactaaaagcttagctaaggcgcttgaagttaaggggcttatgaacatacaatatgtttatgatggcgaaaatgtttatgtaatagaagttaatccaagagcttcaagaacagtacctatattaagtaaggttactggagtaccaatggttaaattagcggttgaaattttaacgggtaaaaatcttaaggagctagggtatggagttgatcttaaaaaagataataagctctatgctgtgaaggttccggtattttctaatgaaaagcttgcaaatgttgatatttatcttggcccagagatgagatctacaggagaggtaatgggaatagatagtgattttgaagtagcaatttataagggatttagagcggcaggaatagaagttccaaaggacggaggcaacctttatgtatccataaaagatgtggataaacaagaaagtgtgcctattattaaaaagtatacagagtttggatataaaatatatgcatcattaggtacaggaaagtttcttcaaaaacaaggaatagactgtgaagttcttcgcacagatgatttaatgaaggctataggcgacggtaagataaaccttataataaattctccaactagaggaaacacagttggcactagaggatttagtataagaagaaaagctgctgagtataaagtaggggctttcacttgtatagatacagcaaaagcttttcttacagcaataaaggttaaaagggaagaggcaaaggtagaatatagagcaatgaaagagtattttaaataa

SEQ ID NO: 15358 - DNA, 648 bp, Clostridium acetobutylicum
atgaatattgctaaaattatagatcatacagcattaaagccagatacaacaaaggagcagatactaaaactaatagaagaagctaaacaaaataactttgcatcagtttgtgtaaatccaaagtgggttaaagaggcaagctgtgcattaaaggacagcagtgttaaagtgtgtactgtaatagggtttcctcttggagctaatacaactgctacaaaagtatttgaaacacaagatgctattaaaaatggtgcagaagaagtagatatggttgtttctataggagaattaaaagataaaaatgatgattatgtagaaaaagatatagaagaagttgttaaggcagctagtggaaaggccttagttaaagtaattattgaaacttgtcttcttaccgaagaagagaagataagagcgtgtaaactagctaaaaaagcaggtgcagattttgttaaaacatcaacagggttttcaacaggaggggctaaggcagaagatattaaattaatgagaaaaacagttggagctggtatgggagttaaggcctcaggtggtattcatacaagagaagaagcaattaaacttatagaagctggagctacacgtattggagctagtgcaagtatagatataatttcagaaaattaa

SEQ ID NO: 15359 - DNA, 774 bp, Clostridium acetobutylicum
atgctaaattttataaggtctgataaagacaaaggtaaaggcaatgataatgatattaatttttctaatataccaaaacatattgcaattataatggatggtaatggtagatgggcaaaaaaaagaaatctccctagaactatgggacataaagctggtggtgaagctttaaaaagaatagtaagagaatgcagtgatataggtgtgaaatatttaactgtgtatggattttcaactgaaaattggataagacctaaggaagaagttaacgcaattatgagacttattgttgaatttttaaaaagagaatttaatgaacttaataaaaataatgttattataaatccaataggcaatattttaggattgccagaggcttgtattacagcattaaatgatgcaaaaaataaaactaaaaataacactggtcttatgcttaatctagcacttaattatggtggcagagatgaaatattaaatgcagtaaagaatatatttgcgagttatgaggaaaataagatatctaaagatgagatatttaacttaagtgatgaagaattctcttcgtatttatatacaggttgtattccggatccagatataataatacgtccaagtggggagaaaagattaagtaattttcttctttggcaatgtgcatattctgaattttggtattctaatataaattggcctgatttttctatagaagatcttcatacagctataaaagattatcagaatagggatagaagatttggaggcgtaaaataa

SEQ ID NO: 15360 - DNA, 1227 bp, Clostridium acetobutylicum
atgaggattttacatacttctgattggcatttaggtaaaaacttagaaggctatagtagaatggatgaacaagaggaatttttagaagactttattaagatagttgaagaaaataatatagatatggttgttattgcaggagatatatatgatacctacaatccaccagctagagctgagaaaatgttttacagcacacttaaaaaaatatcacaaaatggagagagggtaacccttgttatagcaggaaatcatgataacccggaaaggctcgtggctgcaggaccgcttgcacgtgatcatggcataataatggttggtactcctaaatcagttgttcctactggagaatatggaaaacataaagtactttcatctaaggagggctttattgaaattgaagttaatggtgaaagggcatctattattacgctgccttatccaagtgaaaaaagattaaatgaagttctttatgaagaaatggacagtgaagaggaaaaggtaaaatcatatggtgatagaataaaacagctttttgataggttaagtgaaaactttagagatgatactataaatatggtggtttctcatctttttgcgatgggaagtgaagaaggcggttctgagagaaatgttcagcttggaggaagttttattgtaaatggagactgctttcctaaaaatgctcaatatgttgctctagggcatgtacataaaccgcagttagtaccaggtacacataaaatagcaagatattcaggttcgccaatccagtacaataaaaaggagataaacttcaagaaaaaatgttttttagtgaatatagaggcaggaaaagagcctattgtagatgaaattgaatttaaggtatataaacctatagaagtttggaaatgtactggagtagaagaagcgattaagaaatgtgaagaaaataaggacagggactgttgggtttatcttgagatagtaactgataaatatataggcgaagaagaaatgaaggcaatgaaaagtctaaaaaaagatatattagaaattttgcctaaggttagtgtggataatgagattatagacatggcaagctttaaagaaagacctttcgaagagatttttaaagaattttataaaaaagaaagaaaggttgagccagataacgaggttgtggatttattgttatctattataaatggaggtgaggcagaagatgaaacccataagagttag

SEQ ID NO: 15361 - DNA, 915 bp, Clostridium acetobutylicum
atgaatttaaatggtactgaatactactatatcaaaaatgctcaagatgatataataggcttaattgacaaagcagggacacaggttacaagttatacttacgatacctatggaaaagtaatatcaatagatggaagcttaaaagatactgcacacaaaataaatccatatagatatagagaatataggtatgacagcgaaactggattatactacttacaaagcagatattataatgctgagtggggtaggtttgttaatgctgatgttataacggctgtaacaggagatatattatcaactaatatgtatgcatattgtaaaaataattttataaatatgagtgatgttaatggtgatttctcaatggcaaatattggagcaatgattggaacaatgattggaacaatgatggtagatggaattagatcaatgatgtcatcaataacaggcaaaataaacaaagctatagataaacatccgtataaaacaacagtgatacaatcaacagtagatgtaacagcaggatataaatacaataagattagaacatcaagagtttttaaaacggtaagaccagtagaattaacggtatatgaagaattaccatttaacaaagttctaaagtttatgggaaacaaagtaggaatgctatcggcagggcttactgtacgttcactaatattagattatgaaaggaattctggacaaaaggttgtcacggcaatgcttatagatattggtggatttgcagctacatattatgcgggagatttaattggtagagctacgactccattaattgaagtcaatcctcctgctggaattgcagctacagtagttttagttggagcttcatcggttgggataggtatttttacctcaaaggcaaaggaatattttagcgttaattaa

SEQ ID NO: 15362 - DNA, 1164 bp, Clostridium acetobutylicum
atgtcaaaaagctatttaatgaatacttatggaaggtttaatgttacttttgacaagggagagggaacaaagctatatgataaagatggcaatgaatatatagattttgtatctggggtggctgtaaattgtttaggacattgtaatccttcaattgtaaaggctattgaagaacaaagcagtaagctaatgcatgtgtcaaactattactggaatgaaaacgccatggaattaactgaaatattatgcaagaatagtgaatttgataaggtgtttatgtgtaatagtggtacagaggcaattgaagcaggacttaaactggcaagaaaatatgctctcctccatggggatgaaaataaaaaagaaattatatatatggataattcgtttcatggaagaactatgggagcactttcagttacaggacaaccaaaatatcaagaaagctttaaacctttaattggagctgtaaaaagtgttaaatttaatgatttagatgacataaaacaaaaaataagtagcaaaactgcagctgttatagtagagccaattcaaggagaaggtggtataattccagctaaaaaagaatacttaaagcttcttagagatttatgtgatgaaaataatgctcttttaatttttgatgaggttcagtgtggaatggggagagttggaagtctttttgcatatcaaaagtttgaggtagtaccggatatagtttgcatagcaaaggctcttggaggaggatttccaataggagcaatgctggcaaaagagagtgtagcttcttcatttgttccaggggaccacggaaatacatatggaggaaatccacttgcatgtgcggttgctattgcagtgctaaaggaactcgtggataaaaaagttgttgaaataaatgtaaatgagaagagcaaatatctatttgataaattaatgacattaaaagaaaaatataaggttataaatgatgttagaggaatgggacttctaattggagtggaagtagcttgtgatgttaaaaaaataataaataaatgttttgaaagtaaacttctcttaattacggcaggaaaaaatgtagttagatttttaccacctctaaatgttagttttgaagaaatcgataaagctctaggtatatttgaggagagtataaagtag

SEQ ID NO: 15363 - DNA, 996 bp, Clostridium acetobutylicum
atgagtgaaactataagatttgggattgtaggaacgagtagtataacagaaaaatttttagatggatctaatcatgtaaaggacttttctttaacggcagtttattcaagagaagagagtaaggcaagagattttgcaaaaaaatatggagctgagaacatatttactgatttagagaaaatggctaaaagtgatttgatagatgctgtatatattgcatcaccaaatgcaatgcatgcaaagcaagctgaggtatttcttaaaaataaaaagcatgtactttgtgagaaggcctttgcttctaatgtagaagaagtaaataaaatgataagtgtatcaaaggaaaataagatggttttaatggaggctatgaaaacagaatatttgcctggtttttttgctgttaaggagaacctccatagaataggaaaggtaagaaaatattttggaaattactgtcagtattcttctaggtatgataaattcaagcagggcatagtcctaaatgcctttaaacctgaattatctaatggaagtattatggatataggagtttattgtattcatccaatggtatatttgtttggagagccaaataaattaaaggcaaatgctgtgcttttagaatcgggtgtggatggggaaggaagtatattattcaattatgataatatggaagctgtagttatgtattcaaaaataactaattcaagagtaagctcagagattcaaggggaagaaggaaatatagtaatagataacatcaatacctttgaaaaggtaaagatagtatttagaaatggagaagaggaagatttgtccagagtacatatagaagataatatgtgctatgaacttgaggaatttataagattagtaaaagaacaagatactaaaaaagcgctacagagacttaaagtttctaaaagtgtaatggaaattatggatgaggcaagaaagcagataggacttgtgtttccagcagataaaaactaa

SEQ ID NO: 15364 - DNA, 2082 bp, Clostridium acetobutylicum
gtgccaaaagtaagaatttatgaattgtcaaaagaattaggtagatcaagtaaggaacttattaacatacttcatgatgaatttggtatagttgttaaaaatcatatgagtgttatagatgaagaggatgcagaacttataaaggaaatgttatctgaaagtaatgatgaggataaaaaatcagatcttgtagaagaatacgaagatatgatttctgacagtataaaggttagaaaaaacaaaaaagttaagcaaaaggataaagataaggaaaataccgatgaggatgaagaagaagagcaagaattcgatgatgtaattgaaattgaaaatacaataacagtaaaagatttagctgataaattgaaaaaaccaataacagaagtaattaaagagcttatgtttatgggtgtaatggctgcaataaatcaggaaatcgattttgaaacatcatctaaagttgctgctaaatttaaggtggatgttatacaaaaagcagaagaagctgataaaaaggaacttaaaagtgagttcgagaatgagtttgaagaagatgaggatgagggcacttggataaaaagacctccagttgtaactgtaatgggtcatgttgatcatggtaaaacctccctccttgatgctataagaaaatcaagtgtaactgaaacagaagcaggcggaataacacagcatattggagcttatactgtaaaaatgaacgaaggaaaagtaacatttttggatactccaggtcatgaagcttttacagcaatgagagcaagaggtgctgaaataacagatgttgtaatattagttgttgcagcagatgacggaataatgcctcaaactaaagaagcaataaatcactgtaaagctgctaatgtaccaatagttgtagctataaacaaaattgataaacctggtgcaaacatagatagagttaagcaagagcttacagaacatggtttgattcctgaagactggggcggagatactatatgtgttcctgtttcagctaaaacaaagcagggtttagatagcttaattgagatgactatattaactgctgatgttatggatttaaaagcggatcctaaaagacatgcaagaggaacagtaatagaaggaaaacttgacaaaggaagaggccctgttgcatctttaatagttcaaaatggtactttaaaggttggaaattctataatagtaggatcaacttatggaagaataagagctatgtttgatgataaaggtaaaaaaatcaaatccgctggtccatctgtcccggttgagattttaggtctttctgatgttcctgaagctggtgataaatttaacgttgtaaaagatgagaagacagcaagaaacatggctaaaattagagttgaaaaattaagaagtgcaaatttagcctcaaaacataaagtttctcttgaagatttatacagtcaaatacaagagggaaaagttaaagaattgggcataatagtaaaggcagatgttcaaggatctgtagaagctgtaaaacagtcttttgaaaaactttctactgatgcagtaaaggtaagagttattcatggtgctgttggtgcaattacagagacagatgttattttagccagtgcctctaatgccataataataggatttaatgtaagacctgataataatgcatcagctttggctgaaaaagaaaaggtagatataaaaacttatagagtaatttatactgcaattgacgacataaaatcagctatgattggtatgcttgatcctgaatataaggaagaagttataggaaacgctgaagttaggcatatatacaaaatatcaagcattggtactgttgcaggatgctatgtaacttctggaaaaataactagaagtagcagtattagagtaataagagatggtattgtaatacttgaaggagaattggcttcacttaagagatttaaggatgatgctaaggaagtagctcgtggatttgaatgtggtttaactatagataaatttaatgatataaaagaaggagatgtcatagaggcattccaaatggtaaaagttaaacaagagggctaa

SEQ ID NO: 15365 - DNA, 1029 bp, Clostridium acetobutylicum
atgaatcttaatctaacaaaaaatatgaaatatatcttacttttaattctcctatttatagttcttatttttacctttatattttcaatcagcacaggttctttaaaaataaattttggtgaggtatttaacatcctttttaaaattggtgactttaacgacggagattatcaaattgtatggaatatacgttttccaagagcaataggagctctcataggtggctctgcactatctgtatcaggtctccttcttcaagtgttattcaaaaatcctatagtagaaccttacgtacttggaatttcttctggtgcaaccttatttgtagccttagttatgcttggaggcataagtttcggttttgctgcctcctctccttttttagtatttttagctgctttaataggttctactttaattatgtttctagtaatcttgtttgcaaataaggtaaaaagtgtagttaccttacttatcataggaattatggttggatacatatgtagtgctgttacaaatgtcttatcagcctttgcagataaacagcaactgcaattctttaccatgtggacacttggaagtttttctggcttcacatggaaaaatatatatatattattttttataggtataccttctcttttagcagcttttctaatagtaaagcctttaaacgccttcattttaggtgagcaatacgcaaaaagccttggaataaaaataaaattttttagaattatagttataataatatcaagccttcttacagctgttgtaactgccttcgcaggtcctattgcctttataggtcttgctgttcctcacatatcaaggcttatttttaaaacttcaaatacaatatttttaattccaggaactattcttcttggaggaataataacatcaatatgtgatgttatttcaagaactgtattttctccaacagagcttcccatcagtgctgtaacagcatttataggtgctcctattgtaatatttttaatactgaaaagggggactttttcatga

SEQ ID NO: 15366 - DNA, 738 bp, Clostridium acetobutylicum
atgagtttaaacaaaagatatttgggtgcagttattctagctcctctcctaataattttatttttaggaggtatatatcttaaaatatttgtttttgctttatcgatgattggattatatgaatattataaggtatctagggaagctaaccttaaacctatttctattgttggatacttgctttgtatagcttactatgttttaataaactataaacttaattacaagtttgtactttttatgatagtaataggtatatttattatgctttgtgtccctacattggatactaaatataattatatagatatttcagttacaatattaggatttatatatgtagcagttttctttagttttattgccctaacaaatgatttgaagtatggaaattatttgttgtggattatattcatagcatcttggctttgtgatacattagcttattattcaggaagaatttttggaaaaacaaaattatgtcctaaagtaagtcctaaaaagacaattgagggttcgattggtggagttctaggaagtgtaattggatgtactgtttatggttttataatttctaaatatggagttaatatagctatttatcactacataataataggaattttatgcggcgttttttctcaattcggagatcttgcagcatcatcaataaacgaacatgctcaagttaaagattatagtaatttaatacctggtcattggaggtattttggatag

SEQ ID NO: 15367 - DNA, 798 bp, Clostridium acetobutylicum
atgagtatgcaaaaaaaaaccaaggatattcaattgaaaacttctgaggagaatattaaaatatttggatttttagatttgggtgcatttgtagctgcattgtacataaataaaaatatttattttaatcttgtaattttagcagtcacaattttagctaccatttatcttatgggaataaatgataagaaacaatatgaaacagctaaacttgttactaccttggctaaaacgttagagttaagagacaattatacagctgttcattctaaaagcgtagctgaatatgctagatttatagcagaaaagttaaaatattcagaggaagattgtgaaaaagtatttattggtgcacttctgcatgatattgggaaaataggtataagtgatactatattaaataaacccctaaagctgacagaagacgaatacaaaacaatacaagaacatccacaaattggatttagcatactggagttgaatgaagactttaaggaaaacaagatattggatatgattttataccatcatgaaagatatgatggcatgggatatcccagcggtttgaaaggtaatgagattccacaatgtgcctcgatagtagcagtagcagatgcctttgatgcaatgacttcaaacagagtttatagaaaaggtaaggataggagctttgcagtaaaggaaataattaaaaattcgggtacccaatttgatcctcaggttgtggctgcattcatagagtacttatctgaaaatatggatagtgttaagtgtgaagacgaattgctagtaatataa

SEQ ID NO: 15368 - DNA, 948 bp, Clostridium acetobutylicum
atgttggaaatagaaaaacctaaaatagaatgtgttgagtctacagaagatggttcttatggcaggtttgttgtagaacctcttgaaagaggatatggaattaccctgggcaattcattaagaagaatacttctttcatctttaccaggagttgccgctaattcagtgagaattgagggagtacttcatgagttttcaactgttaaaggagtaaaagaagacgttacagaattgatacttaacattaaagctttatgcctcaaaatggaaggtgaagattctaaagtaatatatatagatgcacatggacctggagaggttacaggcgctgatataagaactgatggatctgtagaagttatcaataaggatttacatatagcaactctcgatgaagatggaaagctatatatggaaattgaagttaacagaggcagaggttatgttactcagaataagaataaaagagatgacatgcctataggaacaatagcagttgattcaatatattctccaatcaaaagagtgaatttcactgttgaaaatacaagagttgctcaaataactgattacgacaaactcaccatagaagtatggggaaatggtactataagaccagaagaagcaattagtttggcagcaaagatacttatagagcattttaaattatttatgactcttacagatcatgcagatgatgtggagataatggtagaaaaagaagaagataagaaggaaaaggttcttgagatgactatcgaagaacttgatctttcagttagaagttataattgcttaaagagagcaggaataaacactgttcaagaattaactcaaagatccatggaagatatgatgaaagttagaaaccttggaagaaaatctttagaagaagttgaacagaaacttaaagctttaggattatcattaaagttaaatgatgaatag

SEQ ID NO: 15369 - DNA, 729 bp, Clostridium acetobutylicum
atgcattatagtttagctgtaaagttagtttgcgaaatgcttggtacagcaattttagtactatttggtaacggtgcagttgctaatgtagaattaaaaggaactaaagggtatcgcaatggctggattattattgccattggttatggtgttggtgtaatgcttccagctttaatgtttaataaaattagtggtagtcagacaaatccagctatgacaataggattagcagtaaatgggctttttccgtggtctgaggttataccatatatattggctcagtttgtaggtgctataataggtcaagttattctttactttatataccttccgttttataaacaaacagaggatactaaaagcattcttggtacatgttctactatatcagcatcaggaagtcatataaatggatttgtcacagaattttttggcacattcttattggttttaggtgcaatgtttattcttaattcaactggagtaaaaagtacacctgcagtaggttatgttggtcttggatttcttgtatgctcattagttgcatctttaggtggtccaactggtcctggattaaatccagctagagatttgggccctcgtatagtacattcacttttgccacttaaaaataaaggcaattctgaatggacatatgcctggattcctgttttggcaccaatgtttggaagtattattgctatattcttgtttaataaaatatattaa

SEQ ID NO: 15370 - DNA, 1713 bp, Clostridium acetobutylicum
atgaaaatgtcaaacatgctaatgttaactttaagagagagtccagcagaagcggaaatagaaagtcataaacttatgcttagatctggaatgataagaaaaatggcatccggagtgtataattatatgccactaggattaaaagcattaaagaaggttgagaatataataagagaagagatgaatgctgctggagctcaagaatttctagcatcagctcttttaccatcagagctttggaaggaatcggggagatgggaagtatttggaccagaaatgttcaaacttaaggatagaaatgaaagagaattttgtcttggacctacacatgaagaggtctttacggactttgctagaagtgaaataaagtcatataagcaattacctgtaaatttgtatcaaattcaaacaaagtatagagatgagagaagaccaagatttggtatgatacgttcaagagagtttgttatgaaggatgcttacagctttgataaggataatgaaggattggacgtatcttataataagatgtatgaagcctatactaaaatatttaaaagatgtaatgtaagttgtagtgcagttgccgcagattcaggagctatgggtggatctggttcagctgaattcatggttaagtccgaaataggagaagatgaaatagctttttgtacagaatgtaattatgcagctaatatagagaaggcaccagctgttccagaaaaagctgataaagaagaattaggggaacttaaaaaagttgaaacacctcatgcgaaaaccatagaagagttagtggagttttttggtgtggattccaaaaaatttgttaaaactataatatatagagcagagaataaagttgttgctgtaatggtaagaggagacagagaagtcaatgaaactaaggttaaaaatgcagtaggttcagtagatgttgagcttgcagatgaaaaaacagttaaaaaagcaacaggagctgaggttggatttgcaggaccaataggtttagatgtggattatttacttattgataatgaagtaacatatatgtacaattttattgtaggagctaatgagacaggataccactatgcaaatgcaaattatgatagagatttcaaaggtacagtgggtgatttcagaaatgctgttgagggagaaaagtgtcctaaatgtggcaaaccattaacaatagcaagaggaatagaggttggtcacatatttaagcttggaacaaaatattcagaggctatgaaggcatactttgtagatgaaaatggagaaagtaagccacttataatgggctgctatggtataggagttaatagaactatgtcagcagttgttgaacaacaccatgatgataacggaatagtttggcctttatctgtagcaccatacgaggttatagttgttccagcggtatttaaaagcgaagagcaaatgaaagaagctgaaaagttatataccgagcttaagaaaataggggtagatgcccttttggatgatagaaatgaaagagccggagttaaatttaaagatgcagatttaataggtattccaatgagaataaccgttggaaagaaaatatctgaaggcaaagtagaatttaagtgcagaaacagtgaagaagtagaagttatagatttagataaagttatagctagagttgaagaagagtttgaaaaaaataacttagcgttgaaatag

SEQ ID NO: 15371 - DNA, 630 bp, Clostridium acetobutylicum
atgagtaaagttacacaaatatcacatccacttatattacacaaattagcatttatgagagataaaaaaacaggatctaaagattttagagagatggtagaagaagtagcaatgctaatggcatatgaagtaacaagagaaatgcagcttgaaactgttgaaatagaaactcctatatgtataactaaatgtaaaatgttagcaggaaaaaaggtagctatagttcctatacttagagcaggacttggaatggtaaatggagtattaaaattaatacctgctgctaaggttggacatataggattatatagagatgaaaagacattaaaacctgtagaatacttctgtaaacttcctcaagatatagaggaaagagacataatagtaactgatccaatgcttgcaactggtgggtcagcaatagatgcaataacacttcttaagaaaagaggagcaaaatacataagacttatgtgtcttataggagcaccagaaggtatagcagcagtacaagaagcacatccagatgtagatatatacctcgcatcaatagatgaaaagttagatgaaaatggatatatagttcctggtcttggagatgctggagatagattattcggtacaaaataa

SEQ ID NO: 15372 - DNA, 2646 bp, Clostridium acetobutylicum
atgaaatacatgggattaaatgatataagagaaagctacttgagtttttttgagaaaaaagagcatttaagacttccgagtttttcactcataccgaaaaatgacaagagtcttttgcttataaatgcgggtatggctcctttaaaaccttattttactggacttcaaactccacctaaaacaagagtaacaacatgtcaaaagtgtataagaactggagatatagaaaatataggaaaaacttcaagacatggtacattttttgagatgcttggaaacttttcttttggagattattttaaagaagaagttatttcatgggcgtgggagtatataacagaagtacttaagttccctaaggatagaatatatataacaatatatcttgatgacgatgaagcattcaaaatttggactgaaaaagcaggagttgatcctagtagaatatttaggttcggaaaagaagataatttttgggagcacggctcaggtccttgcggtccatgttctgaaatgcactttgatagaagagaaaagcctgatcttataaaaacaagagaaaaatttattgagcttcaagataaggatgaagtaattgagttttggaacttagttttcactcaatttgataaagatgaagatggaaactacaataagcttaaaaatcctaatattgatacgggtatggggcttgaaagaatagcaactataatgcaaaatacagacagcatatttgaaatagacactataagagaggtgttagatgctgtatgtaaaatatgtaatgtaaaatatggtgagaaccataaaaatgatgtttctcttagaataataacagatcacataagaagtgtaactttcatgataagtgatggtatattaccttctaatgagggaagaggatatgtacttagaagacttcttagaagagcagcaagacatggtaaaactttaggaatagaaaaaacattcttatgcggattgtgtgatgtggttataaaaaattctaaaggtgcttataaagaacttgaggaaaagcaagattatattaagaatgtaattgaaatagaagaaaaaagattcgatgaaacacttgacagcggcatggaaatattaaagaattatatagatgaattgtctcttgaaaacaaaaaagtaatgtccggtgaaaaagcattcagattgtacgatacctacggttttcctgtagaacttactcaagaaatattagaagaaaagggcattgaaattgacatgaatgatttccatagtgaaatggaaaagcagaaaaatagagcaagagatgcaagagaagaatcaaattacatgggtaaagaaataaaattaattgataaattacctgaaagtgttactacaaaatttgtaggatataattctacaagtacagattcaaaggttgaagttttaataaaagatgatgagtttgtttccactataaacgaaggagaaagtggaattgttgtaacagaggagacacctttttatgcagagatgggtggacaaataggagataaaggtattatttttggtaaaaatggagaagctaaagttgttgactgcaagaacaatatatcagggaaaataatacatatagttcaggtagtaaaaggctcaatagaaaagaatgaaaatgttactcttgaagttaactataaaaagagaaaagatatatgtaagaatcatacagccactcatatgcttcaagcagcacttaaaaaggttgtaggaagtcatataaatcaatcaggttcttatgttgataatgaaagattgagatttgattttacacatttcacagctcttactgatgaagaaattttaaaagtagaagctatggttaatgatgaaataatggctgcatatgatgtgaaaactgatataatgtctgttgacgaagcaaagaaaacaggagctatggctttatttgatgaaaagtatggcaatagggtaagagtagtatctgttggagacttcagtagagaattatgtggaggtacccacgtaaataattctggtgaaataggcttatttaagataatatcagagtctggtgtagcagcaggaataagaagaatagaggcaataacaggtaaagaagctgttagatatactgaagaaaatgataatcttataagaaatattgagcaggagcttaaatgttctaagaaggatattttaaataaaataaatcaatatcatagtgaattaaaagaaaaagaaaaggaaataaatatccttaaaggaaagttagcttcaggctttgaagaaaatatactaagttcagtaaaggaagtaagtggagttaagtatgttgcctctgaagtaaaaggaataagtggagataccttgagagaattatgcgataaagtaagaaataaaatagacgatggtatggttctacttgcaagtaaagatggcgaaaaagtacaatttgtagcaatggcttcaaaaaatgcagtaaaaaaaggcgttcactgtggaaaagtaataaaagaggttgcttctatgtgtggaggaaatggaggcggaaggccagatatggctcaagctggaggaaaagatggagaaaaattagaaactgcgttaaaagaagtaggaaatattatggaaaaattagtaaagtag

SEQ ID NO: 15373 - DNA, 1356 bp, Clostridium acetobutylicum
atgccttggtttaaaaaagcaattttttatcacatctatcctcttggtttatgcggagcacctttaagtaatgacttcacttctaaaccaataccaagacttaaggagatagaaaactggataccttatttaaaatcattaggaataactgctttatatcttggacctgtttttgaatccacatctcatggttatgatacagcagattactatacagtagatagaagactcgggacaaatgacactttaaaaaaacttataaataagcttcataaaaatggcatcaaggtagttttagatggtgtattcaatcatgttggaaggaacttcccccaatttatggatttgattataaataagcaaacttccagctttgctacttggttttctggtgttgattttaacagtaaaagtccttataatgatgatttttcctacgatacctggaatggttgttatgatttagtcaaactaaactttaacaataatgaggtgaaaagttttattttaaatgcaataaacttttggataagtgaattcaagatagatggtatccgccttgatgctgctgactgcatagatataaactttctaagagaaatatccaacttctcaaaaagcatatcagatgatttcttccttttaggggaaattatatttggtgattatacacgctttgcaagtaaaaatatattggactctgttaccaactacgagtgttacaagggactctattcaagtcataattcattaaattactttgagatagcttactctttaaatagacaatttggcgatggcggtatatataaaaatattccattatacaattttgttgataatcatgatgttaaccgtattgccagcactttaattgatgcagctaatatttatcctatatatactattttgtttacaatacctggtatcccatcaatttattacggaagtgattttggtataactggtgtaaaacaaaataactctgataagtatttaagacctagactaaaaattaatgaattaaaaaactctaaagaaaacaaacctttgaataattttataaaaaagctttgccatattcgaataaattctgaagcattaacagaaggtttatacaaacaacttttcatttcaaataaactatttgcttttttaagatataccgatagtgaaaaaataatagtagctttaaattgttctaaagaatgttctcaaatagagttctcaaatgatatgaatgctacttctttatttgatcttatagagaaaaaaagcttaaagctagaacctaatggaactataagtataaccttacaggaaaaccaagcaagaatatttaaagtaagtttctaa

SEQ ID NO: 15374 - DNA, 771 bp, Clostridium acetobutylicum
atggaagtcctaagaatagaaaatttaagaaaggtatatggatctaagtttgggggagttaagtatacagcacttaaggatataaatctaaaagtaaataagggagaatttgttggaataatgggaccgtcgggatcaggtaaaactacatttttaaatgtaatatctaccatagacaaacctacagcaggaaatgttattattgacggcaaggatatagtaaagcttagagagcccgggttatcgaaatttagaagagaaaaactcggatttatatttcaggattttaaccttcttgataacatgacaattaaggaaaatatagttttacctttagcattagctaaaacaccatataacgtgatacaaaaaagactagaagatataagcaaaaaactaggtataaatgaaatacttaataagcatacctatgaagtatcgggaggtcaaaagcaaagggcagcagcggcaagagccattataacagaaccgtcacttattttagcagatgaacctacaggcgctcttgattctaaatcatctaaagaacttttaaattctttaggatatttaaatgaaaagaatgaagctacaattttaatggtaacgcatgatgcctttgcagcatcttattgcaagagagtgatattcatcaaggatggaaaattattcaatgagatatataaaggtgatagagatagaaaaggtttttatgaaagcatattgaaagtactctcagttattggaggggaagcaaatgacattatgtaa

SEQ ID NO: 15375 - DNA, 825 bp, Clostridium acetobutylicum
atggaaaattcacaggaattaactccgtggcaaagacttacaatagcgagaatgttagaacgtccaacctctcttgagtatatagatttaatatttgattcatttatggagtttcatggcgacagagcttttggagatgatgctgcaattgttggtggagttgcagaatttaatggaatgccagttactgtaataggtcagcaaaagggaagaaacacaaacgaaaatataaagaggaatttcggaatgcctagtcctgaaggatatagaaaagctttaaggcttatgaaacaagcagaaaagtttaataggcctttaatatgttttgtggatacatcaggagcttattgcggtgtggaagcggaacagagagggcagggagaagctattgctaagaatttaataagcatggcgaacttgaagattccagtaatttctgttgttataggcgaaggtggaagtggaggcgcacttgctatggcagttgctgatgaagtttggatgcttgaaaactcagtgtattcgcttttatcgccagaaggttttgcgagtatattatggaaggattcaagcagagctaaagaggctgcagaggttatgaagataacggcagatgaccttaaaggttatggtataatagataaggttataaaggaaccagatggcggagcacaaaatgatataactatggttgcaaatgccctaagagagaatcttaaaaaagcaatcgaaggactttcaagcactggtattaatgaattactagacaatagatataataagtttaggcaaataggaaagttcatagagaatgaagataactaa

SEQ ID NO: 15376 - DNA, 255 bp, Clostridium acetobutylicum
atgaggttagataaatatttaaaagtttcaaggataataaagagaagaactgttgctaaagaggcttgtgaaagcggaagggtatctataaatggcaaagtagcaaagcctggtacagacgttgaagaagatgatataatagaaataagatatgcaagcaaagtctttaaagcaaaagtagttaacattaccaatcatgctcttaaagaagatgcaaaaaagatgtatgaagtaattagtggtgaggaaatttaa

SEQ ID NO: 15377 - DNA, 858 bp, Clostridium acetobutylicum
atgaaaataaaagatgcacttattaaggcgtactctgttctaaaagaaactaatgatgagttttatatggaagatagtcaaattctactgtcatatgtgcttaaaaaagatagaatatttttaattacaaatagagaatatgagatagaggaaaatagcctaaagcagtattttgattatataaatatgagaaagaaaaaaatgcctattagatatataacggaaaaatgtgagtttatgggacttgattttcatgttgaaaagggtgttttaataccaaggcctgatacggaaattttagtagaagcggttttagaatatatagagcttaataattacaaaaaagtatgtgatgtttgcacaggaagtggggctatagggctttccatagctaaatatgcaaaagatgtagaggtactgtgcagtgatatatctcctgatgcaattagagtcagcaaaataaatcgccaaggtttaaatttagaggacagggtaaaaatagagaatggggacttacttgaaaaacctatagagagaggagaaaagtttgatattgtagtatcaaatccaccatatataagagaggatgaaatcccaaagcttatggatgatgtaaaagactacgagccaataattgcacttgtaggcggagaggatggacttgatttttatagaagaataacttctatgagtaaaaaggttttaaaaccaggtggacttattgcctacgaaataggaagtgacgaagcaaatgaggtctccaacatattagaaaatgaaggatttgtatctattgaaacaagaaaggattttgcaagaatggatagagtagttttggccgtaagaggtggattgtaa

SEQ ID NO: 15378 - DNA, 2169 bp, Clostridium acetobutylicum
atgagacatatttataatattgtaagtatatataagagggatattaaaagcattataaaaaatccaatagcccttttgattataggagggctttgtgtaattccatctctatatgcttgggtaaatatacaagcttgctggaatccctatgaacacaccagcagtattcctgttgctgtagtaaacaacgacaaaggtggttcctttcgcggaaaatacttgaatatgggaaatcaaattgtagataatttaaaaaagaatcataaaataggttgggtatttgtaaacacaagaaatgcaaatatgggtattatcgatggcagttacaccgctatgattgaaattccagaaaatttcactggaagatttacaagtatacttaaaactcccccaaaaaaacctgaaattatatataaggtaaatacaaaactaaaccctgtggcaggaaaaataacaggagtagctaaagataccttgaccaacgaaatcacaactgaatttatagctactgtaaataaagctatattttcttctttaaacaaagtaggcggagaagctgaaaaaaataaaaacaatatactgaaattaaaaaataatataatcgatgtaaataataatatggatcttatactatcgctgctaaacagtataaacaataattctaacaacctaagtatgtttttaacacaattaaaagccactatcccaactataaatagcagcttaagtatgatatctaaaaataacactgacaacaaaaccatgattttaaacactcaaaacaccttaaataattcttttaataacatagctctaaatttaaacaatgctgaagctgcaagctatagaattaaaaatcttactgatgcacttaacacaaatttttcgagtagtaacgcctctataatttactctgacatatctaaaataaacactgagctagataacctaaataactcaatttcatcgataatagaatttctgcaaaatataagcgcaacctcacccaatgagtctttagctaatatgcttgtatcactaaaaaatactcaaggttcaattgcttcacaaaaatctgatataaacaatcttcaaaaacagcttcttagcacaaataacctaaataaagctttagttgcttcaataacaaataggtcttctaccatgaacaaagatctcataaacactaatactagctataatggcagcgttaaagcttctttaaattcaatatcacaaaatttagttaatgtaactaacgacgcctcctctattctaggaactgcacaagatttaaataatggcataaataacttacttcaaacttctatagatgggagcaatctatcttcaaaagtgtctttagatctaaaaaatagacttcttcagtttaaagatataatttcagctttaagcagtaagcttcaggagactaataataacgacttaattcaaattataagcatcctccagagcaatcctgattttatgggaaattttatttccactccctttagtataaaggatgaatccatttacagcataccaaattacggttctggtatggcacctgtatacacagtacttgcaatttgggttggaactttgctccttgtatccttactaaaaacaagagttccggattctcaaggattacatatactaaccttacgtgaaaagcactttggaaaaatgttaacctttataaccctaagcttaatacagtcttttatagtatctcttggtgatatactacttctaaaaatttatactgtaaatcctgctcttttaattgcctttgcactgatgtcaggcttcaccttctgtgtaatagtttttaccttagtatctactttaggcaatataggaaaagcaataagtattatatttttaataatacaaattgcaggcagcggttctacttatccaatacaggttgacccattatttttcagaatccttcaacctatgctaccttttacctatagcgttggtggatttagagaagctatagctggacctttaataagcagcgttatgcttgattttactgccttaatacttatttcagttgtattcatattttttggtttcttctttaaaatacctcttcacaggccaatttcaaaatttgaagacggttttaaaaaatcaggcgttggtgaataa

SEQ ID NO: 15379 - DNA, 540 bp, Clostridium acetobutylicum
atgtatgaattcttagatagaagatacgcacttgctttatatgaagtaggtgaaaaaaatcaaaagttagaggagtatattaatgactttggtgaaatagttcatctgcttaagaatgatgaaaatataaatcaagttgttaatcatccacagataagtacttctgaaaaaaagaaaatatttatggaaatctttaagggaaaaattgatgagaagctacttaatttcttattgcttcttcttgaaaaaaagaggattcatgatgctgaaggaattttaactcaattaaataaaatatccttagaaaagcataataaggttgttgcagaagttagaactgtaataccacttacagacaatgaaaaaacaacccttgcaagcaagctttccgctaagtataataaaataattattttcaaagaaataatagataagactattattggcggagtttatgtaagagttggcgatgatgtaattgatggaactattaagtttaaattagaaagcatgaaaaaagtaatgcttaaagaagaatag

SEQ ID NO: 15380 - DNA, 699 bp, Clostridium acetobutylicum
atggcaggcgaaaaaatacttgttgtagatgatgaggagcatatagtcaagcttataaaatttaaccttgaaaacaatggatataaggttattacggcagcagatggtggtgaagcactagaaaaggcaaagggagaagtgcctcaactggttcttctagatttaatgcttccagttatggatggctacgatgtttgtagagaaatacgaagggatcaatccatttcaaacatgcctgtaattatgataacagcaaagggagaagaattggacaaaatattaggcttggagcttggagcagatgattatataactaaacctttttcagttagagaattagttgcaagggtgaaggcagtattaagaaggactaaggttgattatatagataaaacttttaaatttggtaatattcaaatagattttcaaaggcataatgttaccaaagagggagaaaaggtagagcttacccttaaggaatttgaacttcttcaagtacttataaagaataagggcagagtaatgacaagggattttttacttgataaaatatggggatatgaatacattggagaaacacgtacggtagatgttcacgtgaggcatttaaggcaaaaaattgaagatgatgataaaaatccaaaatatatagaaactataagaggaatagggtatagatttaactatagtggtgattaa

SEQ ID NO: 15381 - DNA, 1557 bp, Clostridium acetobutylicum
atgtcaatttctgagcagtgtgttatagagatagataagtatatagattactttaaaaaaaatactagtcaacctaatattttagcaaaactttttaaaacagattcttcatattatgtttatgatacgggaaccaataaagtattaacctgcggggagtatgagtatagtatattaggaaaaataattgataataagtttgacgagatatcaagaattaatgatgatgcggataaatccggattttatgaagccttagaaaatgtaaggcaggcaatagaaaaggaggacatactaaggggtggtaaagagtggaagtttgtatcaaaaggtcatttcgaagaattagataaaaaacttaattatgaattagatcagattactcttgagcttactgaaaaatgtaatttacgatgtagatattgcatatataatgaatcatacgaacataagaggaattttggaaataaagatatgcctattgaaatagctgaaaaggctattgattatgctaatttacatagtggaaaggaaaaaggagttggagtaactttttatggcggagagcctttggtgaattttaaattattaaaacattctattgaatattcaagaaaagtaataaaggataagaaattaaccttttctctgacaagtaatctaacattaatgacacctgaaatagctacttatttagcttctattgaaaatttaactatattatgtagtatagacggaccagaagaaattcacgacagttatagaaaagatataaatggtaatggaacatttaaaagggctattagaggattgaaatatttaatagaagcatttggggataaggctaataaagcagttatgatgaatatggtatttactccaccatattctatagaaaaagtaaacaaaatagaaacttttataaatagcttagattggcttccaaagggtttacgtatatcaatgacttatccttcaacaggaagcgtagatgatactccaccaaaggggtgtgaaaaaaattatggaatggagctaattcagtggtctgaaagtaagtataaaagtgagcttaaaagtgatggaaaaatagatatgtttaatgaggagtttgttgtacatcctattctaagaatacatggtagaagaataagtgctaaatcagaatctgggtatccagtaaatggttgttgtattccaggaagtagaaaattatatgtaactgtagatggtaattttcaaatttgtgaaagaataaatggttcccctattataggaaatgtatttaatggtatagatgaaaataaaataaaaaatgaagtaatagatgaatttataaataaatcaattaaagattgttctaggtgttgggcagctcgtttatgtaatgtatgttattcacattgttatacagatggaaagcttgatatgaaagagaagaaaagatattgtattaggtcgcgtgaaagggcattaagaagtttggttttttatcataaatgtgctgaaataaatccagaaaaacttaagtatttaaataaaatagaggtttcttaa

SEQ ID NO: 15382 - DNA, 1437 bp, Clostridium acetobutylicum
atggaaatacttgatatgacagtagaacagcttagaaatgcaattttagataaacatttaaaatcagaagatatagtaaaggcttattttgataatataaaaagaaatgaaccagaaataaatgcatacataacactatgtgaggattatgcacttaaagaagctaaagatgtggataaaaagattgcaaatggggataaggttggaagacttgcaggaatacctattgcaataaaggataatatatgcacagatgggataaaaactacatgtgcatcaaagatgctatatgattttgttcctccatatgatgctacggtaataaaaaaattaaaagctgaggacgcaataataataggaaaagtaaatatggatgagttcgccatgggatcttcaactgaaaactcagcttttaaaattactaaaaatccaagagatataactagggttccaggaggttcatctggtggctccgctgccgttgttgcagctaaaatggctcctatttcattaggttcggacacaggaggttcaataagacagccagcagctttttgcggagttgtaggacttaagccaacttatggattagtatcaagatttggattaattgcctttgcttcttcacttgatcaaataggacctttgggaaaaacagtaaaagattgtgcggaattattagaagtaatctcgggagaagatgaattagataacacaagttctaaaaaacatgaaaaagaagattatcttgaaggaatagatgatggtattaaaggtatgaaaatagggatgccaaaggaattcttaaatgatggtttagatccagagataagaaaatgtatagatgatacaatagagaagcttaaaagtcttggggctgaggtttgcgaaatgagccttccaataactgaagagggactttcggcttactatattatttcgtcagcagaggctagttcaaacttagctagatttgatggaataaggtacggatataggccagatgatttcgaagatgtatatgatcttatggaaacatcaagatcagaagcctttggggatgaggtaaaaaggagaataatgcttggaacttacgcactttcatcgggatattatgatgcctattataaaagagcactcaagcttaaaaagaagataaaaaatgaatttaaagaagcctttgaaaactatgatttaattttaagcccagtttcacctgtactaccatttaaaataggggagaaaaaagcagaccctttacaaatgtatctggcagatatatacacagttaacataaaccttgctggaatacctgcaatatcgctaccatgttcagttagtaaagaggggcttcctataggtcttcaactgttaggacctcattttggagagaagaaaatatttagagcggcaagagcacttgaaaaggagagataa

SEQ ID NO: 15383 - DNA, 1326 bp, Clostridium acetobutylicum
atgaataatacgagaaaaattgttcttgatgttttaaataaagttctttctcatgatggattttcaaatatagtattaaataaggcattaaaaggcgaggaaatatcatctaaagataaaggtcttgtaacagaaatagtatatggtactataaaatataaatatagtattgatattataataagtaagtttgtaaagacaaaaataaataaaatagataaaagagttcttaatgttttaaggatgtctatatatcaaatcaggtatcttgataaaattccagattttgctgctgtaaatgaagcagtgaatatcactaaaaaatacatatccttaaaatcatctaaatttgtaaatgctgttcttagaaattatcttagaaatcctaacattgccttttataataaagataattctgtagagaagctttgctttaattactcttttgaaccgtggatggtaaagttttttttaaagcagtataagaataaagcagaagaaattctaaaaggacttaatgaaaatccttctattactataagagtgaataggttaaaaacatcacataaagaattatggaatgaacttgaaaagcttgattataatattgaagaagggtacattttaaaagatgccataaggattaaaaaaggccacagcatcgaaaataatcctctatttgtcaggggagagtttactgttcaagatgaaagtgctatgttagtatcagagtgcatggatattaaagaaaatcttgtaatatttgatatgtgcagtgctcctggaggaaaaactacacatatgggagaattgcttaaaaatactggtacaatatatgcttttgatttacatgaaagtaagataaaattaataaatgaaaatgctaagaggctaggagtagaaaatataaatgcttcagttttagatgccagttcttatcatgatgattttgtaaataaggctgataggatattagtagatgcaccctgctctggtcttggcataataagaaaaaaacctgagataaagtggaataaaaatattaaagacttaaaggaactctctgatattcaaaagaatatacttcaaaacgcttcactttacttaaagaaggaaggaatacttctttactcaacatgtaccctaaataaggatgaaaatgaaaagagtataattcaatttttgaagaacaatcctaattttaaagtagaacctatagaatttggagaatttccaaacttgatttattctccttatggagtgactatactcccaaatgaatatatggatggattttttatgtgtaagcttaaaaaaactaggtag

SEQ ID NO: 15384 - DNA, 495 bp, Clostridium acetobutylicum
atgtcagtttcatttttaagaatagatgacagaatgatacacggacaaacatgtacaaggtgggctttagagtatccatgtgatggtataatagctgttaatgatgcggcagctaataatcctgtattaaaagcagcttacaaaagtgctagtggcaaaaaaacatttgtatggacatatgaacattggaaattaaaatgcgatacagttttgaaaagtagtactagatattttgtaattacaaaagaacctattattatgtctaagattttggtggatgataaatttaatcctggtattaaagaggttattgtaggaccatgcaatgataggccgggaacagtaaaattgggaaataatcaatctataaatcaaaaggaagcagaagcttttgaacgtattatgcaagccggctataatgtggaatttgctcttcttaaagaagaagcaataggcaattggaaaaagtttagagggcaatttggatttaaatag

SEQ ID NO: 15385 - DNA, 1146 bp, Clostridium acetobutylicum
atgaaagctataattaacggaaaaataattaccgaagatagcatacttgaaaataaagttttactatttgatgaaaaaataatagatattgtagatgaaaaaaaccttgataggaaaacaacttatgtaatagatgcagaaggcaactacgtttctcctggttttatagatgttcatatacatggtttcagtggtgcagatactatggatggaaccctcgatgctcttaaaaccataagtagagatataacaaaaaatggtgttacatctttcctaccaactaccatgacaatggacagacaaaaaatttatactgccttagatactataagagaagcgagtacaaagtgcttaggtggtgctaatattctaggtgcccatcttgaaggtccttttataagcgaaaaatttaagggtgcgcaagctaaaactcacatattaaagcctgattatgattttattaaggactatatagatattataaagataataactttagcacctgaagaggatgaaaatctcgaattcataaaaactgttaaaaagaattcagatatagttttatcaataggtcactcaaatgcctcctatgacgaagctgtaaatgcaattaaaaatggaataaatcatgttactcatatgtttaacgcaatgacacctttaactcacagaaatttaggcgtaataggcgctatatttaacaataatattccatctgaaataatagcagataaaattcatcttcatcctgatatatacaagattcttataaaaacaatcggtactaacaatataaccctaataactgattgtatgagagcgggaggtttaggtgatggagtttcagaacttggcggacagaaagtcatagttaaagatgattctgcaagacttgagaacggaactttagccggaagtatattaactttaaataaagccataaaaaatgtatatgaaaatacagatttaaaacttaacgaagcagtaaaacttgccactataaatccagcaaaaaatataaatgtatttgataaaaagggaagtttaaataatggtaaggattcagatataactatatttaatgatgcttttgaaattaaacttacaatcataggaggagatataattgaaaatagtaactgttaa

SEQ ID NO: 15386 - DNA, 522 bp, Clostridium acetobutylicum
atggtaatttcaattggttgtgatcatatagttcctgatataaaaatgaagatttcggagtatttaaaatcaaaaggacatacagttatagataatggaacctacgattttgtaagaacgcattaccctatattcggtaaagcagcagcagaaaaggttgcatcaggtgaggctgatttaggagttattttgtgtggaactggagttggaatatcaaattctgcaaataaggtaaagggtataagagcggcattagtaagagatgtaggaactgcaagatatgcaaaggaatatttaaatgcaaatgttatagcagttggtggaagaataacaggtataggtcttattgaaaatataatagatgtattcttggaagcaaagtacaagcctactaaggaaaatcaagagataataaaaggaatagatgagcttatagaaaatgataaaggtcaatttggaaacgaacatttctttgatgaatttatcgaaaaatgggacaacggtggttatccaaaggaataa

SEQ ID NO: 15387 - DNA, 1452 bp, Clostridium acetobutylicum
ttgattaaagtagtggggcttgggcctggctcgaaaaatgcactgaccctcggaacacttgaggcagttaaaaattcacaaaatattttctttaggactaaaaagcatccagtggtagagtattttgatgaaattggtataaagtacagtacatatgatgataagtacgaaacaggcgaaagctttgatgaggtatatgactttatagcccgggatttggttagtaaggctaaggagcttaaagatatagtgtatgctgtgccaggtcatcctcttgttgcagagaaatcagtgcagatattaatagaattatgtgaaaaagaaaatataaaagttgatatagttccagctgtaagctttatagatgccttgatggaatcgcttaagattgatccggtgaaaggtcttaaaatagttgatgcctttgatattaaaaatcaaattttggataagaggcttggaattgtcattactcaagtatataatagttttatagcttctgatgtaaagctagctcttttggagtattataaagacgatacggagatttatttcgtgagagcagctggaatcgaaaatgaagagagcgttagaaaaatacctctatatgaattggatagacaaagtgatatagattatctaacatcagtgtatgttccttgtgatattaataacaataaggatttttacgatttgttaaatataatggaaatacttagaggagaaaatggttgtccgtgggatagggaacagagccatgatacaataaagagggcgcttatagaggaatgctatgaggctgttgaggcaattgaaaaaaacgatgatgatatgatggtagaagagttaggtgatgtattatttcaggtggtttttcatgccaagataggtaaagatgaagggtactttaacataaatgatgtgatttcagggatttgtaacaagatgatagaaagacatccacatgtttttaaaaatgagcaaataaaaaattctactgaagttttacaaaagtgggacgaaataaaaagaaaacaacaggatttaaattcttatactgaagaaatgaaacacatacccaaaattttaccagctcttataagggctgaaaaagttcaaaaaaaggcttcaaaagtaggatttgattttcgtaatgttgaagaggcgctagataaagttttagaggaaactcgcgaagtaaaagatgtatataaagggataataagggatagaatagcagaagaagttggagatttaattttttctgtagtaaatattgctagactccttgacattgatagtgagtttgcattaaattatactatagacaaatttattaaacgtttttattacatagagaaagcagccaaggataaaaatcttaaaattgagagcatgtctttggaggaaatgaatgctttatgggatgaagcaaaactaaaaattcaataa

SEQ ID NO: 15388 - DNA, 480 bp, Clostridium acetobutylicum
atgaatataacacttataactgttggaaaacttaaagaaaagtatttaaaggatgcagtaaatgaatatgcaaagaggcttcaaaagtattgcaaactaaacataattgagcttcaagacgaaaaaactccagagaaagcatccctaaaggaagaaaagcttattaaagaaaaagagggggagaaaatactttcttctataaaagataactcatatgtagtttcaatggatttaaaaggaaagatgttttcttcagaagagttctctgcttttattgatgacttaggagtaagaggaaatagcagtattgattttgttataggaggttctcttgggctttcagatgcagttttagctagagctaattataagctgtgtttttcaaagatgacttttccacatcagctttttagggttatgcttttggagcaggtttatagagcttttaggattagtaggggtgaaccgtaccataagtaa

SEQ ID NO: 15389 - DNA, 1116 bp, Clostridium acetobutylicum
atgtcaaaaccaaaactgcttcaaaaggttgaagttgattttgtgctttttgcaactgtgcttttacttgtggcgataggagtaattatgatttatagcgctagttcatacagtgcgctcaacagttcaatgtataattatgatgatatgttctttttgaaaaagcaaggtgtctgggctattgggagtataataatactcttaataatagaaaaaatagactatcatttacttaagaaagtaacatcaaaattggttgtagttaccgtaattctccttctagtagttttagcttttccacctataaatggagcatatagatggataagaattggacctttcggaaatcttcaaccatctgagatagcaaaatatgttatagttcttgtacttgcaaaggccattgagaaaaatggtgataagattaaaaaattcattcctaattttgtagcttatcttttaatcgcaatgttttttgctggacttgtttatattgaaaaaaatcttagtatagcaactgtaataatggtagttagtttaatagtaatgtttgtcggtggagctaaattaagacatatagtttctatatttgtagcaatgatacctgcaggattatttttcataacagcagagagctatagatataaaagatttatgacatttagaaatccttggaaggattctcaaggtgttggatatcagctttgtcaatctttgttggccctaggatctggaggtttaaagggacttggctttggacagtcaaggcaaaagtgttattatatacctgaaccttacaatgattttatattctctataataggagaggaattaggccttataggatgtattttcattataatattatttattgtgttaatacaaagaggaattaagatagctatgaatgcaaaagatacatatggtatgcttttggcggttggaataacatcagtaatagcagtacaggcaataataaatatagcagttgtaacgggttctatgcctgtaacaggtgtaccacttccgtttataagttatggaggatcctcactgctttttaatcttatagctatggggatattacttaatatttcatctcaaggaaataagtaa

SEQ ID NO: 15390 - DNA, 1035 bp, Clostridium acetobutylicum
atgcacgagattctaaaattgcagcaaaaaatcgttcctgagcttatggatttgcttgaaaagagatatgacattttaagaacaattaaatataaccagcctataggaagaagaatacttgcaaataaaataggtataggtgaaagagttgttaggacagaaataaactttttgaaaaagcaaaatctcataaatataagcaatccaggaatgtcagttacaaaagacggagaagaaataattgataaacttaaaaatttcataagggaatttaaaggattaacagatattgaggaattcataagaataaacctcaatataaagaaagttataatagtgccaggagatatcgatgaagatagtacagttatgaatgaaattggaagaacagctgctaaatttatacaaagcataattctagacggagatattgtagctattactggtggtactaccatgaaaactgttgttgataattatagttattcacctagatatcagaacaccgttgttgttccagcaaggggtggtatggagagaaatcttcaaactgaagctaatactttagctgccaattttgccgataaattgggtgctagctataaattgatacatgttccagataatttaagtaatgaggctttaagtacaataatcaatgaaaaaagcattaagaacgcaattgatactatacgtaaagctgatataattatttatggagttggaagagctgatgaaatgagcaagaggcgtgggcttagcgaagatgaaatatcccacatactcggaagtggttctgttgctgaagcttttggatatttttttgataaagaaggaaatgttgtatatcacactccatcactgggacttaaaacagaagatattaaaaaagccaaaaatattatagctgttgcaggtagcaagcttaaagcggaagctattgtggcaacgcaaataaatggcagaggaaatatccttataacagatgagggaaccgctaaggaaatagtgaaaatattaaaaggcactaaataa

SEQ ID NO: 15391 - DNA, 750 bp, Clostridium acetobutylicum
atggaaaagttattatccggtaaggttgctgtagttacaggtgcaggaagaggacttggaagagcaatagcattgaaattagcagctgaaggagctaaccttgttgtaaattatagaagtagtgaagctgaaactcaaaagcttataaaggaaattgaagagttaggttcaaaggctgtagcagtaaaagcagatataagtaaatacgatgaagcagaaactattataaaaaaggctttggatgaatatggaactgttgatatattagttaacaatgcaggaataacaaaggataaccttttgttaagaatgaaggaagaagattttgatagtgtaattaatgtaaacctaaaaggagcatttaactgtataaagcatacaagtcgtgtgatgcttaagaaaaaaagtggtaaaataataaatatatcatctgttataggattaataggaaatgcaggtcaagtaaattatgctgctgcaaaggcaggaattataggtatgacaaaatcagtagctaaagaacttgcaagtagaggaattacagttaatgctgtagcccctggaatcataaaaagcgatatgacagatgcacttacagataagcaaagagaaagtatagtggcagcagtaccacttaataaagtaggagaggcagaagatgttgctaatcttgttctatttttagcttcagatctttcttcttatataacaggtcaagttataaatgtagatggcggaatggtaatgtaa

SEQ ID NO: 15392 - DNA, 396 bp, Clostridium acetobutylicum
atggctgtacagaaaaataagaaaactagaagaagaaaagagaaaaaaaatatagagcacggttgtgcacatattaaatcaacttttaacaattctatagttactataactgatgttaatggaaatgctttatcatggtcaagtgcaggtggattaggatttaaaggatcaagaaaaagcactccttttgctgctcaaatggctgctgaaacagctgctaaaacagcaatggaacacggacttaagagtgttgatgtgtttgtaaaaggaccaggatcaggaagagaagctgcaataagatcattacaggctgcaggattagaggttacattaataaaagatgttactccaataccacacaatggctgcagaccaccaaaaagaagaagagtttaa

SEQ ID NO: 15393 - DNA, 3549 bp, Clostridium acetobutylicum
ttggaattaaataaatttgatgcattgcaaataggattggcttcacctgaaaagataagagagtggtccagaggggaagtaaaaaaaccagaaactataaactataggacattaaaacctgaaaaagacggtctgttctgtgaaagaatatttggaccaataaaggattgggaatgtcactgcggaaaatataaaagagttagatataagggtatagtttgcgatcgatgtggagtagaagtaactaaatcaaaggttagacgtgagagaatggggcatatagaactggcagccccagtatctcatatatggtactttaaaggtataccatcacgtatgggacttatacttgatatgtctccaagagctttggagaaagtattgtattttgcatcttatcttgttttagatcctaaagaaactcctttacttaaaaagcagcttttaaatgagaaagagtatagagaagcagctgataagtatggcgaagaatcatttgaagctggaatgggtgcagagtcaattaagaagttacttcaagaaatagacttgaatcaattatcagaagaacttaaggaaaacttgaaaacaagtacaggacaaaaaaaggtaagaattataagaagacttgaagtagttgagtcattcagaaaatccactaataagccagagtggatgataatggatgtaatacctgtaatacctcctgacttaagacctatggttcaattggatggtggaagatttgctacttctgatttaaatgatttatatagaagagttataaatagaaataatagattgaaaaaattattagatcttggagcaccagatataatagtaagaaatgaaaaaagaatgcttcaagaagctgttgatgctcttatagataatggtagaagaggaagacctgtaacaggacctggaaatagaccattaaaatcattatctgacatgcttaagggtaagcaaggaaggtttagacaaaacttacttggaaaacgtgttgactattcaggacgttctgttatagttgttggaccagatttaaaaatgtatcagtgtggacttccaaaagagatggcacttgaattatttaagccttttgtaatgaaaaaacttgttgaaacaggagctgcacataatataaagagtgcaaagagaatggttgaaagagttcagaatcaagtgtgggatgtacttgaagaagttatttctgatcatccagtaatgttaaaccgtgcccctacactacatagacttggaattcaagcattccaacctatattagtagaaggaagggcaataaaacttcatccacttgcatgtacagcatataacgcagattttgatggagaccagatggctgttcacgtaccgctatcggttgaagctcaagcagagtcaagatttcttatgcttgcagcacataatatattaaagccttcagatggtaagccagtttgcgtacctactcaggatatggtacttggatcatactaccttacaatagataaggatggagttaagggtgaaggaaaagcctttactaatgttgatgaagcactaatggcatatcaacttggagagattgatatacatgctaaaataaaagtaagattagaaaaagaaatagatggaaaaatggtaagtggaataatagaaactaccattggaaaacttattttcaacgaatctatacctcaagatttaggatttatagatagaagtattgccggaaatgaattacttcttgaaatcaacttccttgttggtaagaagaatttaggtggaataatagataaatgctatagaaagcatggacctactaaaactagtattatgcttgataagataaaagcaaaaggatatcattattcaacaataagtgctataacagtttcaacttctgatatgactgtaccacctaataaaggagagctcatgtctgaggcagaaacagcagttgaaaaaatagaaaagatgtatagaagaggattcatatccgatgatgaaagatatgaaagagtaatatccacatggactaaaacaactgaaaaagttgcagatgcccttatggataatcttgacagatttaatcctatcttcatgatggctgattctggagccagaggttcaaagagtcagattaaacagcttgctggaatgagaggacttatggcaaatccttctggtaagataatagagcttcctataaaagcttccttcagagaaggtctcgacgtattagagtactttatctcaacacatggagctagaaaaggtaatgcggatactgctcttaaaacagccgattcaggataccttacaagaagacttgttgatgtaagccaagacgttatagtaagaaatgaagattgtggagcaacagagggttttgaagtttctgaaataaaagaaggaaacgaagtaattgaaagcttatctgaaagattaataggaagatatacatcagaagatataatagatcctacaagtaaagaagttcttgtaaagcaaaatgaatatatagatgaagataaggctataagaatagaaaaagttggagttaagaaagtaaaaataagatctgtatttacatgtaattgtaaatatggagtttgcgcaaaatgttatggaatggatatggcaactgctgaaaagataagcatgggagaagcggttggtatagtagcagcacagtcaattggagagcctggtacacagcttacaatgagaacattccatacaggtggagttgcaggatcagatataactcaaggtcttccaagagttgaggaattgtttgaggcaagaaaacctaagggacttgcaattgtaagtgaagtatctggtacagtaagaatagaagagactaagaaaaagagaatagtatttatagctactgaaagtggagaagaagtaagttatgatataccatttggttctagtctaaaagttaaaaatggtgagactataggtgctggagatgaaatcacagagggttctgtaaatcctcatgatattatcagaataaagggagtaaatgctgttaaaaattacttgctttctgaggttcagaaggtgtatagactacagggtgttgatataaacgataagcatcttgaagttgtaattaggcagatgacgagaaaagttaaagtagaggactcaggtgatactgaattacttccaggaactatgattgatatatttgattttagggatgaaaacaaaaaagtagaagagaatggtggaagacctgctcaagccagagtatcattgcttggtataacaaaagcagcactagctactgattcgttcttatcagcagcatcattccaagaaactacaagagttttaacagatgcagcaataaaaggaaaatcagatcctcttgttggattaaaggaaaatgtaactataggaaagctaattccagcaggaacaggaatgaatagatacaagaacatagaaatagatccattggttactgaaacaaacgctgatgatgaaaattttatagcagaagataaaattgaaggttaa

SEQ ID NO: 15394 - DNA, 909 bp, Clostridium acetobutylicum
atgaattcacatttggaagaccttactacagaaaaagtaaatgatgacactgtaaacattgatgttatgaatacagaagatatgcttaaagctataaataatgaggatataaaggtggcctatgcggttcaaaaggaaattcacaatatagtcaaagctgtagatattgtaagtgaaaaattaaagaataatggaagacttttttatattggagcaggcacaagtgggaggcttggggtattagatgcatcagaatgtccaccaacctatggtactaatcctgaattagtgcaaggtattatagccggaggaaatgaggcaattcttaaagctgttgagggtgctgaagatgatgaggacatgggaagaagtattataaaagaaagaaatatgacttcaaaggatgttgtaataggaataacggcgagtggtagaactccttttgtaattggtgctatgaaagaagcgagaaagaatgaaattatagcaataggaatcagcaataataagaattctttaataaataaaaatgtggatattaagataacacctattgtgggaccagaggtaataatgggttctactagaatgaaggcgggaacagcacaaaagcttgttcttaatatgataactactgcagtaatgataaagcttggaaaagtgtatggaaatcttatgattgaccttagtctgagtaataaaaaactaattgatagagcagtcagaataatagaacatgcaacaaaggtagaaaaagaaaaggctatggagtatttaaagagagcgaaccttaagcctaaggttgcaatagtaatgataaagacaaatacaaagagctatgaggcagaaagattgttaaatatggcagatgggtttgtaacaaaggctataaaattgggttctaaataa

SEQ ID NO: 15395 - DNA, 999 bp, Clostridium acetobutylicum
atggggggagtaacattcataggaggaggaagctttggtacagcacttgcaataatgcttgctaaaaaaggtcataatgttgtgatttgggatagaaataaagaaattcttgaagatataaatacattaagaactaatacaagatatcttccaaacaacataataccctgctgcgttaaagcagtagatgatattgagaaggcagctaaggaaagcaaatatattgttcttgctgtcccatcttttgctataagggaagtatgcaggaaaataaagggctttttaagagaagaccaaataattataagtattgcaaaaggcatggaagaagagaccaagaagaggctgtctgaagtagttaaagaagaactttataaaaatcctgttgtagtactttctggtcctagtcatgcagaagaagttgcaaatgatattccaactacagtagtggttacttccacagatatgaaatatgcagaagaagttcaagatgtttttatgactaacagttttagggtgtacacaaatagtgatattgtaggcgttgaaataggaggagcagttaaaaatataattgctctagcatctggaataggtgatggaataggttatggtgacaacacaaaagcggcgcttatgacaagaggtatgagtgaaataatgagaataggcgtaaagcttggaggtaagccagaaactttttttggacttacaggcatgggtgaccttatagttacatgtactagtatgcacagtagaaatagaaaggctggtatactaataggtagggggatgtcatgtagggaagcatgtgataaaataggaatggtagtagaaggcgttaaagcgtgtcacaccttttatgaattaaaagaatccttaggtgtatctatgccaattaccacttcactttataaggttctatttgagaatggagatcctaaaaaagaagtgtatgagcttatggcaagagataaaaagaacgagtactatttttaa

SEQ ID NO: 15396 - DNA, 873 bp, Clostridium acetobutylicum
ttgctatttaatattttaactggagagtataatatagtcataataaaatttttacagcaattctctaatccctttttagataaaattgcccaagcggttaccatgacagcagaagaatattttctagttggatttataggaataatatatttatgtataaataagaggcttggatatataatggcattaacaatcttatttagcagtacaataaattattatgtcaagtgtatttttaagataaaaagacctataggaacccaaggtgtgaggtctcttagacttcaaacagcagatggatattcttttccaagtggacatacccagggggcagctgtattttggggatgtttgatcaaaaatataagaaatagatatatagatatgcttggttatgtaatgatatttttagtcgctatttcaagaatttatctcggagttcacagaccaatagatgttataggtggatttgtatttggtattttgtgtgtaggaatttttaatagagtatttagattaaatgtatataagaaaaacttacttatatttattttagtgattcttccaatgcttacaattaccatatatataggagattttaaattatatgaagaattggggtctattcttgggctcataagtggtcataatattcaggagaaatacataaagtttaatcctaaaactaatataagaaacaatttaataaaaattattatagcagtcttaggaattttaatcttgaagaatattttagattttatttttcctcatactagattaatttcttttataacttatttttgtattttgttttggattactaccggtaacctatggattataaagaaaataggattgaatggagtttaa

SEQ ID NO: 15397 - DNA, 1467 bp, Clostridium acetobutylicum
ttgggtgtaacaaataagctattagcagcatgtcaaaaattaggaaagtcattaatgactcctatcgccgttttacctgctgcaggattacttttaagattagggcagcctgatcttcttaacatttcatggatgatggctgctggaaacggaattttcaacaacttagcaatgatatttgcaattggaattgcagtgggttttgctgaagaaaataatggtgttgcaggactatctgcagcagttggatatttcgttttaacaaatgtcgctacatcatttaacaagcacattgatatgggagtacttggcggtataatagtaggtattttagctggtaatctttacaataaatacaagagtactagacttccagatttcttgggcttcttcggtggaagacgtcttgttccaatactaacatcactatgttctctagtattaggactaatttccggattagtttggcctgctattcaaaatgttataaacgcttttggaaacagcgtatcacatgcaggcgttgttggttcttttatttatggacttttaaacagattacttataccaattggacttcaccatgttttgaatacattattctggtttcaatttggaaccttcaaatcagcttcaggaaaaatagtaactggagatttacatagattctttgcattagataaaactgctggaacatacatgactggattctttcctattatgatgtttgcacttccagctgcatgtttagcaatgatttcagctgctaaaaaagaaaatagaaaaaaggtttctggtatgcttcttggaatagcttttactgcttttcttacaggtgtaactgaaccaattgagtttctatttatgttcttagcaccagttctatatgttgtacatgctgttcttacaggactttctatggcaataacctcagcacttggaataaaatcaggatttaccttctccgctggatttgtagattatataatgaattttaatatatccacaaaaccaatattacttatagtgattggtatattatacgcaataatctattacttcttattcttatttacaataaaaaaattcaatctaccaactcctggtagaatggatgacttagatgacttagatgatttagatgatttagatgatttagatgatttagatgaagaacctgaaaacactccaaaaattaagtcttcaccttcaaagaattcaactcttgaagaaaaggccgttggaatattagaagctataggtaataaaaataacattcaatcattagatgcatgcgttactagaataagacttacggtaaaagacggaagcaaggttgatgaacctaaattgaaaaaattaggagctacaggaattatgaagctagatgacaagaactttcaaatagttgttggaactacagctgatataattgcaactcacattaaggaaattattaaaaaataa

SEQ ID NO: 15398 - DNA, 561 bp, Clostridium acetobutylicum
atgtttaagtcaataaggtatgatataaatagagttttgcagaatgatcctgctgcgaggaacggacttgaagtttttttgttgtatccatgtatacatgcacttatttggtatagaatagcccacgttttttataaacataagatgttttttattgcaagactattatcacaaattgtaagagcttttacaggaatagagattcatccaggagcgactataggaaaaggactttttattgatcatggtatgggagttgtaataggagaaacagctgaaataggtgataatgttgttatgtatcatggttctaccttagggggaactggaaaggaaactggcaagagacatccaactgttggaaataatgtgtttataggttcaggtgcaaaggtgttaggaccaataaaacttggtgatggatgtaagataggtgctaatgctgttgttcttaaagatgtaccttccaatagtacagctgtaggtattccagcaaaagtaattttgcccagtagtaaaaaagaaaaagtaattgattttaatgattattgcaataaataa

SEQ ID NO: 15399 - DNA, 261 bp, Clostridium acetobutylicum
atggtaactaaaagcgttgttgttaaaagttcaactggtttacatgctagaccagcaactttacttgtaaaaaaagcatcaggtttcaaatcagatgtaactatggaattcaatggtaaaaaagctaatgcaaaaagtcttataggtgttttatcattaggagtttcaaaagatagtaatattaagttaatcgtttccggtgatgatgaagctttagcagctgaggaaatagttaaattaatcgaatctttagatgagtaa

SEQ ID NO: 15400 - DNA, 648 bp, Clostridium acetobutylicum
atggacaaaaataaaacaattaggattgcacttacaaagggaaggcttgagaaggccgctgtggagatttttgaaaatataggacttgattgtagtgaacttaaggataaaggcagaaaacttatattccatgattttaagaatagtatagattttgttcttgtaaaggcacctgatgtgttaacttatgttgagcatggagcagctgacataggaatagttggaaaagacactcttcttgaaatgaaaaaggatttttatgaggttttggatttaaaggttggaaagtgtaaattttctttggcgtctatttcaagttttaaattaaatgagggatttaacagaatgaagatagcaacaaagtatcccaatgtgacaagagaatatttcagagaaaagggaatagatgttgaaataataaagatagaaggttctgttgaacttgcaccaatacttaatctagcggatgcaattgtagatatagttgagacaggaacaacacttaaagaaaatggtcttgtaatttttgatgatatatgcgatataagtgcaagaatgatagtaaatagggcaagtatgaagcttaataaggataggataacggatataatacaaaaagtaaaaaattatgttgagagggagagttag

SEQ ID NO: 15401 - DNA, 654 bp, Clostridium acetobutylicum
ttgagattaaatatagcaatagatggacctgccggtgcaggaaaaagcactatagctaagctggttgctaaaaagtttaggcttatgtatattaatacaggtgctatgtacagagcagttactttaatggctatgagacaaaatataagagcaaatgatgtaaaaaagttatgtgatcttattgaatcgctttctatgcattttgaaaatgacaagttaatagttaatggtgaagatgtgagtgaagaaatactcttaccaaaaactagccaaaatgtgtcagattatgcttctgtactcgaagtaagggaaaaacttgtatatttacaaaaaaagatggctggaagatatgatgttgttatggatggaagggatataggaacagttgttttaaacgacgcaccttttaaattttatttaacagctacacctgaagaaagagcaaaaagaagatacaaggaattgtcagcaaagaatataaaggtatgttatgatgatatattaaatgatataataagaagagattatattgattcaaacagagaagtaaatcctttgacaaaggcctatgatgctgtagaaatcgattcctctaatatgtgtatagaagaagttgtagattatattgttcagtatataagtaaaaaaatatag

SEQ ID NO: 15402 - DNA, 1818 bp, Clostridium acetobutylicum
atggaaaaaattactagaaatgatataagaaatattgctataatagcccacgttgaccatggtaagactactctcgtggatgctttacttagacaaagtcatgtttttagagcaaatgagaaagttgaagagagagtaatggattctaatgatctagaaaaagaaagaggaataacaatactttctaaaaatacatctttaatgcatgatggaattaaaattaacatagtagatactccaggacatgctgattttggtggagaggttgagcgtgtacttaaaatggtagacagtgttcttcttttagtagatgcttttgagggacctatgcctcagactaaatttgttttgaaaaaagctttagagcttaaattaaaaccaatagttgtaataaataaaatagataagccaaatgctagacctatggaagttgtagatgaagttttggacttgtttatagacttaggtgcagatgaagatcaacttgacttcccaatagtttatgcttctgcaaaagctggtattgctaagcttgatgtagatgatgaaagcgaaacaatggaacctttgttcgagactattgttaaatacgttaaaggtcctgaaggatatcttgatgaaccacttcaaatgcttgtttctacaatagattctaatgaatatgttggtagaattgcaataggaagagttgaaagaggatctataaagaagaatcagcaggctgttttaataagacgtgatggagcaaaggaaaatgtaaaaatttcaagcttatttacttatgaaggtcttaagagagttgaagctgatgaagttaagtttggagatattgctgtagtttcaggaatacctgatgttaatatcggagaaacaattgcagatgcatctagaccagaagcattaccttttgtagatattgatgagcctacattaagcatgttcttcatggtaaatgattctccttttgcaggtagagaaggcgatttcgttacatcaaggcatttaagagacagacttgaaaaggaattagagacaaacgtaagtttaaaagttgaagaaactgattcagctgataaattcaaggtaagtggaagaggagaacttcatctttcaatattgatagaaacaatgagaagagaaggattcgaattccaagtatctaaaccaactgtaatatacaaagaggaaaatggtaagaagttagagccaattgaagagctcacaatagacgtaccagaagaatttatgggcgttgtaatggagaagcttggacctagaaaggctgaacttgttaacatgacttcagctgtaaatggttatacaagattagagttcaaaataccttctagaggtttaattggattcagaaatgagttcatgacagatacaaagggaaatggaataatgaactctacacttatagattatgaaccatttagaggagatattcctgaaagatcaagaggatctatagttgtttttgaaacaggagtttcagttgtctatggattgtacagtgctcaagaaagaggaagattatttgttggtgctggagtagatgtttacgaaggaatggtagttggagaatgttcaagagccgaagatatcgaagttaatgtttgtaagaaaaagcatctttcaaacactagatcttctggagctgatgatgctttaaaattagttccaattcctgacatgtctttagagaaatgtcttgagtttatagcatctgatgaattggtagaaatcactccaaagagcattagaatgagaaagaaagtcttagatacaaatttacgtaagaagaaaagaaaatag

SEQ ID NO: 15403 - DNA, 339 bp, Clostridium acetobutylicum
atggcaaaaggtggattcccaggaatgggcggaggaaatatgaataaccttataaagcaagctcaaaaattccaaaagcaaatggaagatatgcaaaaagaaattgaaaacaaagaatttacagcaacagttggaggcggtgcggtaagcgcaactgtttcaggcaaaaaagaaataactgaaataaagataaaaccagaagttgtagatccagatgatgttgaaatgcttcaagatttaattttaagtgcatgtaatgaagctcttaaaaaggctgaggaagagacatcaggagaaatgaagaagttaacaggtggattaaatatacctggcttataa

SEQ ID NO: 15404 - DNA, 885 bp, Clostridium acetobutylicum
atgagatttgttattgttacaggattatcaggtgcaggaaaaacacaggcaataaggagccttgaggatcttggatatttctgcattgataatttacctccagcattaataccaaaattcgcacaggtttgctatgaatcagaaagtaaaattaataagatagctcttgttatagatataagaggtggagaattcttcgacaatctttttgaaagcttaaagtaccttaaagaagcagggtataagtatgagatattatttctcgatgcagataatgaggtacttataaaaagatttaaagaatctagaagaaaacaccctttagcaccaaatggtagaatattaaatggaatacagatggaacgtaaaaagcttaagacactatataatatggctaataatgtaatagatacgtctaagcttgctacaagagagttgagagaaaagataaattcaatttaccaggaagaaggtcaaattgagagtaaacttatagtaactgtagtttcctttggttttaaatatggaataccagtagattctgatttggtattcgatgttagattccttcctaatccattttatataccggaattaaaacgtttttcaggtatagagaagcctgttaaagattatgttatgtcatttgatcaaacgaaggaatttgtaaataaaatagaacaattgttaaaatttttaatcccaaattatctaaaggaaggtaaaaggcagctcatagtttctataggatgtacaggtggaagacatcgctctgttaccattgcaaacgagatctatgaaaggcttaaaaatgatggcgaaactgttaatatagatcatagggatatagaagaggatattaataaaggtggtaaaaaactatga

SEQ ID NO: 15405 - DNA, 675 bp, Clostridium acetobutylicum
atggaacaatacaaacaagaatttatagaatttatggtggagagtaatgtacttacctttggggatttcataactaaaagcggcagaagaacaccattttttataaatacaggtaactacaagacaggtaatcaattaaataagttggctaagttttatgctaaagcaatatatgataattttggagatgattttgatattttatttgggcctgcatataaaggaatacctttaagtgtttcagtagctatggcacttgataatatttatggaattaatgcagcttattgttcaaatagaaaagaagttaaagatcacggtgataagggaatacttcttggagcaaagcttgaagaaggagacagagttataattgtagaagatgtcacaacagctggtacatcagtatacgaaacaatgcctatacttaaatcacaggctgaggttgatgtaaagggaatcataatatcagtggatagaatggaaagaggtaagggagataagagtgccttaactgaacttaaagaaaagtttggatttaaaacatgttctattgttactatggaagaggtagtagaatatttgtataagaaaaatatcaatggcaaagtaatcatagatgataaaatgaaagatagaattaatgagtactataaagagtatggagtaaaatag

SEQ ID NO: 15406 - DNA, 2520 bp, Clostridium acetobutylicum
atgggactgttagagaaaatatttggtacatatagtgatagagaagtgaaaaggattattcctcttgttgataaaatagatgcactagatggatcaatgcaagctttaagtgaggatgaacttaaagctaaaactgctgaatttaagcagaggtatgaaaatggggaaacacttgatgatttacttgttgaagcatttgcggtggtaagagaagcttcatcaagaattcttggcttaaagcattttagagagcaaattataggtggtattgtacttcatcagggaagaatttcagagatgaaaaccggtgaaggtaaaacattagttgcaacacttccgtcatatttgaatgcaattacaggtaagggagttcatgtagtaacagtaaatgattaccttgcaaaaagagatatggaatggatgggacagctttatcaatatcttggattaactacaggggtaatagttcatgatcttgatcaaaaacaaagacaggaagcttatgcagcagatataacctacggtacaaataacgagtttggatttgattatttaagagataacatggttatatataaggaagaaagagttcaaagaccacttcacttttgtatagttgacgaggtggactcaatcttaatagatgaggcaagaacaccacttataatatccggagaaggagaaaaatccactgaattttacaaggtggctgacaacttcgctaagatgttaaggaaagaaaaagattttactattgatgaaaaaactaattcagcaatactaacagatgagggtgttgaaaaggcagaaaaatattatcatattgacaactatgcagatccacaaaacatggaaatacaacatcatacatctcaggcattaaaggcaaattatttaatgaaacgtgataaagattatatggtaaaggaagatgaagtagtaattgtagacgaatttaccggaagacttatggaaggtagaagatacagtgatggacttcatcaagcaatagaagcaaaagaaggtgttaaggttcaaaaagaatctaagacacttgctacaataactttccagaattattttagaatgtatgaaaaactttctggtatgacaggtactgcattaacagaggaagtggagttcagagaaatatatggtcttgacgttgttgtaataccaactcacagacctatagctagaatagatgcaccggatattgtatataagactgaactaggaaagtttaaggcagtagttgaagatatagtagaaacaaataaaaatgggcagcctgtacttgttggtactgtaagtatagaaaaatcagaacttctgtcatcattgcttaaaaaaagaggagtacgtcatcaggttttaaatgctaagtatcatgagcaagaagcagaaataatttcacatgcaggagaaaaaggcatggttactatagcaactaatatggcaggacgtggtaccgatataaagcttggagaaggagttactgatgtaggcggtcttaagataataggtactgaaagacatgaatcaagacgtatagataatcagcttagaggtcgtgctggtcgtcaaggagataagggatattcaagattttatgtttcactggaagacgatcttatgagaatatttggttccgataagcttaaaaacatggttgaaaaattaggtcttggagacgacgatgcaatagaaagtaagatggtaagttcggctatagagaatgctcaaaagaaggttgaaggaaacaattttgacataagaaaaactcttattcagtacgatgatgtaatgaataaacagagagaaatcatctacaaacagagaagtgaggttctagaaggtgaaaacctaaaggatcaaatagaaggaatgataaaagaccttatttataacgctgttaattcacacataagtggagtagatgaagagcttgaatcagatatcgaagcaattctaaattaccttgatgatatatgtcttcctagaggtatagttgaggttgaagaacttgctactatgtcaaatgatgaaattaaagaaaagctttattctttagctaaggaaatatatgaaagaaaagaagaagagttttctagcgatcaaatgagagaacttgaaagagtaatattacttagagtggttgatacaaagtggatggatcatatcgatagtatggaacacttgaaacaaggaataggacttagagcatataagcagcaggatcctactcaagcatatcagatggaaggaagcgatatgtttgaagagatggtagagaacataaaagtagaaaccgttaggtatctattccatgttcaagctgaaagagctcctgaaagacagagagttgttaaagaaacagagataaattacagtggaccagatgctggagatactaagaaagagcctgtaagaagaaaagaaaagaagataggaagaaacgatttatgtccttgtggctctggtaaaaagtataaggattgttgtggaagaagagcataa

SEQ ID NO: 15407 - DNA, 1134 bp, Clostridium acetobutylicum
ttgatagaactaaaaaatatatataaaaaggttaataacagaattatactaaacaatgtaaatttaactattaataagggagagcttgtaacattaataggtccaagcggttgtggaaaaacaactaccctaaagatgattaatagattaatacgccaaacttctggtgaaattttaattaatggaaataaaatacagaatgaagacgctattaaattaaggagaaatataggctatgtaatacaacaaacaggactttttcctcatctgacagtagaagaaaatatttctatgatattaaaaattgagaaagtagatcaaactaagattgataagaaagtagaagaattattaaatttagtcggaatgaatcctgaagattataaatataagtatccaagccaattaagcggtggacagcagcaaagaataggcattgcacgtgctcttgctatggatcctgaaataatacttatggatgagccatttagtgccttggatccattaacaagaaatcaacttcaagatgagatcttttcgatacatcaaaatttaaaaaagactatagtttttgtgacacatgatatggatgaagcacttaaattagcagataaaatttgtattatgaaggacggaaaagtaattcaatacgatactccagacaagatacttaaaaatcctaaagatgattttgtgaaaacttttgttggagaaaatagaatatggaatcagcctgaattaattaaagttaaggatataatgataaataatgtgataaaatctagtcctgaaagaacttctattcaagcattagagattatgaaatcaaatcatgtggataggttaattgtagcttcaaaagataataaattacttggaattgttaccttaagagaattgaaatttagtataaatgaaaataaaaaacttaaggatattatgaaaaataacataacaacaataaatgaaaatgattctatagtaaatgtattagatatagttgagaatcaaaagattggttttataccagttataaataatgattcgagccttgttggtcttattacaaaaagtagtttgctttctgtattaagcaatcaatttataaacaaggaggttaatttatatgagtag

SEQ ID NO: 15408 - DNA, 1533 bp, Clostridium acetobutylicum
atggataaacagttagttttagttattgattttggtggacaatataaccagcttatagcaagaagagtaagagaacacaatgtatattgtgaaatagttccatacacatattctatagataaaataaaggaaaagaagcctagtgcagtaatatttactggtggacaaaacagtgtgtatggagaagattcacctaggatggataaagaaatttttgatcttggagttcctgttcttggaatatgctatggtcatcagcttataacttatactttaggtggagaagttatgggttcagaaataagagaatatggaaagactgatgtaacgctagatagtgtttgtgaattatttgaaggaatagatatagagaattcttgttggatgagtcatacagatagagttgcaaaagttccagagggctttaaggtggttggtcatactaatgtttgtccagtggctgcaatggcaaacacagagaagaagatatatggagttcagttccatccagaagttttacatactccttttggagagcagcttttttcaaatttcttatttaagatatgtggtttaaaagaggattggtcaatgtcttcttttgctaaagagaaaattcaggagattaaagatattgtaggagataaaaaagttttatgtgctttatcgggtggagtagattcatctgttgcagcagttttagttcataaagcgattggtaaacagcttacttgtgtatttgttgaccacggtcttcttagaaaagatgaaggtgaccaggttgaaagtatttttagaaaacaatttgatatgaatcttataagagttaatgctaaggatagatttcttggaaaactaaaaggaatttctgatccagaaagaaagagaaaaataataggagaagagttcataagagtttttgaagaagaagcaaataaacttggacaaatagatttcctagttcaaggaacaatttatccagatgttgttgaaagtggaacagatacttctgcaactataaagagccatcataatgttggtggacttccagaggatatgcagtttgaacttatagagccattaagagagctttttaaagatgaagtaagagcggtaggagaggaactaggaattcctcataagcttgtatggcgtcaaccattcccaggaccaggtcttggaataagagttcttggagaagtaactgaagaaaagcttgaaattgtaagagaagcagatgctatttttagagaagaaattgcaaatgcaggacttgaagaaaagatatggcagtactttgcatgtcttccaaacattcattctgttggagttatgggtgatggaagaacttactgcgaaactatagctttaagagctgtaacttcttcagatgctatgacttctgattgggcgagaataccatatgaggttttagataaagtttcaagaagaatagtaaatgaggttaaaggtgttaacagaatagtttatgatgtaactagtaagccaccagctacaattgagtgggaataa

SEQ ID NO: 15409 - DNA, 1056 bp, Clostridium acetobutylicum
atgaaaggcataatatatttagaagatggaacagttttttatggaacaggatttggaaaagagggaaatgaatttggtgaaattgtatttaacacttcaatgacaggatatcaagagatattaacagacccttcctatgctggccaaataataaatatgacatatcctttaataggaaactatggagtaaatgaatcggttaatcaatcaaaatgtgtgtatgcgaaaggatttattgttaaaaatatagatgaaaatccatcgaattatactagtgaaataaatatagatcagatgctaaaaaacatgggagtagttggagtttttggtgtggatacaagaagtataacaaagaagataagaagttatggtactatgaaatgcataatttcaaatggagaattatcaattgaagagttgaagaaaatgatggatgcctccaatatagtagatgattatgttaatactgtaagtaccaaagaaataattcatattgctggaaacggaaataaagtagcagtaatggattttggaattaaaaatgatataattgaaaatttaaaagagagacagtgtgatataactatattcccttatgataccgactataatgaaattttaaacattaatcctgatgggattttcttaagtaacggaccaggggatcctaaatctataccagaagctattgaaaatgttaaaaaacttataggaaaacgtcctatgtttggtatatgtttaggacatcaaataatagcacttgcatcaggaggaaatacctacaaattgaaatatggtcatagaggcggaaatcatggtatttatgatgtacaaagagataaagcatatataacagcacaaaaccatggatatgcggtagatgaagaaagtgtattagaaaatggtatgataataacgcacagaaatttaaatgatggcactgtagaaggaatgaagcataaaagtattccactgttttcagtacaatttcatcctgaaggtgcgccaggaccaacagatacaacttacttattcgaccaatttgtaaacttatga

SEQ ID NO: 15410 - DNA, 768 bp, Clostridium acetobutylicum
atgaaaaaggcaaaagaaaaatatttgatttttatattaatctttttattacttcccattaatgcgaaagcagaaagtaaggggattttaggcaagaaagaagagaaaattgcttttttgacttttgatgatggcccaacacctaataatacagttaaaataattaatgaactaaataaaaataagataaaggcaaccttttttatagtaggtgaaaagggagaagagcatacaaaggctatggaggaacttgttaaaaataaaatgtgcataatgccacacagttatacgcataaattatctatatataaaagtttagataattataatgacgatttagataagtgtataggattcataaataaggttaagaaaaataaaaaagaattgaaatatgtaagaatgccaggtggatcatatagtagatataataaatatgttgttagcagtataagaaaaggcatactaaaaaggaatatgaattatgtagactggaatgtatgttcgggtgatgcagaggctcattatgtttcgagagaaaaaataattagtaatgtaaaaaaacaatgtaaggatcagaaaattattgttatattgatgcatgactcatattataaaaaaactacagttgagtctattagtgaaattgcaaagtatttaaaggaaaaagactataaattcaaaacttttgacaatataagtgaaaaggaaagaaaggaattaatacgtatgggtgttatgaataaaaaacaaaaaatagataaataa

SEQ ID NO: 15411 - DNA, 1083 bp, Clostridium acetobutylicum
atgtttgattatttaatagttggttgtggattttcaggggctgtttctgcaaggcttttagctgaaaagggaaaaaaaattttaattgtggataaaagaaatcatataggtgggaatgcctatgattattatgatgataatggcatactcgtacataaatatggccctcatatttttcacacaaatagcaaaagggtatgggagttcttatctagatttactaaatggtatctttatcagcataaggttttatcttatgtagatggaagacttgtacctatgccaattaatgtggatactgtaaaccagctttatggtacaaattattctaatgatactattagtgagttttttgataaagtaagagaaaaggatattgaaataaataatgctagagatatggtagtgactaaggttgggtctcagctttataaaatgttctttgaaggctacacaaaaaagcagtggggaattatgccggaagagctagaaaaagaagttacagctagaattcctataagaacaaatagagatgacagatattttactaatgtatatcaggggctgccacttgatgggtatacaaagatgtttgaaaatatgcttaatcatgaaaatatacatataatgcttaatacagattataaatttataaaaagtgaaattcagtataaaagtcttatatatactggatgtgcagatgagttttttgattataaatttggaagactgccttatagatcaataaactttgaatttgaaactctaaaccaagattattatcaaaaggttggtacggttaactatcctaatgattatgattttactagaataacagaatttaaacatcttacagggcaaaaatgttataacactactatagtaagagaatattcatgttctgatggtgaaccttattatccagtacctcagagtaaaaatcaaaagctttatttagaatataagaagcaagtagagaatctagaaaatgcttattttttaggaaggcttgggcaatatagatatatgaatatggatgtagttgtagatgaagccataaagcttgttgataagcttaaatag

SEQ ID NO: 15412 - DNA, 3462 bp, Clostridium acetobutylicum
gtgagtttgaggtttatatatggaagagcaggaagtggaaaaagtcaattttgtatagaaagtataaatactagaatagaaaaaggcggagataagccccttatattaattgtaccagaacaattttcatttcagagtgaaaaaaatattttggacttaattggtgaaaagagtattaatagggtaaaggtaataagctttaaaagattggcatatagaatatttgatgaggttggaggaatagcaagagaacacatgaattcctctggcaaaagtatgcttttttatcatataatgaatactttaaagagtgaatttagggtttttgctctttcagctaggcagaaaggttttgtaaacaccatagctgacaccgtaagtgagtttaaaaaatacgaacttacaacagaagtacttagagatactatagatgaaatagaagatgaagagcttaagaacaaattgcatgatttaagtttgatatatgatgaatttaatagactgctttataagaattatatagaccctgatgatgatttaacaatacttaaagataaaataaagcagtctacagtgcttcagggagcggagatatggttagatgagttttcaagcttcattcctcagcagtatggaataatagaggagttgctgaaaaaatgttctagagtaaacattacgttaactatggattacgataacgcttcaaaagacaatgatattttttctgtaacccaaaatacagaaaaaaggctgcttaaattagctgagaataataatataagcatagagaaacctatcaatttgaatggaaggccattctatagatttaaaaatagtcctgaattgagctttttagaaaagaatctatatagttttccatatgaaatttataaaaaaggacctgataaaatagaaattttcaagacttcaaatttatatactgaagttgagaagatagcaagaaatataattgaatttgtacgtgaagataatgtaagattttcagatatagctgttgtaacaggagatttaggaagctatgaaaaaactgtatcggtgatttttaaggaatatagaataccgttttttatagacaggaataaagatattgaggataatacacttataatcttaataaaatccattatagatatttttgttaaaaattggtcttatgaaacggtatttagatatcttaaaactggatttgcagacatagaaccggacgaaatagatatactagaaaattatgttctagcagctggtataaaaggaaagaaaaaatggactgaagaagaatggacatataatgtatatggtgatgcgctggaaggtgatatttctgaagaaagtaaagaaaagctatctaaggtaaatgaaattaagaatagatttttaagacctattcttaatttcagagaaagagtattaagaagaaataatgtagctgaaatatgcagagctttatttgaatttttatatgatataaatgttcctgaggcagttgagaagatggtaaatgaatttagagaaagcggaaggcaaattttggctaatgaatacagtcaaatatggaatataataatagaattaatggatcaattagttgaagtaatgggaaatgagaaggtaaacctagagcagttttcaagaatattatttataggaataaaagaacataagatgggactcataccatcatcacttgatcaagtattagtaggaagtatagatcgtttaaaaagtcatgctataaaaattctttatataataggagttaatgacggcgtatttccatctgcagccatggaagaaggaatattaagtgatagagatagagaaattttgaattcaaaaggagtggagctagctaaagatacaaaaactcaagctatggaacaaagattcttagtttatacagctatcaccaattctaaagaatatctatttttgagctatccaatagcagactatgaaggaaagactttaagaccttctcttatagtgaatagggttaagacattatttcctaagatagtagaaaaaagtgatgttattaaaatagaaaacgatgaagaaagtatgaagcttatttctgcaacagtacccacctttaatgagatgatatcatcttttagaaaagaaatagatggagaaggtgaggttagcagcatatggcatgatgtatatagatggtatagcaaaagcgatgaatggactggaaaatgtaataatatgtttaaagccatatcgtatacaaatcaagtagattatataagtgaagaaaaagcgttaaagctttatggtggaagtcttaagatgagtgtttcaagacttgaaaaatatattgaatgtccattttcatattatgtgcaatatggtcttaatataaaggatagaaaaatattcagcttaacacctcctgatttaggttcatttatgcataaggtgatagatagattttgtgaaactataaaagaagagaatatagattggaatgaagttaatgatcatatatgtgaagaaaaaatatataagatagtggaccaggaaatagagggtagaggaggatcaatactaaatagttctcctagatatagttatatagctttaaggcttaaaagaattttaaagagaactgtaagaattgtagcagagcagttcaaaagaggaagttttaagccagtaggatatgaagtctcttttgaaaatggtgggagttatcccccaataactgttggacttaatgacggaagtgaagttgtactcacaggtagaattgatagaatagatatgatggaaaaggacggaagtacctatattagaatagtagattataaatctggaaataagatatttaaactttcagatgtttactatggttttgatattcaacttttattgtatctcaatgccatactcgaaaatgaaaatttggatgaagaagataaggttctgccaggtgcaatattatattttacaatggatgaccctattattaagggaaaaaataatttaacagatgaacaaataagagaagaaataatgaaatcccttaagatgaaagggcttttgctttctgatccagatgttataaaagaaatggatagagaaatggaaggaagttctattataatacctgcatcaataaaaaaggatggaacacttggaaggtcaagtgctgctactaaagaacagtttgacatattaatagagcatgtgagaaatttagttgttaaaaattgtgaaaacctgcttatgggtgatataagaataaagccatataaaaaaggaaaagaaaaaccttgtgattattgcatgtattcttcaatttgtagatttgatacaatgtttgatggcaataattatagatatgtaaaggaaaaatcagatgaagaggtttggaagcttatagaaagagaaatgagtgaagagggtgatgaacgtggggaagactaa

SEQ ID NO: 15413 - DNA, 1356 bp, Clostridium acetobutylicum
atgaaatttattgattggataaagcctggcattaagcttaaaaggtggattatgcttgggggaatgggagtgttatttatttcctttgctctagcagaattaatcactaagggaagttattataatgtatattacaaggctttctatatattcttaatagtagtcggagcatttatcctctatatttctctaacgcaaggaatgaagtccataatatcactaataaataaggggtacttaaatgtatctttagattcaaggaaactaggaaatcttatatatgaaaaaagacttttagttaagggacctaagatagttgctattggtggaggaactggattatcaactatgcttagaggtcttaagtattatacttcaaatataacagcagttgttactgttgcagatgatggaggaggttcaggggcattaagagaggatcttggaatactgccacctggagatataagaaactgtattttagctttatctgatacagaaccattaatggaggatttacttcaatatagatttaaagatggaagacttaagaatcaaagctttggaaatctatttttggctgcaatggatggtatatcaactaactttgaggaagcagttcataaaatgagttctgtacttgcagtaacgggtaaagttcttcctgtaacactggacaatgttgttttaaaagcaaagctaaaaaatggagtagttgtagagggtgaatctaatataccagagcaggcaattttatatgaaagtcctatagaaaagatattcatagaacctgaaaatgcaagagcacttcatgaaactgttcaggcaataaaggaagcagatgctgtaatacttggacctggaagcttgtttactagtgttataccaaatcttttagttaaagatatagggaatgcacttttaaaaacaaaagctcttaaactatatgtctcaaatataatgacacagccaggagaaacagataatttttctgtatcggatcacgtgaatgcaataacgaagcatgtgggtggcaaagttgtagactacacacttgttaataatggtactgtaagtgagaaattaaagaaaaagtattttgaaaaaacttctgagcttgtaaaaatcgataaaaatgaacttgataaaattggcgttggaatagtagaaggcaattttatcaaaataaaagatggttttgttagacatgattcagatgagattgcaaaaattttagtagaaacaataatggataagaaattattctatgatagaaagaaaataatagaatacttctatttgtcacaaagacttaaagaaaatagaaaattagaaaaagaaaacaggggtaattag

SEQ ID NO: 15414 - DNA, 2616 bp, Clostridium acetobutylicum
atggaaagactgcttgtgttagatggtaatagtcttatgaatagggctttttatgctttgcctgaacttacaaatgctgaaggactccatacaaatggaatatatggctttatgactatgcttataaaaatgcgagatgaaataaagcctgattacatagttacaacctttgataggaaagcacctacctttagacataaggaatacgaggattacaaggcaggaagaaaaaaaatgcctcctgaacttagtgagcagtttcctgtattaaaagaattacttgaaaagttagctataaacatatttgaaatagatggttttgaggccgatgacctcataggaacattagcatgttttgctaaagaaaagggaatagaagtatacatagttacaggggataaagatgcccttcagcttgcagatgataatgttaaggttgttataaataaaaaaggaatgaccgaaaaagaaatatacgataaaaatagaatgattgaagagtttggtgttactccagttcagtttatagatgtaaaaggacttatgggagataattctgacaacataccgggagtaccaggaataggccctaagacagcctttaagctcatacaagaatacggcagtgtagagaatgttctcgacaatatacaaaatataaaaggcaaaaaaataaaagagaacttagagaattatgcagagcaagcagtttttagtaaaaagcttgcaaccataatgactaatgttcctattgaaatagatattgaggaaataagatctaaagaaagttttgatgttgagggtgctagacatcttttaagaagacttcaatttaagagtataatagaaaaaattccaagtcttaatgttgaagcggaaaaaagtgattttgttgtagagtataatttaatagacgaatttccaaaatttcatgaattattttcagctattaaagatactgaaatttatatgtcatattctataggaaatggagagctgtattctaagatttatattgatacaatttttatgaaagtagaagaaaagacatatatagtagatttaaagaaaataattgagcaaaatagagaagatgttctcaaagatttaaaagagttctttgagaataagaaaatagctaagataatacatgattctaaaaatatgtatacagtgcttatgaagaatggcataaaaatagagaatctggcatttgatacggcaatagcagaataccttataaatccatctaaaaaagagtacaatttaaaagacgcggcggaagagatgctcttattggatttgacgggagaagacaatgatattaaaataaaagaagtttacgttatggataaaatttacaataaacttaaagacaaaataaaagaatatgatatggatgagttatactataaagtagagcttccactcatagaagttttatcctctatggagagtgaaggatttaaggttgaaaaaaataaacttcaacaaattggcgataaatttacagttgaaatagcaaaggttaaagatgaaatatataacatggcaggtgaggagtttaatataagttctccaaagcaacttggaaaaatattatttgaaaaattggatttaccagttataaagaaaaccaaaacgggttactccactaatgctgaggttttggaaaagctgatggataagcatcctataattgaaaaggttgtatactatagacagcttacaaaactctattcaacatatgttgaaggacttaaacctgttatagatgttgatgaaaagatacattcaagttttaatcaaactgtaactacaacaggtaggctttcaagtacagaaccaaatcttcaaaacatacctattaaaaatgagatgggaagagaaataaggaaagtttttgtgcctgaaaatgataattgtataatactttcagcagactattcccaaatagaattaagagttttagctcatattgctgatgatgaaaatttaattaatgcatttaaacatcacagtgatatccatacaaagacagcttcggaggtttttagagtacctattgaagaggttacgtctagaatgagaagtaatgcaaaggctgtaaactttggaattgtctatggaataagtgatttcagtctagctcaggatataaaggtatccaagaaggaagctaaagaatacattgatacttattttgaaagatatccaaatgtaaaaaaatacttggaggatatagtggttacagctaaaaagaatatgtatgtaaacactataatgaacagaagaagaattattccagaaatagcctcatcaaataaaattgttaaaggctttggagagagacttgctatgaatacacctatacagggaagtgcagcagatcttataaaactttcaatggttaatgtgtatagtaaaataaagcaactaaagcttaaaagtaggcttatacttcaagtgcatgatgaactaattttgaatgtacataaggatgaactcgaaaaagtaaaggaattagtaaaacttgaaatggaagaggttatggaacttaaagttcctttggaagtagatatagaatcaggaaatacctggtatgaagcaaaataa

SEQ ID NO: 15415 - DNA, 957 bp, Clostridium acetobutylicum
atgaaaaaatatatattacgcagatttcttcaaatgattcctacacttataggagtctccattattattttctatttattttctttaatgcctggagattatatagattcaaaccgaaaccttacaccacaaagggcacacgaacttagagttctaaatggtttcgataaaccaatcatagttagatatcttatatggttaagaaatattttgcacggagattttggattttcattgaaatatttagagccagtaacaactctaataaatcagtatatatggaactcattcatcatagctattgttaccctaattcttacttggtccattgctctagtaatcggaatattctcagctacaaaacaatattccttttttgacagagtaataacactgcttgtatttgcatcattgtcttttccatcattttttataggccttttaatgattaaattctttggagttgatttaaaaattttacccatcggtggtatggtggaaaccggaagcaccaccataggactttctcatattttagaagtaattcgtcatatgattcttccagttggtatacttacattcttaagtattggatcacttacaagatatttcagaagtagtatgttagacgtacttaaacaagattttataagaactgctcgtgcaaatggacttaaagaaagaaaaatcatctttaaacatgctctaaaaaatgctattctacctgcaattacacttctatctttcgagctccccggacttttttcaggtgctattataactgaacaaattttcaattggcctggaataggaagaatacagcttgaagctcttagtttcagagattaccccgtactcatgacttttacaatgctactttcatttctcactattttcggtaatttctgtgcggatattttatatgcagcagcagatccacgaataagattagaatag

SEQ ID NO: 15416 - DNA, 1929 bp, Clostridium acetobutylicum
atgagaaaggttatgcttgctgaaaaagcgggtttctgctttggggttaagagagctgttgatatggcacttttaactcaaaaagaatataataaaaaaatttatactttgggagaattaattcataataatgatgtagttgataaacttaaggataataatgtatatcctattggaattgaagatatagataatctaaaggaaaacgatgttatattaataagatctcatggaatttctgaagaaatatacaaaatacttttatctaaaggacttacagtaattaatgccacttgtccatttgtaactaaaattcaggaaaaagtaaaaaaatataatgaacttggatacgatatagtaattgtaggtgataaatatcaccctgaggttattggcattaatggttggtgtgataataaagctataatttcaaagcaaggagaaaatttagagaatattacatctgaatcaaaggtttgcattgtttctcaaactacggaaaaacttgaaaactgggaaaaggttttaaaggaagttaagaatagagcaattgaagttatatcttttaatacaatatgtaatgctacatcagagagacaaaaaattgcaaaggatctttcaaataaagtggacttcatggttgttattggaggaaaacaaagttcaaatacaactaagctgtacgagatatgtaagtctaattgtaatgaaactattcatgtagaaaattcaggagaaatacctgagaatatattaaaaaataaaaattgtgtaataggtgtaacggctggagcttcaacacctgattggattattgaggaggcaattagtaaaatgagtgaaaatcaaatttcaaatgaaacaaataatgaaatggcagatgcaatgaaattcatagctgaaaatgaaggtaaaatatatgtaggtgcatcagtaacgggagaaattattcaggtttctgaaaaagaggtatttttaaatataaactataaaagagatggagtaataccaaaaagcgaaatagatgatgatggaaaagatttaaaagaattatttacagtcggcgacaaaattgtagcgaaaatcataaagttaaaggatgcagataactatgtagtattatctgttaaagagcttcaaagagagcaaggatataaagaaattaaagaagcttttgaaaataaaacaactttaaatgttgttgttaaagaggatgtaaaaggcggaataatagcttcttataagggaataagaatatttattccagcttcacatgtagaattatttcatgtagataatctaaaagaatatataggaaaaagctttgatgtggcaattatagaatattcaactaagaaaagacaaacaaagatagtagcttctagaagagcactattaagtaaggaaaaagaaaaagtagaagagactgtttggaacaaattagaggaaggtcaagttgttgagggagaagttaaaagattaactgattttggagcttttgtagaaattgaaggtgttgatggacttcttcatgtatccgaaatatcttggggaagggttgaaaagcctgctgatgttcttaagataggagataagattaaagtatatgttttaagtgtagataaagaaaacaaaaaattatctctaagtgtaaagaaattaactgagaatccttggaacaatgttgaggagaaatatcccgttggttctgtagtgcttggaaaagtaattagatttgctgattttggtgcatttgtaaaacttgagccaggagttgatggtttggtgcatatttctgaaataagccataaaaggatagcaaaaccatccgatgctcttaatgtaggagaagaaataaaagctaagatattagaagtaagctcagaagaaaagaagataggtttaagcataagagaagttgaagaataa

SEQ ID NO: 15417 - DNA, 1065 bp, Clostridium acetobutylicum
atgaaaaatataaagaaaatcatagcacttgctgcaacagtcatcttaacttgttcttctctaactgcctgcaacttaaaacctggttcagataaaaaaacaataactgtttttaactggggcgaatatattgataaagatattcttaaggatttcacagcaaaaactggtataaaggtaaactacgaaaccttctcaactaatgaagaaatgtatgaaaaagtcaaatcaggaactaataattatgatcttatatgtccatctgattacatggtggatagaatgattaaagaaaattcagttcagaaaattgattttaagagtttatccaattattctaatatagataacaaatataaaaatttaagctatgatccaaagaatagctattcagtaccatatatgtggggaacaattggcataatatatgataaaactcaaattaaagataaattagatagctggaatgacctatggaatcctaaatataaagataaagtatatatgtcagatgacatgagaaattccttgggcatatcacttaaacgccttggatactcaatgaattcaaaaaacaaaaatgaaatatcaaaagcatctagtgcactaatagaacaaaaaaagcttataaaccctgtatatgttggtgatgaaatcaaagatgacatgagaaacggagaaaagccaataggcgttatttattcaggagatgcagctgtactgatgaatgaaaatccaaacaaatatgaatatgtaattcctaaagaaggaacaaatttgtggttcgacagttgggttatacctaaaaacgcaaagaataaagaagcagctgaaaaattcttaaattacttacttgatgcaaaggtaaataagaaaaatgttgattatataggttacggaactccaaacacaaaaacctttgatatgttaaatgataaagtaaaaaataacaaagcatcatatcctgacgatgcctccttaaagaattcagaagtatttacagacttaggaaactttaaaaaactttataatgatgcctgggttaatataacagctaaaaaataa

SEQ ID NO: 15418 - DNA, 6159 bp, Clostridium acetobutylicum
atggaatctaataacggtgaaaagtttattggtagattaaccttagatttaaataaactaaaagaagatataagtcaggctaataaaatcttagaagatttatctaaggtaaaaatcgactctatagatattgaaagtggtaaaaaatccatagaagttcttcgttctatagaagcagaattcgaaaagctaaagactgcatctggaaaatcttttgattcagatatttttaggaatatagaagaacaattaagcaaacttggaataacacttgattcgaatacaacaaaaatcacaaaattttataaaggaacatcagaagaagcaaaaaacggagcaaacacattcaaacaaataacagagcaaatagacgaattgggcagaaaatatcaggaaataaagaacttagaaattaatgagaatggagaaattttagataaaggatcagttacaaaagttaccgaaaatcttgaaaaagaagaaaaagctcgtaatgaaattcaagcggcgattaaaaaaacaataaatgctagagaagaagaacgaagaactattgaagagaatcaagctaaaaatataaacaaacaattagaccaagaagaaaaagatagacaaaagattgaatcagaaatttcaaaaacaataaatgctagagaacaagaacgaagaattattgaagagaatcaagctacagctataaataaaagtttagaacaagaatatagagatagacaaaagattacagagcaactagaaaaacaaagggttgcagaacttaaagagtacactcaaattcaagctaatagttctgcgtatttaaagttatcagaaagtatttctcagatatcaagtaaatcaagtttagcaatgggatcaggaaacgcaaataacacttttcttgatagaatgaaaatttcagcagcttacgctggttctgctgttgttattgcatcagtaacgggagaaattagaaatgcgattagcaccaatacagagtatgaaaaaaaccttgtagacctaggtagagtcttagatagtaataaaaaaagtctacaagattttggacaatatgcagttagaacctcaaaagaatttggacaggatcttgggggtatacaaagtgctatgtcaagcttagctgcacaaggtgttagtgctaaaaaagacttagaaagtatgacaaagactgtttcattagggttaaatactagtgaaattacaaactctaatgagatggttcaattgttagtatcatcaatgaagcaattaggaattaatttttctgactcagaaaaagttttggatagctggaataaaaccgcagatattagcatggcaaaaaccgcagattttgctcaggttacagataaagctggtatgacatcaaaagatatgggtattagtttaaatcaattaaatggtattactgctgtgctagctgacaatactgggaaaagtggaaacgaaataggtgatgctttaaagtctatggaaaatagacttgaacgccccaaaacattagagactttaagaggttatggtattgaagtaatgaaagataaagaccattttaaagattttggagatatagtaaaagaagtttcttcagcactcgataaatttggagataacactactcagagcaatagtattttagatgctttgggtgggacaatgagaaaagactggattgatgttttagcgaagaattggaaagatgttgataaattcgctaaacaatctgccaatagtgctggttattctgctaaaaagaacgctcaagcaatgagtactgtagaaaaacaagtaaaagttcttgaagcttcggtaaaagaattttttgttactcttggtcaaagtggtggattgacagaaattagaaccgttgtaaatggtgcaaatgatgttgttcaagctctagaaggagtaaataagggttttggttcacttttattgcttattcctcaagtagccttagcaataaaaggtttaaattttgcttctaacgctataacagggaaatcatggaaacagttgtttaatgatcatggtggtgaatcaactgcttccataaaagcttacagttctgctgtaaaaagcgtacaaagagatgtcgcatcaggtaatataactttggaagaatccgcaacaattttagatgttattagacaaaaggtaggtttaagtaaggctcaagtagatatatttgcagcagcagaagaaaacttaaaagctaaggtcgcagcaggaacaatgacagaagaagaagcgtcagaagccttagaagcaatgcaaataaaaatgaaagcgactactgtttcagcagaagaagctagttctgcaaataatgcgctttctgttgctcaaaagtcagctactttaagtaccatgggacttaatttagcattaggtggtattgttggtgcattaactataggtttgtctatggctatatcagacattatcgaaaaacatgaagagcaaaagcaaaaagtagataaattaaaacagggctatgaagatttaacaaaagccatgaaggacaactctatcacagcagataatgacgattataaaaatttagagaaggaacaatcaactttagaaaatgctttaaaaagaaaagcagaactagaaggcaaaatcaattctgtaaataaatctaaaaaaaatgataaatggggaaattcattaggcgatacaggaaaacttaaagattttcaaagtgaactaaacaaagtaaataaggtaataagtgaaactcaaaaaaatttagacactactggatattcttatgataaaactactggtaaaatcaagctcttatcagaagcatctgaacaaattgctaataataaaagtattgagggtgttgctagagatcttacagagaattcagataaagcaaaaacttctataggacagctaatacaatcctatgttactttatataaacaatcagataaaacagccttggaatcacaaaagcaaaaaggtttagcacaacaactagccttagtatttggtgatttaactttatcaacagataagaatggagacactattataaaaaacgcttcagctctacaaaaggatactgaagcctttataaaaggaaatgctgtagttaaagatgctatattaaatgataaggaattgcaacaagcacaagaaaaaataaataaagccatacaatctactacaaatagctacaaatcatatttatcgtattcaaatcaaattgaaagaaataacaaacttgatgcacaatctgtagctgatataaaaaaaaatcatcaagagttagtaccatatttaaataatactaaacaattgtatagtaaaatacaacagggaattagttcttttaaaaatactgtagttatgtcatatgcgcaaatgcaaatggcagaacaaaagaattactcaaaattgggagcagaatatcagcaatatacaaagctacagagacaaataagtaagaataaaggttcatccaaagaattagctgatgctaaaaagcaagttggtaaaatcgctcaggatttagcaaataaaataaaagggcttagtactgtaacagataaaaatggaaatgtaactcttaaagctgggaataaagaaaaagaaattataaaaatattaaaatcagaaggtaatacctataaagaattagaaaaaataaaattaggtagttcaaaatctacaaccatgatagaggatggcaatactgctgttactcagaaacaagctcaatatcgtataggttattatactaaagaagcaaaaatgatagctgcaaaggcaaaagtaaaaataaatgcttcaactttagagataaaggctggtcaagctttaacttctaaggctcaaaaaaacgcaaaagaaagaataaaagcattacaagaggaaattgattccctaaaggaagcttcaaaggaaattgacaagctgtttgaacaagctcaaagtgctgctgactcatcaatgaatacagtagattcagataacattggtgactatgcatctgaagatgcggcagaaaaggctgaggaaaaagcagaaaaggctgaggaaaaagctgaaaaaaaacagcaagaagctgaagaaaaagctgaacgtcaacgagaagaaactcagagaaaggctgaagaagctcaaagaaaggctgaagagcaacagagaaagagtctcgaagaagaaaaaaaacacatggatgaagctttggaatcaagctataagatagaaaaacaacaccagcaagaaataatagatatgtataaatctcaactagatgaattagaaaaaaaacatgcccttcaagaatctaacaatgaacaacaagaatatgaaaacaaacttcttgaggataagcaaaaattagaaaatgcccaaacagaaaaaactgttagggacataacaacaggacaatggattactgatagtgatgctatatatgaagcacaaaaacaactaaatgaagatcaaaaagaatatgatcaatggaaagaggaacaagattataaacagcaagaagacactttaaatgggcaattagaatctgctcaaagcaaaatggatgaaatagaaaataattatcaaaatcaaaaagataatgttgatcaatcttatgaaagtaaagaagaagcacttggtggatatgttgatggaactgattatgttcctgaaagtggtttttatgatttagttgaagatggtaaaccagaattagttgtaaaatctagcaaacaatttttaccaaaaggctcaatggtaataaataatgaaaatttaaacaaactaggttctattacaagcaatcaggcaacagaaaaagcccctagcccaaatagctcaaatgatataaatgaaatttctgttaacgcaaaaccaatagtttctttagtaaaagatataactaaaagcttactgtctttcgaaaaaaattcttcaaattttagtaagaataccttaaaaaatattggggatgcaattaccgataataaagaattaactttaactccacaacaaaaatttcaacaagatatagataaaactatttctcaatttgttaataatacaataaattatggtaagaatagtgataaaaatattggacaaggaatatctgatgaaaagcaaaatgttatagaccctattaacctattaactgctgaagaagcacaacttttaaatgatttttctaaaagttgtgcttcttatggctcagatttagttactgaactaggtaatggagtaaagagtagtgaagataaccttacaaatattgttcaagatctaactcagaaagtaataactaaatttaaggaaggctttgggatacattctcctagtagggttatgtatgagattggtgattacttaatgcagggcttaataaatggtatgtctgataatgatgtaacagaatttattaaatctcaagtttcaagtgcgataggtgtggctggtggagcagcaagcggaagtttatcagagtggataagaaccgccatgtctttaactggtgttggagaagagtggtttgcaccattaacacaaattattgaacatgaatctggtggtgaccctaatagtataaacctttgggatattaatgctatagagggacacccctcaaaaggtcttatgcaactaatagacgagaatatgcaagactggcatttacctaatttaccagatgatatttataatccaatatcaaacatagcagcaggtataaggcttatagaacatgattatggaaacatatttaatgttccaggcattaaagctttagcagcagggagaccttatgtgggttatgctagaggtggaaaagttgaagataatggtttggctacaataaatgaatatggtcaggaaatgagaatgttaaatgcaggagatcaggtggttactgcgcaaaaaactcaaagtatagttaattttgctgagaatattcctaatttaatggcgtctataagaacaccaaaaattattttacctagtagtttaaatgttaatggaaatagtcctaattctagtggattagctaatcaaagagtctttcatataaataacctaaatgtccaagcgaatgatgcaaaacaactaataaaaagcttggaactaatggttgaaacaggagattattaa

SEQ ID NO: 15419 - DNA, 732 bp, Clostridium acetobutylicum
atgttaatgattgaagctaaaaatttaacaaaaacctttggaaagttaactgtttttgaagatctaaatgttaatatttcaaagggggaagttcttgttataataggaccatctggttcaggaaaaagtacgtttttaagatgtttaaatcatcttgaagagccaaatggaggccaggttattattgaaggagaggttttaaaccataaggataagaagaagtatagagagataatagagaaaacaggaatggtttttcaaagttataatctatttccacatatgactgtacttcaaaatgttatggaagctccaattactgttaaaaaagaaaataagagtgaggtacgcaaaagggcagaggcattactttataaggttgggttaagtgataaaatgaatgtatatccttcaaaactgtcaggcggacaaaagcagagggttgccattgcaagagcgctttgtatgcagcctgacataatgctgtttgatgaaccaacttctgcattagatccggagcttgtaggagaagttttaagtgtaatgaaagagcttgcagaagagggaatgacaatggtagttgtaactcacgaaatgggcttcgcacgtgaagttgctgatagagtaatatttatggacggtggaaaaatagttgaagagaatactccagaagggatattcacaaatcccaaagaagaaagaactaaggaatttttaaataaaatattataa

SEQ ID NO: 15420 - DNA, 1665 bp, Clostridium acetobutylicum
gtgaaatataacggttccagaattatacttgaatgtttgaaagaacaaggtgtagatactatttttggatatccgggaggagcagtcttaaatatttttgatgctttatattcattttcagaaataagatgtgtactaacatctcatgagcagggggcatcacatgcagcagatggatatgcaagggctacaggaaaagttggggtttgccttgcgacctctggaccaggggctacaaatcttgtaactggaattgcaacagcgtatatggattcagtacctatggtagctataacggggcaagtagctacatcattaataggtaaagattcttttcaagaagttgatataacagatataactatgccaataactaagcataattttatagtaagaaaagttgaagatttagctgatactataaggaaagcattttatatagcacaaagtggtagaccaggtcctgtattaatagatattcctaaagacgtaacgggaaatgaatgtgagtacgaacctaggaagccagaaaaaattgaaaaaagctctgtaagggatgcggaggtagaaggggctattgaacttctattagaaagtaagaggcctgttataattgttggtggcggttgcaatatatcggaagcatcaaaagagcttaaaattcttcaagaaaagcttaaatgtcctgtttgttcaactatgatgggacttggggcatttagtggcaaggacgatatgtttactggtatggttggaatgcatggaacaaaggcatcaaataaatctatatgcgaaagtgatttagttatagctattggatgtagatttagtgatagagttacaagtaatgcagatacctttgctaaaaatgcaaaaatacttcatattgatattgatgaagcagaggtttctaaaaatattaaagcagatagttttattattggggatgtagaagaggttctaaaaaaagtaaatgagaagcttactgcaagagaaggtaatgagtggacagaatatgctctaggtcttctgaaaaaagataaatctaaggtacttaggataaataaatgtgactctgtaaatcctgtatatgtaataaaaaagttatatgaacttacagatggagaagcaataataacaacagaagtgggacaaaaccagatatgggcaactcaaggatatatttatacaaagcctagaagttttataacttcaggtggacttggcacaatgggatacggatttggagcggcaataggggctagcgttgggaaagataaaatgacatttgatattgctggtgatggaagctttagaatgaacataaatgagcttgcaacagttgttagatataagttgccagtaaaaataattgtattaaacaataatgttcttggcatggtaagacagtggcagaatttattttacaagaaaagatattcaagtactactcttgagagagacactgactttgtaaaaatagctgaaggatacggtgcccttggtttaagagttgatacaaatgcaggagtagagtcagctcttaaaaaggcaatagattatgatggaccagtagtaattgactttaccgttggagaggatgaaatggcaacgcctatagttccccctggggctgatattgaaaatatggttgtacttgattaa

SEQ ID NO: 15421 - DNA, 819 bp, Clostridium acetobutylicum
atgaagaaaaaatttttatcagtacttttatcaggagcagttttaataggagctttaacaggatgcagttcaagtacaagcagtagtacaagcagcaatgataagaaaacaatagtagtaggagcaacagcagttccacatgcagaaatattgaataatgctgtaaaaccacttctaaaaaaggaagggtatacattaaaagtaaaggtatttactgattatgttactccaaatacagctcttaatgatggagacttggatgcaaactacttccagcacgtaccttacttagaaactttcaataaggaaaaacatatggatttaacttatacagttaaagttcatattgagcctatgggattatactcacataaaattaaaaagttaagtgaacttaaagatggtgatgaaatagctgttccaaatgattcaacgaacgaatcaagagcacttaaaatattagagcaaaatggaattataaaattaaaaaaggctgaccttgttacaaaacttgatataattgagaacaagaagaatataaaaataaaagagttagatgcagcacagctcccaagggtacttgatgatgtaacagcttcaataattaattctaattatgcattacaagcgaatctaaatcctacaaaggatgcaattgtttcagagcctaaagatgcaccatatgcaaatgttcttgcagtaagaaagcaagataaggataaaccttatataaaagctttaaataaagcattaacatcaccagaggttaagaaatatattaatgataaatataagggtgaggtagtgcctgcattctaa

SEQ ID NO: 15422 - DNA, 819 bp, Clostridium acetobutylicum
ttggataaattattatttggaatttcaggaatacctaatggaagcggaaatgaaaagtttacatatgaaacaggaatagactatttaaaaagcataggacttgatgccatggaacttccatttgttagaagcgttaatataacaaataaaaatagagaaggtattttaaataaaaaacatgagaaggatttctatttatctgctcatggttcttactttataaatttaaatgcagaggaaaatgaaaaacaagaagcctcactaaaaagaattgtgtctggtgctgatgccttaaaaagtgtagaaggaaaaagcttaatatttcatcccggtttttatttaaaagattcaaaggaagaaacctttaataccataaaggaaaatctaaaaaagctgcccgatataggtgttgactataggcttgaaactacgggtaaacctactcaatttggatctttagaagaaaatgtagcactagcttcagaagttaagacctgcaagctctgtatagatttttgccaccttcacgcaagatataatggtctttttaaaaccatagaagattttgataaagttctttcttatgtaggtgaaaaacttggggaggctgctcttaatgatatgcacatacatatgtctggaataaattacggtataaagggagaaaaaaatcaccttccctttaaagaaagtgattttccctatgaaaagtgtataaaatcctttgtgaaattcaacataaaaggctgtataatatgtgaaagccctcttcttgaaaaagactctcttcttttaaaaagcatttatgaagcttcttaa

SEQ ID NO: 15423 - DNA, 2271 bp, Clostridium acetobutylicum
atggatttaaagaaactgcttaatgaagaacaatataaagctgctacaaagattgatggacctattcttatactagcaggagcaggaagtggaaaaactagggtacttacatacagaatagcacatatggttaaagatctcgaaatttatccgtctcaaattttagctataacatttacaaataaagcagctaaggaaatgaaggacagggttaaagcacttattggtggaaatgaaattgataatatgtggatatctacttttcactcctgctgtgtaagaatacttagaagagaaattgataaaataggttataataaaaactttactatatatgatagtgatgaccaaaaggttctcatgagagaatgtataaaacaggttgggataaatgaaaaagatataacagaaaaagaaataatatcaaaaataggctcggcaaaagacggtcttgtatctgcaaatcaatataaaaaccaaaactcaggtaattttaaattaaataagatagcagatgtgtatctcctttaccagaaaaagcttaaagagaacaatgcattagactttgacgatttgatattcaaaacagtagagttatttaagaaggctccagatgtattagcattttatcagaggaaattcagatacataatgatagacgagtatcaagatactaataagtctcaatatgaatttgcaaggctgcttgcttcagctaacaaaaatttatgtgttgttggagacgatgaccaatgtatatatggctggagaggtgcagacataagaaatatacttaattttgaaaaagactacagaaatgctgtaataattaaactagaagaaaactatagatctaagggtaacatacttaaagcagctaacggtgttataaagaataatccacatgagcatttaaagagccttaggacaagaagtgaggacggagcaaagattaaagtatataggggagaaactgaccttgatgaagcaagcttcgcagcctttaaaataaataaggaagtaaaggaagaaaagcgcagtttcaaagattttgcaatactatatagaacaaatgcacagtcacgtgtttttgaagatatttttataaagagaaacataccatatagaattattggtggacttaagttttatgatagaaaagaaataaaagacataatgtcttatcttaagcttataggaaatccacttgataacatcagtcttaagagaataattaatgttcccaaaagaagtatagggcaaactactttaggaaggcttcagcaatttgcagatgaggttgaagaatgcttatatgatgcacttttagacatagaaaatataccaggcatacctaagagagctatctcttcaattaaagaatttacaggaatgataaatagttttataagaaggaaagatgagataaatgtatctgttttaataaaagaaattttggaacaaacaggttatttaaatgaacttaaagcatctgatgatattcaagataaagctagaatagaaaatatagaggaattggtaaatgcagcagtagattttgaggaaaattcagatgataaaactttggcagcatttttggaaaaaacagcacttgttgcagatgtggataattataatgaagatgctgatacagttgtgatgatgactgtccatagcgcaaaaggattagagtttccagttgtatttatggctggaatggaaaatggaatattcccaggcatggcttcgtttaatagtgaatatgaaatggaggaatctagaagacttgcttatgtaggtataacgcgtgcaaaagagaagttatatatgacatctgcaaaattaagaagagtatttggaaaaactcaagcttttgaagaatctgattttataaatgaaatagatgaaaatttaaaagagtatgtaactctagatggtgaaggcagaagaaaaaaagatactacaggtttgttctccacaataagtagcgatataccacctaaaaatgctatgttttcaaattttatgtccaaaagcgggtttaatgctaatgaaatgattaaaaagtcagtgaaggaagaaaagaagagtattaaaaccttaaatgaagaagatgctgtaaaaggagctaaggtagttcacatgaaatttggtaaaggtacaataataactacaagtagagctgatggacacataaacttgacaatagcttttgaaaatatgggaattaaaaatttaaggcttgatatggcgccgcttcaacttttgtag

SEQ ID NO: 15424 - DNA, 792 bp, Clostridium acetobutylicum
atgagcaaagctgatgaaaaatatttagatataatagaaaacattttagaaaatggttattatgataacaatagaacaggaattgaaacctataagcttcctcatcaaattatgcagtttgacttgtccaaagagtttccaatactcacaacaaaatttgttgcttttaaaacttctgtaaaggagcttttgtggatatataaagatcaatcaaacgatgtgagaaaacttcaaaatgagaatgttaccatatgggatgaatggatgctcgaagacggcactataggaaaagcttacggttatcaagtagctaaatttaaacaaattgacaatctaatagacaccttaaaaacggaccctcaaagtagacgaatgcttatatccttatggaatatagccgacttaaaggatatgtctcttacaccttgctgctatgaaacactgtgggatgtacaaaatggcaaactaaattgtatgctagttcaaagaagtggtgacatgcctttaggtgtaccttttaatatgtgccaatatgcagttttagtacatttaatagcccaggttactggccttaaaccaggtctctttactcatgtgataaataatgctcatatatataaaaatcaaattgaaggtatgaaaattcaacttaaaagaagagataaggcatacgaagcaccaaagctgtggataaatcctaacattaaaaatttttatgattttacagctgatgacattaaattaatagattacaaacatcacgataaaataaaaatggaggtggccgtgtaa

SEQ ID NO: 15425 - DNA, 543 bp, Clostridium acetobutylicum
atggttccaagacttaaagaaaaatacgaaaaagaagttattccagctttaatggaaaaatttcaatataaaaatataatggaagttccaaagcttgaaaagattgttataaacatgggcgttggagaagctaaggaaaatcagaaagttttagaatcagctgttgctgatatgcaattaatttcaggtcaaaagcctatattaacaagagcaaaaaaatcagtagctaattttaaaataagagagaatatgcctataggttgcaaggttacattaagaaagaataaaatgtttgaatttgcagacaaattaatgaatgtagctttacctagagttagagatttcagaggagtatcaagtaaatcttttgatggaagaggaaactacgcattaggaataaaagagcaattaatattcccagaagtagagtatgataagatagataaagttagaggtatggatgtaatctttgttacaaacgcgaagacagatgaagaagcaagagaattgttaagattccttggtatgccatttgctcaataa

SEQ ID NO: 15426 - DNA, 1356 bp, Clostridium acetobutylicum
atgaatttaaaaacaacattgtttaatacaacttataaatttaaagatataaaggatgtacttgcaaaagcgaatgaaaaaaaatctggagatgaaatggcaggtattgcggcaagtggagcaagagaaagagttgcagcaaaaactgttttagcagatataacactagaagaattaagaaacaatcctgtggtatcttatgaaaaagatgaaattacaagagtaatacaggattctgttgatgaagagcagtataaaaaaattaaggcattaacagttggtgaatttagagagtttttacttgaaaatgatgaagataagataaaggaaataagggatggattaacctcagagatgattgcagcagtaacaaagcttatgagtaatatggatcttgtatacgcagctcaaaaaatttgtaatacagctaaatgcaacacaactataggtagaagaggaactttttcttcaagacttcaacctaatcatccaactgataatcctcaaggtattatggcatcattgattgatggaataagctatggagtgggagatgcagttataggattaaatccagtagcagatactatagaaagtgtatctgatgtgcttaaggtatttaatgactttactagaaaatggagaataccaactcaaaattgtgtgcttgctcatataacaacccaaatggaggccttaaaaaatggagttccgattgatttaatgtttcaaagtatagcaggttctgaaattgcaaataaagattttggaataagtgtagccttattagatgaagcttatgaacttatgaaaactaaaaaaagctccaaaggacctaattttatgtattttgaaacaggacaaggcacggaactatcgtcggaaggtaataacagagcagatcaacttgtgatggaagcaagatgctatgggttagctaaaagatataaaccgtttcttgtaaatacagttgtaggttttattggacctgaatatttatatgatggaaagcaagttataagagcaggtttggaggatcattttatgggaaagcttacaggtttatcaatgggagttgatacatgctacacaaatcatatgaaagcggatcaaaatgatcttgaaaatttagctatgcttcttttagcagctaattgtaactaccttatggggataccttgtggagatgatgtaatgcttatgtatcaatcttcaagctatcatgatatagcaactttgagggaaatatcagataaaagaccaataaaagaatttgaaaaaagaatggaagaattagggataatgaagaacggtaaattaacaagaaatgccggtgatccttcaatatttatgtag

SEQ ID NO: 15427 - DNA, 468 bp, Clostridium acetobutylicum
atgaaaatatatgaaggcaaacttataagcaaaaatttaaaatttggaattgtagcagggagatttaatgaatttatagtatcaaaattgctatcaggtgcagtagatgcgcttaaaaggcatggatgtgatgaagatagtatagagcttgcatgggctccgggagcttttgaaataccattaatatcacagaagatggctgaaagtggtaaatatgatgcagtaatttgcttaggtgctgtgataagaggagcaacctcacactttgactatgtatcttcagaggtttctaaaggaatagcacaaacttcacttaagacggggtgccctgtaatatttggtgttttaacaacggataatattgaacaggcaatagaaagagctggaacaaaatcaggaaataaaggttttgatgcagcagtaacagcaattgaaatggctaatttaattaaaacaattggcgaatag

SEQ ID NO: 15428 - DNA, 549 bp, Clostridium acetobutylicum
atgattaatagtaaaaaagaacttaggaaaaatatggttttaaaaagggattctttagagccagatttaaaatcaataaaggataatatgatttataataaagtcataaatagcatacaatataaaagtgctaataatatatttgtgttcgttagttacaaaagtgaagttgatactcataatataataagaacagcaattgcagatggaaaaaaagtttttgtgccgaaggttatttccaaggaaaagggaatggaggcagcagaaattagaggtttttttgatttagaaaagagtgcttatggaattttagagcctaaaagttcaaattacatagagccagagagcatagaactactgttagtgcccggacttgcatttgatgaaagtggaggcaggataggttacggtggtggattttacgatagatatatgagtcttttagataagtcagcagtaaaagttggaatatgctatgactttcaggtaatagataaagttattatgaatattaacgatgttccagttgataaaattattgtaggctaa

SEQ ID NO: 15429 - DNA, 1380 bp, Clostridium acetobutylicum
atgaaagaatttgatactatagcagcaatatcaacagcaatcgggaatagtggaatatctataataagagtttcaggaaaagaagctttaagtattgtagataaggtgtttaaaggtaaaagtaaaaaaggtattattgaaatgaatacttataccatgagatatggaaatatagttgagttaagtaatggtgatataatagatgaagtaattgtaagctttatgaaaggacctaagagttttactggagaaaatgttgttgaggtaaattgtcatggaggtatgtatccaaccaaaagagttttagaagaaattataagggctggagcaagacttgcggagccaggtgagtttacaaaaagagcatttttaaatggtagacttgatttaagtcaagcggaagctgttatggacattataaattctaaaacagagctaagtatgaaatcagcagttgctcaatcagaaggtgtgatttccagggaaataaataaattaaggcaaagaatacttgaaataatagcacatatagaagcaacggtagattatcctgaggatgatttagaagaggttacggctgaaaatgtatcaaaagacttaaatgatattttaaaggaaatagatgaattgattttaagtgctgatgaaggaaagatattaagagaaggccttaacacggttattataggtaaacctaatgttggaaagtcatcactattaaatctacttttagacgaaaaaagagcaatagttacagatattcctggaaccacaagggatgttattgaagaatatataaatatttcgggaataccaattaaaatagtagatacagcgggtataagagagactgaagatgttattgaaaaaatgggtgtcgaaagatcaaaagaaaagatggaaaatgctgatcttataatatttatgatagattcaagtaaaaaaatagatgccgaagatttggagataatcgattatattaaggataaaaagtatattgtgcttttaaataaagtggatcttaaaaatagagaagataaaagtaaattagatttattaaataaagataatattatagagttttctgtaaaagaaaaagttggattagaaaaacttaaggatactatagaaaatatgtttgcaacgggtaatctccagcatagtaatacaatgattactaatacgagacataaggaagctcttttaagggcaagagagcactgcactacatcattaaaagctcttcaagatacattggccatagatcttgcatctatagatatacgtaatgcttggacagctctcggagaaataacaggagaaactctccaagaagatttaattgataaaatatttaaagatttttgtttaggaaagtag

SEQ ID NO: 15430 - DNA, 345 bp, Clostridium acetobutylicum
atggcatcaggttatcgtaaattaggtcgtcctactgaccaaagaagagcaatgcttagaaatctagttactagttttttaaagcatggtaaaatagagactactgtaacaagagcaaaagaaactagaagtttagcagaaaaaatgatcactcttgcaaagagaggagatttacatgctagaagacaagttcttagctttgtaacagaagaaacagttgttaaaaaattatttgatgaagttgctccaaagtacagcgagagaaacggtggatacactagaatctacaaaatgggaccaagaagaggcgacggagcagaaattgttatactagaattagtgtag

SEQ ID NO: 15431 - DNA, 1080 bp, Clostridium acetobutylicum
atgaataaaaaactaagggttggtttacttggtggtacaggtcttgtgggacaaagatttgctaccttactagataatcatccatattttgaagtaacatgcattgcagcaagtccacgttctgcaggtcaaaagtattctgatgctgtaaaaggaagatggaagcttgacatacctatgccagaatatataaaagattttattgtaaaagatatttatgatatcgatgaaatttcaaaggaagttgattttgtcttttgtgctgtaaatatggacaagagcgaaattaaaaaaatagaagagaattatgcaaaacacgaaataccagtggtatctaacaattctgcacacagatttacagaagacgttccagtaataattccagaaattaatcctgaacatcttgatataattccaaagcaaaaggaaagattgggaacaaaaaagggctttatagttgcaaaaccaaattgttcaattcaaagctacgttcctgcaataagcgcacttttggaatttaaaccaacaaaaatattagtctgtacttatcaagctatctctggaagcggaaaaacctttgaacaatttcctgaaatagtagataatacaatcccttatattcctggagaagaacaaaaaagcgaagatgaacctttaaaggtttggggacatatagaaggaaataaaatagtttcgaaaaaagatcctttaataacttcacaatgtattagagttgcagtttcagacggacacctagcagcaacctttgtttcttttgaaaataagcctacaaaagaacaaatagtcgaaaaattaaaaaattataagggtaaacctcaattgcttaatctcccaactgcccctgaacaatttataacctactttgaggatgaattcagaccacagccaaagcttgatagaaatatcgaaaaaggtatgggcataagcattggaagacttagagaagatactctctttgactataaatttgtaggtctttctcataacgctttaagaggtgcagccggaggagctgttttaactgctgaattattatacaaagaaggatatttatattaa

SEQ ID NO: 15432 - DNA, 720 bp, Clostridium acetobutylicum
atggcaaatactactaatccgcttaatgacttaagtacagtcactattacggaaaatagtaaaactgctggtggaacccaaatagttcgtaatgcgggtaatacattagggcaagatgcatttttaaaaatacttattgcggaaatgtctcaccaggaccctacaagtcagcaggattcaacacagtatatagctcagttagctcaattttcaaacttagaacaaatgactaatttgaacagaaccatgacctttagtggtgcatcatcacttatgggaggaacggttactttaaaacagtatgaccctgatggcgtgccatatagaggagaagttcaaaaggtaactaaaaatggggataccattcaaatatatgttaaattaattgatagtaatggtaattatgttcgtcaagaaaaagttgatggaaatggaaatgtagttagagactcaaagggaaacattgagtatgaaacagaaacggtaccacaaacagattcaaatggaaatgttgttaaggattcaaatggcaacattatgtataaaactcaagatgtatataaggtaatagcttttgattatagtcaggttaatagcgtttctgctcttaaggataatatatatgatacaactcaaaagcaaatagatgaccaagttgcatcaaagagcgatacctcaagttcatcgagtactacaagtaatacttcttcttcgacataa

SEQ ID NO: 15433 - DNA, 696 bp, Clostridium acetobutylicum
atgttaaaaagagataatttttttaaggtgtttataaaagttttcagcgtttttatagctgtaacttttgtattttcagtaatgcctaacaatgtaaatgcaaaaacgggaaaaaaaattatactgatagatccagggcatggaggtattgatggcggtgctaatttaaaggatggtactttggaaaaggatataaaccttgcaataggattaaaacttaagaaaaaccttgaaaaaaaatataaggttgttatgacaagagaagaagataaaggactttattccgaaaatactagtaccataagaaagaaaaaagaagaggatttaaataacagatgcaaacttaagagtacttcaaagtgtgatgtttttttaagcattcatctaaacatgtttccgcagtcgcagtacaatggagcgcaggtttggtatgctaacaatgatgcaagtaaaaaactagcaggtatacttcagagtaattttaaagaaaaccttaataaaaataataaacgaaaagaaaaggtttcaattaatgattacagagtattaagaaatagcggagaagttccgtctgttattatagaatgtggatttctttctaatcccgatgaagctgctaagctcaaagatggaggctatcagcaaaagttagcagatactattgaacaatcattaaatgaattttttaataaatag

SEQ ID NO: 15434 - DNA, 1122 bp, Clostridium acetobutylicum
gtgcttgattttgatgttgatgttcaacagtttgctcaaataaaagtaattggatgtggcggcggaggtaataatgctgttaacagaatgattttggaaggtcttaagaatgtggaatttattgccataaacactgataagcaggcattggctctttcgcaagcatcacagaagatacaaataggtgataagcttactaaagggttaggagcaggagctaatcctgaaataggtcaaaaggctgctgaagaaagtaaggatgaaatatctcaggctataaaaggtgctgatatggtatttataactgctggtatgggtggtggaactggaactggtgcagcacctgtcgttgcagaaatagctaaatccatgggaatattaacagttggagttgttacaaagcctttcccttttgaaggaagaaagagaatgctccatgctgagtcaggaattaaaacactaaaagaaagagttgatactttagttacaattccaaatgaaagattgcttgctattgtagataaaaagacaactttagtagaagcctttaaatcagcagatgatgttttaagacaaggtgttcaaggtatatcagatttgataactattcctggtcttgtaaaccttgattttgcagatgtaagaactgttatgataaacaaaggacttgcacatatgggtactggaagaggtgcaggggacacaagagctagtgatgctgctaaacaggcaatatctagtcctcttttggaaacatctatagttggtgctacaggtgtacttttaaacgtaacaggaggagaagacttaggacttcttgaaataaatgaagcagcaagagttgtacaagaagcagcagatccagatgcaaacataatatttggagctgttatcgatgaaaacttaaaggatgaaataaggataacagttatagcaactggatttgaaagcgaaggagaaaatggagaaataataagaagagaagttaggccagaagtatcagagcctaagtctgagcaggaggcagcaagtgcacttgataatacaggtagctttgatgctccagaaaaagatcttaacatacctgcgtttttaagaagacaaaataaaaataaatattaa

SEQ ID NO: 15435 - DNA, 699 bp, Clostridium acetobutylicum
atgaaacctaaaaaattagtagatagtttcaatcatgcacttgagggtataatttatgcagttaggacacaacaaaatgttagaattgatttgattgcggctcttgtaatacttactatgtgtttttttacaaatttgacaagagtagaacttttaattataacaataacaataacaatggtaataagtgctgaactcatgaatacggctatagaagccacgatagatttaacatccaactattaccatcctctggctaaaattgcaaaggatgtagcggcaggagctgttgtggtaacagctattaatgctgttatagttggatttattgtattttgggataagcttgagccagttacaaaccatgttatatataagataaaaaattcaaatccgtatatgatatttgttattttggtgatagtatgtatacttactcttataataaaggctatttttggagaaggaactcctttaagaggaggaatgccaagtggtcatagcaccatagctttttcattagcaacaataataacattgatatcacctcagcctgtagttataatactaagctactttttagctgtaatagttgcacagagcagggtggattcaaaagtacactcttcacttgaagttgtatgtggtgcggtttttggatttttagctacacttttgttattcaaactgtttcactag

SEQ ID NO: 15436 - DNA, 501 bp, Clostridium acetobutylicum
atggaagatttttttagcattgggcaaattataaatactcatggagttcgtggagaacttaaaatttatcctctgacagatgatatcaatcgctttgatgatttagatagtgtttacgttgataatgaaataaaaaaggtaatctcagtaaaaaagcaacctaataagcttatattgaagttagaaggaatagatactttagatgaggctgtaaaatataagaataagtatattaaagttttaagagaagatgcagttgagttaaaagaaggtcaatattttattaaagatattataggatgtaatgtttttgatgaaaatgataaggatttgggagaagtatatgacgtcataagtacaaaaaataatgatgtatactgcataagaaaagaaggtcagcaggatattttggtgccagctcttaaagatattgttcttaaaattgaaatagagaataaaaaaatagttataaaggctgttgaagaatggctagaaagttga

SEQ ID NO: 15437 - DNA, 2493 bp, Clostridium acetobutylicum
atgctaaatgaaggaaaagttttacctgtagatataagcagtgaaatgaaaaaatgttatatagattatgcaatgagcgttatagtaagccgtgcacttccagatgtaagagatggacttaagccagttcataggagaatattatattcaatgcatgaattgggtttaacacctgaaaagggatatagaaaatgcgctagaatagttggagatgttttaggtaagtatcatccgcatggagattcttctgtttatggtgctttggttagattagctcaagactttaacttaagatacacagttgttgatggtcatggaaactttggttcggttgacggtgactctgctgctgctatgagatacacagaagctaaaatgaataagatagctcttgaaatggtaagagatataggaaagaatactgttgattttattcctaactttgatggtgaagaaaaagaaccggttgttttaccatcgagatttcctaacttacttgtaaatggttcagctggtattgctgttggaatggctacaaatataccaccccataatttaggtgaagttatagatggtataacaatgcttatagataatccagaagcaacaattcttgagcttatggctcagataaaaggacctgactttcctacagcaggaataataatgggcaagtctggaataagagctgcctatgagactggtagaggaaaaataacagtaagagctaaaagtgaaatagaagttgaagataatggtaagcagaaaatcataattacagaaattccatatcaggtaaacaaggcaagactagtagaaagtattgcagaccttgttaaagataagagaattgtaggaataagtgatcttagagatgaatctgacagagatggaatgagaattgtaatagagataaaaaaggatgccaattcaaatataatattaaatcagctatataagcatactagacttcaagatacttttggaataaacatgttagctttagttgataacagaccagaagttcttaatctaaagcaaattttgcagcattatattaaattccaagagcaagttataagaagaagaactgaatttgatcttgaaaaggcttcagcaagagcacatattttagaaggtcttaaaatagcacttgatcatatagatgaggtaataagtttaataagaggttctaagacagcacaagaggcaaagttaggacttatggataagtttggactttctgaaaaacaagctcaagcgatacttgatttaaaactccaaaggttgactggtttagaaagagaaaagatagaagacgagtacaatgagctaatgaaaactatagctgaattaaaaagtattcttgctgatgaaaacaagatacttgcaataataagagatgaacttaatgagataaaagctaaatatggtgatgaaagaaagactgcaatagaaagagctgaaaatgatattgatatagaggacttaatacaggaagaaaatgttgttataactcttactcatgcaggttatataaaaagaataaatgctgatacctatacttctcaaaaaagagggggaaggggtatacaagcaatgacaacaaaagaagatgattttgttgaaaatatctttataacatcaacacataataatatattgttctttacaaacaaaggaagaatgtataagcttaaagcctatcagataccagaggctggaagagcagcaaagggaacaaatgttgttaacttattgcagcttgatccaaatgaaaaaatacaggcagttatatcaattaaagagtttgatgaggaaagcttcttagttatgtgtactaagaaaggaataataaagaagactgttgttggtatgtataaaaacataagaaaaagtggtcttattgctataaaccttaatgatgatgatgaactagtttctgttagaatcactaaaggtgatgatgatatcataattgtaacaaataaaggacttgcgataagatttaatgaagttgatgtaagacctttaggaagaaatgctcttggggtaaaaggtataactcttaaagaagatgactttgtagtaggcatggaagttcctaatcaagaaagtgatgttcttgttgtaagtgaaaatggttttggtaagagaacacatgtaggagaatataaatgtcaacacagaggtggaaagggacttataacatataaggtctcagataaaacaggaaaacttgtaggagttagaatggtagaagatggcgatgagcttatgcttataaataacttgggcatagccataagaatcaatgtttcagatatatcaactacaagcagaaatgctatgggtgtaactcttatgaggaataatggagacgagaaagttctagctctagctaaaataaataaagatgatagtgaacagcttgaggacagtgaagaagtctcagaagttcatgatgctgaagaaaataatagtgaagaataa

SEQ ID NO: 15438 - DNA, 879 bp, Clostridium acetobutylicum
atggataatttaattgaacaatactttgctgaaataagaaagaaaaatcttagtttaaatacaatagatgcatatagacgtgatataaagaaatttcatgaatttttagatgaaaaaggtgaaaagcttcgagaggttgatgttattacgataatgtcgtatgtgcagtatttgcaaaaaaatggacgggctaatagttctattgtaagaaatatagtatccataagaaattttttcaaatacttggagataaaaggcataatggatgataatcctgtaacacaatatgagatgccaaagataagaaggaattttcctgatattcttacaatagaagaggttgaaaaattgctaatgggtcctgatggaaatactgataagggtataagggataaagcaatgctagaaataatgtatgcaacaggaatgaaggttacggaactgttgaatttaactatatatgatataaatttaaaactatcttacataaaatgtcgcggtataaaaaataaggaaagaataattccaatggggtcatatgcagttaagtgtcttgaaatatatttaaaggtaagaacaaagttaaatgttcaaaatattgattatcttttttttaatctacaaggtgataaaatgactcgtcaaggtttttggaagataattaagcagtatgcacaagaatctggtataaaaaagaagattaatgcatatactttaaggcattcatttgcggttcatttacttcaaaatggagcggatataaagactatacaagagcttttaggacatagtgatatggctactactcaaatttattctggtatgtatagaaagacaagaatagctgaagtttacaagaaaactcatcctagagcttaa

SEQ ID NO: 15439 - DNA, 1791 bp, Clostridium acetobutylicum
gtggaatgtcttattatagctgaagatataattcaaaaagtaaaagatttaaatgatatagtggatattgtatctgaaaaggtaaagcttaaacgtacaggacgtaattattcggggctttgcccatttcatcatgaaaaaacaccgtcatttagtgtatctcaggataaacaaatatataaatgctttggatgtggagaagcaggaaatgttataacttttgtaatgaagactaaaaacttttcttttgtagaggcggtaaaataccttgcggacaaagttaacattactatagacgataataaagataagtactatgcaaaaaataaagagaaatatgacaaattgtatagtatgaatgttgaagcagccaggtatttttttagaaatttagattctaattcaaaagcaaaaaaatattttttggatagaggaattaatcaaaaaaccatgagaaggtttggacttggatatgctaaggatgactggagacagcttctaagttttatgaaatctaaggggtatacagaattagaacttattgaagcaggacttatagtacagaaaaataaagctgtctatgataggtttcgaaatagggttatatttcctgtatttgactataaaggcaaggttatagggtttggaggtagagttttagatgattctaaaccaaaatatttaaactctccagaaaccaagatatttaaaaaaggaactaacctttatggactaaattttgcagtgaaaaataatataggggatacaattataattgtagagggatacatggattgtatatctcttcatcaatatggtataaataacgttgtggcttcgcttggaacagcacttacgaaagatcaggcaaagttgttaaagagatatgctagtaaagtggtaatatcatatgacgctgatacggctggtcaggctgctacacttagagggtttgatatattaagagaagcaggatttgatataaaaataataaaaatcccagatggtaaagatccagatgaatttgtgagaaaaaatggtaaagaggcttttatgaggcttgtagagaatgctgtttcaattatagactacaggataaatagggcctttgaaaacgtcaatttgaaggatagcgaaagtgttataaaatatgttaaggatatttcggaaataatcgaagagttagatccagtagagaaagatgtctatatcaagaaaatttcagataaaacgggaataagagaacaagcaatttatgatttgattagtactgatattcagaaaagtggcaataacattgaaaaaatgaataaaaatagcaattatggacaaaatttatatgtggaatccgcacacgttaaatccgaaagatatttacttagattaatgattgaacataaagatatacgcagttatatagagtccaaaattagtgcggacgatttaataatggaaagccataaaaaaatatataacattatattgaattttgaagataatttaagtagtgatctaaaatctaaatttggttttattgaatcaagatgtgatgatggggaaagttcctctgaaattgtaaagatagaagaacagaatataatgctttcagaaaacaatgttaaagatcttgtagatgattttattacaaacattaaaaaatttagattagaggagtcaaaaaagaagattatgagtgaaattaaaggccttgaagaaaagggattgtttgatgagaccattgaacttatcaaaagaatggaagaaatacaaaatcagttagacaatctatag

SEQ ID NO: 15440 - DNA, 732 bp, Clostridium acetobutylicum
ttggaactaaatatatgtcatttatatcccgatttattaaatgtgtatggtgatattggcaatataagaatattaaaatatagggctgaaaaaagaggcattaaagtaaatatatcaaatgtatcattaaaagataactttgataaagatgcttatgatatcgccttctttggtgggggacaggactatgaacaatcaatagtttctgaggaccttacaaatacaaaaaaagaatcaataagggactatataaacagtgaaaaagtatttatcgctatttgcggaggctaccaacttttaggaaagtattacactacacctgaaggagaaaagctttctgggttagatatattaaatatatacacagagcctggagataaaagatttataggaaatactgttataaaaaatgagctttttaacgaaacttatgttggttttgaaaatcattctggaagaacatacataaatgatttaaaaccttttggaaaaaccattgttggatatggaaataacggaagcgatggatatgaaggttgcatctataaaaatacttattgtacatatttccatggttcactactctccaaaaatcccgagcttgctgatagatttataaaaacagccctagaattaaaatacaaaaaagaaattatattagacccaatagatgattctcttgaatttaaggcaaaagaatttgtgattaacagagaaacaaatactaaataa

SEQ ID NO: 15441 - DNA, 1197 bp, Clostridium acetobutylicum
atgaagattttaataacaacagatgcttattaccccatgataaatggagttgtggtatcaactaataatttatataagcaattaaaaatggcagggcacgatgttagaattcttaccttgtcctataacggaagagaatatatagagggtgatatatactatttaaattcccactttgtaaaagtatatccagatgcaagaataatgaagccatttggaaataaagtaataagtaaaatagtagaatggtcacctgagattatacactcgcagacagaattttctacaatgttagttgctaaatatataaagagaaagcttgatatacctcaggttcatacttatcacacaatgtacgaagattatcttaaatactttttaggtggtaaggttatacgtaaaggtacaatggctaaattgttgaaaattttattaaataccttcgacgaaatcatagctccaactgaaaaggtaaagaatgttcttagagagtacgaggtctataaagatataaagattgtaccaacaggaatagatataaaatcttttcaaaaggagttatcaagtaaagagagagaaaaaattttaaatcattacggatggaaaactaaagataagattttagtttatgttggaagggtagcggaagaaaaaaatatagatgaaataataaatttatttaagaagggcttaaatgaattgaaggatattaagctcctcatagttggtggagggccatatctttcacagctgaaagagcttgtttcaaggtacggaatagaagatattgtgaagtttacagggatggttgatagtgatcaagtgtataaatattataaaatgggaattgcatttgtaactgcatctcaaagtgaaacacaaggattaacttatatagaagcgcttgcgagcggatgtccagttatatgcaaatgggatccatgcattaagaatttaattgtaaatggggttactggatttgcatatacggatacaagtgagtttgtaaaggcagtagagagtttaaaatcaaatgaaatactaagaagaaaaattatatctaatgcaaaacaaaagtcgtgtgaatattctacggagaactttggaaaaagcgttatggatatttataacaaggtactattaggaaggaatgtaaaaaagagaaatttagtgcaaatcatacgaacaatattctag

SEQ ID NO: 15442 - DNA, 2457 bp, Clostridium acetobutylicum
ttggatactaagactttaagaatagagggaatgacttgtgctgcatgtgcaagagctgttgaaagagccactaaaaagctagaaggtgttgaagaggcaaatgtaaatttggcgacagaaaaattaactgtaagctttcaggatgataaggtaagtgttcctaatattcaagaggcaatagaaaaagcaggctataaagcacttactgaggctacaaataaaaccctagctattgggggtatgacctgcgctgcgtgtgcgaaaactgttgagagagttacaagtaaactagaaggagtaactagttctagtgtaaacctggctacagagaaattaagtataagttttgaagcatctaaggtaagtattaatgatataaaacaggcaatagaaaaagcgggctataaggcttctgaagaagtggagtctgtagatactgataaggaaagaaaagaaaaggtaataaagaatttatggaagagatttataatatcagctgtatttgcagttccacttttaataattgctatggttcctatgatatttaattcaataggagttatgttgcctagtgctattgatccaatgaataacgaaaagatatatggtgttttggagcttatattagtcttgccagttatgtttcagggaagaaaattctttcaggttggatttaagactcttataaagagaagtcctaacatggattctttagtagcaataggttcatctgcggcatttgtatacagtttatttggattgtatcaaatatttactgggattaatggagctcagctttactttgaatcggcaggaataatattaacactaataacccttggaaaatatatggaagctgtttctaaaggtaaaacttcagaggcaataaagaagctcgttggactgacaccaaagactgctttggttgtaaaaggggaaaaagaagaagaggttgcaatagaggaagttaaaccaggagatgtagtaattgtgaaaccaggtagtaaaataccggttgatggaatagttatagaaggtaatacgtcaatagacgaatcaatgcttacaggagaaagtattccagtttcaaaagggccaggagatgaagttataggagcaagtataaataaaaatggctcaataaagtataaggtaaccaaggttggtaaggatactgttctttcacaaattgtaaagcttgttgaagatgctcaaggttcaaaggcacctatagctaagcttgcagacatagtatccgggtattttgttccagtagttattaccttggcaataatatcttctttagcatggtatttatcaggtgaaaatctaactttcacgttgacaatatttatatcagttctcgtaattgcttgtccgtgtgctctcggcttagctacccctacagcaattatggttggaacaggtaaaggtgctgaatatggagtacttataaaaaatggtacagcacttgaaaatacccataagattaagactattgtttttgataaaacgggaactataacagaaggaaaaccgaaagttacagatataaaagctattgatgaagtttcagaggaagaactacttaaaattgcggcctctgttgaaaaggcatctgagcatcctctaggagaggcaattgtgaaagaagcagaatttaaagggatggaatttttaaaggttagcgattttaaatcagttacagggcatggaattgaagccttaatagatagtaagagagtgcttcttggaaataaaaagcttatggataataacaacatagaagttaaaagtgtgttggattatgtagatgacttggcaaaacaaggtaagacacctatgtatattgcaatagataaacaggtaaagggaataatagctgttgcagacagcgtaaaggaaagtagtgcaaaagcaattaaaaagctgcatgatatgggtatagaagttgctatgataacaggggataataaaagatcagctgatgctatagctaaaaaggttggaattgatagagttttagctgaggtgcttccagaagataaagcaagtgaagttaaaaagcttcaagcaggaggaaaaaaagttgctatggttggagatggaattaatgacgctccagcattggctcaagcggacataggtatggcaataggtaaaggtactgatatagcaatggaatcagcagatattgtactcatgaaaagtgatcttatggatgttataacggcaatagaactaagtaaaaagacaataaaaaacataaaagaaaatttattttgggcatttggatataacgttataggaatacctgtagctatgggaattttatatatatttggaggaccgctattaaatccgatgatagcagcagcagctatgagtttaagctcggtttcagttctaacaaatgcactgagactaaaaagatttaaacctgaatatatgctttag

SEQ ID NO: 15443 - DNA, 204 bp, Clostridium acetobutylicum
atgaaggctaaagaactaagagaaaaagcacctgaagaattaaatttacaattaaatgatttaaagacagaattatttactttgagatttcagttggctactggtcagctagaaaatcctatgagaataaaggaagttaaaaaatcaatagcccaaattaaaaccatccttagagaagaagaattaaaggcgtgtgaggattaa

SEQ ID NO: 15444 - DNA, 753 bp, Clostridium acetobutylicum
atggttaaaattttactaaacggttgcggtggcaaaatgggaactgcaataacaaatctttcaaataattacgacaacgcttcaatatcagctggagtggataaatttccaaaatcaaacactggctatccagtatttaaatctatagctgaagttaatgtagattgtgacgtaatactagatttttcaagacctgattcattagatgaaatacttaaatattcatctcaaaaaaaattacctatagtactttgtacaactggatatacaaatgaacaaattgataaaataaatgaattcagcaaaagccatactgttttccgctctgcaaacatgtccattggtgtgaatatagtaaacaatattctaaaaagtgtaagttctatcttatatgaaaattatgatattgagttaattgagaaacaccacaatcaaaaggttgattctccaagtggaacagcacttctacttgcagatactattaaaaatgctatatcagaacagattgattatatttatggaagagaaggcgtaagcaagaaaaagcacaatgaaataggaattcatgctgtaagaggtggcagtattgtaggtgaacatgatttgatatttgcaggcgaaggcgaaacaattgaaatcaaacatactgctcaatcaagagacgtatttgctgctggttccttaaaagcatgtatgtatatatgtgataaaggccctggactctacgacatgaacgacgtcctcggaatgtaa

SEQ ID NO: 15445 - DNA, 891 bp, Clostridium acetobutylicum
atgtttaaatcaggatttgtaacaataattggaagaccgaatgttggaaaatctactttacttaatcatattatgggggagaaattatctatagtttcctcaaagccacaaactactagaaataatatacaaacaatacttacaggtgaggaatatcaaattgtctttgtagatactcctggaatgcataacccaaggcataagcttggtgagtatatggtgaaggttgctaaggaatctatgaacgaggttgatgtagctttattcgttactacacctgatgtggaagttaaaagaggagatttacatatactagagcagctgaagtcagcaaaggttccagtttttcttgttgtgaataaaattgacgagacaacggaagaaagacttgcagcaactttaaaaaattattccgaggcttttgagtttcaagagataataccaatatcagcacaaaaaggaaaaaatgtagataaattaatagaacttatggtaaaacacttgaatgaaggtcctaaatattatcctgatgatatgataatagataagcaggagaggtttataatagcagagataataagggaaaaagcacttaggtttttatctcaggaagtaccacatggaatagctgtcgagattcttcaaatgaaggaagaaaatgaaaaatataaaatcgaagcaactataatgtgcgaaaaagattctcataaaggaattattattggaaaaggcggagaaatgcttaagaaaatatctcaatctgcaagaaagagcgcggagaagtttctagataaaagggttaacatgaaaatatgggttaaggttaaaaaggattggagagatagtccttttgtactaggtgagcttggatataaagcgcctaaaaaataa

SEQ ID NO: 15446 - DNA, 375 bp, Clostridium acetobutylicum
atgattaaaggagttggcgttgatattattgaaataaatagagtaaagaacgctattgatagaaattataaatttattgaaaaattgtttagcagaagagaaatagcatatataaaagctgaaaagacaaaggcacaatacatagcaggaagattttctgctaaagaagctgtttcaaaagcacttggaactggttttagaggctttagttttaaaaatatagaaattcataaggatgatttaggaaaaccaatagtagttttaaatggaggtgcaagagctattgctgaaggttatggaaaataccaagttcaattaagtatttctcatgatagagaaaaggctatagcttatgctgttttggaggtgttttaa

SEQ ID NO: 15447 - DNA, 603 bp, Clostridium acetobutylicum
atgaataatttaattgtttttgcacatccaaatccaaacagttttggaaagggtatattagatgaagttgtaaaagcatcagaagagagtggtgcagctgtaagaattagagatttatatcaattgggatttgatccaatattaaagcctgctgattttgaaacttttcaaagaggagaggttccacaggatattaaagatgaacaagaaaatgttaaatgggcaaacatgattacttttatttatcctgtatggtgggctggactaccagctatgcttaaaggatatgtagatagagtatattcatatggatttgcttatgagtatgttgatggtcagccaagaggtttattaacaggtaagaaggcattaatattctgtacaacaggaacaccaagtgatgtatatggagcaaatggtatgcataactcaatgaagcagacaacagatgaaggaatatttaagttctgtggaatagaggaagtaagacataacttttttggagcagttccgcatgtttcagatgaaattagaaaagattatttaagagcagcttcagaaatagtgaaggagcacataagttcttcaaaaagtttcgtttaa

SEQ ID NO: 15448 - DNA, 300 bp, Clostridium acetobutylicum
gtgaggtatattatgtctgtttctaaaaaagatgttgaatacgtggctgaacttgcaagacttagctttagtgaagaacaaaaagagggatttatggaggatcttaatagcatacttggctatgtagataaattaagtgaattagataccgataatgttgatataattgtaaacccatattatattgaaaataaattcagagaagatgaagtggaagaatctatggatttaaaggatgttattaaaaatgcacctaagaatcttgaagaatacatagtagtacctaagataatagattaa

SEQ ID NO: 15449 - DNA, 807 bp, Clostridium acetobutylicum
ttgaacaaaagatttgagggatggattttaatatctgatatggatgatactttaattggcagtgataaaagaatttcagaaaagaatcttaatgctataaaaaagtttcaaagtttaggtgggaggtttactatagccactgggagaactatggaatcagcatataggtatataagaaatcttcaggtggatttaccagtcatactttacaacggagctaaaatatatgatttcaataaaagtaagactatatttgaaatagaattagatgatagagtaaaagaaataataaaaaaggtaaaggaatacgatacttcctttggaattgaaatatacagtaatgaaaatacctatatttacaacacttgcagatttactgaaagatttaaaaaaaggggttacagtgtattctacgaaattccagaagagctttggaaagaaaagtggacgaaagttcttgttgtaggagagaaaaatcaggaggattacttagaagaaaactttgaaaggctttttggaaaggttaatttggtgagaagcggtgaaaattatttagaaataattccaaagggtttatcaaagggagcagcactagaaaatttgtgcaatctagagggtgttgatattaataaggttatttctgtaggtgataacatgaatgattacgaactaataaaaaaggcgggatatggtttttgtgtgtcaaatggcaacaatagacttataagcatgtgcagcaatatatgtccatcaaatgatgacaatccacttgaatacattgtaaactgggcattagaaaacttgtag

SEQ ID NO: 15450 - DNA, 1056 bp, Clostridium acetobutylicum
ttgaaaaatcgaatagaaactttattagtagcatttacttttgtatctgctactttttttatacctttaaatgtacacgccacaatctataaaggtattgatatatacgaatatgacaatatacaggactggcaacaagttaaagatagtggggtttctgtagttatacaaaaggctacgcagggactataccacaatgatagtttacttaattataggtatcctaaaataactaatgcaggacttaaaattgggtattatcattttgcaaataattctgccaatcctgtagctgaagcacaacatttcttatctaggatacaagggctaaaaatggatacctgtttatggctagacatagaaaatcaaccgaattggacaaagcaacaggctatagactatacaaataagtttatatcttatgtacagagccaaggttataaaataggaatttacacagggttaagcttctattatgaatatctacaaggacatgttcctaatgttcctttatggcttgcttcttatggcaaacaacctcaacaatatcctaatttggtttcatggcagtattcagaaagtggaagtttgtcaggtgttattggggatgtggatttagattattttaatgatagtatctttacgggacaagcaccacaagtaactacagcggtacaagaaactaatccagttaagataattcaacaacagttaaatacagtactttattctagtaaccttactatagatggaatacaaggtaatgcaactacacaacaaattagagtatttcaacaagtctgtggtttaaaaatagatggcatttggggacaacaatgtgtaaatgcaatacaacagatttatggaaaagatttatgcggcagaccttatattcatagaatacctactcgtgttattcagtacaatatgggtattagctttgatggcatttatggtaaaggtactgcaagtcgtgtacaagcatggcagtcaggtcacggattaaatacagatggattattcggaaataaatcatggaacaaattatttaaataa

SEQ ID NO: 15451 - DNA, 1287 bp, Clostridium acetobutylicum
atggacaatttgttaaacatcgttattatactcttacttgtatttatgaatgcattttttgttgcagcagaattttcaatggttaagataagaaaatctagaatagaaacgctggtacttgacggagataaaaatgctaaatacgccctaggagtaattaataatctaaattcttatttgtctgcatgtcaattaggaataactttggcatctttaggcttaggttgggttggagagccagcagtgtcaaagatgttatccccattattcaatctccttaaaatacctaaacaaattattggttctatttcggttgtggtgggttttataataataactggatttcatattgtccttggagagttagcccctaaatctgtagctattttaaatacagaaagtatagcaaaagctacagctattccattaacactattttataaatttacttatccaataatagtagcctttaataaaagtacggatcttgttttaaagctatttggcataaagcaggtagatgagcatgaagaggctcatacggatgaagagataagaatgctggttgaggagagctataagcatggtttaattgataaaacagagttaacctttgtggataatgtatttgacttttctgaaaaaactgtaaaggaaattatggttccaagaacagatatgaaatgcatttttgtagaggattcctttgatgatatagtaggagtaactatagatgaacatttcacaaggtatcctgtatgtgaagaaagcaaggataatatcattggactcatacatataaaggatttatataagctaaaaattaataaagaagatgaaaagatagaaagtattataagggaaatcaaatttgttccggaatcaatgtccattagtgaactatttagaatgtttcaaaaagaaagaatgcagatggcaatagttattgatgaatatggtggaacctttgggcttgttacaattgaggatattttagaagaaatagttggagaaatccaagatgaatttgatgaggaaatggaagaaattataaaaacagaaaatggaagctatgtagtagatggcaaggttttaatagaagatatcaacgagcttttagatatagagatatatgaggaaaatattgatactataggaggatggatttattctaagttgaagaagtatcctaaaaccaatgaaaaaataaattatgggaattatcaatttataatattaaaatgtgatagaagaagaatagaaaaaattcttattaaaaatttatga

SEQ ID NO: 15452 - DNA, 1497 bp, Clostridium acetobutylicum
atgaagaaatatataatagcattagatcaaggaactacaagttcaagagcaataatatttgaccatgaacaaaatatattagaaattagtcaaaaggaatttactcaaatctatccgagtaaaggatgggttgagcataatcctttagagatatggtcaagtcaatatggagttttgcaagaagtaatggcaaaagctaatataactcaagaaaatattgcagcaataggaattactaatcaaagagaaacaacaattgtttgggacaaaaatactggagaacctgtgtataatgctattgtatggcagtgtagaagaacagcagatatagtggaaggacttaagagagataaagagttttcagattatgtaaaagaaaatacaggattaatattagatgcatatttttcagcaacaaaaataaagtggatattagataatgtagagggtgcaagagaaaaagctgaaaaaggtgaattgctatttggtacagttgatacttggcttgtatggaagctaacaaatggcaaagtccatgtaaccgattacacaaatgcatctagaactatgctttataatataaaggaattaaaatgggatgaaagaattttaagaaaacttaatattccaagatcaatgctaccagaagttaaaaattcatccgaagtttatggatatacaaaccttggaggtaaaggtggtattagagtaccaatagcaggcatggcaggagatcaacaatgtgcattatttggtcaaacctgttttgaagaaggtagtgttaaaaatacttatggcacaggatgctttttacttatgaatacaggagaaaatataattcagagtaaaaatggactagtaacgacaattgcaattggattagaagggaaagttcaatatgcattagaaggttcagtgtttgttgggggggcagttattcagtggattagagatgaacttaagttagttagcgatgctgcggatacagagtattttgctaaaaaagtgaatgacaatggtggagtatatgtggtaccagcatttactggtcttggagctccatattgggatatgtatgctagaggagcaatttttggtctgacaagaggcgcaaataaaaaccatataattagagcggcacttgaagctattgcatatcagtcaagagatcttatagatgcaatgaaagaagattcgggatgtgaaattacaagaattaaagttgatggaggagctagtagaaataatttattaatgcagtttcaagcagacattacaggaacagaagttgtaagacctataataactgaaacaacagcacttggtgcagcttatttagccggacttgctgtaggcttttggaagtcaaaagaagaaattgccgagaagtggtctgtgagtgaggtgtatactccgaatttagatgaggatgagaaaataagattatataacggttggaagagagcagttgaaagagttcagggctgggaagaataa

SEQ ID NO: 15453 - DNA, 1191 bp, Clostridium acetobutylicum
atgatacaacttttagcattgaaaagagatttaaaagttgaaataagagaaaaattttcaataatagagaaaagaataggagataaggatgtacttttaaaggaggtatgcaatgaagttgtcatattaagtacatgcaatcgaattgagatatattttaatagtgagaagaataggaaacaaattatagaagagattttttcaaagatgggatggaacataaattttttagagaattttttctattgtaaaggtgatgaggcaattaatcatctaatggaagtggcatgtggctttgattctcttatcttaggagaagatcagatattagggcagataaaagctgcatatgatactgcgcttaaaaataaaacttcaggtagtgaactaaagaagctgttccagttagttattacctgtggtaaagaatttagaagtatatctatgcttaatagaatacctgtttcatctgcatcgatagctgttaataaggcaagacaggaaaacttaagaagatttatggtttttggctttggagatgtaggttctctagtatgcaaatatatattatcaagtgattttgatgtgttatatattgttgttagaaataaagcagctgtaagtataaaagataaaagaataaaggtcctttcctttaatgaaaagaatagttactatgatgatgtagagtgtatgatttcctgtacgtcagcacctcatcctgtaatatgggagaaagagcttccttacaggaaattcactattttcgatttggcagtaccgagagatgttgaagagactgtttatggtagaaataatatagatatatatgacatagatcagataagcatgatagataataataacagaaaaaagagaaaagaaataatgatggccaatagacatataatgtccaagtatattgtagagttctatgattggcaaaaggttcaggaaatagttcctgatattataaaattgaagctgtatggtgaaagcgtaaataaaagaagatatgaaacctttaagaataaaaaagctacaaaggataatgatatgcttgtaaatatgctcataaaaagcacgtcaaatgtatatataaatagagcaatagaagtgcttaaagaggagcaattgaaagggcgtggagaagattgcctaaggatattaagaaggatatttcagaagtag

SEQ ID NO: 15454 - DNA, 1713 bp, Clostridium acetobutylicum
atgtattgtattgaggaaaaaatagaaaaagcattgggaataaaagaagcctcacttgtacttaaaaattgtaatatagtaaatgtattttcaagtgagataatacgtggagatcttgctatagatggggacactataataggaatagggaaatataaaggaaaaactgaaatagatttaagtaataaatatgtagctcctggatttatagattcacatgtgcatatagaatcatctatggtttcgcctaaggaatttgcaagagcagttatatcaaggggaaccacaactataattgttgacccacatgaaatagctaatgtgtgtggaatggatgggataaaatacatgatggaggaaacaaagaatatgccacttgatgtattttttatgctttcatcatgtgttccggcaactagttttgaaacttcaggtgcagttcttaaggctgaggacttaaaggaattgattgacagtgatagagtgcttggcttaggtgaaatgatgaactatcctggtgtattaagtagagaagaggaagtactaaataaattaaagcttgcaggaagttataataagatagttgatggtcatgcaccttcagttagaggaaatgaattaaatgcatataatttggctggaataaaaactgatcatgagtgcagcagtatagaagaaatgaatgagaagataagaaacggaatgtatatagcaattagagaaggctctgcagcaaaaaacttagatatacttataaaaggagttaatgctaaaaatgaaagaagaattatgttctgtgcagatgatagacatccagatgatattttaaaatcagggcatatggataattgtgtaagaagagctatatataatggaattgaaaatacagcggctattaggatggcaagtattaatgcagctgaatgctataagcttgaaagagttggagcaattgcaccttcatataaagctgatttagttgttttggaggatttaaaggatgttaaagtaaacatggtaataaaaagtggagaagtggtatttaaggacaataagcatttaaaggatatgggaagtaaaagcgatattacgaaggtcagcaatacagttaatataaaaaaagtaagtgaagaaaatttagaactaaaattagatacagatgtttgcagcattatttccgtagctttaaacagtatatcaactaaaaacgtaaagagaaaagtcaatcttagtaatggtatatttaaatgcgagctcaattatggaataaataaagttgcagtaattgaaaggcataagaagtctggaagtataggaataggtcttgtagaaaactttggacttaaaaggggagcaatagcatccacagtagctcatgattcacacaatataatagttcttggaaataacgatgaggatatggtgaaggctgtaaatgaaatagaaagagttggaggagggataacaataagtttagatgggaaaataattgaaacacttgaattagaaatagcaggattaatgtccaataaatcaatggagtttgtggcagaaagagtttcaaaaatgataaatatatgccataatactttaggtgtaaataaggatattcagccatttatgactcttgcgtttttagcacttccagttataccagagatacgaattacagataaaggtgtatttgatgttgtgaattttaaatttctataa

SEQ ID NO: 15455 - DNA, 990 bp, Clostridium acetobutylicum
atgcaggagcctgatttttggaatgatgtaaaaagagcacaagaaataagcatggagataaaatttcttaaaggaagaattgatagatttaattctattgaaagcagaattgaagatgataatgtacttatagaaatgtgcagagaagatgaaaatgaagaagaagcggatgagatactaaaggaagttcgtgacttacatgaagaggtagataattttaagatagaaataattctttcaggagaatatgatagaaataatgctattttgaatcttcatacaggcgttggaggtaccgatgcacaggattggacacaaatgcttttgaggatgtatacaagatgggcggaagctaaagggttcaaggtagacataattgatatgctcccaggagatgaagcaggtataaaaagtgtaagtataaatattgatggagaatttgcttatggatatttaaaggctgaaaaagggatacatagattggtcagaatttcaccctttaatgcaaatggtaaaagacaaacttcttttgcatctgttgaagtacttccacaattaactcaaagccaagatatagttatacgacctgaagatttaaaagtggatacttatagggccagtggagcaggtggtcagcatgtaaataaaacagaatcagcagtaagaataacccatcttccaacgggaatagttgtacaatgtcagtctgaaagaagtcagcattctaataaggaaactgctatgaacatgttaaaatcaaagcttgttgagttaaaagaaagaatgcataaggaaaaggtagaagacttagcaggagaacttaaggatatgggatggggaaatcaaataaggtcatatgtatttcaaccatacacaatggttaaggatcataggactggtgtagagacttcaaatgtagatgctgttatggatggagaaattgataaatttataatagagtacttaaataaggaaaacagccagaaataa

SEQ ID NO: 15456 - DNA, 1716 bp, Clostridium acetobutylicum
atgttattaaggaaagatgcaacagaggagagattgacaggaagatattttacaccaaaagatttagcaagttatattatagattgggtaatacaggataataatattaataaaattctagaacctagttgtggaaatggtgtatttctagaatgtttaggtgagagaagactagaagatggtcgtaatattacagcaatagaaatagatgaagatgtatcattcgaagcaagtatgcaaattgataatagcctaagatttaataattgttatgattatcaaagagcgttaagaaatgatggagatatagttaataacggtatagtaataataaatgatgatttttataaagtgtacgaacaagaattacaagggcaaagatttcaggctatagttggaaacccaccatatattagatatcagtatttatcggagcaacaaagagaagaacaaagcaagattttaataaggaataatatgagacctaataagttaattaatgcatgggtttcctttgtggtagcttgtgcagaaatattagatggcaatgggaaaatggggctggttattccagcagaattacttcaagtagcttatgcagaagatttaagaagatttattatgagaacatttcagcgcattactattgtaacgtttagagagttagtatttcctaatgttcaacaagaagtagttttattgttagtagaaaaagagatattgcatacacgagagcatcaacttagaattgtagaatatcaagatataaatgaattaacagaaagtaatgatttagatgaatatccatttaatgatgtagaaataaatgaatctaaatggactaaatattttctatcagcaaatgatataagattaattaataatattagagaaaacgataaatttgtaagatttagtgatgtggcaagagttgaagttggaattactactggaaataatgattacttctgtgtgaataggagagttgtagaagaatatgatttagaaagagtatgtagaccattaattgctaggagcgttaatattaacggagtaaaatttacttatgaagattggaaaagtaatattgaaaatggagcaaaaacatatctaatagatttccctgacgtaccatatgatgagtatcagttgtcatataaacagtatattgagtatgggatacataatgataaaaattcaggatataaatgcaggataagggataggtggtataaagttccatcgatttgggttccagatgcatttttcttaaggagaaatcacttgtatcctaaatttgtattgaatagtcaagaagttaatgctgttagtacagatacaatgcatagggttagatttaataatcatgatgatagggaaagaattcttctttcttattataatagtattgcattagcattcactgaaattgaggggaggagttatggtggaggggtattagaaatattaccaagagaagttggaagaattattatgccagatttaagaaatagagaattaattgatgatgcaacagtaagtaatttacttaacagaatagatggatatattaggagtaatgataacatactgggaatagtggatgaaattgatgaaataatattagttgaaataatgggtgtagatgaaaatgtggttagagaatttagaaatatatggttaaccctacaaaggagaagactgaatagaagataa

SEQ ID NO: 15457 - DNA, 198 bp, Clostridium acetobutylicum
atgactggtacagttaaatggtttaatggagaaaaaggttttggatttattacaggagaagatggaaacgatgttttcgctcactattctcaaataaatgtagatggatacaaaactcttgaagaaggtcaaaaagtttcttatgatgttgttaagggaccaaaaggacttcaagctgaaaatattacacttgcataa

SEQ ID NO: 15458 - DNA, 549 bp, Clostridium acetobutylicum
atgaatttaaatatagataatcaaattttgaaaggtaaagaactagaaatttccgcatttctaaagaagagatttttattatctcccatatctatttcaaaagagatagaaaaaatgctagagggagactatagtattcttgaaacagaaaaggatcaagaagaatttaagaatattttatttaaagaggatttaaaaaataaaaataaggttgataacgatacaaatgcggatgttttaaagatagaattaagtaaacttaaaagatcaaatcaaaaaaaggatgaagatatacaaagcttaaagaatgcattacaaaaggctgctgaagataacaatagattaaaagggcttctttctattacagttaataaagagttagtggtagttgaagatgaggaaattgatgaactttttgtgcgctatatgacatcatcaggagctgttaaaaagtacaaaaaggctattgttatagaggaattgggtattattcctaagtccttttacatcattaagaaaggagtaagtaaagatgaagaacacgagtaa

SEQ ID NO: 15459 - DNA, 762 bp, Clostridium acetobutylicum
atgaaaataaagtgcattttaatagaagatgaaatttctaatgagaaagagttatattttatattaagaagatatgatgatattgaaatagtaggtatggtacaaaatactgatgaaggaatagatcttgttaagaagttaagaccgcaggctgtatttttagatataaatgttccaaactttaatggaataaaactagctgaggaaataaaagatgtggacagtactattgcggttatttttgtaactgcttatgataaatatgctgtagctgcttttgagattaaggcacttgattacatattaaaaccttttagtatagctagaattgaaaaggctgtagaaaggcttaaggaatatattaatgttaacaaatccatgaaggagaagttatttgagttaatatgtgaatttaataacatggaaagaaaatatattattaataagataccatgtgaaaataaaggaaaaattgtacttgtggatgtaaatgatatatattttttctatattaaatcagagaaaacatatgttaaactaaatgatattatatatgttacaagcagtacattaaatgatatggaaaagaaaacaggattttttagagctcacagaagttatcttgtgaatttaaacaaaatatttgaaatttactcttggtttaatggtacctataagcttattatgagtgattatagaaaatcagaaattcctgtaagcaggggaaacgttagaaaacttaaagagattataaatatataa

SEQ ID NO: 15460 - DNA, 603 bp, Clostridium acetobutylicum
atgaataataaaaaaagtacaaatgtagtgtggcaggaaactaaaataaaaagacagaatagagaaaaaatgttaaaacagaagggtgcagttttatggtttactggactttcaggttcaggtaagtcaacggttgcatctgcacttgaaaagaagctttatgaaatggggtacttgacatatttattggatggagacaatttaagatatggtcttaattctgatcttggctttaaaagtgaagacagaactgaaaatataagaagagtatcagaagttgcaaaactgtttgctgatgcaggaatcataacaataacaacatttatttctccattcatagaggatagaaataatgcaagaaagcttttagggaaagattttgtagaggtatatatagattgtcctattgaagtctgtgagaaacgagacccaaaaggcatatataaaaaagctagaaatggtgagatcaaaaattttactggcatcgattcaccttatgaaaaaccagaaaagccagaaattacggttgaaacgtataaggatactgaagaaaaatgcgttgacaatataattgaatatctaaaacaacataaaattttatag

SEQ ID NO: 15461 - DNA, 963 bp, Clostridium acetobutylicum
atgaggattattggacttagaactttaaaaacggctttaggagcggctatagccattataattgcagaattcttaggattaaagtatgcagcagcagctggaatcataacgatactaagtgttcaaaatacaaaaaagacttccataattatagcttttcaaaggctagcatcaactttactggcacttattataagctgcataatatttatgatttttggctataatccaataagctttggagtatatttagcaatatttattccccttacagtcctatttaagcttacagagggaattgcagttagttctgtactagttacgcatattttagtcgaaaaaactatatcagtattttggcttaagaatgagctcttattgatggtagttggagccggtatagcaatactcttaaatacatatatgcccaaaattgataagagaataaaggaaaatcaaattgagatagagaatctcatgaaaaaaatacttttaaatatggcgagggagcttagaggagaagccatacaaacagaaaatttgtctctttttagtgaactctctaaggcaatcaaaagtggaagcgagagggcatacagaaacctcaataataatataatagtttcggataaatactatgttatgtatatggaaatgcgaaacatgcaattcgaaattttaaaatatatgagaaatcacttcaccaagttttatatgagctttgagcagacgaaattagtggcagacataactgaaaagataggagaacagcttcatgaggaaaatcctgtagatacacttattgaagatttaagagagcttttcaaaacttttaaagagcaaaagcttccagagacaagagaagaatttgaaaatagggcactgctttttcagttcctaaatgacttggaatattttctagagataaaaagaaaatttataaagaataaagtaagtgtttaa

SEQ ID NO: 15462 - DNA, 1755 bp, Clostridium acetobutylicum
atgaagaaattaatgcttggtaatgaggctattgctagaggagcttatgaagcaggggttactgtagcaacagcgtatcctggaactccaagtacagaaattacggaaagtattgcaaaataccatgaagtatatgcagaatggtcacccaatgaaaaagttgccttggaagtggcaattgggagttcaattgggggagcaagagctttgtgctctatgaaacatgtcggcttaaatgtagctgctgatccattatttacagtatcatatacaggtattaatggtggactagttattgttgtggcagatgacccaggaatgcatagttcccaaaatgaacaagatagtagacgatatgcaaaggctgctaaaataccaatgctggagccatcaagtagccaagaatgtaaagaatttgtaaaagaggcatatgaaataagcgaaaggtttgattgcccagtaattatacgtttatccacacgaattgctcattctcaagatattgttgaaattaatgaaagatgtaaatgtgatattaaggattacataaaagatattaataaatatgtaatggttcctgcaatagcaaaagtacgacatattaaagtcgaaagtagaatgaataaattagtaagttttagcgaatcatcacagttaaataatatcgagtggggaaaaagaaatataggaataatttcaagtggtattgcttatcaatatgcaagagaagtatttaaagatgtgtcatatctaaaaattggcatggtttatcctttaccacgagagataattgaaaggtttgcaaataaagtagaagaactatatgttattgaagagctggaaccttttattgaagaatacataaaggaattaggaattaaagtaataggtaaggaagttttgcctatggttggggaattaaattcggagattataaataatagtttttctagtaaaaaacctactgttaataaaaaaatagctaaagatattattgcacgacctcctgctatgtgtccaggatgtcctcatagaggaattttttatgttttgaaaaagttaaaattaaatgtaagtggagatataggatgctattcattaggtgcattattgccattaagatctattgattcatgcatatgtatgggagctagtattggaattgcacatggtatggaaaaagcacgtggtactgaatttataaatagaactgttgccattttaggagattctacttttatacattccggtataacaggattaattgatattgtatataataagggaaattcaactgtcattatacttgataatgcagttactgctatgacgggatatcaatctaatcctacaacgggttataatattaaaaatgaagcaacaaaaaaagtagaacttgaaaaactttgcagagcagttggagtggagcgtataaaagtagtagatccatttaatgttgatgaagttgaaagtgttgtaaaggaagaaattgcagcatgtgagccttctgttattattgcaagaagagagtgcgaacgaataaaagaacataaatcaaaggctattcctttaaaagttaatcaaagtaaatgtgttaagtgtagaaaatgtcttgaaataggatgtccttgtatttgtattgaagatgaagatattgtagttaataaatcattgtgtattgggtgtaaattgtgtatgaatatttgtaaaatggatgctttcgaggaagatggtgatgtgaatgaggaatattaa

SEQ ID NO: 15463 - DNA, 1935 bp, Clostridium acetobutylicum
atgtcagagaagaaaaagttttatattacaacacctatttattatccatctgcaaagcttcatataggtaatacatatacaacagttgcgtcagatgcgcttgtaagattcaaaaggcttcaaggctatgatgcctttatgcttacaggaacagatgagcatggacaaaaaattcagagaatagcagaagataagggaattactccaaaagcttatgttgatgaaatagttgcaggaataaaggatttatggaagatgatgaacataagctatgataagtttataagaactacagacgaagagcatgtaaaagcagttcagaaaatagttaaaaaattctatgataatggagacatatataaatcagcttatgaaggctggtactgtactccttgtgagtccttctggacagaaactcaacttgtggatggaaagtgtcctgattgtggaagaccagtagaaaagacaaaggaagaagcttatttcttcaaaatgtcaaaatatgctgatagacttataaaatatatagaagatcatcctgattttatacagcctgaatctagaaaaaatgagatgctcaataatttcttaaaaccaggtcttcaagatttatgtatatcaagatcctcttttgattggggaattccaataacttttgatgaaaagcatgtaatttatgtttggatagatgcactttcaaactacataacagctttaggttatggaagtgataatgatgaactttataataaattttggccagctgatttacaccttgtaggaaaagatataataagattccatactatatattggccaattatgttaatggctttagacttgccacttccaaagcaagtatttggtcacggctggttattggttgatggaggaaaaatgtcaaaatccaaaggaaatgttgtagatccagtagtactaataaatgaatttggaacggatcctgttaggtattatcttcttcatgaaataccatttggttcagatggtttgtttaacaatgagatatttataaagaaaataaattcagatcttgcaaatgatcttggaaatttggtttcaagaactgctgctatgattgaaaagtattttgatggttcaattcaacctccagttgataaggaagaaattgataatgaacttattgatatggctataagtcttcctgaaaaattggatgaagacataaagaaactgaaaataccagaagcacttgatcatatatgggatctcataaagagagcaaataagtatatagatgaaacaactccatgggttcttgctaaggatgaaaataagaaggcaagacttggtactgtattatataatttagtagagagtttaagatttgttgcgacaacattaactccattcttacctgaaacaggagagaaaataaagacacaacttaatatagaacttgatacatgggaaagtctttctgcttttgatggaactcgtgcaggtactaaggtttcaaagggagaagtaatattccctagaatagatgttgataaaaaaatagaagaacttaataaattaaaagaagagcagcttaaggctactagaaaaatgcagcctttaaaacctgaaataagcatagatgatgttgataagttggatttaagagtagttaaggttttagaatgtgagccagttaaaaaatctaaaaaacttcttaagcttaaggttgaactaggtggagaagaaagacaggttctatctggaatttctcaattctataaaccagaagatcttattggaaagaaagttgttcttgtagctaatttgaaacctgcaaaattaatgggtcagctttcacaaggaatgatacttgctgttgcaactgacgatgacagtaaattatatactttagatataccagaagatataccaactggaagtattgtaagataa

SEQ ID NO: 15464 - DNA, 864 bp, Clostridium acetobutylicum
atgagcataagaaaagctgtgattccagcagcaggtttaggaacaaggttccttccagctacaaaagctcagccaaaggaaatgttacctatagttgataaacctacaatacagtatatagttgaagaggcagctttatcaggaattgaagaaatacttataataattggaagaaataaaaaatcaatagaagatcattttgacaaatcggcagagcttgaagaagaactaaaaaataaccataaggaagaacttcttcggatggttaggcaggtaagtaatatggttaacatatactatgtgcgccaaaaggagcctatgggattaggacatgctattagtttggcaaaaagttttgcaggaaatgaagcttttgcagttatgcttggggacgatatagtggacagtaaagtcccctgtttaaagcagcttatggactgctatgatagatataatacgtctatattaggagttcaggaagtaagaaagaaggatgtttgtaaatatggaattgtggatggaataaacatagaaaataaaatatgcaaggtcaaaaatttagttgaaaagcctagtatagaaatggcaccttctaatatagctattcttggaaggtatattataacgccaactatatttcctatactggaaaatacaaaacctggaaaaggtggagaagttcagcttacagatgcattagaagaattgctaaagagagaagcaatatattcatattgttttgatggcaaaagatatgatattggagataaacttggatttatagaggcaaatatagattttgcacttaaaaatgataaactaaacagtgaacttaaggaatatctactcaacataaacaaatag

SEQ ID NO: 15465 - DNA, 789 bp, Clostridium acetobutylicum
atggctacaattgaatggaagtcttttttgataccttacgagcaagcagtagaagaattaaaggttaagtttaaaagtataagaaaggaatatagaaaaagaaatgaatattctccaatagaatttgttactggaagagtaaaggagatttcaagtatactagaaaaagccaataagtttaatatacctgatgaaagaataatgcttgagatggaggatatttgtggaatacgtataatgtgtcagtttgttgacgatgtaacaaaggttgtaaatataattcgttcaagaaaagatatgcatataatgtatgaaaaagattatgtaacaaatgtaaagagtagtggatacaggagttatcatatcattataaagtaccccgtaagtatggcagaggggcaaagagatattatagcagaaattcagataagaacacttgctatgaacttttgggcgacaatagaacattctttaaattataagtataagcatgatatacctgacgagattaaagcaaaattaaaaatagcagcagatgcagcatttcagcttgatggacacatgcttgagattaaagatgagattaaggatgctcaaaagctatttgaagttaaatctagtattgtttcaaatattataagaaatatacttaccataacatctatggggaagttatcagaagcagatatatataaaagtaagcttaatcagctaattaataagggagaggtttttgaattaaataatctccttagaagtacggaaaagacaatagaaatgggtagataa

SEQ ID NO: 15466 - DNA, 480 bp, Clostridium acetobutylicum
atggaatttaatttagttactataggctttacaatagtaaacttcataatccttatgttgatacttaagcactttttctttgataaagtaaataaagttattgatgataggaataatgaagtagcattaacaataaaaaaggctgatgcacaaaacgaagaagctaggcttttaaaagttgaaagtgaaaagaatctagaagattcaaaacttcaaggaaaaaccattgtagaaaattacaaggtaaaagcagaaaaagtttcagaggaaataacagcagaagctaaaactgaagctcagaatatattagaaagagctaaaagagaaacccaaagagaaaaagaaaaggctgaagatgaaatcaaaaatcaagttgttgaacttgctgtattaatttcctcaaaagctcttgaaaattccataaatgaagcagaacacagaaaacttatagaagattttgtatctaaggtaggtatttaa

SEQ ID NO: 15467 - DNA, 774 bp, Clostridium acetobutylicum
atgaataccatggttgaactaagaaagcttattgtatttttactttcatttacttttcttttatatttattatatgtaggaatcaatatttcaaaaaaactgaggataagaaggtcacctttctttttaatgatatctggtgttggtcttattactttaggtacttttttagatgctattgacaaatttatagatgtaggaataaaaaatgttatagccgcatgttttacttttggagcaatactgtttgttgtatttataatatttttatcaaacaactttgtgtgtacagtatctttattatatgaggatgcaaatatggacaaaatgacaggtgcttataataggaagggaattaatgaaatatttcaaagaagtattgctaagcagaatagcttttatcttatgttatttgatttagatgaaacaaagagactaaatgataaatatggacatgcagttggagataaatacataataggagcttcagcaattataaaggatactataggcaacaaaggatttgtaggcagaattggaggagatgagttcatagcgcttttaaagcttgaaaatgaagttgatgtagagaaaattaaaaagcttataaaagatcaattttgtgaaagctttaagcaatatggagccaacataagtataggatattcgaggtttaaagaagatggacaagagtttgaagagatttttcaaatagcagacaagaatatgtatgatgataaaaagagtaataaaaagaataaggcttgtttttaa

SEQ ID NO: 15468 - DNA, 768 bp, Clostridium acetobutylicum
ttgcatgtaatatatgctagaaaggtatgcgtgaaaaagctattttttcccatttttcttttaattttttgtgtaggtatttttatgtatatgcataaaaataatataggagtttttgtcgataaagataaaaaattacctatatattctgtcgatactaaagataaaaaaatagctataacatttgattcaaattggggtaacgataacaccatgaagattttagatgtattagataaatacaatgctaaggcgactttttttcttataggaagatgggtagaagattatcctaatgaaacaaaagagatttatagaaggggaaatgagataggtaatcattcatataagcacttagatatgactacaatgtcaaagcaaaatataaaaaaagatatagctatggctgatgagaagatttattcggttacaggaaccaaaacaaaggtttttagatgtccatcaggttcctatgatagttctacaattgaagtagcagaaagcacaggacataaatgtatacaatggaatattgatagtatagattggaaggaacaaggtcagaatgtagaatatgatagagttattaaaaatattaaaccaggatcaataatactttttcacaacaatgcaaaatatactccaaagaatttggatagaatgttaaataaattaaaaagtgatgggtataaattcgtgagaatatctgacttaatttacgataataactattatattgattatatgggcaggcaagtaaaaaaatag

SEQ ID NO: 15469 - DNA, 474 bp, Clostridium acetobutylicum
atggcaagtaaagttttaaacaaagttatgggaataataggacttaatgatgaggattttgatgagtatgaagatgaagtaatggaagaaaaagcaatagcaagagaaaatagttatgactatgatgaaaaattaaatgataaaaatagcagcaatagtaataataaagtggtaaatatacatacagcttcttctgtaaaggttgttattgttaaacctaaagattatgatgaggcaactcaaatttgtgatgatttaaaaaatagaaaaatagttgtagttaatgttacagatttagagcctaaaacagcacaaagacttcttgattttatgggaggagcaagttacgtattaaatggtgagcttttagaaattgataaaggggtctatttgttatcaccttcaaatgttgatatatcaagagatcttaaaaatgatttagcaagtaaaagcatttttaattggtctaaataa

SEQ ID NO: 15470 - DNA, 1431 bp, Clostridium acetobutylicum
atgagaaatacttatgaaacaccacttaatacaagatatgcatctaaagaaatgagttatcttttttctgatgatatgaaatttagaacatggagaaaactttgggttgctctagcagaaagtgaaatggaattaggacttaatataactaatgagcagattaacgaattaaaagctcatattgatgatataaactacgacgttgcacaagaacgagaaaaaatagtaagacatgatgtaatgagtcatgtatatgcttatggcgttcaatgtccatcagcaaagggtataatacatttaggtgctacatcctgctatgttggagataatgctgatattatcataatgaaggaagcccttatacttataagaaaaaaacttcttaatacaatacaccatttaagcaaatttgctttaaactataaatctcttcctacacttggattcactcaccttcaacctgctcagcttactactgtgggtaaaagagcaaccttatggatacaagatttaatgatagatttagaaaatcttgattttgtaatagaaaatttaaaattaagaggtgttaaaggtacaacaggaactcaagcaagttttatggacctttttaatggagaccaggaaaaaattaaaacccttgagaaaaaagtagttgaaaaaatgaactttaaatcggcatatgatgtaacgggtcaaacttatcctagaaaaatagattctatagtactaaatacactttcagagattgctcaaagtgcttataagttcagtaatgacttgagaatacttcaaaatatgaaagagatggaggagccttttgaaaaaaatcaaattggatcttcagcaatggcttataagagaaatcctatgagatctgaaagaataagtgctctatcaagatatataattgtaaattcacttaatcctgctattactgcggcaactcaatggtttgaaagaacactagatgattctgcaaacaaaagaatttctgtagcagaagctttccttgcgctagatggtgttttgaatctttatataaatgtatcgtccaatatggtagtatatgaaaatgtaataacagctcatgttaagagtgaacttccttttatggcaacagaaaatattatgatggaagctgtaaaaaaaggttgcgacaggcaagaacttcatgaaagaataagaaaacattcaatggaaacagctaaaagaattaaagctgatggattaccaaatgatttaatagaaagaataaagaaagattcttattttaaattgacagaaaaagaaattgatgaaataatagatccaaataaatttgtaggtagagccccatatcaagtagaagaatatataatcaattgtgtaaagcctattttagttaagaataaagatattgtaggtatagaagttagtattgatgtttaa

SEQ ID NO: 15471 - DNA, 693 bp, Clostridium acetobutylicum
atggtatttatttggtcactgatttttatagtaattttatccgtagtatttacaactaatataaagaaaaattacaagggatggtatgctttagcgagttttatttcaatattagtaagcatttatgaggtaatgagaatagtttcacaccctaagcttaatggtgtgattttaagtattgaacaagcctttatgaaaggtaatgtagctatagcattttttattttagttatgtttgcaggtgcattaagtacaaaacaagtaattggaaaaaagttaatgagtataagagctgaacttgctattttagggtctatattgatattaccacatggaattatatattttgttagatttttgattataaaacttcctaaaatactcaatggaaaagcaaatgctactctctatttaatctacatatccattggaataattgcttttataattatgattccattattcataacatcttttaagagtgtaagaaaaaggcttggaggctttagatggaagaagcttcataggtggtcatatgttttttattgtcttatatacttacatattatcttggcactgcttaatggtaagattaattttataaagataattttatatacttttatttttatggtttatactgtaatgaagttcataaagcatagaaatattaaacttagaagaaaaagttaa

SEQ ID NO: 15472 - DNA, 429 bp, Clostridium acetobutylicum
atgaaaatagctataggagcagatacagatggatttgaacttaaagaacacttaaaaaattatttgaaaagtaagggtatagaagtaatagataaaacgccagaaaaggggattaatcttgttaagtcagcaagtttagttgcacaagctgttatgaataaagaagcagatagggcagtagcaatagatgagtatggtgcaggttcttttatggtaggtgctaagcataagggaataatatgtgcagaggtttcagatgaacattcagctaaaatgacaagtcagcataattcagctaatatgcttgctattggggcaggaattgttggaaagagacttgcagaaggaatgcttgatgcatatatagctgagaaatatgctggtggaagacatcaaataagagtagacatgttaaataaaatgttataa

SEQ ID NO: 15473 - DNA, 426 bp, Clostridium acetobutylicum
atggcaaagaaagtagtaggtttaataaaactacaattacctgcaggaaaagcaactccagcaccaccagttggtccagcattaggacagcatggtgtaaatatcatggcattctgtaaagaatacaatgctaaaactgctaatcaagctggatttactattccagttgtaattacagtttatcaggatagatcttttagtttcatacttaagactcctcctgcagcagttttgataaagaaagcagctggtattgaaagtggttcaggcgttcctaacaagaataaagttggtaaaataactaaagaacaagttaaggaaattgctcaaactaaaatgccagatttgaatgcagcatctttagaagctgcaatgagcatgatagctggaacagctagaagcatgggtgtagaagtagtagattag

SEQ ID NO: 15474 - DNA, 1875 bp, Clostridium acetobutylicum
atggctgtaaaacagtttaaagctgaatctaaaagacttctcgatttaatgattaactcaatttatacaaataaagaaatatttttaagggaacttatatcgaacgcaagtgatgctatcgataagtgctattatcgttcactcgttgatacaaatattactttcaataaagatgatttttatataagaatttcagcagataaagaaaataaaactctaacaatcactgacacaggaataggtatgacaaaggatgatttagaaaacaatctaggtactattgctaaaagtggttcttttgctttcaaaagtgagaatgaagcaaaggaaggagtggatataatagggcaatttggagttggtttctattcagcatttatggtggctgatgatgttactgtaataagccgttcggttgattctgaggaagcatataaatgggaatcaaagggagtagaaggatatactattgaaaaatgcgaaaaagagacacctggaactgaaatagtattaaagataaaagaaaataccgatgatgaaaaatatgatgaatttttagatgagtataaactaagatcactcattaaaaaatactctgattttataaaatatccaattaagatgatgactaaaaaaacaagacctaaaaaagataatgacaaggaaacagaagaatatttagaagatgaaactttaaatagtatggttcctatatggagaaagaacaaaaatgaattgaagcaggaagactacgataacttctatatggataagcactttggatttgaaaaacctcttaagacaatccactctaatgtagagggagtagtaagctacaatactcttttatttattcctgcaagtgcaccttatgatttctatacaaaggaatttgaaaagggcttagagctttactcaaatggagtaatgataatgcaaaaatgtggagatttacttcctgattactttagctttgttcaaggtttagttgattctccagatttatctttaaacatatcaagagagcttcttcaacacgatagacagcttaagtttattgcaaagaagataaaagaaaaaattaaaagtgaattgttatcaatggctaagaatgatcgtgaaaactatgttaaattctttaatagctttggtagacagttaaaatatggagtttattctgattttggaagtaataaagaagtacttcaagatttacttatgttctattcatcaacagagaaaaagctagtaacccttgatgaatatgtttcaagaatgaaggaagatcagaaatacatctactatgcagcaggtgaaagtaatgaaaaaattgaaaaacttcctcaaactgaagtggttaaagacaaaggatatgaaatattatatttcacagatgatgtagatgaatttgcaataaaaatgttaatgaaatataaggaaaaagaatttaaatctgtttcaaacaaggatttaggttttgaagcggatgaaaaagagagtaaaaaggaaacagaggagaataaagatttatttgatttcatgaaagaagttttagatggaaaagttaaggaagtaagagcttcaagtagattaaaatcacacccagtttgtctttcaaatgatggagagttatctattgaaatggaaaaagtacttaaaatgatgccagataacaataatgttaaggctgaaaaaatacttgagatcaacacaaaccatgaaatgtttaattccattaaggcagcatttaaggatgataaagataaattaaagaaatatgcaagtcttttatataatgaggctcttttaatagaaggtcttcctatagaggatccagtacagtttgcaaatgacgttgcaagtttgatgaaataa

SEQ ID NO: 15475 - DNA, 3768 bp, Clostridium acetobutylicum
atgaatacaaaagtaaggcgtatattcgtaaagaaaaaagcaggttttgatgttgcagcaaaagaacttttgaaggatttagtagaaaacctcggaataaaaactttaaaggatttatcaatattaaatagatacgatgtttctggcataaatgacagtgagtatgaggatgctaaagctattatattttctgaaaaaactgttgatgatgtatatgatgaaaaatttgaagtttcaagtgaagataaagtttttgctgtagaatatttgccggggcagtacgatcaaagagcggattctgcatgtcagtgcattaaaatacttacaggaaatgaagatgttttaatagcatcagcaaaagtaatcattttaaagggaaatataagcgttagtgatttagaaaaaattaaaaaatatgttatcaatccagttgattctagagaggcatctcttgataaaccggaaacattagaagtaatatatgatcttccgtatgaagttgaaaccatagagaattttataagcatgtcagaggatgagcttaaggtattcttagatagtaatggacttgcaatgagtatggaagatttaaaattttgtagggaatactttaagaatgaagaaaagagaaatcctacaataacagaaataaaggttatagatacttattggtcggatcactgtaggcatacaactttccaaacaaggcttcagaatattcagtttgaagatggaaaatatacagaagttttaaagtctgcctacaaaaattatgtggatgcaagaaaatatgtttatggaaataaagaaaaagaagtatgtcttatggacattgcagttattggaatgaaggaattaaagaaaaagggctttttaaatgatttagatgagtcagatgaaataaatgcctgtagtatagtagttgatgcagatgtaaacggaaaagatgaaaaatggcttgtaatgtttaaaaatgaaactcataatcatcctactgaaattgagccttttggaggagctgcaacctgtcttggaggagctataagagatccactttcaggaagagcctatgtatatcaagcaatgagagttacaggtagtggagatccaagagttagaatagaagatacaactaaaggaagacttcctcaaaagaagataacacttggagcagcaaacggctatagttcctatggaaaccaaataggacttgcaacaggacaagtttccgagtgctatgatgagggctttatagcaaagagaatggaagttggagctgtggttggagcagcacctaaggaaaacgtagttagagaagagccaaaaccatctgatgttgttattcttttaggtggaagaacaggaagagacggctgtggtggagcaacaggttcctcaaaagaacatgatgtaaattcacttcaaaactgtggtgcagaagttcaaaagggtaacgcacctacagaaagaaaacttcaaagactttttagaaataataaggtaagtacattaataaaaagatgtaatgattttggagctggtggagtttctgttgctataggtgaacttacagatggacttgacattaacttagatttagtccctaaaaagtatgagggactagatggaactgagcttgcaatttccgaatctcaagagagaatggcagttgttgttgagaaaaaagatgctgaaaagtttatagaatatgcagataaggaaaatttagaagctgtaatagtggcaaaggtaacagatacaaaaagacttaaattattctggaaaggaaatgctatagtaaatatttcaagggcatttttagatacaaatggtgttagacaaaatgttgatgtttttgtaaaggcaccaaaaaaggaagataactacttcaagactgaaaataaaaataaggacgttaaagaggaagttttagaaaccttaagggatttaaatgtatgcagtcagaagggactttcagaaagatttgacagcactataggtgcaggtactgttttaatgccttttggaggaaagaatcaaataactccagctgagggtatggcagcaaagcttccagttcttaatggagagacttcaacaggaacggtaatgacttacggttataatcctaagataggaaaatggagtcctttccatggtgcaatgtatgccgttatagaatcccttacaaagatagtgtgcatgggcggagattataaaaagactagacttacttttcaagagtattttgaaagattaaataaagagcctgaaagatggggtaaaccttttgcagcacttcttggagcacttaaggcgcaagagatatttaatactccagctataggtggaaaggacagtatgtctggtacttttatggacttaaatgttccaccaacacttgtatcctttgctgtgaatgtagttgatataaataatgtgatatcacctgaatttaaaaaggtaggcagcagtgtggttttagttaagtgtgaaagggatgaaaatgaagttcctttatttgatgaattgaagaaaaactttgatactgtacaggctttaattaaggataaaaaggtaataagtgctcaaagcgttagacacggcggactcatagctgctttaagtaaaatgtgttttggaaataaaattggttttgaaatgctcaaagaggaagaactatttactcctgattatggttctatagttttagaacttgaggagagcttagatattaaggaattatttaaagatgtaaaatacgaagttattggtaaaactatagctgatagtaaaataatcttaaataatgtttcaataagcattgatgaagctttagaggcatatactgagcctttagaaaaagttttccctactaaagtggaagcttcaaagaagattaatctagctttatatgatgaagttaaatatgaaaatataaaaagagttagtgctgtaaataaaattgcaaagccaagagtattcataccagtattcccgggaacaaactgtgagtatgattcaaaaagggcctttgaaagagcaggagctgaagttaatacccttgtatttagaaatatgaaggcaacagatattgaagaatctataaatgaaatggtagaggaaataaataaagctcagataataatgcttcctggaggcttcagtgcaggtgatgaaccggatggttctggaaagtttatagcaactgtatttagaaatgagaagattaaagaagcagtaatgaagctattaaatgcacgtgatggccttatgcttggaatatgcaacggcttccaggcacttataaaattaggacttgtgccttatggagaaataagagaaatagatgaaaactgtcctacactaacatacaacaatataggaagacatgtatctaaaattgcatatactaaaattgtttcaaataaatcaccttggttttctaatgtagaaattggagatattcatagtatacctatttctcatggagagggaagatttgctgcaagtaaagaggttgtagaagagcttataaagaatggacagatagcaacgaggtatgtagatttaaacggtaattcaagttatgaaacagaagtaaatcctaatggatcagtactttgtatagaaggaataacaagtcctgatggaagaatacttggtaagatggggcattctgagagattttctaaggggacttataagaatataattggaaatcaagaccaaaagatatttgaaagtggagtacagtattttaaataa

SEQ ID NO: 15476 - DNA, 1188 bp, Clostridium acetobutylicum
atggagaaaaaaacagtatataatatcacaaattctattgctataagtgaagaggaagctgtaaattgtaatatacctgaggttaacaaggctgaaattaatttaagtcagcttaagcgtaattttgatattattcaaggatttttaaaacctaatacaaaattcatggcggtcttaaagggagatgcctatggacatggaatacgtccaattgcaaaagaattgataaatttaaaatgtgatgtctttggggttgttagattgattgaggcttttaccctgagaaaggctggtattaaaactcccattatgctgcttgcaccaatttctccatcgcaagcagcttgggttattagatataatataattccaatggtagatagtgaagagattgtagaagcattagatcaaagtgcttcacaaaatgatactatagttaaattgcatgtaaagataaatacaggtttaaataggtatggagtaaatccagaaaatgcagtaaagtttattagagaaattcatgaaaagtatctgcatgttcaagtggatggagtatatactcactttcaggaccccgattacaaccctgattttactcataagcagattgagtgctttaataatattatatttcaacttcaaaaacaaaaattaagacctagaataattcatgcagctaattccactggcataataagatatccagaagctcattatgatatggttcggtgtggaacccttttatttggcttggagcacgaacaggggcagagaaatatgccaaaaggtataaaaacactaatggagttaaaagggcggattatgaaggttagaacaataagagcaggtgaggctggaggttatggaagtacttttgtagcaaaaaaggattcaaaagttgctatcattgcttttggatatggtgatggtatcagtagaggttggaaggaggtattagtagcaggtaagagggttccggtagtgaattattttatggatggtttaatggtagatatttcaaacatagatgaaacagtaaaggagctagatgaagctgttattgtaggaaatcaaggcgatgaaagcataacttggttagaggcttgtaaaagtcttggaagctatgtagatgagcaaatacaatgcattactgaaagagttcctaaaaaatatttttatgagaaatag

SEQ ID NO: 15477 - DNA, 1383 bp, Clostridium acetobutylicum
gtgatagatatgggggactacacgttaaaagagcttgaaacctggaatgagaaaattgaaggtatagtcaatgaaatggggcttaattattacaatcaggaatttgaaatcataagttataatggaatgcttgaagcggaggcttatactggaatgccatcaagatatccacattggagctatggaaaggcatatgaaaaacaaaaaacactttatggttatgaccttgttgggcttccatatgaaatggtaataaactcaaatccatgcatagcatatttgatgaaagaaaatactttactacttcaaattcttactatggcacatgtttatggtcacaatgatttctttaagaataataggctttttagagaaggtacagatgccagtgaaactgttaatatgtttaaaaatgatgctgatactataagaaattatatagacaatccagcaataggaaatgaaaaggtggaaaaaattctcgatgcagcacatgcaataagatatcaaactcacagagtaataggagagaaaagactatcttatgaagaaataagaaataaaataatacaagattataattcaagctataagcctagaagtataatagaaccttatgaaaagcctgtagagccagatttgagtaagatacctttagagccggaagatgacattatatattttatagagaactatggtaatcttcaagagtgggaaagaaatgtaatagaaattgtgagaagggaaactgcttattttattccacaaattgaaaccaaaataatgaatgaaggatgggcgagtttttggcattatacaatattaaatgagcttaagcttccagatggacttcatttagagttcttaaaaaggcataatgatgtattgtcacctattcttggctcgttaaacccttattaccttggttttaaaattttaaaggatatagaagatagatatggcagagataaaatttttgaggttagagaaattgagagggatgaatcttttataagaaaatatcttactagggaactatgtgaggaattaaatctatttgaattttccaaaagaagaggagaatatataatagataatgttgcagatgaagagggatggaaaaatataagaaactcaatatgctcaggatgtggtatgaatagtataccagtaataagagttgtagaattgtctaaaaaggataacaatttgatattggagcatctttacgatggaagggaacttaatatgcagtatgcagaggaaaccttaaaatatgtggttaacttgtggaagggtaaagttactttaaaaactactattgaaggaaaagagtacaggatagtatgtgatgagaataaaaaaatatgtgaagtgaaataa

SEQ ID NO: 15478 - DNA, 984 bp, Clostridium acetobutylicum
atggaaagtgtatttgattacgaagatattcaactgattcccgcaaaatgcattgtacgtagtcgatcagaatgcgatacaagtgtaatattgggagagcatagctttagactgcctgttgtacctgcaaatatgcaaactattatagatgaaaatatagcactctttcttgcacaaaacggctacttctacattatgcatcgttttgaaccagagaaacgtttatccttcataaagaacatgaaatcaaaagggctctttgcatctattagcgtaggcgttaaaagggaagagtatgattttataaaacaattggcacaggaaaatctttccccagaatatatcactattgatatcgcgcacggccattccaacacagtaatagaaatgatacagcacataaaaaaatatttacctaaaagctttgtcatcgcaggaaatgttggaactccagaagccgtaagggaacttgagcatgctggtgctgatgctacaaaagttggtattggaccgggaaaggtgtgtataactaaaataaaaaccggttttggaactggcggttggcaattagctgcattacgttggtgttcaaaggctgcaagtaaacctattattgccgatggaggtattcgaactcctggagatatagctaaatcaattagattcggagccaccatggttatgattggttcgttatttgcaggacacgaagagtctccaggagaaacaattgaaaaggacggaaagctgtacaaggaatattttggttcagcctcagaatttcaaaaaggagagaaaagaaatgtagaaggcaaaaaaatgtttgttgaatacaaaggtccactaaaagatactttgatagaaatggagcaggatcttcaatcttctatttcctatgccggtggaaaaagtttagacgcaattcgtactgtagattacgtaattgtaaaaaattcaatctttaatggtgacagaatttactaa

SEQ ID NO: 15479 - DNA, 933 bp, Clostridium acetobutylicum
atgcttctagaaataaaaaatttagttaaaaggtatggagattttttagcagttgataatgttaatttaagtatagaagaaggagaaatattagggcttttgggacctaatggtgctggaaaaacaactataatagattgcataataggattaaataaaatagattctggaagtataagaatttttggaatggattttctaaaaaatgagatggctataaagaaatctataggaatagtaactcagactatatctgtgtacgatgatttaaatgtatatgacaatgtaatgtattttggaggaatgtatggtcttagaggaaagaagcttaaagagtacgcaagagaagcattaaattttgtaggaatttgggataatgcaaggaagtttcctaaacagctttcagggggtatgcttaggaggcttaacatagcttgtggaattgtacataaaccaaagcttataatcatggatgagcctactgctggtatagatccaaagtctagaagcaatcttttagaatcaataaaggagctaaacaaaaacggtgcaactataatttatacttcgcattatatggaggaaatagagagaatctgtagtagtatagctataatcaatgaagggagaattattgcaaagggcgataaagaggagcttaagagcttagcagcaaaggaagaaaaaattaaaataaagccgtcagcattaaactatactattgtggatgaaataaagaaaatttacggagttaaagaatgtagtataaatgcagattatatcgatatagtttcggataaaaatagtaagaatatagctaaaataatagacatgattgtggggtctggattagaggttttagatgttatcattgataggcctagcatagaaacagttttcttggcccttacaggaagaaatttggataattaa

SEQ ID NO: 15480 - DNA, 1023 bp, Clostridium acetobutylicum
atgaaaaattggcttaatagcgatttaaaagacaatgatatagtaataacaacaagaattaggctagctagaaatataaaaggaataccttttccagataaattatccgatgatgaaggaagagatgtagtaaaaaaaattaaagatacacttatcgtttctaatgatggaaaagaaaattttacatgtatagatttatggaaaaatgacaacaattgtaatgcagagtatcttgaaaaacatttaataagtaaaaaacttatagaaaattataatagatcagcatttatactaaataaggatgagactataagtgtaatggtaaatgaagaagaccatttaagacttcaggcaataactgctgggctaaatttggaagaagcatacgaatgtatagatagaattgatgacaaaattgaggaaaacttagattatgcatttgatgagaaaataggatatttgactgcatgcccaacaaatataggaactggcatgagggcatctgtgatgattcatcttccagcattatcaatgaataatgagatgccaagaatattaaatgcgttatcccaaataggaattactataagaggtctttggggagaaggttctaaggctattggtagtttgtatcaaatatcaaatcaaattactttgggtatgagtgaaaatgacattatatcaaatttaaaaactgttgttgaacaaattattaaccaagaaaatttatcaagagaacaactgatgaaaaagtacaaatatgaattagaagataaaatagctagatcacttggaatacttaaaaactccgtaattctagacagtaatgaatgcttaaatcttatttcgaatgtaagaatgggtgtagaaataggaattataaatgatataagtaaaaaatcattaaacaatttgttagttaatacgcaaagggcaacactacaggagatttataataaagaattatctaagaaagaagaaaatataaagcgagccctttatgtaagagaaaatttaaggtag

SEQ ID NO: 15481 - DNA, 1767 bp, Clostridium acetobutylicum
ttggcaaatagtatagtatttcaaaatgcagcaagtcaactaagatcagctatatatggatatgatggaactaattatcaacctgttaaagttaatagtacaggagaacttcaaataaatgtaggaacaatcaatgcagtgggaacaataacaagactcggagtattaggaacagttaacgcagtaggaacagtaacaagattgggagtactgggcacagttaatagagtagcaggagtagcaacaataacaagactcggagtattaggaacagttaacgcagtaggaacagtaggaaggttaggagtactgggaacagttaatagagtagcaggagtagcaacaataacaagacttggagtattaggaacagttaacgcagtaagcgcagtaggaacagtaggaaggttaggagtactgggcacagttaatagagtagcaggagtagcaacaataacaagacttggagtattaggaacagttaacgcagtaggaacagtaggaaggttaggagtactgggcacagttaatagagtggcaggagtagcaacaataacaagactcggagtattgggaacggttaacgcagtaggaacagtagcaaggttaggagtactgggcacagttaatagagtggcaggagtagcaacaataacaagacttggagtattaggaacagttaacgcagtaggaacagtagcaaggttaggagtactgggcacagttaatagagtagcaggagtagcaacaataacaagacttggagtattaggaacagttaacgcagtaggaacagtaggaaggttaggagtactgggaacagttaatagagtagcaggagtagcaacaataacaagactcggagtattaggaacagttaacgcagtaggaacagtagcaaggttaggagtactgggcacagttaatagagtagcaggagtagcaacaataacaagacttggagtattaggaacagttaacgcagtaggaacagtagcaaggttaggagtactgggcacagttaatagagtagcaggagtagcaacaataacaaggctcggagtattaggaacagttaacgcagtaagcacagtaggaacaatagcaagattgggagtactgggcacagttaatagagtagcaggagtagcaacaataacaagacttggagtattaggaacagttaacgcagtaagcacagtaggaacaatagcaagattgggaatactgggcacagttaatagagtagcaggagtagcaacaataacaagactcggagtattaggaacagttaacgcagtaaacacagtaggaacaatagcaagattgggaatactgggtacagttaatagattagcagcagtgggaacattaacaagactcggagtattaggaactatatcaggagatgtcaatagtagaatagttggaagtggagtatatgctactgttcaagatatagcagtttcatctacaggcacttacaccaattttatagatatatctcaatattcagctaccggatggtatattaagaaaatttcaaatgtacctgcaactttaacagctagaatagctcttgtaccaagcacaaatagggcagtgtatactccgtatattgatttaccagtaggaactataacttcagatataacaaaagcattagttttagatagaactcaatatctaaaatatgctgcagttaatttgatttctagtagtacaacaattccaacggtacaagttgtttttgatgctaaaaactaa

SEQ ID NO: 15482 - DNA, 2439 bp, Clostridium acetobutylicum
atgagtacttatagtacaaaagttgatgaaaaatggcaaaaaaaatgggaagaaacaagtctgtataaatttgatgaaaataatctcgaaaaaaaattatatgttttggagatgttctcttatccttctggcgcaaagcttcatgcaggacactggtttaactatgctccagtagattcctgggcaagatttaaaaaaatgactggttataatgtatttcaaccaatgggctttgatgcatttggtcttcctgctgaaaactatgctataaaaacaggaattcaccctaaggactccacattaaaaaatattgaaactatggagaaacagttaaaatctatgggagcaatgttcaattgggatcatgaggtaataacttgtacgcctgattattataaatggactcaatggttgttcttagaactttataaaaacggtcttgcttatagaaaaaaagctcctgcaaactggtgccctagctgtaatacggttttagcaaatgaacaagtagtagatggctcttgtgagagatgtggaacagaggttataaaaaaagatttgactcagtggttctttaaaataactaattatgccgaagaacttctccaaaaattagatgagcttgattggcctgaaaaaacaaaggcaatgcaaaaacattggataggtaaatccaaaggtgctgaggtaaccttcaaggttgataacagtgacttaaaatttgatgtatttacaacaagagtagacactctatgcggtgtaacctatgtagtacttgcacctgaaagccctctagctgatgagcttacaaaaccagaatataaagaaaaagttgaagaatataaacttcaagctcaaaagcaatctgaaattgaaagacaatcacttacaagagaaaaaacaggagtatttacaggctcttatgcaatcaatcctataaacaacaagaaagtacctatatggattgcggattacgtaatatacacttacggtactggtgcagttatggctgtcccttcacatgatgaaagagattttgcttttgcaactaaatacgatcttccaattgtgagagttgttgaaggcggtgaagagcttcctttcacaggttatggcccactggttaacagcggtgaatttgatggtcttaaaggaaacaaagcaaaggaagctattgtaagtaaactttctgaaaatgatcttggaagatggaaggtaaattacagacttcgtgattggttagtttcaagacaaagatattggggtgctccaataccagttgtttactgtgaaaaatgtggaatagttcctgttcctgaaaaagatcttccagtggaattgccttataatgtagaatttaatcctactggtaaatcccctcttacaacttctgaggaatttatgaacacaacttgccctcattgtggaggtcatgctacaagggaatccgatactttagatacctttgtatgttcatcctggtactatttgagatatgcagataatgaaaatagcgatgcaccttttgataaagaaaagatatctaaaatgcttcctgttgacaaatatgttggtggacctgagcacgcatgtatgcatctattatatgctagatttatcacaaaagcattaagagatattggataccttaattttgatgaaccatttttatctttaagacatcaaggcttaattctaggtcctgatggtcaaaaaatgagtaaatctaaaggaaatactatttcacctgatgatattatagctgagcacggctctgatgtatttagaatgtatctaatgtttggatttgactatgctgaaggcggcgcatggagtgatgacggagttaaagccatgtccaaatttgtagacagattttctagaatgattgaaactgcaaaagaagaaataaataatcctaaaaactcaaaaacagatatgggaaaagaagaaaaagaattaaattatgttagaaatcattcaattaaagctgtaacagaagatatggataaattccagttcaatacatgcatagctaggcttatggaattcacaaattctttatcaaaatatctaactgtagataataaaaatattaagcttcttaaagacaccactattgatattataaagctgatagctccatttgcacctcactttgcagaagaacaatggaatataattgaggaaaaatattcagtatttaatgaaaagtggccagaatttgatgaaaaagctcttgtaaaagatgaagttgagatagctattcagataaatggcaaaattaaagctaaaataaatattgcaacaaacttaagtgaagatgaaatcaaatctgctgcactagctgacgataaagttaaagctgctactgacggaaagaatatagttaaggttatagttataaaaggacgtcttgtaaacatagttgttaaataa

SEQ ID NO: 15483 - DNA, 540 bp, Clostridium acetobutylicum
atgtcgagagtaggtaaacagccagttgagatacctagtggtgtaacagttacagtaacaccagacaacgttgttactgtaaagggcacaaagggtcaattagaaaaggctatgcataaagatatgaaaattgcagttgaagataataaagttgtggttacaagacctagtgatagcaaaaatcacaaagcacttcatggattaacaagggcgttaataaataacatggttataggtgttacagaaggtttttcaaaaacattacaattagttggtgttggttataaagcacaacttaagggtaaaagcttaatattaaatcttggatattcacatccaatagaagttgcaagtattgaaggagtaacttttgaaattccagatgcaaatacagttgttgtaaaaggaattaataaagaattagtaggatccgtagcagctgatataagaacatttagaaaacctgaaccatataagggtaaaggaattaaatatagcgatgaagttataagacgtaaggaaggcaaaactggtaagtag

SEQ ID NO: 15484 - DNA, 624 bp, Clostridium acetobutylicum
atggaaaacaataacgaaatttttaaagaaaaatcaagggaaaattttaataaaacagctgatatatatgatgaaagtcatgatgggaaatttgtagcaccaatgtacgatgaaattataaagagaattctaagagctaaccctaaaacagtattggatgttggttgtggtactgggaatgtattaaaaatactagctaaagatgaaaatttaagcctatatgggttagatttatcagaaaaaatgatcgaaatagcgaagaaaaatcttaagggtcgtgcagagctgaagcttggagattcagaaaacatgccgtggaagagtaattcatttgatgttattgtatgtaatgcatcctttcatcattatccaaaccctaaaaaagttttaattgagatgaaaagaatactaaagaaagatggaacattgattataggagatccgacagcaccagtaatttatagacaaatattaaatttatattgtaaaatatctaataaaggggattataaactatactctaagaaagaaattgaaaatattatgaaagagtgcgggtttgaaccttttaattttattcacataaatcatggtagttttgcagtaaacgctaagataagatga

SEQ ID NO: 15485 - DNA, 1206 bp, Clostridium acetobutylicum
atgaatttcaaatttaatactgtagaagaagcaattcttgatataagacaaggaaagatggttattgttgtagacgatgaagatagagaaaacgaaggagatttggtggcagcaggagcaacgataacaggagaaactataaattatatggcaaggtatgccagaggactcatatgtacgcctatggattcagatagcatggaaaggcttggaataaacaccatggtagaaaaaaatacagagtatttcggtacggattttggggtttctgtagatgctgcaaggactagaacaggaatttcagcatatgaaagagctgaaactataaagaaactttctgataaagatgccaaggaagaagattttgtaaaaccaggacacacatttcctctaagagctaaaaaaaatggagtattggatagaaatggacatacagaggctaccgttgatttagtaagacttgcaggtttctatccttcagttggagtatgctgtgaaattatgaatgaagatggcactatggcaagactaccaaagcttatggagttctcaagaaaaaatgatattaaaataataactgttgaaaaattgattgaatatagaaaaaagaatgaggcacttataaaaagagaagcagaggccaagcttccaacaaaatatggtgagttcaaaatagttggatataaaagcctgattgataataaggaaaatctagctatagttaagggagagcttaaagctgaagaagaggtgcttgtaagagttcattctaaatgccttacgggagatgtatttggatctctaagatgtgattgtggaaatcagctttcatatgcacttagtgcaatagaaaagcagggggcaggagttgttctttatatggatcaagagggaagagatataggacttttgaataagttaaaggcatatatgctccaagaaaagggtcttgatacagttgaagcaaatttgaaattaggatttgaagctgatttaagagaatattgggcggctgccgaaatgcttaaagatttaggtgttaaaaaagttaaattaatgacaaataatcctgaaaaaataaacgaattaaataaatatggaattgatgttgtaagcagagttcctattaatacagaacatgttaaagaaaatgaattttatctaagaactaaaaagcaaaaaatgggtcacttaattgaaatttaa

SEQ ID NO: 15486 - DNA, 765 bp, Clostridium acetobutylicum
atggtagatatacattcgcacataattccaggaattgatgacggttcaaattcacttgaaactactttgaaaatgatggagatagcaaatgaagcaggtttaactaaaatggtagctacttctcactatttcaggggaagatttgaaaacagtatttctgccattacaagcgaagcagaaaaactgaatagtatctttaaaaagaaagctgtggatatagaagttatacccggacaggaagtttttatagataatcacacacttgaagctcataagaatggaataattggctgcattagagatacaaattacatgcttgtggaattcgatatgatgtcgcttttagaaaatgcagcagatatattgtacgagattcaaataagaggtattaagcctattatagctcatcctgaaaggtatacttatattcaaagagatttgtacaaaataaatgaccttattgatgaaaatatttattttcaggtaaatgcaggaagtatagaagggctttttggaaagactgtacaaaaaacggcaattaagttaatagaagaaggcttggttagctttattgcttccgatgcacattctgcaggaaaaagatgtccaggttatgaaggagcacttaagctggtggctaaaattgatagtgtattgcctgggaaatttgtaaaaaatgcagacttacttatagaaaatcaggaaattaaggcgaggagtcaaaaactaaaaagaaaaaaaggttttttcactttttttaaatag

SEQ ID NO: 15487 - DNA, 573 bp, Clostridium acetobutylicum
atgaaattagtttgtattggagatagcttgacctatggctacggagtttctagcacctcctcatgggtagagcttttaaaagcacattttagtataaatgtaataaataaaggcataaacggtgacaccacttcaggtattctttcaagatcctacagcgatattgtaaaggaaaaaccaaattacgtaattataatggcaggaacaaatgatatgcttatggattattccactaagttaattaaagataatattgaattattattaaaagaagccaaggaaaataatataactcccatattagcacttcagccaccagtaatatcccctcttgctaaaacttattgggattctgaaattgactatgaaaaagtagctatcagtttactagattatattcgttgggctaaagcttattgcattaataacaatattgcatttgtaagcttcaatattgtctttattaataaagacaatattgaagctttatacaatgatggaatacacccaaattctgaaggccacaaattaatgtttaatgaattatctaaaattttaaataaaataatttaa

SEQ ID NO: 15488 - DNA, 933 bp, Clostridium acetobutylicum
atggaagatattatttatataactggacataaaaacccagatacagattcaatttgttcagcaatagcatactctgaattaaaaaacaaattaggtttcaatacagttccaggaaggcttggcaacataagccgtgaaacagaatttgctcttaattactttaaagccaatgctcctaaattattagagaatttgtctagtaatcaagatataataatagttgatcataatgaaagagctcaatcagtagataatttagaagatttacatttgcttgaaataatagatcatcacagaatagcagatattcaaacaagctaccctatattcttcagaaatgagcctgttggttgttcaagtacaattataggttcaatgtactttgaaaaaggtatagagccttcaaagagagctgctggtttaatgtgctctgctataatatcagatactcttttatttagatctccaactactacagctagagacaaagaagtcctaaaaaaattagctaaaatagcagatatagaccctgaaaagtatgcttcagaaatgtttaaggctggtacttctttgaagggaaaaacagtcgaagaaatattcaacagcgactacaaagcattcaaccttggagataaaaaaataggggtttctcaagtcacaactatggatatagaaggtttcgatgaatataaaaaagatatgttagcatatatgaataaaaaagttaaagacgaaaattttaatgcagtacttttacttcttacagatattataaaagaaggttctcttataatagctaccggagaaaatactgaccttgtaaataaagcctttaatgttgagcttaaagataatgcagtatatgttcccggaatactttcaagaaaaaaacaagtaataccacctttgacttctgccatagaaggaaaataa

SEQ ID NO: 15489 - DNA, 1992 bp, Clostridium acetobutylicum
atgaaactaattgaagatttaattgaaaagttaaataaatattcctacagctattatgtgcttgataatccaattgtagctgataaggaatatgatataatgtatgatgagcttaaaagattagaagaagaaacagagtatattaatcctaatagtccaactcaaagggttggtgatattatccttgataaatttgagaaaacacatcataaaaataaactttggagtcttgataaggctcaaaagaaggatgaagttaaagcttttgtaaataagtgtgttaaatttgtagagcaatataatttaacacatagtgaaaaattgccttcaccacaattcgttgtaacacaaaagcttgatggacttactataaattgttcatacaatgaaagtagattaattaaatctgcaactagggggacaggggaaataggagaagatattacagaacaaagtaaaaccattctcaatcttcctaatgctataaattatagtggagaaattgatgttcatggagaagcattaatgacaaaaaatgctttagaacaatataatagtaatttaaaagtaaatgaaacaccacttaaaaacttaaggaatggtgcagcaggagcattgagaaatttaaacataaaagaaactgcaagaagaaagctagtagctcaattttatgatcttagctatacagataagaagttaaaaaaatatagtgaaattttattatttttaaaatctcaaggatttaacataactgagtacaatatttgtaataattttgatgaaattaaccaagctattgataatataggagaggtaagaagtagcttacaatacgatatagatggagttgtaattcgattaaatgatatagaaacgagtagattaatgggctatacaataaagtgtcctaaatatgcaatagcttataaatttaaagcaaaagaaacaactacaaagctaatagatgtagaatggaacgtgggcagaagtggaagaatcaatccaacagctattttagaacctgtagaattagctggagtaatagttaaaagagctacattaaataatatggatgatataaagaggaaaaagattaaaaaaggtgctagagtatttctaagaagatctaatgatgtaataccagagattatgggagttacagaagagacagagggagaaacgaaggaaatagaagcaccaacaatatgcccatattgcggcagtgaaatagtaaaagaaggtgtacatttattttgtgaaaatactttgtcctgtaaaccccaaatggtaaaaagtatagtccattttgctagcagaaaagctatgaatatagaaggctttagtgagaaaacagcagaacaattatttgagaaattaaacataaaaagcatatctgacttatatagaataactaaagaagaattaatgtcattggataagtttaaagacaaaaaggctagtaatcttataaatgctatagagaaaagtaaggaatgtgatcttgattcatttgtatactcattgggtataccaaatgtaggaaaaaaaacagcaacagatttatgtaagcaatttaaaagctttgagaacataaaaaaagcttcttattttgagcttatcttggttcaagatataggatcaattgttgcaaaaagtattgttgatttttttaaacaagaaaaaatagaaaaaagtctaaatgaattatttaaacttggagtaaaaccatcttatgaagaaagtgaagtttcagaaagtgtatttaatgataaaactgtagttgcaacaggaagtcttcaaaattatagcagaacagaaataaaagaaaagttggagagccttggtgctaaggttgctggaagtgttagtaaaaaaactgattatgtaatagcaggtgaaaatgcaggatctaaatatgacaaagctgtagcacttggagttaaaatattaactgaagaaaagtttgaagaattaatagaaagtgtaaagtag

SEQ ID NO: 15490 - DNA, 1350 bp, Clostridium acetobutylicum
atggctttcgagggattatctacaaaattacaagcagcaatgaaaaaactcagaggaaaaggtaaactttctgaaaaagacataaaagatgctatgagagaagttaagcttgctcttttagaagcagatgttaactacaaaatagttaagaactttgttaaagtagtaggagaaaagtgtctaggtaatgaagttatggaaagtcttactcctgggcagcaagttataaaaatagttaatgaagagttaactaacctcatgggtaaagaggaaagcaaaatagaatttgaggaaaatggaattactgttataatggcagttggacttcaaggtgcaggaaaaaccactatgtgtggaaagctttctcttagtttaaagaaaaaaaataaaaagccacttcttgttgcatgtgatatatatagaccagcagctataaagcagttagaggtagttggaaagtcaatagatgtccctgttttttctatgggggataaggttaatcctgttgatatttcaaaggctgcaatgaagcatgctaaagaaaatggtttaaatgtagttataatagatactgcgggaagacttcatattgatgatcagcttatgaatgaacttgagaacataaaaagtgaagttaatcctaaggaaattttgcttgttgttgattctatgacaggtcaagatgcagtaaatgttgctgaaagctttgataataagcttgaacttactggtgttgtgcttactaaacttgatggtgatacaagaggtggtgctgcactttcaataagagaaatgactggaaaacctataaaatatgtgggtttgggtgagaagatgaatgatattgagatctttcatcctgatagaatggcatcaagaatacttggtatgggtgatgttttaacacttatagaaaaggctcagtctgctattgatgagaagcaagcaaaagagcttggtgacagaatgctcagccaggaatttaattttgatgattttcttcaagcttttgagcaaatgaaaaagttaggacctataggtaagcttcttgaaatggttccaggttttaatagtagtatgcttaagggtgttgatttgtcaaaaaacgaaggtgaaatgaaaaagtatgaggccattataaaatcgatgactgctaaggagagaaaaaatccatcacttataacttctacagcttcgaggaaaagaagaatagctcttggatcaggtactacggttcaagaagtaaacaaaatacttaaaaacttcgagcaaatgaagaagatgatgaagcagtttaaaggaaataagttttctaaaaaagggttatttggtgggaaaatgcctttttag

SEQ ID NO: 15491 - DNA, 1914 bp, Clostridium acetobutylicum
atgtcagaaaaaaatgaaatttatgatgaaagtcagatacaggttcttgaaggtctcgaagctgtaagaaaaagaccaggtatgtacataggaagtactggtacaagaggcttacatcaccttgtatacgagatagttgataatagtatagatgaagctttggccggatattgcagccatataaaagtgtttatacataaggacaattcagtaacagtatccgatgatggtagaggtatgcctataggtatacaccataaaatgaaaaagccaactgtagaggtaataatgacaattctacatgcgggtggaaaattcggaggcggagcttacagagtatcaggaggtcttcatggagttggtgcgtctgttgttaatgctttatctgaaacttgtgaagtagaagtaaaaaccgaaggacatatatggaaacaaacttatcataggggtaaggtggcatcaccttttgaaaaaataggtgatagtgatgagcacggaactaaaatatattttaaaccagaccctgaaatatttgaggatacagagtatgattatgatacattatcccaaagattgagagaattagcttttctaaataagggaataaagattgaactcactgatgaaagacatgataagaatgagatattccattatgaaggtggattaaaatcattcgtaagctacttaaatagaaacaaggaagttgtatttaaagaaccaatttatgtagaaggttcaattgattcaaattattctgttgaaatagctcttcaatacaatgatggttacaatgaaaatatattttcttttgctaataatatacacactattgagggtggaacacatcttgctggatttaaaacagcattaacaagagttataaatgattatgcaaagaaatttggatatttaaaagaaaatgataaaaacctatcaggagaagatataagagaaggacttacagcagtagtttcagttaaacttacagaacctcagtttgagggacaaacaaaaacaaagttgggaaatactgaggttagaggaattgttgatagcataataagtgaaagagtaagcacttatcttgaagaaaatcctcaaataggtaaattagttatagataaggctttagtagcatctagagcaagagaagctgctaaaaaggcaagagaaattactagaagaaagtctgttcttgaaagtacatcccttccaggaaaattagctgattgctcatcaaaggatgcagaggaatgcgaaatatatatcgttgagggagactcagcgggaggttctgcaaagcaaggaagaaatagaaggttccaagctatattgcctcttagaggtaaaataatgaacgttgagaagcaaagaatcgataagatacttaactcagaggaaataaaagctatggcaacagcttttggtggaggaataggtaaagattttgatgtatctaaattgagatatcacaagattattataatgaccgatgccgatgttgatggagcgcatataagaacacttatacttacattcttctataggtatatgacagagcttatatcagaaggtcatgtatttatagcacagccgcctttatataaagttacaaagactagaaaagaatattatgcttatagcgataaagaattagaagatgtgcttcaagatgttggtggtaaggataaaaatactgatatacagagatacaaaggtttaggagaaatgaatcctgagcagttatgggaaaccactatgaatcctgagcaaagaacgttaataaaggttaacatagaggacgctatggcagcagatgaaattttcacaatacttatgggagataaggttgatccaagaagaaaattcatagaagaaaatgctactaaagttgtaaaccttgatgtttaa

SEQ ID NO: 15492 - DNA, 282 bp, Clostridium acetobutylicum
gtgagtagatcaataaaaaagggaccttttgtaaaagaatctttactcaacaaaatagttgaaatgaataaggctggagataagaaagttgtaaaaacttggtccagaagttcaactattttcccagaaatgataggtcatactatagctgttcatgatggaagaaaacatgttcctgtttatataagtgaagatatggtaggacacaaactaggagaatttgttcttacaagaacattcagaggtcacggaaatacagaaaagacaacatcagttaagtag

SEQ ID NO: 15493 - DNA, 1992 bp, Clostridium acetobutylicum
atgaatatagataatttagctataaatactataagaattctttctgcagaagctatacaaaaggcaaagtctggtcatcctggattgcctatggggtgtgcaccaatggcatatacactttggagcagacatttaaaacataatcctaataattccaaatggaaagatagagatagattcgtgctttcagcaggacatggttctatgctcttatattcgttacttaatatatttggttatgatgtaagtgttgaggaaataaaaaactttagacaattcaaaagtaagactccaggacatcctgagtatagatggacagatggagtagaaacaacaacaggacctttaggacaaggaatatgcaatgctgtgggaatggcaatagcggaaacttatctagcaaataaatttaataaggaaagttacaatattgtagaccattatacctatgcgcttgtaggtgacggctgtcttatggaaggaatatcaggagaggcaagttctcttgcaggtacattaggtcttggaaaattaatagttttatatgattcaaataacatatcaatagaaggaagtacagacattgcctttagagaaaacgtagctttaagatacgaagcatacggatggcaggttatcaaagtggatgatggtactaatttagaaaaaatagatttagccataaaggaagctaaggtagaaaaaaataaacctaccataataatagtaaaaaatgttataggatatggctgtccatcaaaacagggtaaagcagctgctcatggagagcctttgggagaagaaaatttaaagctcacaaaggaaaatttaaattggaattatgaaccttttactgttccggaagaagtaagagcatacactaaagagtttaaagtaagggctcaaagacaagaggataagtggaacagtatgtttgaagaatataaaaaggaatatccaaagctttataaagagtgggaagtttggtttagtgaaaaaactccaatgaagctattagataatggagaattttggaagtttgataaaaacatggctacaagacagtcctcaggggttcttattaatagacttgcaaaacttattcctaacttaataggaggctctgctgatttagcaccatcaaacaagacacatatggatgacagaggagatttttcagctgaaaacagaagtggctctaatatgcattttggagttagagaacatgctatggcagctattgcaaatggaatgtacttgcatggtggacttaaggtatttgtagcaaccttctttgtatttagtgattacatgaaaggagctatgagactttcttctataatgaagcttccaatagtttatgttttaacgcatgacagtattggtgtaggtgaagatgggccaactcatgaacctattgagcaattggcagccttaaggtctatgcctaatatgactgtgtttaggccagcggattctaatgaaactgcagcagcctggtatagtgcattaaatactaaaaatggaccaacagccttagttttaacaagacaagcacttcctttatatgattcttcaggaaaaaatgctttaaagggaggatacattctaaaggattctaaaaataaagaaaatccagatgtaatacttatggcttcaggttctgaagttgagcttatattaaatgcagcaaaagagcttcaaaatgaaaatatagatgcaagagttgtaagtatgccttcctttgaagtatttgaagagcaaagtgaagactataaaaattctatattacctagaaatataagagccagagttgcagttgaagctgcatcaccttttgggtggcataaatatgttggacttgatggcgaagtgattgctatggagagttttggtgcatcaggtaaatcagatatattatttaaagagtttggttttactgtggagaatgtagttgaaaaagtaaaaaatgttttgaaaaatttaaaataa

SEQ ID NO: 15494 - DNA, 597 bp, Clostridium acetobutylicum
atggaattctatcctgtggcaattgagaaattaatagaagaatttgcaaaactgccaggtgtcggatataaaacagcacaaaggcttacaatgcatgttttaaatctaccaaaggaagaggttgaaggttttgcagatgcactaaaaaaggcaagaggaactataaaatactgttctgtttgtggtaattatacagatactgatccgtgtgcaatttgttctaatcctaacagagataagagtcttgtttgtgttgttgaagagccaaaggatataatatctatggaaaaggtaagagaattcaatggtgtttaccatgttcttcatggagtaatatctccaatgcttggaaaaggtccagattctataaaacttagagaacttgttagtaggatgaatggaaaagttaaggaagttattgttgcaaccaatcctaatgtagatggagaggctacagctatgtatatatcaaaaatcttaaaaccgcttggagttaaagttactagaatagctcatggtattccggttggaggagaccttgagtatgcagatgaggtgactctagctaaagcgcttgaaggaagaagagaaatatag

SEQ ID NO: 15495 - DNA, 726 bp, Clostridium acetobutylicum
atgataaaattagagaaagtttcatttacatataagaatagggcagctttgtgcgatgtaaatgttgatataaatgagggggaagctgtggctattataggtcctaacggcagcggaaagtcaacttttttaaaggtattgaacgggattctttttccaagcagtggtaggtatgtatttgacaataatgaaataaatgagaatacattaaaaaacaataaattcttaaagttatttcataaaagagtgggatttgtattccaaaattctgacgctcagttattttgttctacagtatttgatgaggtggcatttggaattatgcaaatgggacttgaaggagaagaggtagataaaagggtgagagactgccttaagctgcttaatatagaaaagttaaaggaggaacatccatataacttaagcggaggagagaaaaagagagtagctattgccagcgtactagccatgaatccagaggtgataaccttagatgaacctatgaatgcaatagatccaaaaggaaaacgctttttaaaagagcttttaatagatttaaataaaagtggtaagactataatttgcgcaactcatgattttgaatatattgaaggagtatttaatagagctgttgtattttcagaaaatcataaaataataagagatgatagatatgaaaatattataagcgatagagagtttttaatggaatgtaatattatatga

SEQ ID NO: 15496 - DNA, 1452 bp, Clostridium acetobutylicum
atgaaattaaaacaacttttacaaaacatagattacgatttaataaaaggggacattaatataaatatagaaggaataagctataattctaaaaaggttaaacaaaattacgtttttgtttccattaaaggagcaagatttgacggtcatgatttcataaaagaagctgcacaaaatggggctgcggcagttattatagatgaagattttcatgattcaatagagaatacaaccttagtaaaagttaaaaattcaaaagtggctttagcttgcctatgcaatttattttatgaggagccctctagagaacttaacttggttggtgtaactggcaccaatggaaaaaccacagttatacattacataagagatatgcttgaagcctttggcaatagcactggtactataggaactcttggttatgagttaaaggataaagaaataaatgtagaaaaaattaatcctactacgccagaggctttagagcttaaccaaattttaagggactttatagacaagggtgcaaaaaacgctgtaatggaggtaacctcttctgctttaatgaagcatagagttgattattgcagttttaaagtaggcgtatttacaaatctttctcaagatcatcttgatgaacatggcactatagaaaattataaaaatgagaaaattaaattattcaaaatgtgtcctgtaggtgtaataaatctagatgacaatattgcaggtgaaattattgaaaaaggaacttgtgaatttttcacctacggagttttaactaatgcagatcttacagctagcgatatggtttataagcctaattccgtaagctttaatgttcattacaaaggtatatcctctaaagtcaaggtaaatgtacctggtgaatttactgtgtacaatgttttagctgcaataggaagcctactttgcctcggcattgattttgaaagtattttaaagcttgtttcaagcataaaacctgttttaggaagattagaaacaataaataatccattaaataaaaatataataatagattatgctcatactcccgattctcttgaaaagcttcttataatggctcgtgaaatgacaaatggcagaataataacagtatttggctgtggtggtgatagagataaaagtaaaagaggtcttatgggcatggcagttggaatactttctgattactgcataataacctctgataaccctagacatgaaaagccagaggatataattagagatatagaacgcggcatgcaaactataaattcatcttatgaaaaaattacggatagacgctgtgcaattaaacgtgggattgaaatcctaaaagaagaggatatactaataatagctggaaaaggacatgaagactatcaaattattggagataacaaagtacactttgatgatagagaagttgttaatgaattactaggataa

SEQ ID NO: 15497 - DNA, 420 bp, Clostridium acetobutylicum
atgaaattatctactaaaggtcgatatggagttaaagcaatggtagatttagcgattcattatggtgctgagccagtttcaataaaaagtatatcagagaggcaaaagatatcagaggcttatttagagcagcttttcgttccgcttagaaaatcaggtctaattaagagcatacgaggatctcaaggaggatatgttctatcaaaagatcctaaagatattcatatatcaaatatctttgatgttcttgaaggtccaatagagatttcagactgtgtagaaagcgacagctgtgataatagtgattactgcgttacccgtcttttgtgggttaaaataaaggaaagcatagacaatgtaactaagactataaccttaaaagatatggtagatgattataattctattaaaaaccaatag

SEQ ID NO: 15498 - DNA, 1377 bp, Clostridium acetobutylicum
atgtcttttgatctaaaaaacgatataagtaaaaaaatacactttattggtattggtggagttagtatgagcggtcttgcagaaatactgcttgaaagaggctttaaggtttcaggttcagatatgaacggctctccaatgatagataaattaaaagagcatggcgctgaaatatatttaggtcataatgaaaaaaatattaataatgtagatatagtagtttacacagctgctattccagaagataatccagaattaatttatgcaagaaaaaataatatatccttaatgacaagagctgaatttctaggttcattgatgaaaggacataaatataatattgcaatctccggaactcatggtaagaccactactacctctatggtttcacatatagctttgacagaggatgttgatccaacaatattagttggtggaaatttagatatcataaacggaaatgtacttgctggaaaaagtgattattttataactgaggcttgtgaatataaagcttcatttttagaattttatccttatataggtgttatattaaatatagatgctgatcatcttgattattataaaaatatagatgatatagaaaacactttcgctaaatttgtaaacttaatcccaaaagaaggctacttaatagcaaatgcagacgataaaagagttgctagagttgcttcaaatgcaacatgcaatgtagtatcctttggaattgataacggagatataagagcgaaaaatatatcttttaatgaaagtggttttagttctttcgatgtatataaatcaagtgaacttttattcaacattgagcttaatgttcctggaaagcacaatattttaaatgcactttctgctatagcatcagctttaactcttaaaatcagtcataaatctataatcgatggacttaaaagctttaaaggaactcatagaagatttgaaattaaaggagttaagaatggtattacagtgattgatgactatgctcatcatccaactgaaataaaagcaacactagatgccgcaaaaaactatcctcacaataaaatttactgcgtatttcaacctcatacttattcaagaactttaagtctgtttgatgatttttcaaattctttttcaggtgtagatgaattagttctagctgacatatatgctgcaagagagaaggatactggagttgtaagctctctaaagctttctgaggctataaataaaaatggtgtaaaatcttcaaacctacacagctttgaagatatagtaaattactttaaaagcaaattaaatgacggcgatattcttttaactgttggtgcaggtgatgtctttaaaattggagaaatgtttttaagtaaataa

SEQ ID NO: 15499 - DNA, 1020 bp, Clostridium acetobutylicum
atgaaatctaaaaagaaattcggttttttgtcaaagttttttattacaattcttattttaatagtagtgataggtgtaactgctggaggttacttttactcaaagacaagtaaaatgaaaaaaacgactatatcaaagaaaccttctgatttaggaataacacagaagaatcaaaatgaattacagaagtatgatgatactataaacatagcattttttggacttgatagacgtcaaaaaactgatatatcacgttcggattccattatgattttaacaatggatccaacacataaaaagcttaagttatcctcaataatgagggatacatatgtaaatgttgatggacatggtatgactaagataactcatgcctacgcttatggtggtcctcagctggcgataaaaactataaatgaaaattttaatttaaatattaaggattatgtaactgttgacttttatggacttgaaaaaattatagacaagcttaatggagtggaagtagatgtccagccagatgaggttaattatctaaacagctatatagatgaagtttcaaagtatgagaaagttactcccaaccatgtttcttcagcagggaaacaacttttagatggtagacaagctgttgcctattcaagaattagatacacagcgggtggagactttcagaggacagaaagacaaaggactgtgcttatggcagttttcaataagatgaaagcacaaggaaaaagtaatatgctaagtatgatggatgaacttcttccttatgctgaaactgatttaggaagtcttgatattgcaaagtatggagctaagtttctttcatcgaatatagattctattgatcaagagagattcccagtggatggatactgtagtggcattacagttgataatgtttggtatctaaaaacagatttaggtgtaacttcagatcaaatgaaaaaatatatatttgaagatgtaaagccaacacctaaagcatcacttgtaaatatacctgctaaataa

SEQ ID NO: 15500 - DNA, 588 bp, Clostridium acetobutylicum
atgaatgagtgcaagagtaaaggtaaaaatcaagctaaaagaatattagatgcagctcttaactgtatatctatgaagggatatgctaatgtgtctatgagagatattgcagatgaagcaggggttgttttaagtcagctaagttactattatagaaataaagagggtatatttaaagaaataactaaaagaatcacagaaaaatatctttatgaaattgataatattttaaagagaggtaaatgtgaagaagagaaaatatcctcacttataaaatattttcaagaaactttaaaaaataaccctaataggtttaagattctttttgatttgacaagcatgtctattttctcaaagcctataaaaaatcttttaaacagcttttatgataaggcatcggaaattgtacaaaataatgttatgaatgatcttatagctaaggaaagatttaaaaactattctccaaaagttctctcaaaaatgcttcttggaactctctatggagtatctgcacagtttgttatgagtgataaagatgagaacgtacctgataatatatttgaagagcttagaatgatgtttaggtaa

SEQ ID NO: 15501 - DNA, 2379 bp, Clostridium acetobutylicum
atgaaagtacctgttaaatggttaaaggattatgttgattttgatataaatgctaaagaacttggagatagacttactctttcaggttctaaggttgaggaaataataacgagtggggacgaaataacaaatgtggttactggaaaaatattaaagatagatcctcatcctgatgcagaaaaacttgtgatttgcagtgtggatgttggcaaaaatgagcctattcagatagtgactggagctcaaaatatgaaagaaaatgatattgttccagttgcacttcatggttcgactcttcctgggggcgtgaaaataaaaaaaggtaagcttagaggagtagtttccaatggcatgatgtgcgctaaagaagaacttgggatagcagatgaagaacacgttcatggacttatgatattagatgagaatactcctataggaaaagatataaaggaagttttaggacttgataatcctgttatagattttgaaataacatcaaatagaccggactgcttaagtgtaattggaatagctagagaaacagcagctacaattaatacaaagtatagaaatgtaaagatagatttttctgaaacaaagggaagaaatataaaggaagagctagaggttgaagttaaagataagttatgtagaagatacatggctagagtaattaaaaatgttaaaatagaagactctcctgcatggatgcaagaaagattgatgcttgcaggtgtgagaccaataaataatatagttgatataacaaattttgttatgcttgaagtaggtcagccaatgcatgcttttgataaaaaaatgataacttcaaataaaatagttatagaaagagcaaaggatggagaaaaatttactactcttgattctgaagagagaagcttggattcaaatgttcttatgataaaagatggagataagaattgtgctatagcaggaataatgggtggacttgattcagaagttgcagagaacactcatgagataatattcgaatctgctaattttgatggaaccaatataagagtctcctcacaaaagttagccttaagaacagaagcttcaggaagatatgaaaaagatttggatcctaatctcgctgagatcgcacttaatagagcttgtacgcttattcaggaattaaatgctggagaaattgtagaaggcgtaattgatatatatcctgttaaaagtgaacctaacatagtagaggttgattacaattggataaacaatttccttggaattaaaataagtaaggaggaaatgaaggagtatcttgataggttagaattaactacagaaataaagggagacaaattagaagttttttctccaacttttagatgtgatataaatataaaagaagatgtagcggaagaggttgccagaatttatggatataacaaggttccttcaactacagtcaaatctcaaagtataagaactggaaaaagcaaaattcagcaaataaaagatgtagttactgacattttaatttctagtggcttgaatgagtctataaactactcatttgtaagtcctaaaatatttgataaaatactggttcctgaagatagtgaacttagaaatgttgttaagataagaaatcctttgggtgaagattttagtgttatgagaactacaactcttcattccatgatggaatctcttgcaagaaattattctcataacaatgagcttgcaaaattatttgaaattggaaaagtatatattccttcagaaaatgaaggagagattcctaaagagagaaatgttataacaataggtatgtatggaaatgtagactattttgatttaaagggtgttgtggagaatttagtggagattttaggagtcaacaagatttcatatgctcgtgaaagcgaaaatcctacttttcatccaggaaaaacagcagttataaaaataaaaaatactgttttaggaactttaggagaagttcatcctgatgtatgcgaaaactatgaagtggaagaaagatgctatgtagcagaaatagatttagatttattacttgaaaatgtatcattaagtagaaagtataaagctcttccaaaattcccaacggtaacgagggatatttcagtattagttgatgaggatatacttgtccaagaaattgagaatgttataaaaagacaaggaggaactatactggagtccttaaacttatttgatgtttataagggaaaacaggttcctcaaggtaaaaagagcgtgtcatatgcacttacctatagggatgaaaacaaaacactaacagataaagatgtagaaaagattcaaaataaggttataaagactcttgagcacgttttaggtgcagagcttagataa

SEQ ID NO: 15502 - DNA, 1413 bp, Clostridium acetobutylicum
atgaatggaattgttgaatttgccaatgctgtttttaaaccactaataaatttgggtgcagcaccaatgatgtttattgttttatcggttttagcaatcttgatgcgtgtaaaagtaagtaaggcaattgaaggtggtcttaagcttgctattgctttaactgcaattggacaaataatttcattacttacaactaatttttcaggtgctcttcaggcatttgttaaatcaacaggtataaacttatctataactgatcttggttgggcgccagttgctactataacttggggatcaatgtatacgttatttttcttgtttattcttgtaattgtaaatgttataatgttagctttgaataaaaccaataccttggatgttgatatatttgatgtatggcatccagcattttgcggaatattaataatgttttactctaaaaatctgcttgttgcaactatatttgttgtatttctcggaattttaaaaattatcaattctgatttaatgaaacctacatttaatgatcttttaaacatgcctgacactaatccaacaacaactacacatttaaattatatgatgaatcctatagttatggtttttgataagttaattgataagtttctgccctttttagataagtatgattttgatgctgctcaacttaataacaaaataggtttttggggaagcaagtttgcaataggtgcttatctaggagtttttgttggagttttaggacatcaaagtattataaaaatattcactttggcatttataggtgcaacatgtctagagctattttctgcaataggttcttggtttatagctgctgttgaaccattatcacaaggtataactaactttttaagtaaaagattaaagggaagaacctttaatataggtattgactggccgtttattgcaggtagagcggagatgtgggctgtggctaatatattggcgccaatacttttgatattttcgttaattttaccaggaaataaacttttaccattaggtggaattatagcaatgggtataacaccagcgcttttggtggttactcgcggtaagatgataaggatgataataattggaatacttgaaataccaatatttttgtgggcaggtacagtaattgcaccttgtgtaacaaacttagcaaagcaagtgggagcatttccaaaaggattatcaacatcaaccttaatatcacattcaacctgtgagggtcctattgaaaagttcctttctgtacttataggtaagttttttcaaggaggaaatatcactacaggactatatgtaatattagcactagcagcgtatttagcattatttgtttggtatgcaaaacaaatgaaaaaacgtaatacagaatatgcaaaagtaaaaactgaggattaa

SEQ ID NO: 15503 - DNA, 1359 bp, Clostridium acetobutylicum
ttgacgtttaatgaaattgcaaaagctgtaaatggaaaagttattttaagaggaagtaaagatgtattcaatgatgtaagtatagatacaaggaagctctcaaagggtgctatttttattgcaattaatggcgaaaattttaatgggaataagtttatacataatgcagttcaaaaaggagcagctctttgcattgtagatgaaattcattttgaaaaagattcttttaaagaagatatatctattttattagttgaagatactaaaaaagcacttttagatttagctgaattttatagaagtactcttaatattaaggtggttgctataacaggttctactggaaaaacttctacaaaagatatcacagcatctgttcttagaagtaaatttagagtgtttaaaacatctggaaattttaataacgaaataggtcttcctctcatgatattcaagcttgataaaagttatgaagttgcagtattggaaatgggtatgaatcattttaatgaaatacacaatatggcaaaggctgcaagaccagatatagctcttataactaatataggaatatctcacattgagaatcttaagagtagagaaaatatattaaaggccaaactggaaataacagatttctttaccaaggataatttacttattgtaaatggtgataatgatttgttaaaaaaacatgaatttaagagcataaatgttctaaagacgtctttaaataaagaaggtaatttaaatgctgaaaatttgtgtttacatgaaggaaattcagaatttgaagttcagggtgaaaaacttgttttaaatatgccagggaaacataatattgaaaatgctatgctgtctattgcagcagctttaaaacttggtttgacttttgaagaaattagaaaaggtctaaaagatttagaacttacagctatgaggcttgatattgtaaatggtgaaaatatagtaattgtagatgattcttataatgcaagtcctgattctatgatagcggctattgatgtaacaaagaatcttaagggaaatagaagaatagcagtgcttggtacaatgagagaacttggagaaaagtcttatgaatctcataaagaagttggagcttatgcaaaagaaaataatatagatgaacttttagtagttggagagtttagtaaagcttatctagatggatataaagataaagaaaactttagtgagtttgaaacaaatgaagagcttttaaaatttgtgaaaacagatatacgaaaaggagatatattccttataaaagcatctaggcttatgaaatttgaaaatatagttacaaaacttaaagaactagataaggagatataa

SEQ ID NO: 15504 - DNA, 1179 bp, Clostridium acetobutylicum
atgaaagaagttgtaatagctagtgcagtaagaacagcgattggatcttatggaaagtctcttaaggatgtaccagcagtagatttaggagctacagctataaaggaagcagttaaaaaagcaggaataaaaccagaggatgttaatgaagtcattttaggaaatgttcttcaagcaggtttaggacagaatccagcaagacaggcatcttttaaagcaggattaccagttgaaattccagctatgactattaataaggtttgtggttcaggacttagaacagttagcttagcagcacaaattataaaagcaggagatgctgacgtaataatagcaggtggtatggaaaatatgtctagagctccttacttagcgaataacgctagatggggatatagaatgggaaacgctaaatttgttgatgaaatgatcactgacggattgtgggatgcatttaatgattaccacatgggaataacagcagaaaacatagctgagagatggaacatttcaagagaagaacaagatgagtttgctcttgcatcacaaaaaaaagctgaagaagctataaaatcaggtcaatttaaagatgaaatagttcctgtagtaattaaaggcagaaagggagaaactgtagttgatacagatgagcaccctagatttggatcaactatagaaggacttgcaaaattaaaacctgccttcaaaaaagatggaacagttacagctggtaatgcatcaggattaaatgactgtgcagcagtacttgtaatcatgagtgcagaaaaagctaaagagcttggagtaaaaccacttgctaagatagtttcttatggttcagcaggagttgacccagcaataatgggatatggacctttctatgcaacaaaagcagctattgaaaaagcaggttggacagttgatgaattagatttaatagaatcaaatgaagcttttgcagctcaaagtttagcagtagcaaaagatttaaaatttgatatgaataaagtaaatgtaaatggaggagctattgcccttggtcatccaattggagcatcaggtgcaagaatactcgttactcttgtacacgcaatgcaaaaaagagatgcaaaaaaaggcttagcaactttatgtataggtggcggacaaggaacagcaatattgctagaaaagtgctag

SEQ ID NO: 15505 - DNA, 900 bp, Clostridium acetobutylicum
atgaacattgatatattaggcgtacctatctactatggttctgatagaaaaggagtagatttaggtcccagcaagttgagagaaaaaaatttagcgtcacttatagccaagtacaatcacaatgttaaagatatgggcgatgttaatgtaccatttatatccgaaaaggataaatttaaattcaatgataaaatgaaatttttaaagcccatagttgaagcgaatacagaactcgcaaacaaggtttatgaatcactatcctccggaaactttccatttgtagtaggaggtgaccattcactcggtcttggcagcataacgggtgcaagtaaagctcttgataaccttgcagtaatatggattgacgctcacacagatataaacacagacaaaaccacagaaacaggtaatgttcacggaatgcctttatctgctgcaatgggtattggtgcaagcgaacttacaaacatatgctataacggtcaaaaagtgaaaccagaaaatgtgttcataataggagcaagatcaattgataagggtgaattagctctaatttatgaaaaaaaccttaccttctattcaacaaaaaccgtaaagagattaggtgttgagtatattctcaaagagattaccgaaaagctttcaaaaaataatatcaattcagttcatctaagttttgatatagattgtcttgatgaaaccatagtaccaggaacaggaacaccggtttctgatggtctaaatgtagacgatactaaactaatggtagaatctcttgttaaaagcggtcttgttaagtccatggatcttgttgaatttaatccagctttggataaagatcatcaaactgaagatttagttatggagtttattgactgtatttttaaaaacttaaagtag

SEQ ID NO: 15506 - DNA, 1395 bp, Clostridium acetobutylicum
atgaaaatatataatactatgactcggaaaaaagaagaatttgttccggtaaagcctaatgaggtacaaatgtacgtttgtggtccaacagtttataatttttttcatataggaaatgctagaacctttattgtttttgatactgtaagaaaatattttgagtataggggatataaggttaactttattcaaaattttactgatatagatgataaaatgatagcaaaggctaataatgaaggagttagtgtaaaggagcttggagacagatatataaaggaatactatgaggatgcagatggtcttaatttggaaagggcaacttgtaatccaagagcaacagaatatataggtaaaataatagattttgtaaaaggtcttcaagatgaaggttatgcatatgaaattgatggagatgtatattttaatacaaacgcctttaaggaatatggaaagttgtcagggcagaatttagaggatagaatggctggagcaactatagcagttgatgacagaaaaaagagtcctgcagattttgcattatggaagagcgagaaacctggagaaccatcttgggagagtccatgggggaaaggaagaccaggatggcatatagaatgctcatgcatggctcgagatttactaggtgatactatagatattcacgcaggagctatagatttaattttccctcatcatgaaaatgaaatagctcaaagtgaggctagaactggaaagccattttcaaagtattggatgcatgcagcttacttaaatataaataatgagaaaatgtctaagtcattaaataatttcttaacagcaagagacattcttaaggagtatgatgcagaggttataagattattcctattatcagctcattatagaacaccacttaattttactgaggagtcaatagaggctgctaagacatctcttgaaagactttataatacaataaacaatttgggaagccttttaaataatacagctgagagtaatgatgatagtgaatatttaaaagcactggatagctatagagaaaagtttatagaaaaaatggatgatgattttaatacagcagacggtatttctgtaatatttgatttagctaaggatattaatataaatataaatggaaaatcaagcaaggctgctgttgagaaggctataagtcttatgagagaacttggaaaacctcttggaatacttcaaaaggttgaaaaacataatctagaagatgaaatacaaaatcttatagagcaaagacaaaatgcaaggaaaaataaagattgggcacttgcggataaaataagagatgaccttaaagaaagaggaatagtattagaggatacacctgaaggaataaggtggaagtttattgataaataa

SEQ ID NO: 15507 - DNA, 732 bp, Clostridium acetobutylicum
ttgaagattaatgaagttgcaaagttgactggcattaccataagaacgctgcattattacgatgaaataggattgcttaaacctagtgaaattacaggagcaggatatcgtttatacgatgaaaatagcctttctaaattacagcaaatattattttttagagaactggaatttcctcttaatgaaattaaagaaataatgagaagttctcaatatgacacagcagaagcattaaaaaggcaaaaagaattacttattaaaaagcgcgagcgaattgataagcttataactcttgtagaaaatacaataaaaggagaaggtaaaatgagttttgaagaatttgatatgaccgaaattgaagagtctaaaaagaagtatgcaaaagaagttaaggagcgttttggaggttctgacgcttatatcgaaagtgagaagaaaaccagtaattacggtagagaggagtggcaaaaaataaacgatgaatgtaagaatatattaaaggcttttgctgataatagggataaagcgcctgaaagtaaagaggttcaggaacttgttaaagagtggcagttatttattacagagagcttttataattgtacaaatgatattctaaggggtctaggttatatgtatgttgaagatgagcgttttaagaaaaacattgacagtaatggtgaagggacagcagaattcatttcaaaagcaattaaaatttactgtgagaaataa

SEQ ID NO: 15508 - DNA, 507 bp, Clostridium acetobutylicum
atgtctgaattcgaggggaacattataaatgaggaagacacacaaaatggcaagtttttaatttttattactgacggagagcagtatggtatagaaattaaacatgtaattgaaataataggaataagccctattagtgagatccctgaattgcctcaatatataatgggagttattaaccttagaggaaaggttatacctgtaatcgatataagacttagatttaataaaattttcaaggagtataatgatagaacatgtatagtaataatagatgttcaggacatgttgattggcattatagttgataaggttctggaggtattgaaaataagcgagaatgagataatggatcctccagagataagtaaggataaaaatggatatatcaaagccattggaaaaacccacgatggtatgaattttatattagactgtggaaaattaattagctctgaggaaataaataaactgggaccaaaaaacaaaattagggaggataaatag

SEQ ID NO: 15509 - DNA, 1209 bp, Clostridium acetobutylicum
ttgaaaaacaaaagctattattttttgaccattattaggtatgctgtatatttactcataggaatgtgtgctgttttttatggtgaattaaaaaatacagagatgtattattttatagtattttttcttatgtatattattgtaactcagtttagaatttattatttaaggaataggaagtatgttagtgtttctatggtagtagatttggttttagtttgttttatgtatagttatgtaaggaattttagtttcctatttctttttatatctgttttagattcatctataatgctttctaaaactcaagcgtatgcttctggtataatatgctcagttgtaataattattcaaaatgtaaaaattccctttagtttaaaggcgggaactaatttaataaatattctctttagcatacttttaatatttactttagtttttataggagacagctttagagaagaacaaaaaagaaaaatagaggcgcagggactttatgataggctcagagaatcggaagaaaagttaaggggagcttatgaaaagcttgaaagatattctgaaacggtagaagagttaagcattcttagggaaagaaatagaatatcaagggaaattcatgattctgttggacatacattatcggcagtattaatgcagcttcaagctcttttatatcttataaaaagtgataaagaggaaagtttaaaaactgtagaggaaatgacaggctttgttagaggtggaattgaaaatgtaagaagaactgtaagagagcttaaacctacagatttcgatagatttgaaggagtttttgctatagaggaaatgataagaaaatataagaagctcacatctgctgatataaggtttatactttcaaaagagaaaaggtcactgtcttcagatgaaagttttataagctatagagttgttcaggaggccttaaataatgcaataaggcatggaaaagcgtcgttagttgaggtttctatgcaatttaatcaagatagactctacataagaataaaggataatggagttggaacggatggaataaaaaagggctttggtatgactggtatggaggaaagagtaaagaagcttggaggaaatattgagttttacagtgaaagggataaaggttttgaagtgactgtgaatttacctaaatcatcagaagaaaaaaattctattataaattattaa

SEQ ID NO: 15510 - DNA, 1518 bp, Clostridium acetobutylicum
atgaacataaaacctgaagagataacttcaataataaaaagtcagattgagggatatgaaagtaaattagaaacagtagattcaggtacgataatagaaataggtgatggtatcgctagaatatacggcttacaaaattgtatggctggcgaacttcttgagtttccaaacgatgtgtatggaatggctctaaatcttgaacaagacaatgttggatgtgttttacttggttcagaagaaggaatcaaagaaggagacattgttaaaagtacaggaaaagttgttgaagtgcctgttggtgaagaaatgcttggaagagtagtaaatgctcttggtcaaccaatagatggtaaaggaccaattaaagcagaagattcaaaaccagtagatataaaagctacaggagttattgatagacaatcagttaatcaaccacttcaaacaggtataaaagccatagactcaatgatacctattggaaaaggacaaagagaacttattataggagatagacagacaggtaaaactgctatagctatcgatactatattgaatcaaaaaggaaaagatgtaatttgtatatatgttgctataggtcaaaaacaatctacagtagcacatatagttaatacatttgaagaaatgggagctatggattacagcatagttgtagcagcaactgcttcagattcagcaccacttcaatatttagcaccatattcaggtgtaacaattgcagaaaactttatgtttaaaggaaaagatgtacttattgtatatgatgatctttcaaagcacgctgttgcatacagaacgatgtcattacttttacgtagaccaccaggcagagaggcataccctggagatgtattctacttacattcaagacttcttgaaagagctgctaaactttcacagaaacttggaggaggttctataacagcacttcctataatagaaactcttgctggtgatgttgcgggttacataccaacaaatgttatttctataacagatggtcaaatattccttgaatcagaattattctatgcaggacaaagaccagctgttaactcaggtatatcagtatccagagttggtggtagtgctcaaattaaagcaatgaaaaaactttcaggaactttaagacttgagcttgcacaatatagggaacttgctgcatttgctcagtttggttctgaccttgataaagaatctaaaaagagacttgaaaaaggtaaaagacttactgaaatgatgaaacagcctcaatataagccaatgccagttgagaaacaaataatgattttatatgctgttgtaaatgagtatgtaatggatattgatgtttcaaaacttagtgcatttgaaagtggattatttgagtatgtagatgctcattatagagacttaggtaagcaaatacttgagaaaaaagagctaactgatgatataagcagtcagcttaccaaagctattaacgaatataaaaagatatttttagcagaggaacagtag

SEQ ID NO: 15511 - DNA, 795 bp, Clostridium acetobutylicum
atgagtaaaaatgaatatgtaccttttctttcagaaattaaggaagtaataaagcataccaatatagaatatacttttcgcatgagctatgatggggttgttaagccaggacagttttttgaagtttctatacctaaatatggtgaagctcctatttcagtaagcggggttggagaaaatacagtggatcttactataagacgtgttggtaaggttacaaatgaggtttttgaacgttacgttggagacaaactgtttttaagaggaccttacgggaatgggtttgatgtagaaaattataaagacaaagaaatagtgatagtggcaggaggtactggtgtttctccagtaagaggtgtcgtggagtatttcgctaaaaatagtaaagaagccaagagtgtaactcttatagcaggctttaaaactccaaaggatatcctattttcagaggattttaaagaatggaagaataatatcaacattattttaactgttgattcagctgaaggcgattctaattttaaagaaggattagttactaaatatattccagagttaaaattacagaatgtaaaggaagcatctgctatagttgttggacctccagcaatgatgagatttagtactcaaggtcttttagatgtaggcttcaaagaagaaaatatgtggatttcacaggaaagaaagatgtgctgtggaataggaaaatgtggtcattgtaagattgatgatgtatatgtttgtttagatgggcctgtgtttaatttcacaaagggcaaaaatttaattgattag

SEQ ID NO: 15512 - DNA, 978 bp, Clostridium acetobutylicum
gtgaatagtgttgagattatagggactggaagctatgtcccagaaaaaatagttactaatgaagatatgtctaagatagttgatactagtgatgagtggatatcatcaagaacaggtataaaggaaagaagaatatctataaacgaaaatacatcagatttaggtgctaaagctgccttaagggcaatagaggactcaaacataaaaccagaagaaatagatttaataatagttgcaactacaagtccagactcatatactccatccgtagcttgtattgttcaggagaagataggtgccaaaaatgctgcctgttttgatttgaatgcggcatgtactggatttatatttgctcttaatacggcatctcagtttataaaaacaggagagtataaaacagctcttgtagtaggaacagaggtactatcaaagatacttgattggcaagatagaggtacatgtgtactttttggagatggtgcaggtgcggtaattataagaggcggagatgaaaacggaattattaaagcatgtcttggttcagatggtacgggaaaagacttcttgcattgtccagcgactaatgtgataaatccattttcggatgaaaaaggtttagcaagcagtaagatttctatgaatggaagagaagtctttaaatttgcagttaaggtaatggtaagctcagttaaaaaggttatagaagatagtggactaaatatagaagacattgattatatagtacctcatcaggctaacattagaataatagagtttgcagctaaaaaacttggattaagtatggacaaattttttataaacctacaaaactatggaaatacatctggagcgactataccactggcaatagatgaaatgaataaaaaaggcttgcttaaaagaggtgctaaaatagttgtagttggttttggtggaggacttacttggggttccatggttcttaaatggactaaataa

SEQ ID NO: 15513 - DNA, 222 bp, Clostridium acetobutylicum
atgttagttatgggaagaaaaaaaggcgaatctattttaataggtgatgatatagaaataactattgtgagtttagatgaaaattctgttaaaatagctattaatgcacctagagaagtaactattctcagaaaagaattatacaataagattaaagaagagaataaagaagccgttattaagagtagtgaagttttaaaggaattaactctaaagaaataa

SEQ ID NO: 15514 - DNA, 177 bp, Clostridium acetobutylicum
atgtcagaaataaaagttggagaaaatgaatccttagaaagtgctttaagaagatttaaaagaaaatgcgctagagcaggagttctttcagaagtaagaaagagagaacattacgaaaaacctagtgtaaaaagaaagaaaaaatctgaggctgctagaaaaagaaagtttaaatag

SEQ ID NO: 15515 - DNA, 306 bp, Clostridium acetobutylicum
atgtctttaaaaacttcttttgatgaaaatataaaacaaaaacataaaattgaaaaacccaaaatgtataaagtaatactacataatgacgattatactacaatggagtttgtaattgaaatcctcatcaatgtattcaataaagtccctgccaatgcagttaagataacttttgatgtacacaaaaatggaataggaatagcaggagtttatccatatgatattgcggcaacaaaaataaatgaggttaagaaattagcttacaagaatggatatccattgaaattgactatgggggaggtatag

SEQ ID NO: 15516 - DNA, 1179 bp, Clostridium acetobutylicum
atggataataagaaattgtttgtatttataaagtactttacactagtttttatgattgttggaattatttttggagggaaggaatttaatgcacagaatattacattaatgcttatacttataataaatcatcagttaagaaccttctctttaaataagtatattcataaaattatatcttttattcttgagatagttcttgttgtcatatgtaatttttggatttcaggatatctatttacatatttaatattgctagctatagatgctaatgtaatgtttaagaaatttttagcttctacctttaatgttgtgataattttaattggtgtttatttttctttcaattatagtttgaactataagataatgaatcttggtgtttcaattattattatagctgtattttatttcaataaatatgaaaatgagaagaaaattgaagctcaagatctttatgacagattaagaatatcagaagaaaagcttaaaaaggctaatagggacttagagatgtatgcttcttctgttgaagagttaacgcttttaagagagcgaaatagaatttccagagaaatacatgatagtgtaggacattcattatctacaatggttattcagcttggagccattgagaagattataaggaaggctccagagaaggcagagcttcttacaaaaaacttaagaaagtttactcaaaaaagtcttgatgaagttagagcagctgtaagagcaataaaacctaaggaattcgaagaatatgaggggatattaagtattgaggaacttataagtaatttcaaaaagatggccaacatagatgtcagattagcttttacaaaagaaaaatggtcactaaattctgatcaatcatttgtactatataggatagttcaggagttcttgtctaatagtgcaaggcatggaagggcatctagggttgatgtaataatggcatttagtgaaaaaaatttacttgttacattaaaagataatggacaaggatgccagagtattattgaaggagtaggtatgaaaagtatgagagaaagggtaaaggagcttggaggatattttgaatataagactgcaccttatgaaggatttactgtaaaaatagagctagctaaaagagaaaaacttaaagtatattctggaggcgaaaataatggataa

SEQ ID NO: 15517 - DNA, 228 bp, Clostridium acetobutylicum
atgaagcaattgctagagactattgcaaagtcattagtagattgtcctgatgaagttcaagttagcgaggttactggagaacagtccataatacttgaattaaaggttgcacctgaagatatgggaaaagttataggaaagcagggaagaatagctaaggctataagaactgtgataaaggcagcagctgtaaaagaaaataaaagagttgttgtagaaataatataa

SEQ ID NO: 15518 - DNA, 429 bp, Clostridium acetobutylicum
atgccaaatgtgaagtctatattaaatcatattgaaaagttaccattacagcagaaagaacaaatactatcaactttagaagaaattcttgtcctaggttcacaagtaagccaagtagaacaagaagttaaagaatttagattttccaaggggaaagtatgcccaatttgtggttctgaaactatatcaagaaatagcaagtataatggtaaacaaggatatatctgcaagtcttgtaaaaagtcctttactgacttcactaattctgcaacctataaaagtaagaaaacattagataagtggcttaaatatgctaagtgcatggttaatggatattctatcaggaagagtgctaaagttgtagaaattaatatagcaacaagtttcttttggagacataaaattcttgattgtgtaagcacattttag

SEQ ID NO: 15519 - DNA, 471 bp, Clostridium acetobutylicum
gtgccaagaaaaggacatatagctaaaagagatgtattaccagatccattatacaacagtaaggttgttacaaaattaataaacaacataatggaagatggaaaaaaaggtgtagcacaaaaaatttgctacaacgcttttgagtatttaaaagaaaaaactggcaaagaacctatggaagtatttgaagctgcaatgaataatgtaatgcctttgcttgaggtaaaagcaagaagaatcggaggagctacttatcaggtaccaatagaagtaagacctgaaagaagacagactcttggaataagatggatgcttgcagcagcagataaaagaggcgaaaaatatatgcacttaaagttagctggagaattattagatgcttcaaataacacaggtgctgcagttaagaaaagagaagatactcataaaatggcagaagctaataaagcatttgcacattatagatactaa

SEQ ID NO: 15520 - DNA, 726 bp, Clostridium acetobutylicum
ttgaaaatagtaactgttaatgattatgatgaaatgagtaaatttgcagctaaaataattgcaagtcagataattttgaaggaaaatagtgttcttggattagctactggaggcactcctctaggaatgtataaagaactgataaatttatataataaagagaatctaaacttttccaaggtacagacctttaatcttgatgaatactatggagtttctgatgataaccctcaaagctatcactattacatgaaaaataatttctttaaattcacaaatataaaaaatgagaacataaatatactggatggaactacatctgacattgaaaatgagtgcaaaagctatgataataaaattttatcttctggcggaatagatattcaagtcctaggtattggtgaaaatggccatataggttttaatgaaccagacattaatttcgaagctaaaactcatcttgtaaaattagatgaaaaaactatagaagcaaattcaagattctttaactcaaaaaatgaagttccaacctctgctctaagtatgggaataaagacaataatgcagtctaaaaagatattacttttagcaaacggcgaaaaaaaggctgaagcaatatttaaaatggttaatggaaaaatatcacctgaagtacctgcttcaattctccaacttcacaatgatactacaataataattgataaagccgctgcaaaaatgttgtag

SEQ ID NO: 15521 - DNA, 483 bp, Clostridium acetobutylicum
atgattttaggacaagaaaatttaaacatagtattatttcagccagaaattcctcagaacacagggaatatagctaggacgtgtgtgttaaccaattctaaattacaccttattaaaccacttgggtttagtttagacgagaagcatcttagaagagcgggacttgattattggaaagacctagatttaagtctgtatgactcttacgatgagttaagagagaagtacaaggattctactttttatttttctacaactcatggtaatggtttttacgatgacgttaaatttaatcaaggtgattttataatttttggaagagaatcttgtggtcttcctgatgagataagggaaagtgatcctgataggtgtataagagttccaatggtaaaaacatctactagatcgcttaatttatcaaatactgttgcaatagttgcttatgaggctataagacagtttggttttcccaatatgaaataa

SEQ ID NO: 15522 - DNA, 1071 bp, Clostridium acetobutylicum
atgcataaaaaattatttatacctggacctgtagaagtagcagaagatgtacttcaaaagatggcagagcctatgataggtcatagaagcaaggaggcttcgtcacttcaaaggggcataagtgacaagcttagaattgtttttcaaactaaagaagaaatattactttcaacaagttctggaagtggattaatggaaggagcaattagatgctgtacagctaaaagagcagcagtattttcaataggagccttcggtaaaagatggtatgaaatggccatagacaacagagtaccagctgatttgtatgaagttgaatggggagaagcaatcaagcctgaatttgtagatgaagttttaggaacaggaaaatatgatttaatagcattaacacataatgagacatcaacagggataatgaatccagttggtgagatagcaaaagttataaaaaaatatcctgaggtagtatggtgtctagacacagttagttctatggggggaactaatataccagtagacgagcttggagttgacgtttgtataacatcatctcagaaagcacttggactacctccaggattggcagcatgttcattctcaaagaaggcaatagaaagagctagaaatgttgagcacagaggatattatttagatctattaaaactatatgagttcattcaaaagaaagattatcaatatccatcaacaccttcattatcacatatgttcgcacttgattatgctcttaataaaatgcttgaagaaggcatggataacagatataaaaggcatattgaaatggctgagtatgtaagggcttgggctagaaaaaatttcgaaatatttggtgatgaagataacctttcgaatacggtgacaactataaagaacactaggggcataagtgttgctgatttgaataaggaacttggaaaaagaggatttgcaatatcaaatggatatggcaagttaaaggaaaagacatttagaattgctcatatggctgagtttactttggatgatattaaagagcttatagaaaatataaatgatattttaaagctatag

SEQ ID NO: 15523 - DNA, 435 bp, Clostridium acetobutylicum
atgaataaggttgttttaataggaagattaactaaggatccagagttaaagtttactcccggtacaggaacagccgttgcatcatttactttggctgtagatagaagatttaaaaaagagggtcagcaggaagctgattttattcccatagttgtatggggaaaacaagctgaatctacggctaattacatgagtaaaggaaaacttatgggagttagcggaagaatacagactagatcttatgatgctaaggatggtactagaaggtacgtaactgaaattgtagctgaagaagttcaatttcttgaatggggatcttctaataataactccatggcaaatgatcaatttaataatggaaatgaaaatggttcaatgcaattaccagataataatgatataacaccaatagatgatggagatatcccattttaa

SEQ ID NO: 15524 - DNA, 255 bp, Clostridium acetobutylicum
ttggaaagaggaaacagaaagacaagaattggtagagttgtatccgataaaatggataaaacaatagttgttgcagtagagacaaaagttcgtcatcctttatacggaaaaactgtaaataagacaactaaatttaaagctcatgatgagaaaaatgaagctaaacttaatgatagagtacaaataatggaaacaaggccattgtctaaagataaaagatggagacttgtagaaatagttgaaaaggctaaataa

SEQ ID NO: 15525 - DNA, 843 bp, Clostridium acetobutylicum
atgaaatataaactagtatgtatagatatggatggaacacttctaaatagcaaacattgtgtaagtggagaaactaaggaagtaataagaaaagcatatgcgaaaggtgtggatatagttataactacgggaagaatatacgcaaatgctgcattttattcaaagttgattggtgtaaaatcacctgttattgcatcaaacggagcaattataagaggaagagataataatattatttacaaaaatgtccttagttcagacaccctttcaagaatttttaatgtatgcagtagactaaagggaaatataactcttcatacacacgatagtattatttgttcaagcaaatttgcttatattgtaatgtgggttatttttataggatctatcataaaaaataatgaaaatacactaaagataaaatacgttaaaaattatagtgcatatataaacgggcttaaggaaagcaatgatattataaaatgcgaaataattgataaggatgtaaagaagatatcagcaataagagaagagttaaaaagaatgaatgacatagaggttgtaagctcatcaagacataatatcgaggttacatcaaaaaatgtctctaagggtaatgctataaagagtttagctgaattttacggtataaagagagaagaaataataacaataggtgatagtgaaaatgacttatcaatgatagagtatggcggacttggtgttgtcatggaaaatggttgtgaaagtgcaaagaagcttgctgattatataactgatacaaatgataataatggtgtagcaaaggttataaaaaaatttataatggaagatggcaattaa

SEQ ID NO: 15526 - DNA, 1020 bp, Clostridium acetobutylicum
atgaaagagaaacttgaagctataaaagagaaagccttaaatgaattaaaaagtgcagtagacaaaaagaatattgaagaaataagagtaaaatatcttggaaaaaaaggtgagcttactcaaatattaagaggtatgggggctctatcttcagaggaaagaccaatcataggaaaacttgctaatgaagttagaagtaagcttgaaagccttattgtagaagctagtgaaaaaataaaggatgcagaaaaaaagactagacttgagagtgagattatagatatctctatgcctggaaaaaggcaaactataggtcacagacatccaacctacttaacattaaataaagttgaaaatatatttagagatatgggttttgtaatcgaggaaggacctgaggttgagtatgataagtacaattttgaaatgctcaatatacctaaaaatcatccggcgagaggagaacaggataccttttacataaatgataatgtggtattaagaactcaaacttcaccagttcaagttagaactatgcttaatcaaaagcctcctataaaaatgatttctccaggaaaagtgtatagatcagatgcagcagatgcaacacattcacctatattttatcaagttgaaggccttgttgtggataagggaataacttttgctgatttgaaggggacacttgaaacctttgctaagaaaatgtttggagaaaatgtaaaaatgaagtttagaccacaccattttcctttcacagaaccttcagcagagtcagatgtaacgtgttttgcatgtggaggagaaggctgcagagtttgtaaaggggaaggttggatagaactttggggttgtggtatggttcatcccaatgttttaagaaactgtggtatagatcctgaagtttatagtggatttgctttcggtatgggacttgatagaatagttatgcttaactatggaatagatgatataagacagctgtacgaaagtgatatgagatttttaaaacaattttag

SEQ ID NO: 15527 - DNA, 264 bp, Clostridium acetobutylicum
ttggataaagcaaaaaaacaagagttaattgcaacatacagcagaaaggaaggagatacaggttctcctgaggttcagattgctttattatctgaaagaattaatcatttaactagtcatttaaaagaacataaaaaggatcatcactcaagaagaggtctttttatgatgattggtaaaagaagaagtcttttaaactatcttgaatctgttgatattgaaagatatcgtgacattataaaaaaattaggtttaagaaagtaa

SEQ ID NO: 15528 - DNA, 729 bp, Clostridium acetobutylicum
atggctagaaagttgaagatagatatactaacactatttccagagatgtttgacttattcaatttaagtatgataggcagagctaaaaagaatggcataatagaaataaatacttataatataagagattacacaatagataagcataaaaaaactgatgactacccttacggtggcggtgcaggtatggttatgacacctcaacctatagttgattcaattagaagtgtaaaggaatcaaataaagggaaggtcatattcttaggtcctagaggtaagaaatttgatcaagaggatgcaaagaaactcgcagacagagaagaattaataatattatgcggccattatgaaggaatagatgaaagagtatataaatatatagacgaagaatactctcttggggactttgtactaacaggaggagaaatggcctgtatacctatagtggatagtatatgtagaatgattccaggagttttatcgaaaagtgaaagttatattgaagagtctttctatagtggacttttagagtatccgcagtacactaggccagaggagtttgaaggcgcaagggtaccagatgtacttatttcgggacatcatgagaatataagaaaatggagaagaaagcaggctctaaaaataactaaagatagaagaaaagatttatttgataagcttgttatgacgaaagaagacaaaaaactgttaaatgataacgaattataa

SEQ ID NO: 15529 - DNA, 1032 bp, Clostridium acetobutylicum
atgcataattctaaggaattaacagtttttttacaaaatctactacaaataaatagtccttctggctatactcatgatgtagtcagctatatcgaaaaagagttctgtaaacttggagttcattataaaataacaaataagggtaatataatggcaacccttcctggaaaaaatagttccttcgaaagaacaatttctgcacatctagataccttaggtgcaatggttaaagagataaaatcaaatggtactctttcacttactcctataggtggttatatgatgaattcaatagaaggcgaaaattgcaacataatgacacttgacgacaaaaaatatactggaacaatacaatcaaccaaaccatctgttcacatccacaatgatgccaaagagttaaaaagaatacctgaaaatatggaagttgtaatagacgaaaaggttttttctaaggaagatgttgaagctcttggaattaacgttggtgacttcatatgttttgatccaagaataaaatttactgatagtggttttataaaaagcagacatcttgatgataaggctagcgctgccataatgctctacgccataaagcattttatagacaataacattgagcttaagtacacaacaaatttttattttagtacctatgaagaagttgggcatggtgcctcaaacctccctcaaaataccaaagaattactttgtatagatatgggagctccaggaaaaggtcaaaactcttctgaatttgcaacctgtatatgtgcaaaagattcttctggtccttacgattatgcattcaggaaaagactggtagatatatgcaaaaataaaaatataccatataggatagatacttatccatactatggttcggatgcatctgctgctttaaaaagcggatacgatataaaaacagctcttataggcactggcgtatatgcctcacatggctacgaaagaactcatttagatggtatgctagcaacattagatcttcttataaattactgtacatctgaataa

SEQ ID NO: 15530 - DNA, 771 bp, Clostridium acetobutylicum
gtgagtgtgaaaaataaccctataggtgttattgattctggtgttggaggtataagtgttttaaaagaggcagtaaaacaattgccatacgaaaattttatatattatggagattcaaagaatgcaccatatggaataaaaagtgtggacgaggtaagaaacctaaccttcaatgttgttgagaaacttcttaaattaaatataaaagcgcttgtcgtagcatgtaatacagccactagcgcagcaatagatgaacttagagagaaatataagaacatacccgtaattggtatagaacctgcactaaaacccgcagtagaattaaaaagaaggggtaaaataataataatggctacgcctatgaccctttcagaagttaagttcaaaaatcttatggagaaatatgagaaggattcagaaatagttaagcttccttgtcctggattggtagaacttatagaagatggaatagttgaaggggaaaagatgcaggagtacttaagaaataagtttaaggattatgaaaaagatgatattgcagcttttgtacttggatgtacacattatccttttgtaaagaaggaaattgcaagtattgcaagggatgttccaataattgatggtagtcaaggaacagttatgcagctaaaaagaaaacttgataaatatgatattttaaatattggcagtgaaaaaggaaaaattaaaataatgaattctttaaaagatgataaaatactagatctaagccatagactcttagatttataa

SEQ ID NO: 15531 - DNA, 804 bp, Clostridium acetobutylicum
atgaatatacttaaggatttttcattggaaggtaaaattgcattagtaaccggtgcatcatatggtattggatttgctattgcaagatcctatgcaaatgcaggagcaacaatagtattcaatgatattaaccaagatttagttgataaaggactaaaggcatacgaggcagaaggaataaaagcacatggctatgtatgtgatgttacagacgaagataaggtaaatggatttgttaaaaaagtagaaaaagaagttggattaatagatattcttgtaaataatgcaggaataatcaaacgtattccaatgcttgaaatgaaagcagaagattttagaaaggttatagatgttgatttaaatgcaccatttatagtatctaaagctgtaatacctggaatgattaaaaaaggacacggaaaaataataaatatatgttcaatgatgagtgaacttggaagagaaactgtttctgcatatgcagctgctaaaggtggacttaagatgctaacaagaaacatcgcatctgaatatggtgaacataatatccaatgtaacggaataggacctggatatatagctacaccacaaactgcgccacttagggaacttcaagcagatggttcaaaacatccgtttgatcaatttataattgcaaaaactccagcagcacgttggggaacaccagaggatttgatgggaccagctgtattcttagcatctgatgcctcaaactttgtaaatggacatgttttatatgtagatggtggaattttagcttacattggaaaacaaccgcaataa

SEQ ID NO: 15532 - DNA, 423 bp, Clostridium acetobutylicum
atgtttgaaataaaaaggggaagcttaacacctgaagtattcaattctttagctgaatctgttggctggggacatccttcaattgatcaagttgaggaagcactaaaaaattcactttacacagcttgtgtagttgatgggagtaactttattgccatgggaaggattgttggagatttaagtatgtcttactttataaaagatgtagccgttatgcctgaataccaaaacagaggtattggtaagcttcttatgatggatatgctttcatttattgaatctaaaacacctactggttggaaaacttgcattgaactattaagtgctcatggcaaggaaggcttttatgaaaagtttggctttcaaaaaagaattaaagaaaaaaacggctgtggtatgactttaattatacgatttaaataa

SEQ ID NO: 15533 - DNA, 1155 bp, Clostridium acetobutylicum
atgattaaaataaataacagacttaaatccatagatgagtaccatttcaagaaaatagaggataaaaaaagagagttaattaaaaaaggaaaacaaataatagatcttggaattggtgatcctgatcttgaagtaagtaatagagttcaaaatgaaataataaaatcccttggaattaaagattttaataaatatccaccatacagcggaatagagaagcttaaatcaagagttataaaatactatagggatatttttcaggttaatttagatttagatgaaattataattacaataggatcaaaggagggtataagcagtataataccttcaatttgtgatataggtgattatgtaatagttccaaatccaggctatcaggtatatacagcagcgtcatatttgtggggtgctgttccatataaaatcccattaacagataagaatgattatttaccaaacttaaatgttataccccaaaatatagcacttaaaagcaaactatttttcattaattatcctaataatcctacaggagcggaggctaataaagacttttttaaagatatagttgagttttgcaaaaaaagaaatatagttttggttaacgattcagcatataatgagataataaaaaaggagagtacgccaattagcttgcttcaaagtgatgaggataaaaaaatgattgaaatagggagtttctccaagacctataatatgactggatttagagttggatatgtggttggcaataaaggagtaataaaggctcttctaaaggttaaaagcaatattgattcagggcaattcatgccagttcagtatgcggctgctgaggctattaacttagatagaaatgaaataaaaaaatcaagagagatatatgataaaaggagaagtacagcaaaaaaaatacttagtaaaaagggaataaaatattttgatgccagtgcagccttttatatttggtgcagtgttccaaagggatacagcacagatgaattttgtgacaaacttttaagtgaatacggtgttgttgtaactccaggatattgttttggaaatttaggatacgggttttttagaatagcgctgacaactaaaatcgaaaatattgaaacagcattgagtaaatttgaagattttcaatga

SEQ ID NO: 15534 - DNA, 387 bp, Clostridium acetobutylicum
atgatggaagaaaaaagttttttaccacttggaagtattgtaattctcaaaggtgcaatcaaaaaattgatgattgtcagcagagcaaatgtagtcaataacaattattttgattatggtgcaatactttatcctgaagggatgattgatgaaaatgtagcttactttaatggcaaagacatcttgaaggtggtttcagaagcatacacagatgatgatgatgccttgatggttgagcaactatgtcaagctaaagaagagtacttagcgtctagcgtagaaattaaagaaaatgtttcagcaccagaaacagccgcagcagaggcaggaaactttgatgatgatccttttgcagctgtgagagatatggaggatgacgatgagtga

SEQ ID NO: 15535 - DNA, 519 bp, Clostridium acetobutylicum
ttgaaaactattcttgtggatgggtacaatgttataaatagttggggaaaactcaattctattaaggatgatgtgagtttagagagtgcaagagataagcttatagaggtattagtagaatacggcgaatttacgaattgcaagattatagttgtttttgatgcgcatcatatccctgggaacactggagaaaagattaaaatgtacgataaatttactatagtgtatacaaaggcaggagaaacagcagatagttttattgaaagatatgtaaataaagttggaagaaaatctgaagtttgtgtagttacatccgataatttagaacagcaggttgtttttcaaagaggatctactagaatgtcttccatagaattttataatgatgtacaaaaaattcatgggagaataagcaaaaaagctgagaaaattagaaatgaaaagaagtataatcggttagaagatagaattgataaaaatataatggaaaaactggataaaataagaaaaaatctttga

SEQ ID NO: 15536 - DNA, 645 bp, Clostridium acetobutylicum
ttggaagaaaacactataactaaaatagaagcacagaagaaaaaaaaagatagggttaacgtatatattgataatgaatattcattttcgtgtaacactgaattgatatatattcatggtttaaaaaaaggtaaagtggttgacttagattatcttcaagatataattgaagaggataattatttatatgctaagagtagagccttgagctttattgaaaaaacctttaaaacagaaaaagaaatacgggtaaagcttagagaaaaagaatttaatgaaaaaattatagagcgtgtaattgagtttcttagaaagtatgattttgttgatgattcgagatatgcggaactttatataaaggaaagaataaataaacaaggtaaagttaagataaagtatggtcttataaaaaaaggaataaatgatagtattatagatgaaaagctaagtaaatattcagctaataatgaaaattatattgaagcaatgagagaagttgcattaaagaaatttaataacatcgctaaaagagaaacggataagcttaaaataaaaagaaaattaagcagttacttattgggacgaggctattcttggagtgaaataggtgaggttttaaaggaaattttttcagaaaataactaa

SEQ ID NO: 15537 - DNA, 1236 bp, Clostridium acetobutylicum
atggattttgaaaatataaaagtaagtgattctgaagtctattctatcatagaagaagaaaatgcgagacaagaaaataatatagaacttattgcatctgaaaacttcacaagcaaagctgtaatggaagctatgggttcatatttaactaataagtatgcagaaggatatccaggaaaaagatattatggtggatgttacgtagttgataaagttgaagagcttgcacgtgaaagggcaaaaaaactttttaaagcagagcatgctaatgtacagccacattcaggttcacaagctaatatggctgtttactttgcagtattgaagccgggagacactataatgggaatgaacctaacagatggaggtcatttaactcatggaagtccagttaatttttcaggaaaactctttaatataattgcctatggtgtaagtgatgaaacagaacaaatagattatgaagcgtttagaaaaaaagccttggagtgtaagccaaagatgatagtatctggtgctagtgcatattcaagaattattgattttaagaaaataagagaaatatgcgatgaagtaggagcatatatgatggtagatatggctcatatagcaggacttgtagcagcaggacttcatccgtcaccaattccatatgctgattttgtaacaacaactactcataagactttaaggggaccaagaggcggagcaattttctgcaaggaaaagtatgcaaaggacattgataaatctgtattccctggaatgcaggggggacctttaatgcacataattgcaggaaaagcagtatgctttggagaagctttaaaggatgattttaaagattatgcacagcaaatagtaaataatgcaaaagtgtttgcagatgaacttacaaaatacggttttagaatagtttcaggtggaactgataatcaccttttattagttgatttaacgaacaaaaatataacaggaaaagatgcagaacatcttcttgattcagttggaataactgcaaacaaaaatactataccatttgagaaaaagagtccttttataacaagtggaataagaatgggtacaccttcagttacaactagaggatttaaggaagaggaaatgaaaaaagtagcgtatttcataaactatgttatagagcatagagatgaagatttaagtgaaataaggaaacaagtttcagaattatgtagtggatttcctatatataagtaa

SEQ ID NO: 15538 - DNA, 1425 bp, Clostridium acetobutylicum
atgaataactttggagaggattttatatttggaggagcaacagcagcttatcaagcagaaggagctacaaaggaagatggaaaaggaccttgtatttgggatgaatatctaaaaaaagaaggcagatttactggagatacagcaagcgatttctatcacaagtataaggaggaccttaagttttcaagaaagtttggagtaaatggaataagaatatcaattgcttggtctcgtgttattccagatggaaaaggtgaggttaatcctaaaggacttaaattctatagtgatttaattgacgaatgtataaaaaataatgttgaaccttttgtaacacttcatcattttgatacacctttaaccttgttcaaagatggcgattggttaaataggaataacatagattattttgttaggttcgcaaaggtttgttttgaagctttaggagatagggtaaagaagtggataactttcaatgaagcttgggcagttgctcaaaatggttatataataggaaacttccctccaagtataaagtatgacataccaaaggcagcacaatctatgcataacatgatggtagcacatgctaaggtagttgaattatataagagtatgaatttggatggagaaataggaatagttcatacacttgagggtaaatacccaataactgattctaaagaagataaagaagcagcttatttagattatatgatttcaaacaaatttatgcttgatgcatgctttaaaggagaatatcctaaagaaactgaaaagactattaatgaaataatgtctaagaatggtggggagcttaagatatatgatggggatttagaagtacttaaaaaggcttcttcaaagattgatttcttaggaatgaattattattcaagtcattttttaaaggcgtatgaaggagagagcagaatacaccataatggaacaggagaaaagggaacaagtatttttgcacttaaaggaataggtgaacgtgttaataatccagaggttccgacaacagattgggattggcctatttacccaaagggacttcatgatatgctagttagaataaaaaatgagtacccaaattacaagaaaatatatgtaacggaaaatggaatgggctacaaggatgatttcaaagatggaaaaatagacgatacaccgcgtatagactatattaataagcatttagaggctatacttaaagcgaaaaatgaaggtgtagttgtaaaaggatattttgtatggtcacttatggatgtgctttcctggagtaatggatacaataagcgttatggattattctatgtggattttaaaactcaaaatagatatgctaaaaagagtgcttattggtttaagaggatatcttacgagaagaaactaatagattttagcgatatagaatactag

SEQ ID NO: 15539 - DNA, 1998 bp, Clostridium acetobutylicum
atgaataaaaatctaaaaagaaatttagctgttttggtaagttctacatttcttgtctctacaactataaatctaacatcatcaaagcctataaaagcagagaatgccagaaaacctgtttatttaaatcctaatgcaaacactgaagctagagtttcagatttattaaaacgaatgacattagatgaaaaagttggccaaatgcttcaaggagaactaggaacctcttctgataacgcaaaaccagaggactgtatcaattatactttaggttcagtattaagcggcggtaatgcagacccaactacaggaaatgatgctcaaagctggtatgacactgtaactagctttgttgaagcatcaacacaaaacagacttcatatacctatactctatggagtcgatgcagtacatggtaacagtaacataattggagcaaccatatttccacacaacattgctcttggcgctattgcaacaggtaatcttaatgagggtaaaaaaattgtaagaaaaattggctctgctaccgcaaaagaaatgagggttactgacattccttggacctttgctccttgccttgctaatccacaaaatcctacttggggaagaacttatgaaggctttggagaagacataaatctagcctctgaacttggtagctcctatataaagggacttcaaggtaatgacattaatgatttaaaaaagcctaacaaggctgttgccactataaaacattatcttggagaaggttacacagaaaacggcactaatcaaggaaatgtgacctcaatgacaaaggagcaggttgctaaaaatcttataaaaccttatgaagatgcagtaagggcaggcgcaagaactgttatgccttcttacaacagcatacagggagttaaaatgactgcaagcaaataccttttaactgatatattaaagaacaaactaaaatttgatggttttgtcatttccgattacaatgcagctcaacaaatcaccgcggatgaaaacggtaacagtgtaagtggacttaaaaatcaagttaaagtttctataaatgctggtgtagatatgcttatggaacctaacgattggaaaagctgtattggctacattaaagaacttgttgcagatgaaaaagcgcatcctggtactggaataccaatgtctagaattaacgatgctgtatcaagaatattgagagtaaaattccaatcagggttattcgaacatcctatttctaataaccctgaaaataatccaaaggtaatggcacaactaggttcaaacaaacatagaaaattagcaagagaggctgtaagtaagtctcttgtactgttaaaaaatgatgctgtaggtggaaaaccaattctttctcagcttaagaaaatgaaaaaaatctttgttgctggaaaaagtgctaacgatataggcaatcagtgcggtggatggactatagactggcaaggaaagagtggtaatacaaccaaaggaacaaccatacttcaaggtatcaaagattcaatcagtccaaaacaaaatgttactttcagcgaggatggtgctggagcttccggaaatgatgtagctatagctataataggagaaactccttatgcagaaactaatggcgataatcttaatggattaaatttagattcaactgacaaaaaaactcttgcaaatctaaaagcttcaggtgtacctactattgttgtacttgtatcaggaagaccaatgatagttactgattatataaaggactgggcaggcttagtcgaggcatggcttcctggaacagagggtaatggagtttctgatgttctatttggaaataaggacttcacaggaaggcttccagaaaaatgggctttttatacagaagcataccctataacaaatagtaataaacaatatatgctatttgattcaggctacggacttactaaaaatcaggttacaccaaggcttcctataacaccagcacatccataa

SEQ ID NO: 15540 - DNA, 1212 bp, Clostridium acetobutylicum
gtggagaaaaagactaaacaagaaatagtaattagaataatgtgttttatagcggcattttgtttatggctttacataagtaattacgaaaatcctattaaaacttataagattaaaaatattccagtaactataaataacacagatgttttaaaagataacaatctcgccctggcaccaaatcaaaaatttcaaattactgtaacaataaagggaaatgcgacagatgtgtatagagttaagcctagtgagtttaaaatagcagcggatataagcgcttatgctgtaaagaaaggtgaaaataagattccagtagagattgttaagtctccaggaaatgttagcatagttcaggaagaaaatatgtgggttaatgtaaaaattgataagattattaaaaaaaatgttagtgttgtaatcaaaaagcaggcaaaaagcaattatttaacaggaatatatgatgcttttccaacaccatcaaaggtaagtgtttcaggtgcatcagagatagttttaaatgtggatcatgttgagggaattgtggatattaaaaatgaggatgaggatagttttgtatcaaaggttaagcttgaagctgtagatgctaagggaaatgtaataggaaatgttgctatagataataaggaaattgatgcgacgcttacaaaaagaaagaagagtaaaacagttggtataaatgtaaagaccactgggcaatcacctagcggtgtaaaaataaaatctatcacaccaagcactaatactatacaaatagtaggtgtaggtgataatgtaaataatctttcctcaatagatactgaaccaatagatttatctaagatttcagtaggagagacagttcaggtaaagcttatagttccagagggagttaggcttacaaattctaatgacagtataaatgtgagattagatacggacaatactgttcaaaagacctttaaggtgaatataactacatcaaatttaggtcaagatttaaaggcacagctttctaataccacattagatgttgttgcgtcaggttatggaacagatataaataatgttaaagatggagatataaaagcaaatttagatttgagtaatttagcagaaggtaattacagccaaagtgtaaatgtaactcttccttcgggacttactaaagtatctcaggatgttgataaagtaaatgtaactataacaaagtaa

SEQ ID NO: 15541 - DNA, 684 bp, Clostridium acetobutylicum
atggaacaggaaaatgatatagattttactgggatttttgaggttttaaataaagaaaaagcgatgattgcggcagtaaccatattttttgtattattttcagctatcttaagtttttttataataaaaccaacttaccaaggacacgttacagttataataggaaaaaatgattcaaagtccagtacaaatgagcagtataatgatgttatgatgtcacaaaatcttactaaaacatatgctcaaattgcacaatctaaacaagttgcggataaaactgtaagtaaattagctgatggaactacagcagatcaggttttaggactagtgagtgttacgcctcaaacaggtactcaaataatagatataacagctaatggaaaatcacctgataaggcagcagatttggcaaatgatttttcagatagttttgtagaagtgtcaaaggcagtttacacagcaggcgatgctagaataatcgatagagcgacagcacctaaatcaccaataaagcctaaaaaaatgataaatattgctatagcttttattttagggctttttatatctgtaggtatagccttcattaaagaatatatggacaagactataaagacgcaggaagatataaaaaagcatttggatttacctgtacttggtgtaatacctaattatgaagaggaataa

SEQ ID NO: 15542 - DNA, 846 bp, Clostridium acetobutylicum
atgattaaatataggggtggaaaggcgagagaaataaaaaaatttatacatcacttgaaaagtcaaaaatatgatagctattatgaaccatttattggtggtggagcggtatattttgatttagagccccaaaatgcaattataaatgatataaatactaaattaatagatttttatgtggatgtaaaaaacaatttcagtaggataaaaaatgaacttgaatttttggagaatgtgtacaataaaaatcagcaacaatatgatgcattgaaaatgattaattctgaagaaagagttttaagtatgaatgagaagttgtattatgagctgagagaggaatttaactacccaaccgggaagtatttaagaggaacagtgtactattttattaataaaacctcctattcaggaatgattagatacaacaaaaagggcgaatacaatgtcccttttggaagatacaaggggtttaatgcaaagggaatagacattaaacattatgagctgcttaaaaatgcacaaatacttaatttggattatgaggaggtatttaaaaaagctagctctaaggatataatgttcctagatccaccatatgattgtgtttttaatgattacggtaacattcaattaggtggaggttttgatgaagaccagcataggcggctagcagaaaattttaaaaatttaaatactagatcacttatgattattggtaaaacaaagcttacagaagaattatatagaaattatattgttgatgaatattcaaaaaagtactgtgttaatataaaaaacagatttaggaactcagctattcacatagttgtaagcaattatttataa

SEQ ID NO: 15543 - DNA, 1092 bp, Clostridium acetobutylicum
atgaggaagttaagtaagaaggtttttttgatttttgctgtaacaacaatttttattcttggaaattcagcttgggataggaccatagcatctgaagaggataattctatgattgatggaaaacctaaagagtattatataagtgaaaaaaactataaaagagaaataaagcaagttgaaaattatcttagtgctaggcgagaatcagggcattttattggaaaggaaaatatagatatttactacgaaaaatatgttataccaaattcaaagaattcaattgtaatatcccatgggtttagggagagtatggtaaagtataatgaaacaatatattattttttgaaaaatggatattccgtatatggattggaacatagaggccatgcaagatcaggtagattaggaaaagattcaacacaaacaagtgtagataattttgattattatgtagatgattttaaaaaatatgttgatactatagtagaaccggataatagagggaaaaatttattcttatatgcacattctatgggaggagcaattggaggcttatttctagaaaggtatcctaaatatttcaaagccgcagttttaagttctccaatgtttgaggtagatacgggaagataccctgaatttttgtcaagagctgttgcaagtgtatttaactttgtgaatttaggagatacatatgctcctggtcaccatgagtattcttgtgaatcggattttgaaaattcctgcacaacaagtaatattagatatgattattatttagataaaactaacaagagtagaaaaattgaaaatggtggagcttcgtttaagtgggtaaaggaatctttaaaggcaacagatgaggttacagacggaaaaaatgcatcaaaagtaactattccagtgttgttatttcaagccgaaaatgatgatatagtaaggccaggaggacaagataagtttgcaaaagaagctaagaagtgtaaactaatagtgattaagaattcaaagcatgaaatatatagagaaaaggatagtataatggttccatatttcaataaggtatttacttttcttaataacaataagtag

SEQ ID NO: 15544 - DNA, 2364 bp, Clostridium acetobutylicum
atgaataaggttgaattgctagcaccagcaggcagtattgagagcatatatgcagctgttcaaaacggtgctgatgcagtttatgtaggtggaagtaggttttcagctagagcttatgctgaaaattttaatgatgaaattatggaaaaagcagttgattattgtcacgattatggagtaaggctatacgtaacagtaaatacgcttataaaacaagatgagataaaagaagttattagatatatagaatttctttataaaataggagtagatgcacttatagttcaagatactgctatattgcaacttattaaaagatacgttcctgattttgaaatacatgcatcaactcagatgacaattcacaatgcattaggagctgtgtattataaagaaagaggctttaaaagaattgtgctttcgagggagttgtccttaagggaaattgaatacatatctaaagaacttaatatagaaacagaggtttttgttcatggtgcattatgtgtatgttattctggacagtgtcttatgagttctataataggtggtagaagtggtaatagaggaagatgtgctcaaccatgtagacaaagttatacacttattgataaaagcagtttggaaagtaaaaaaggatattttctaagtaccaaggatatgtgtactgtggatattttagataggctcattgataccggaacttcttccttaaagatagagggaagaatgaaaaagcctgaatatgcaggaggagttgtttcatcatatagaaaagccattgataataagcttaatggagactataaagaagagaaagcaaagcttttaaagctttttaatagagagggtttttcaagagcatatcttttgggcaatacaggaaaagatatgatggcttataaattccctaaaaatacaggggtttttatagggaaggtaataagtgatggaagtatagttcttaaagaaagtttaaacttaaaggatggagttagaaatgatgtcaagggtactgttgtgtcaaagatacttcttgatggggttgaagttaaagaggctaagccaggagaaaaggtgaaaatatttcctcgcttttacaagtctggagattatatatacaagactcttgatttaaagcttactcgtgaaattgaggaaagttataaaaaggattttaagagaaaagtatatttagatttagaaattgaatttaaaatcggagagccatttaagattactgcaagtttttcaagagtaaatgatttaggggcaaatgaaaaaaatagggctattagtatacaagttttaggggatatggtttgcaaggctgaaaaaagtcctgtaaagagagaaaaagtagaggaacatttaaggaaaacaggaggtactccttttgaggtcagaaacatagagtttacctgctttgatgaaggatatataccgatatctgctttgaattcaataaggagagaagttctagaaaaatttcaaaatagtattcagaaaagctataaaagagaagctaatttaaagtttgaaggaataaagatttctaagaggtcagaagttaaaatcccagagatcatggttttagtttcgaataaggagcagtatcttgcagttaaagaagagggatttaagaacataatagttgacttatttaaaagaaaatgtgacttgaagcttaaggaacttaaggatgtttatattaaggttcctaatgtaattaaagaagagtttaacgatatatgcaataaaatagatgaaaatatagaaaacattaaaggcatagtaacggttaatgcaggaataataaataaatataaaggtctagttaatataataggagactataaaggaaatatatttaatagcgaagcattagagttttataaggaagatctagatggtttttgcattagcacagagttaagtaaaaatgaaataaaggcattgaataaatgtaaatgcatggatacccaaatgcttatatatggtaaaatagaagcaatggtaagtgagtattgtcctataggaagtgtttttggaggtaaatcttctaaaagcaattgccaaggtacatgcatgaaatcagactttgtacttaaagataagatgggagtatcttttgatgtggtaacagacaaatattgcagaagtcatatatataatccattaccattaaatcttataggcaatttagatgaaataaagaatttaggcgtgaattcttatagaatagattttattgatgaaaatagagaaagtgttaaaagagttctttcatggatgaaaaatggtaagattgatggagaattcagtggttttacaagaggaagttataaaagaggagttgaataa

SEQ ID NO: 15545 - DNA, 2232 bp, Clostridium acetobutylicum
atggttgatgtagaaaatttgtgcaaggaagccttaaagggcattaatgatgatgaaaatatatacactaaaactaaacttataaatgtacttaaacatataacgcgtgagggcatgaaagaagaggagataattaaatctgtaattcaagtatgtctagaattgactaaggcagatgaaccaaagtggcttcaaggtgcttctagactatatgttataaatttatataatgaagttagaaaaaacagaaatatttctgaaaatgaagatccatataagggcttttatgattttattgtgaagcttacggatgaaggactttatggtaagtacatattagaaaattattcaaaagaggatatatacgaacttgaaagttttattaagaaggatagagattttttatttacatacagcggcataaagctgctttctgaaagatacttgattcaaaattttgaaagaaaggtgcttgagcttccgcagcaaatgtttatgggaatagctatgcatcttgctgttccagaaaaacaggagaatagggtttactgggctaagagattctatgatgttttaagttctcttaaggcaacaatggcaacccctactatgtcaaatgcaagaaagccgttttatcagcttagttcctgctttatagatactgttgatgacagcttaaagggcatatacaaatcactagataattttgccaacgtatctaaatatggtggaggaatgggagtgtattttggaaaagtgagatctatgggcgcttcaataagaggttttaaaggtgcgtcaggcggagttgtaccgtgggttaagctttttaacgatacggcaatagcagtggaccagcttggagttagaaatggaagcgtggctgtgtggctagatgcatggcataaagatttaccggaatttatgcagcttagaaccaataacggtgatgatagaaagaaggcacatgatgtatttccaggagtgtgttatccagatcttttttggaggcttgcagaggaagatatagatgcaaactggtatatgatgtgtcctcatgagataaaattagttaagggatattcacttgaggattattatggcgaagagtgggaaaagagatactttgactgtgttaatgaccctagaatagataaaagaatgatgtcggttaaggatatagtaaggcttataataaaaagtgcagcggaaactggaacgccttttgctttctatagagatgctgctaatagaatgaatcctaataaacataagggaatgatatactcttcaaatctttgcaccgaaataatgcaaaatatgagtgctatggatattttagaagatgaaattatagatgaaaatggtgataagataatagtacaaaaagctaaatctggagattttgtagtgtgcaatctttcttcaattgtactaggtaatgttgatgtaaatgatgatgaagagcttcaatatgtaattgaaacccaaataagagctatggataatgtaattgatcttaattattattctgttccttttgcagaggttacaaataaaagatacagaggaataggcttaggaactagtggatatcaccatatgcttacaaacaatagggtagtgtggacaagtgatgaccattttgaattcacagatagagtttatgaaaaaataaattactatgctatacaagcgtctatgaatatagctaaagataaaggacgctatgaatatttcgaaggttctgattgggaaaatggtagttactttaagcttagagggtacaattctcctaagtggaaagctcttatagctaagattaaaaagtatggcatgagaaatggatacattatggcagttgcacctaatggttctacagcaactattgctggtacttcagaaggagtagatccagttatggctaggttttggatggaggagaaaaagggcagtataactcctaaaatagcgccaaacctttctagagaaaatttctggttttacaattcagcctataatatagatcaaaaattgtgcgttaaaataaatggaataagacaaagacacatagatcaatcacaatcctttaatttatatataactactgattacactatgaggcaaattatgaacttatatatagaagcctataaatctggtgttaaaagtatttactatgttagatcgaaatctttaaccgttggagattgtgacagctgttcagcataa

SEQ ID NO: 15546 - DNA, 1179 bp, Clostridium acetobutylicum
atgttaaataaagaatcattagaatgtgaaggaatacattacagattacaggtgatatttctctttatagcaagtatctgtgtaggtacgggtatttatgaatggattccgctcaccaatgtgttacagcagagttttcatgtaggacaagaacaaattatttttataggaagtgtgttttcgttattttatgcaataggcttcctaatttttggttggttagctaattatgttgaaataaaaaaactattaattgtgggaactttattattgatgatctcaacatttctgataggatttgcaacaaattataaacttatgatagttttccgtgctattcaaggtatatttgcagcttcttttgcaccactaggcttttctattatagttaagatgtttccggaatctaaacgtatagctggtattagtgccattactacaggatttgttatggcaggtattttaggacaattgtatggaagtataatagctaattcatattcatggtcagttgtattttggctgcaagcattaatttatttgatgattattatttccatgatatttcttgtgcccaaaacagataaagtttcagagagacctacaagcttcattggtgaattagtaaaattgttaataagtaagtcactttttccatgttacgtgattacattgactttgcttttctgctttgttggtatgtatactgtaatgggaatgttttttcaaaaagactttggtcttaataatgaaaaaatcttatggattagaggaattggtattattggaatgataggttcaatggtatttgccaaattatcaaaaaaaataggagtaggtaatattctatctttagggcttgtgtgtgcttcaataggcgttttaattattggtatatcaaataatgtaggtctatcagttgcgatgagtgtagtttttgtatttggaattaccatatcattgccaatggttgtttcatcaatagggactttggctgggaagaaaagtggaaatgcaatgacgctatatacatttgtattgtttataggagcaacagtaggaccaattgtatgtaatcgcattatagaaagtggaagctaccctttggcatttatatttttagctgttgttttaggtattagttttattgcttcactaatagtaagaaaaactatataa

SEQ ID NO: 15547 - DNA, 1713 bp, Clostridium acetobutylicum
atggcattagatggtatatatatacacagcatattacatgaacttaaagataaattactaggcggaagaatctcaaaggtaaaccagcctgaaaaagatgaaataaatttaactataagaactacttcaaattcaaatataaaattacttataagtgcaaatccaacttatcctaagatacatattactgatttaataaaaacaaacccaataaaagcacccatgttttgtatggtgctaagaaaacatcttttaaattctagaatattaaagatagatcaaattgaaagtgatagaatagtcataatagactttgaaactactgatgaattgggttttaacagtatatataaattatatatagagataatgggtcgtcatagcaacatatctcttgttagagagcacgataacacaataatggattgcataaagcatataactccagaggtaaatagatataggactcttcttcccggttgtgaatttgttcttcctccaaaaagtgataagcttaatccctttaattttgaatacaatgatttaaaggactacatatctgaaaaagacattacaaaaaatccaaacatgttttcaaaaacattcaccggagttagctcaactttatcaaaagaactatattttaacgtagaaaaacttaactcgcttgaagctgctttcgattacttaaaaactatatttgataaagtaaaaaataatgatttctattttgcatcatacttgactaatggatatgttaaggacttttactgtttaagattaaattacttagaaggttttagtgaaaaaacatatgcaacaccttctcttcttattcaagagttttattttgagaaagacaaagccgaaagattaaagaatagatcttctgatcttcaaaaaatagtaaatactaatcttgaaagatgcagaaagaaaaatgaaatttatgaagatgagttaaatgaatgtgctaataaggatacctacaaaatatacggagaacttctcacctccaatatatatacgataaaaaagggagataagactgcaactgtactaaactactattctgaaggcaatgaaagcattacaataaaattagatgaaaataagacaccttctgaaaatattcaacgttattttaaaaaatataacaaacttaaaaagacagaggaaaatgcacaaattcaaattaaaaataacaatgaggaaatagaatatctgcagtctgttttgacaaacatcgaaaacagcgatacttacagtgatattgaagatattcgtcaagaacttatagatacagagtatataagattctccaagaaaaataaacaaaagaaaaaggataaaatatcaaagcctatgcacattaaatccaaggatggaatagatatgtacataggtaaaaataataaacaaaatgattacttaactttaaaatttgcagataaaagagatatatggtttcataccaaaaatatacctggttctcatattatagtgaaaaattttggtgatataccggaaacaactcttatagaagctgctagtatagctgcatattatagtaaagctagagaatcatcaaatgtagcagtagactatacagaagtgaaaaatgttagaaaaccttctggtgctaagccaggtatggttatctactacaccaacaaaaccatttatacaaatcctaaagaaccaattacataa

SEQ ID NO: 15548 - DNA, 114 bp, Clostridium acetobutylicum
atgaaagtaagaccatcagttaaaccaatttgcgaaaaatgcaaggtcataaaaagaaaaggcaaagtaatggttatatgcgaaaatcctaagcataagcaaaaacagggttaa

SEQ ID NO: 15549 - DNA, 2286 bp, Clostridium acetobutylicum
atggttaaaaagttgactcctgaagatgttatttacaatattagtcccagagataagagagcagataaaaacaatatttatgataaaatgtatgttgatataaagaatggaattgatataaaggataggggatacaatatatacgtagtagatgattttagcactgatatgctaaaggatataaaaagttatgttaattatcttttaagtagaaaaagcagtcctaaggatatatgttatgttacaggaaaagatagagatatacctcaaagtataattataaataatggttttggaaaaaagctttatgactgtattgaagaaataaaaaaaatatatagggacataatatataaattttataatgcattagatatagaagaaagggattttataatagaagatgcaagaaatgaaaaaaaggctataataaacaaaatactaagtgaagcagaagaaaaaggttttgaattaaagccttcagaggctggctttaattttataccactaaaggaaggaaaaccaattacagaagaagagtatgatgagcttcacgaatcgcaaaaagaagacatattgagcaaaatgaaggaattaaaaagcagtactaagattgtatttacaaagctaaaggatatagaggagaaagaaataaagagtttaaaggaatgtttcaaagattatatagaaaatgagacagaggaaaagaaatactcgtatatgaatgaatttgaaggtgttccagaagccgtggtatacatttataaggtgtttgatgatataaaagaggaaattgtaaaaaattatacttcaagctatgaaaaagactctgaaaaaataattgcaatactttttaagtactgtgttaatgttatagtagataatagtactaataataaaccacttaccatttacgaggatgatcctaagctatctaatcttttaggaagcattgaatataaaaatcatggtggaaattatgttacggatgtgagtttaataaaagcaggctcacttttaaaagcaaatgagggctgtgtaataattagaattaaagatttaattgaaaaaccaatggcttactattacctaaaaaaagtacttttaaatgagacagtgagacttgactatacaaaggatcatcttgaacttatatcacttagaggactaaatccggagcctataaaagtggatttaaagatcatactaattggagattatgaaacctataacattttatataacttagatgaggattttagggaactttttaaaataaaggcagaatataatccaatagtaagcataaatgacaattcaataagatatgtagaaaaaatagttaagtcttttttgaattgtgaaaaaggcaaagaaatatcatcagctgcattcaaagaaatatgtagacagttatcacgaaaagcggataatagaaataaactttatatatctcctaaggatataaagcaaatattaatattaacctgcaataatgctaataaaactgatgataaatatataaatgatgaaaatgtaagagaagtagtttgcaaaagagaaatcatagaagaagaaattataaaaaattataaagaaaagaagatactcatggatttttcaaaaagtaaagtaggtcaaataaatgcattatctgttgtaagcttgggcaataaagatgtaggaaagccaattagattaacctgtacttgtcataaaggaagtggaaatatagttgacatacaaaaagaaaattctatgagtggaaatattcattcaaaatcaataagtatcttaaagggacttatgggagaaatatttggaggatatgatagaatacctgtggatttttatctgtgttttgagcaagtatatggaaagcttgaaggggatagtgcttctgtagcggaaactttatgtatgatttccgcactgactaaaatacctataaaacaaaatataggagttacaggatctataaatcaatttggtgagattcagccagtaggaggaataaaagataagatagaaggtttttacagagtttgcaattcatataatagcagagacggatattctgttgctatacctgataataataaggatgatattgtattaaattatgatgttgaaaaggcagttattgaaggaaatctatttgtatatactatcgagaatattaaagatgccgtgaaagttttaatggatgaacaatgggatgatgtaattaaaaaagcgtggatagagatgaaaaaatatgatatcaaaagagagagaaggcactga

SEQ ID NO: 15550 - DNA, 1710 bp, Clostridium acetobutylicum
atgaaaaggaaagtacttgctatattcgtaatcactgctatgttttctacaatactatttacgggatgtggttcagaaacagctaatgtaaaagataccgcagagcctaaaatagaaaacgttataaaagtgactagagctgtagataagactaaattacctgatgaagctaaaaatagaaaagatacattaataataggtacaggtgttcctggtggaaattttataagctattatgcccaaacacttacagatgcgtatattagtgatgttgttacagatgggttagtggattgggatgattctggagagccaattccggggatagctaaaaagtgggatatatcagatgatggattgacatatacttttcatttgagagatgacgttaagtttagtgatggaaagcctcttacagctgatgacgttaagttttcactagagctagtatttgatcctagcttctccggtgcagtagatcattcggcaataccgattaagggtggagatgcctttaataagggaacagtaaaggatattgagggaataaatgttaaagatccacatactatatcagttacgctaaataagcctaactcgtcaatattatatcttataggtacaactattatttcaaaagattactttggcaaggattatgtccctggaaatacgaaaggggtggaggcaaagcttcaaactcctgtaggatgtgggcagtataaggttactaagtatgttccaggtcaggaagtagatcttacagctaatgaatactactggaagggcacaccaaagattaaaaatttgatatttaaagccactactgaagaaaataaaatgcagaatttaagctctggagaaacggatatagacacttttgatggtacacctgaaaatatagaacaattaaaatcaatgggatttcttgatctaacctcatttccttcttcaagtattttctatataggagtaaattgcaaggattcaaagtttagtgacagaaaagttcgacaagctctagagtatggtttaaacaggcaagagatggcaaaaacagtttttaagggcaatgcttatataataaatgaaccacagtctaaggcacatgcatcttatcttaaggatgttaatgaatataaatacaatgtgtccaaggcaaataaaatgctcgatgaagctggatggaagaaaggtactgacgggataagagaaaagaatggacaaaagtttgtaattcatttaatgtcttcgtctactaactctgcccataagcttgaaatacctataattaaagagaattataaaaagcttggtatagatgttgaacctgagcttatggatctcaatactcttttaagtaaaacggataaaaaagattttgaagcatatttaatgggaacttccttaggtgcggatgcattatcatcaaacttagcggcaaactttaaaacaggtgctccaagtaataatatgtcttactcaaactcaaacgtagatgatttaatagataaggcttataaagaatcggataaggataaaaggacggctttagagcaaaaggtatataaagatataaatgaagacttaccatttatattcacttatcagccagaaacaatatgggtaaataattcaagagtgacaggaattaagtttttaccatataattctttttgccacaatatttataaagcagaaataaagtaa

SEQ ID NO: 15551 - DNA, 933 bp, Clostridium acetobutylicum
atgatattagaaattaaaaatcttaagaagacttataaggagtttacagcagtagatagcttgaatcttaaaatagaagatggtgaaatttatggattgcttggaccaaatggtgcgggaaagtctacaacaataaatacaataacaggattaacaaaggttgatagtggagaaattaaaatatttggtaaaagatttaatggaagcgatacaaatataaaaagaaatataggagttgtaccacaagatatagctgtttttagtgaattatcagcttatgagaatgttgccttctttggtaaattaaacggtcttaggggagcagttttaaaagagagagttaaggaagcacttgattttacaggtttgtgggatagaagaaaaagtaaaccaggtcagtattcaggtggtatgcagagaagacttaatattgcttgtgctatagttcatagacctaaattaattataatggatgaaccaacagttggaattgatccacaatcaagaaatcatattttagattcagttaaaaaattaaatgaaatggggtccacaataatatatacctcgcattatatggaggaaatagagacgctttgcagtaaaataacaattatagatcatggaaaagaaatagcgacaggaactaaagaacagctaaaagagatgatatcaaatgaggaaaaggttgaacttgaattatcggaggttacagatgatttagtagaagctgttgaaggcataaaaaatgttaaaaagtgcagaagaaatgaaaatatgttggtgattgtttcagataaaaacagcgaaaatataagcacaattacggcgaaaatagcagagtttaagagtaaaattatatcaataaatgttgaaaagcctagtcttgaaggtgtatttcttacacttacgggaagaaaacttagggattag

SEQ ID NO: 15552 - DNA, 765 bp, Clostridium acetobutylicum
atggtagatattcattcacatataattccaggaattgatgatggttcaaattctcttgaaacaacattaaatatgatgagtatagcaaaagaagcaggagtaactaaaatggttgctacttcccactattatagaggaaaatttgaaaacagtatttcagttattgagaaaaaagcaaatgagttgaactatacattaaaggaaaagggtgtagacattgatgttataccaggacaagaagtgtttatagacaattatactcttaaagactataaagaggggataatagggactataaataatacagactatatgcttgttgaatttgatatgatgtcacttggcgagaatgcaatagatactttatatgagcttcaaataaaaggaattaagccaattatagctcatcctgaaagatacacttatattcaaaaagatatttataaaataaatgaattaatggatgaaaatatttattttcaagtaaatgcaggaagcatcgaaggactttttggaaagactgtacaaaaaacagcattaaagttagtagaggagggtgtaattagttttattgcttcagatgcacattcagctggaaaaagatgccctggttatgaaaaagcacttcatgatttgacaaaaattgataaaacattagccgaaaagtttataaaaaattcgaatttgcttcttgaaaatgaaaaaattgaaaataaagtacgaaaattgaaaaagaaaaagacttttttctcttttttaaaataa

SEQ ID NO: 15553 - DNA, 834 bp, Clostridium acetobutylicum
atggcagttagaggctttaagcctacttctcctgcaagaagacagatgacagtatctacatttgaagaaataactactgatgtaccggaaaaatcactgttagtttctttaaataacaaagcaggaagaaataataatggtaagataacagttcgtcatagaggtggcggaaacagaaacaagtacaggttaatagatttcaaaagaaataaagatggagttccagctaaggttactacaatagagtatgatccaaatagatcagcttatatagctttagtagtatatgctgacggagaaaagagatacataattgctcctactaaattatcagttggggatactgttgtatcaggtccagatgcagatataaaaattggtaatgcacttccaataaaaaatatacctgttggtacagtaattcataatgtagaattagcagcaggaaagggtgcacaattagtaagagcggctggttcatcagcacagcttatggctaaagaaggaaactatgcacagttaagacttccaagtggagaaatgagatatgttagaattgaatgcagagctacaattggtactgtatcaaatttaacacatgacattgttaacatcggtaaggctggaagaaagagacatatgggaataagacctacagtaagaggttctgtcatgaaccctaatgaccatccacacggtggtggagaaggtaaatcaccagttggtcgtccaggtccagttacaccatggggtaaaccagcattgggttacaagactagaaaaaataagaagtattctgacaaacttattgttaagagaagaaatgataagtag

SEQ ID NO: 15554 - DNA, 1182 bp, Clostridium acetobutylicum
atgatggcagccataacagcagcaaaaaaacatgaggttattctaatagagcggaatgagaaacttggtaaaaaactttttataactggaaagggaaggtgtaatataaccaactctatatctattgatgagttttttgaaaatatacctggtaatccgtattttttatatagttcattatattcttttactaataatgatttaatggattttatagaaggactaggtgtgaaattaaaggttgaacgtggaggaagagtttttcctaaatcagataaatcttctgatataatattggcattagaaagagaactaaaaaagagaaatgtaaaagtgattttaaattcaagggtagtaagtataaaattggaaaatggtgtaataaaaagtgttactacaagtaataatgaatgtttcaaaggagatttctttattctgtgtacaggtggaaaatcatacccacagacgggttcaacaggtgatgggtataattttgcaagagatatgggacataacatagttgaacctagaccatcacttgttccaatagaaattagagaaagctttataagtgatcttcaaggtctttcacttaaaaatgtatcattatatataaaaaaaggaaagaaagttttgtatgataattttggtgaaatgctttttactcattatggtatctcaggtccaatagttttaagtgcaagtagagttgtgaattataataatgaccttaaagctgttatagatttgaaaccagctcttgatgaaaaagaactggataaacgtattcagaaggattttatgaagtatataaataaagattttaaaaatgcactagatgatttattgcctcaaaaattaataccagtaattataaaattatctaaaatagaagaagataaaaaagtgaatttaattactaaggaagagagaaaaaagatagtaaatcttataaaagaattcactataacaataaaaggacttagacctattacagaagctattataactgctggtggagtggatgttaaggaaatagacccttctactttaaaatcaaagaaggtaagtaatctttatttttgcggagaaatagtggatgtggatgcttatacaggagggtttaatttacaaatagcaatgtcaacagctcatgaagctggtagaaatattggagattaa

SEQ ID NO: 15555 - DNA, 351 bp, Clostridium acetobutylicum
atggaagaaagaatatatttgtcaatgcttttaagcacttatggcagtctacttacagaaaagcaagtgaatgtcatgagattatattatgacgatgatttatccatgccggagatagcagaattaaacaatactacaaggcaagctatacatgatttaataaaaagatgtcataaaatgcttttaaactatgaaaataaacttaaacttgtagaaaagtataaaagaaatgaagatataaagaaagacattaaggacaaactttatattttgaaagataaaattcaagataaagataatgttcagttaattgatgaaattgaaaaagatataaattcttttagtatataa

SEQ ID NO: 15556 - DNA, 657 bp, Clostridium acetobutylicum
atgagtacaacagatatattaaaacagattttgttaccttcactttgggaaacaatttatatggtttttgtatctaccttatttgctataataattggatttataccagctataatacttgttgtaacagatgaaaatggcttaaagccaaataaaattgtatataaaatattagattttataataaatatgttaagatcttttccgtttttaattcttatgattgcgatattcccattcacaaaattaattacaggaaaacaaataggtacaacagcagcgatagttccattaacaattggagcatttccatttgcagctagagttatagaatcttcacttaaggaggtggacacaggaataattgaagctgctaaatcttttggggcaagtaattttcaaatcatatttaaagttatgataaaagaggccatgccatctattgttttaggaattactcttacagttattaatataataggatattcagctatggcaggtgcaataggcggtggcggacttggagctgctgcaatgcagtatgggtataatatgtttaacaccacagtaatggtttatacagtaataatacttatgattatagttcaaattttacaatcacttggaaactttgtttataaattaatggttaaataa

SEQ ID NO: 15557 - DNA, 933 bp, Clostridium acetobutylicum
atgttaaaaactcagttttgtgatataattggaataaaatatccaataattcaaggtggaatggcatgggttgcagatagttcacttgcagcgggagtttcaaatgcaggaggactcggaataatagcagcagcaaatgcaccagttgagtatgtaagagatgaaataaggaaggcaaaaaaacttacggataagccattcggagttaatataatgctcttaagtgataatgcagaagaagttgcaaaaatggtctgtgaggaaggcgtaaaggtagttaccacaggagcaggaaatccaggtaagtatatagatatgtggaaggaacacgacatcaaggttattcctgttgtagcatctgtagcgcttgcaaggagaatggaaagatgtggagtagatgctgtagtagctgaaggttgtgaatcaggaggtcatgtaggagaattaactacaatggcattagtgccacaagtagtagatgctataaacattcctgtaattgcagctggaggaataggtgacggaagaggtgttgcagctgcatttgcacttggagcatcaggagttcaggttggaacaagatttttaatagcaaaagagtgtactgtacaccaaaattacaagaataaagttttgaaagctaaggacatcgatacagaagtaacaggaagaagtacaggacacccagtaagagttcttagaaacaagcttgctagaaaatataagctaatggaaaaagaaggagcatcgccagaggaaatggaagagttaggaagaggagcgcttccaagagcagtaagagaaggggatgtggataatggttctgtaatggcagggcaaattgcaggactaattaataaagaagaaacttgtgatgaaatagttgaaagcatgtttaaagaagcagtagaagttatagatagaattaaatag

SEQ ID NO: 15558 - DNA, 1353 bp, Clostridium acetobutylicum
atgagcaaagtaaaaagtttttttgtgtgtcaggaatgtgggtatcagtcagtaaaatggctaggaaaatgtccttcatgtaatagttggaatagctttgttgaagaagaaagagtagaaaacaaaaaagcaagtaagatcacattaaatagtgaacctaaatgtataaataatataaaatcaggacagtatgaaagatatgatacaaataatacagagttaaacagagtacttggtggaggacttgttaagggttcaattacacttatatctggtgcgccaggtataggaaaatcaacactcttattgcaaatctgtcaagatatagctttaaaatatggaaaagtactttatgtttcaggagaagaatctgaacatcaaataaaaatgcgtggagatagactaggagtgacttcagctaatatatatatattagctgaaaccaatatggagagtatagagagacatgttgaaaatataaaacctgcttttgttataatagattcaatacaaactctgtataaagaccagataacttctgcacctggaagtgtatcacaggttagagagtgtgctaatgatattatgagaatagcgaagacggataatatacctttctttattgtagcacatgtaacaaagcagggggagcttgcaggaccaagggtattagaacatattgtagatacagtacttacttttgagggacaaagaacagaagaatttagaatacttagaacggtaaaaaatcgtttcggaacaacaagtgaaataggtgtttttgaaatgaaggaagagggacttgagcaaatacacaatccttcaagtttatttttagaggagacaaattttaatcaggaaggatcagttgtaataggtattatggaaggaacaagaccaattcttgttgaaatacaagcgttagtttcaaaaacaaatgctgtaatgcctagaagaacttctgtgggaatcgatagttcaaggttaaatttaattttagcggtgttagagaaaaaacttaaggtgccattctataattgtgatgtttatgtaaatgttgtaggtgggctaaatatagaaggaacttatggagatctgggattagcacttgctctagtttctagtgttaagggagtaagtataaagctagataagatgatagtagtaggagaaattggactaacaggagaagttagacccgtatcattttctgatcgaattgttaatgaagccgacaaattaggttttaaaaatatattaatgccacaaaaaaatattaaaaatgacaaaaatattgcgataaatataataggtgtatcttatttaaaggaagctgtaaataaagttttttaa

SEQ ID NO: 15559 - DNA, 888 bp, Clostridium acetobutylicum
atgaacaaagttaagtttatttacaatccattttcaggagaaaatttaattataaataatatagataaagttataaaaacacatcaaaaatatgggtacacaatagttccacatagaatagaattaaattgtagtatagaaagtgctttcgatgatatagatgatacatataagtatgttcttatagctggtggagatggtactgtagataatgtagttaatgttatgaaaaagtgtaatttggatatacctattgcaatacttccagtaggtactgcaaatgattttgctaaatttattggaatgccagctgatattgaaatggcctgtgaacaaatattaaatagtgaaataagaaaaattgatattggaaaaataaatgataagtattttatcaatgtagctagtgcaggattatttactaatgtttcacaaaaaacagatataaatatgaaaaatacaatgggaaagcttgcttactatgttaaaggaatagaacagctgcctaattttaagagaataccattaaaagtagaatcaaaacaaaataattttgatggggaaatgctccttatgcttgtttttaatggtcaaacagcaggtaactttaagtttgcatacaaggccattgtagatgatggtatgcttgatgtaattataatagagggcggaatggttaaagatatagtaaatatactaatcaagatgtttaaaggggagcatcttgaagatgtaaacggaataatatattttaagacagataagcttaatataagttgtaataatgatatagttactgatatagatggagaaagaggacctgattttcctgttgaaattacatgcataaaaggcgggcttaaaatttttggtgtaaagaatatttaa

SEQ ID NO: 15560 - DNA, 1833 bp, Clostridium acetobutylicum
atgaatattgcatactttacatcgctctttatggtgtttttaagagttttcgcattttttatagcactacaggttatgtttccaaagtcgcttccaaatactgtaaaggtaatgttatcattgtgtatatcttttttcgtaatgccatatataaatttatcacaggttagtgcattaaataatggttttctatatacatggcagtgtatatgtgagattttgactggacttatacttggcttctttgctaatttaatgtttttaggagttaaaataggcggacaatttttagactttcaaataggatacagtatgatgacagcttatgatccttcaagtgaaagtaatgcatcattgatagaaagatttttaaatatgttttctgtggttttatttttttctataggtggacatgaagtagttataaaagagcttgtaagcagctttaattcagttaagttgggtacatttgttataaatgatcaaagtgtcatggtggcatttaatgtatttgtacagttctttgttataggtttcaaaatagcactaccagttgtattagtgcttttaattacagatatagttatggggcttatgtctagaactgtgcctcaattaaatgtaatgatattaggtatgccaataaagatactacttggacttacttgccttatgataattttaccacttatagcaaaggttttaataacatcgttttcatctcttcctgatatatataaaggattttataaattagttcccatagggcttatttttgcagattcggataaaactgaagaagcaacccctaagaggaagagtgaagctaggaaaaaaggccaggttgctagaagtaaggaagttcctcttgctgcaacacttgttgctattacatttattatatcgctcggtggacaaacattctttaatggtcttggcgttatgatgcaaactttttttcaatcatatatacacagtaatcttacagagcttgatttaagaaggattattatatttgtaattctgaatgctggtaaatttatatttatgtttggagtgccagtaatggtcgttggaatcgtagccaatatagctcaaactggatggataacaacaactgagcctataaaacctgatttaaaaaagctaaatcctatttctggttttaaaagaatattctctatgactacaatagtaaatcttttaaaggatttagtagtagttgcagtattatcagttgttgggtacaaatttcttatgtctaactatggcgatatagctaatctgaataatttaatggttcaatatattcctcaggcatatttaagttatgtaataagtattttcagaatagtagctcttataatgatagtaattgcaggatttgattttgtatataacaggtataagtataaaaaagacatgaagatgacaaagcatgaggttaaagaagaatttaaacaggcagagggagacccagaaataaagggtaaaagaagacaaagaatgcgtgaaatcgtaacaagaacgatgttaagtaaggttcctgatgctacggttgtaattacaaaccctactcatatttcagttgcaattaaatatgagaggggagttgataaagctcctacagtggtagctaaaggagcagatagaacggcacttagaataaaagaaattgcaaaagaaaacaatgtgcctataatggaaaacaagccactagcaaggttgatatttaaaaaggttgaagtagacgaacagatacctgctgaaatgtatcaaacagtggctgaaattttagctttggtatataaattaaataagaaacaagggtga

SEQ ID NO: 15561 - DNA, 831 bp, Clostridium acetobutylicum
atgaagtataaattaatatgtgtagatatggatggtacggtacttgatgacgaaaaaaaaataagcaatgaaaatatagaggcaatgaaaagggctcatgatgcaggagttaaaatagcaatttgtacaggaaggctttttgcaagtgcgttagcatattctgatatattaggagtaaaagctcctttaatagcttcaaatggtggctatataagggaaaaagataatgacaatgttatatacgaaagctatttgaaaaatgaggaagcgaaggatatataccatataatagagaaatacaatgtatctatgtttttcaatacctataatacggttatatcaaataaagaatttgaagaaaactatacatataacaaatttaacgataaccttccgaaagaaaagagagtaaaacttgtttatcccaaaaatatggataagtttttagaagaaaatgttggcgaaatattaaaatgtatatgtattgacaaagatgtagaaaaacttaaattgctaagaaaagagatagagtctcttaatagatttgatgttgtaagttctggtgaatttaattttgaaattatgccaaagggtgtttcgaagggaaaggcagtaaagatgctcgctgctttttacaatataaaacaagatgaagttatttgtattggtgacaatgaaaatgatctttcaatgataaaatgtgctgggattggtatagcaatgggaaatgctgaggatagtattaaacaaattgcagactatgttacagatacaaataataattctggagttgcaaaagccatagataaatttatatttaatgaagaatag

SEQ ID NO: 15562 - DNA, 1299 bp, Clostridium acetobutylicum
atggcaaaatacgataataaaaagcagttacgttgttcgttttgtggaaaaagtcaagatcaagtaaagagattaattgcaggtcctggtgtgtatatttgtgatgagtgcatagaattatgttctgaaataattgcagacgaatttgaagaaactcctcagataaatgttggtagtttacctaaacctagtgaaattaaggattatttagatcaatatgttgtaggtcaagaagatgcaaaaaaatcattatcagttgctgtgtataatcattataagaggattaactcaaatttatcaaataatgatgatatagaacttcaaaaaagtaatatacttttacttggacctacaggttgtggtaagacatttcttgcacaaacgttagctaaatttttaaatgttccttttgcaatagcagatgctactacattaacagaagcaggatatgttggtgaagatgttgaaaatatacttttgaagcttatacaaaatgccgattacgacgttgagagagcagaaaaaggaataatatatattgatgaaattgataagattgcaagaaaatcagagaatccttcaataacaagagatgtgtcaggagagggtgttcaacaagctcttcttaagatacttgaaggtacggttgcatcagttccgcctcagggtggaagaaaacatccacatcaagaatttatacaaataaatacaactaatatattatttatttgtggtggagcgtttgatggagtagacaagataattgaaaatagaacaagagtaagtacaattggatttggtgcttctattcagtctaaacaacaaaaggatataggggcaattcttaagaagataatgccaggtgacctattgaagtttggtctaatacctgaatttataggaagacttcctataatagtaacgcttaattcacttgatcaaggtgcacttgttaaggtgttatcagaacctaaaaatgctcttgtaaagcagtatgaaaaattacttcaaatggataatgtagaacttgaatttaaagatggtgcgcttaaagcaattgcttctgaggcaatatcaagaagtacaggagcaagaggtcttagagctatagttgaagatataatgaaagatataatgtttgatataccatctagagaagatgttaaaaaggttatagttacagaaaatactataaatacaaaacaacctgaattagttttagaagaaggagcaaaagctatagaagctcctaagaaaaaagaaaaatcaaaaactaaaaaagatatagaaagtgcatag

SEQ ID NO: 15563 - DNA, 969 bp, Clostridium acetobutylicum
atgaggaatataaaatgggctatattggggccaggaactattgctagagattttgcaaaagctatatcagaagttgataacaatatatatgccgttgcatcaagaaatattgagagagctaaaaaatttgccaatgagtataaagctgaaaaattttacggagattatgatgaaatgttaagggacgaaaacattgatgtagtatatatatccacacctcattgtaatcattacgaatatataattaaaagtcttgaaaataataaacatgtattttgcgagaaggctataactgtaaacggtaatcaattaaaagaaattgttgatttggctaataaaaagaatttaatagtgagagaggctatgaccatttatcatatgccattatataaaaagcttcgagagcttgtagatgaaggtaagatcggaaaggttaaaatgatacaggtttcctttggaagtcttaaagagtatgatgtgaataacagattttttagtaaagatttagcagggggagccttgctagatataggtacttatgcactttcctttacaagatactttctttctagccagccagaggagattctaacaacagtgaagaagtttgaaactggagtggatgaacagtcaggtataatacttaaaaatgcagaggatgaaatggcagttatttctttaaccatgagagcaaaacaacctaaaagaggagttgtggcaggagagaaagcatatataactgtagaaaatttcccaagagctgataaggctacaataacctatccagatgggtcagtagaggttgtagaagcaggagaaactgatagggcattagtgtatgaagttcaggatatgaaggcgtgtatattgaataaagatacggattatacgctacagctgtcccttggtgtaatgaatataatggatgaagttagaagtcagtggggaataagatatccttttgagtaa

SEQ ID NO: 15564 - DNA, 855 bp, Clostridium acetobutylicum
atgaagaatataggtgtcaatatcaattcatgtaaagatcctgatggtacaataagaaaatatgtggaaaaagtcataaaagaagaaaaaaaggacgttcaagtaaaattttatgatgaattaaattattttgacgaagtatgtaaaacaaaaccagatttctttattgcgtttggaggagatggcactattttaaacgctgcaaggaatttagtatcatgtggaattcctatattcagtgttaatataggtcaccttggatttttatcatctattgagtttaaggatttcaaagatgcaatacataaaatatttaagggtgaatatttttttcaagaaagaactatgcttaaatgttcttttataaagggaaacagcaaaaaagttttctattctttaaatgaagttgttttgtacaagggaaatatggcaaaaatactaaaatataatatagatgttgacgataagttttatatgggatttaagtcggatgggataattatatctactccaaccggctctacagcgtacaatttatcagcaggaggtccaataatttatcctaacctggatttaatatcacttactccaatttgtcctcaaggaccatatgcaggtaccatagtattggatggtaaaagtaatataacaatatcaggaatagatgcaaatgagaacgtatttataactgtagatggaaggcaacctgtagacgtaaaaggagtttcatttattgagatttcgaagcttaactataaatgtaaacttctaaaattgaaggattataattattttgaagtacttagaaagaaaataatacttagaactgaagaatgtgaaggtgataaatattga

SEQ ID NO: 15565 - DNA, 1026 bp, Clostridium acetobutylicum
atgaaaactaaagataaaaagaaatttggattctggaaaaagttttttattgtctttttcattttaatctttggaataggagcttctggaacagcttacttttattccaaaaccagtaaaatgaaaaaaacagaaatatcaaagaagccatctgagcttggaatatctaataaaacacaagacgatttaagcaagtacagtgatactgtaaatattgcattatttggtgtagataggcgattaaaaacagatgtttctcgttctgattctataatgatattaacaatggacccagcacataaaaagcttaagttatcctcaataatgagagatacatatgtaaatgtggatggacatggtatgacaaaaataactcatgcttatgcctatggtggaccgcaacttgcaataaaaactataaatgaaaattttaaattaaacataaaggactatgtaactgtggatttttatgcacttgaaaaaattatagataagcttaatggtgtggaaataaatgttcaatctgatgaagtaggatatcttaatggatatatagacgaggtttcaaaatatgagaaggtcactcctaatcatgttacttcatctggtaaacagcttttggatggaagacaagctgtagcttattcaagaattagatacacagctggtggagattttgtgagaactgagagacagagaactgtgcttatggcagtttttaataaattacaagctcaaggaaaaagcaatatggtaagtatgtttgacgaaattttaccttatactgaaacaaatatgggaagcattgatattgcaaagtatggaacaaaatttatttcatctgatataagtaatatagaccaagaaagatttccattagatgggtattgtagcggtgttactgttgacaatgtttggtatcttaaaactgatttaaatgtaacttctgatcaaatgagaaaatatatatttgaagatgtaaagccttcgcctaaagcttcacttgtaaatataccagaaaagtaa

SEQ ID NO: 15566 - DNA, 2931 bp, Clostridium acetobutylicum
atgaaatttgaaattggcaacatttatagcgggtttaaatttgaaagtgagactgtaatagatgagataaatagtaaaggtagggtatttaaacatataaaaagtggagctgttcttgtaaatttaaaaaataaggatgacaacaaagttttttctataacctttaagactcttccccacgatagtacgggagtagcgcatatattagagcattctgttttatgtggttctagaaagtttaaggtaaaggagccttttatagaaatactaaaaggttcacttaacacatatttaaatgctgcaacttatgctgacaaaacaatgtatcctgttgcaagtagaaataaaaaagactttatgaatcttatggatgtatacttggatgctgttttttatcctgatatatataatactcctgaaattataatgcaggaaggatggcattatgatataaaggatgaagaagatgaaatagagtacaatggtgttgtttacaatgaaatgaaaggagcctactcatcgccaatttccttgctatcaagaagcatggacgaggagctttttaaagggagtgtttatggagtagattctggtggaaaagtagaaaatatagtggatttatcttatgaagaggcactaagcttccatgaaaaatactatcatccatctaacagcataatatatgtatatggagacattgatatagaagaagttttagagtttattaatgacaattatttaaaggatttcaataaaaaaaatatagatgcagatataaaggtaaatggagcctttagtaaagttcatgagaaggaattagaatattctatttcagagggagaaagcgaaaatgacaaaacttattttggcatgagttttgtaacaggagacgctttagatactgaactttcaatgggcttagagcttttggagagtattttacttgaggcttcatcatcaccacttaggagagctattgtagaagaaaatataggaaaagatgtttttggagtttttgatagttcaatattaaaaaataccttttcaataattctaaaggattctaatttagaggataaagataaatttaaagaagtagttaaaaatacacttaaagagcttgttaaaaatggaatagataagaagcttataaatggcataataaatgcaaaagagtttgctcttagagaaagtgattttgattcttatcctgcggggcttgtttacaatgaaaagatattggaaagcatgctttatggaggagatccctttataaatttaagatttaatgatgtaataaaaaatattagaaagtatgcagagtcgaattattttgaaaatttaatagaaaagtatattttaaataataactatggagtatttataactgtaaaacctaagaaaaatcttgaagaggaaagagaagaaaagttaagagaaaagcttagaaaatttaagaatggtctttctaaggatgatcttaagaaactcatagctagtaatagaagcttagaattaaggcaggatactcctgatagtgaagagaaccttgaatcaatccctcttatagctataggtgatgtaaaaagggatatagagacaattgagcataaaataatagatgaaaacaatgcaaaaattatatggtgtccactaaacactagaggtattcagtatgtaagtatatactttgaaggaaaatcagtacctcagaatatgattccttatgcttctttattatcctctgttataggaaaggttaatacagaaaaatataactttaaagagttgtctaatgaagctatggaaaacctgggcggcatggattttggcttagatgtatacagtaggcctcaaaattacgaggattatgcacctaaatttgctgtaagggctaagagcttaagagaaaagcttccaaagatgtttgaaataatggaggaaataataaatcacagcatttatgatgattacaagaggcttaaggaaataatagacgaaataaaatctaggatggagatggcaataagaggttcaggaagcagaatggcatctgtaagagttgggtcttatgtatctagtgcgtataaatacttagatactataacaggaattgatttttataaatttatagtagatataagcagtaattttgaagagaaaaaagaggaagtagcagcaaatctaaaggctgcatcggattatatattcaaaagggataatttaattgcagcatattgtgcagaagaagaggattatgaaacttttagtaagctgtttaatgattttaccttaaaattaaagaataacaattttaaattgaatgattataaatttgagcttaaaaagttaaatgaagcatttatgatgtctacaaaggttcagtatgtagctaagggttttaattttagaaagttcaatttcaagcataatggagcgcttattgtgcttagaaccatagcaaattatgattacctttggaatagtgtaagagtaaaaggaggggcatatggagcttctatgtcattatcgaggaatggacatttagcatttgcttcatatagagatcctaatttacttgagacattaaaggcttatgaggaaatggtatcctttgtaaaagattttaatgttaatagtagagaaatggataaatacattttaggtaccataagtggtattgatatgcctttaagtaattattcaaagtgtgaaaaggtgacagcacagtatttaacgggaatagatgacgaatatatgagaaaagagcgtcttgaaatattagattgttcagtggaggatataaaggactcctatgacattttgaaaaagcttaacgaagaaaattgtatatgtgtttttggaagtgaagaaaagataaaagagaacaaagaattatttgataacgtagtggatatattcggagaatag

SEQ ID NO: 15567 - DNA, 690 bp, Clostridium acetobutylicum
atgaattgtgcaattataatggcagctggcagaggtagtagaatgaaggtgaataagaacaaacagttcattcttattcaaggtaagcctattttagcatatacaatagacaagtttcaaagaagtccgttaatcgatgagataataatcgtggcagctgagagtgaaataaatttttgtatgcaagaaatagtttataagtacaaattcaataaggttaaaaatatagtttctggtggcagtgagaggcagcagtcagttatgaatggccttaaagctgttaaatctgcgaatattgtattaatacatgatggagcaagaccatttgtagacaataaaattatagaaaatggaataaaatatgctgaaaagtatggtggagcagcttgtggtgtgcagcctaaagatactataaagataaaaagtgaagatggattttctgaaaagacaattgatagaagtaaattgttttgtgttcaaactccacaatgttttaaatatgattcaatacttaaggctcatataaatgctgaaaaagaaggtattttagcaactgatgataccatgatatttgaaatgtcaggaaacaaagtatacctttatgatgggagttatgaaaacctaaaaattactacaccagacgatttatatgctgcagaaacactattaaaaaaaaatagtatacaatag

SEQ ID NO: 15568 - DNA, 198 bp, Clostridium acetobutylicum
atgccaaaaatgaaaactaaaaaagcagcagctaaaagatttaaagctactggaactggaaagttaaaaagaggtaaagcttttagaagccatatacttactaagaaaagtacaaaaactaaaagaaacctaagaaaaggtggatacgtttcagagacacaagaaaaaacaatgaaaacattgttaccatacctataa

SEQ ID NO: 15569 - DNA, 4359 bp, Clostridium acetobutylicum
atgaagaaaataaatgaaatttttagtgactatggggtaaatggtaatataaatagtgctgttgtagaatcggtagttttaaagaaaaagagcaagagattggaaatgaaaataagctcggataaatatattgaaataaaggaatttgaacggcttaatgaatttataagaaagagatttgcgttaaatgattctgtaattgaggtaaattacgttgatggaacagacaagaagcctatagaggatgaaattaaagacattatattttcaatgtcagataaacaccctgttctaaaatcagttataaataatagcgaatgtaaggtagagaataatactataaatttcaactttaaaattgcagctgcggagttctttaaatctatgaagtacgacaaacatcttcaggacgctataaaaactctttatggtacttcatataatataaattttgttgatgatataacaagtgaggaattgatgcttcaacaagaggcacgtgatcaggaaatgcttgctatttcgaagcagattaaagaggccattggtagtggaggtataagtaatagttctgctccaaaagcgcctaaagaaactacatataaaagagaagatacaaaggaagaaacgaagggtaaaaaagatccacgcttaatattgggtagaaacgctaaatttaaagaaaatgtaataaaaattactgatataacaccagatgaaggaagagttgccatagaaggtgaaatatctaatatagaagccaaggaattaaaaagtggaaagaccttagtttcttttgatttatacgatggatcaagttcaatgacctgtaaatctttcctaaagcctggtgaagacggagaggttatttctagacttaaaaaggctaagggggttaggctttcaggaattgctggctatagtaagttctcaggagaagttgagatgattgccaatgttatattagaaacagagggaattagaagagctaaaaggcaggataatgcgaaagagaagagagtagagcttcatatgcatacaaaaatgagtcagatggatgctatgactagtgctactgatttaattaagagggctatgagctggggaatgaagtccattgctataacagaccatggtgttgttcaggcatttccagaggcacataaactattaggaagagataatcctgatatgaagattatatatggagttgaagcgtacctagctcctgacaagaagccgtctgtaacaaatgctaaagatcaaagtattgataccacttattgtgtactagatttggagactacaggcttttctcctaaaactgaaaaaattactgaaataggaattatgaaatatgagaatggtaaggtaatagataagtttagcttattcgtgaatcctgaaaaacctattccggcaagggttgtagaggttacaaatataactgatgacatggttaagaatgcggaaacaatagataaggtttttccaaagatgcttgaatttattaagggaagcgttttggttgctcacaatgcatcttttgatataggatttttaaaacataatgcaaaagtgctaggttatgagtttgactttacatacttagatacactatctttagctcaagctgtttttcctcagtataagagttataaattagggagaattgctaaaaaccttggcataaaggtagaggttgctcatagggcgttagacgatgtggataccactgttaaagtgtttaaggtaatgcttgaaatattaaaagaaagaggagccaagactcttgaggatgtagatatatattcagtagatgaagagtctaaaaaagaggagtataagaagcttagaacctatcatgcaataatattagcaaagaattatgttggtttaaagaatttatataagctagtatcatattctcatttaaactacttttataaaagaccacgtatactaaaaagtctttataaaaaatactcagaaggacttattttaggaagtgcttgtagtgaaggtgagcttttccaagcaatacttctaggaaagccagatgaagaagttgaggacattgctagagattatgattacttagaaatacagcctttgggaaatgacgattatttaataagaaatggtcaggtgccaaacaaagaagctataaaggacattaatagaaaaattatagagctgggtgagaagcttaataaaccagtagtggcgacaggcgatgtacacttcatagatccagaggatgaaatttatagacgtatacttgaagctggtcaaggctttaaagatgcagataaccaggctccgctatatttaagaactacggaggagatgcttcaggagttttcatacttaggaagggaaaaggcttatgaggtagttgttacaaatacaaataagatatcagatatgtgtgaacagattagccctatctcaccagagaaatgtcctccacatatagatggatgtgagcagacaattaaggatattgcctatgaaaaagctcatgagctatatggtgatccactgcctgaaattgttcagcaaagactagacaaagaacttgaatcaattataaaaaacggattctctgtaatgtatatcatagctcaaaaattggtgtggaaatccaatgaagatggatatttagttggttctagaggatctgttggttcctcttttgtggcgaatatgacaggtataacagaggtaaactcgctgccaccacattatagatgtcctaaatgtaagtactcggatttttcggattacggcgttaaaaatggatttgacttgccagataagacatgtccggtttgtggagagccattgactaaggatggtatagatataccgtttgaaacctttctaggctttaatggagataaggaaccggatatagacttaaacttctctggagaatatcaagcaaaggcacatagatatactgaggttatctttggaaaaggaacgacctttaaagcaggaaccataggtacaatagcagagaaaacagcctttggatatgttaagaaatattacgaggaaaagagtattccagtaaacaaagctgagataataagaatttcaaggggatgtacaggtataaaaagaactactggacagcatccaggaggtattatagttgtgccaaaagggagagagatttttgaattctgccctgtacagcatcctgccgatgatccaaattctgatattataacaacacattttgactatcactcaattgaccagaacttacttaagcttgatatactaggacacgatgatccgacggttataagaatgcttcaggatataacaggaataaacccacacgaaatacctatggatgataaggagaccatgtcgcttttctcatcaacaaaagcactgggagtaacaccagagcagataaactctaaagtggggacatttggtattcctgagtttggtactaagtttgtaagaggaatgcttttggatacaatgccaaaaactttttctgaccttatatgcatatcaggactttcacatggtactgacgtgtggctaggaaatgccaaggatttaattgaccaaggaatagttactttaagtgaagcagtatgtaccagagatgatataatgatttatcttattaaaaagggacttccaccaaatactgcatttaaaataatggagcttgtacgtaagggaaaagctttaaaggatcctaaaaaatgggcagaatatgaagctttaatgagagagcatgaggtgccagaatggtatatagattcttgtagaaagataaaatacatgtttcctaaagcccatgctgcagcttacgtaatgatggcatttagaatagcttggtttaaggttcatatacctaaggcttactatgcagcatactttagtatcagagcaaaagcttttgatgcagagtttatgatttttggaaaagaaaaagtaaagcagaagatgaaggaaatccaaatgatgggcaatgaggctggacctaaagataaggatatgtatgacgatttagaaatagttttagaaatgtacgagagaggttttaattttcttcctattgatatatataaatctcatgctacaaagtttcttgtagaggaagatggcttgagaccacctataaacagtatatctggtatgggaaatgttgcagcagagggtatatataatgcaatgcaggaggaaaaacctataagttctatacaggacttaaagaagcgcgctaagataggaaattcagccatagattctcttagaaagtttggctgtttaaaaggacttcctgaaagtgatcaattaagcttttttgatgcgatttaa

SEQ ID NO: 15570 - DNA, 750 bp, Clostridium acetobutylicum
atgataaaaacaacacttaatattgcacatagaggattcagtggaaagtatcctgaaaatactatggtggcatttaaaaaagcaatagaagagaaatgtgatggaatagagacggatttaaacatgactaaggatggtattcttgttgtttgtcacgatgaaaaaatagatagaacaaccaatggatgtggatatataaaagattatacctataaagaattgaaacaatttgatgcggggataggttatggtgaagaattcaaaggggagaaaatcttgtgtatagatgaattactagactatataaaagataaaaacctactattaaacttagaacttaagaacaatttgattgaatatgtggatattgagaagaaggttgtggataaaattcatgaatataaacttgaagataatataatagtgtcctcctttaatcattattcaatggttaaattaaaagaatatgacagtactatgaagataggcttgctgtattctgctaatctttacaacgttcatgaatatggaagaaagcttggagctttttcgcttcatccatattatccagcagttatgaataaagaggttgtagaaaatataaagaaagttaaaattaatataaatacttatacagtaaatgaagaagaagatatgagaaaattaatagggttaggtattgaggggataataacaaattatccagacaggttaaataaagtacttaaggaagccattaaaaattcatag

SEQ ID NO: 15571 - DNA, 1458 bp, Clostridium acetobutylicum
atggctgcaaatgaaataagaacacgttttgcacctagccctactggttatatgcatatcggaaacttaagaacagctctatatacctaccttattgccaaacatgaagatggtaaattcattttaagaattgaagatacagatcaggaaagatatgtagaagatgcactagctgttatttacaaaacacttgaaatgacaggcttaaaacatgatgaaggtcctgatgtaggtggccctgttggaccatatgttcagagtgaaagaaaaggactttatctagactatgctaaaaaactagtagaaaaaggtgaagcttattactgcttctgctctaaagaaagactagatattttaaaaacaaattcagaggctttaaaaagaccttttaagtatgacaaacattgcgctaacttatcaaaggaagaagttcaagaaaaacttgatgctggagttccttatgttataagacaaaataacccaactacaggctctactacctttgacgatgttatatacggaagaatttctgttgataattcagaacttgatgacatgattttaataaaatcagatggatatccaacatataactttgccaatgttgtagacgatcatttaatgggaataactcatgttgtacgtggaaatgaatatttatcttcagctccaaaatacaatagactatacgaggcttttggttggaatgtaccaatatatgtacattgtcctccaataatgaaggatgcgcatagtaaactaagtaaaagaaacggcgatgcttccttccaggatttaattgaaaaaggatatcttaaagaagcagtattaaattatattgcacttttaggttggaatcctgaaggaactaatgaaatattatctcttgaagatatggttaagttatttgattacactcacataaataaatctccagctgtatttgacccagttaaattaaagtggatgaatggagagtatgtaagaaagcttagtcttgatgaatttcataaggctgcactttcttattatgatggagttataacaaaagaaaacatagatttaaagaaaataagtgaattaattcaaacaagggtagaaatttttagtgacattcctgaaatggtggatttctttaatgagctccctgattatgatatagaaatgtacactcacaaaaagatgaaaactaaccctgaaatatcattggacagcttaaaaaattgccttcctgttatagaaaatatagaggactggaatttagataacatccaaaatacaataatgaattacatcaaagatttaggtgtaaaaaatggcgttgtattgtggcctttaagaactgctctttctggaaagaaattcactcctggtggtgcttttgaaattgcagatataataggaaaagatgaatctataagaagaataaaaataggaattgaaaaattagagaaatag

SEQ ID NO: 15572 - DNA, 603 bp, Clostridium acetobutylicum
atggataagaagaagcttgattattttaaaaataaacttatgtttgaaagaaagagtttaatggaacttattgagcagatgagaaaaaacgatactatagactctaaaatggaaatagcctcagaattgtcttattatgacaatcatccttctgatttggcatctgaatttaatgacatacagagaggaatggcgtttagaaaaaatgaagaagcacttctaaataaaataggaaacgctatagataaggtagagcatggaggatatggaatttgtgaagtttgtggtaagccaataagtgaagaaagactggagtttgtaccttatgctgaaaattgcgttgagtgtcaaaacaagctaaatgattcaatgccaagagagaaaaatgataggccaccggaagaagatgtacttggatatccattttatgatggaaatataagaaatgcatttgatttagaagatagttatgaaaaggttcaggaatttgacaaaatagagaagtatgaagaatttgatgatgatgatagtgaagactatgggtatgttgaatctatagaaaaagtaagcaattcccaatacagagatcaacttcctgactga

SEQ ID NO: 15573 - DNA, 1035 bp, Clostridium acetobutylicum
atgcttgatttaaaatcatatagagaaaaagaactggcaagttatgatttagatgttgagctatttaatgaatttaacttttctgtatataatgtaatgcctcttagaaaagcattcttaatatctacagataagggtgaaaagatacttaaaaaaatagactatactattgaagaatttaaatttgttttagcagccgtaaattatattaagaatgaaaatgaatttaatagaataattgattttaataagacacaaagtggtgaatactactgtataaaaaatggagacttatattgtgttatggacatgattgaaggaaaagaatgtgaattcagtaatccagttgacttaagcataagttcatttggattgggacagcttcatagtgcgtcagagggatttaggtatagtaaaattgctagtaaaaatatatgtggaaaaatgataaaaggttttaaaaggaaaaaagaagaagtaaactttttaaaaaagatggtaaacttatatgaaagtttaaatgaatttgatgaaatttttataaaaaatgttgattattatttagagcaaattgataaaagtattgatattatgaataaaagtcaatattataaattatgcagcgaagaagataaaatagtgctgtgccatcatgatttagcacatcacaatataataataaaagatgaagaagcatattttatagattttgattatgcaataatagatttaaaagtgcacgatttatctaatataatatcaaaagctgcgaaagtatttaattatagtatagacaattcaaaaataattatatcaaattactgtaagtcaaatactcttagtaaaaatgagatggaagtattatttggaatgttgagttttccggaggatttttatgaaattgtgaaaagctattatacaaaacgaaaagactggtccaatgaagagtttataaataaaatgaaaagaaaaatggcaaatgaagaaaatagagttgaatttctaaaaaactttaaagaagatttgaaaatttag

SEQ ID NO: 15574 - DNA, 789 bp, Clostridium acetobutylicum
atgattatagatggacatacacatgttattttgccagtagaaaaacacattaaaataatggatgaggcaggtgttgataagactatattattttcaacttccatacacccagaaacggcagtgaatcttagagatgtaaaaaaagaaatgaaaaaattaaatgatgtagttaatggaaaaacaaattctatgatagatgtaagacgtaattctataaaagaacttacaaatgttatacaagcatatccatccagatatgttggatttggtaacgtacctgttggattaagtgaaaatgatactaactcatatattgaagaaaatatagtaaataacaaacttgtaggtataggtgaacttacgcctgcaagtgggcagataaaatcattaaagcctatttttaagtattctatggattcgggaagtctgccaatttggatacatgcatttaatcctttggttttacaggatataaaagaaattgctgaactgtgtaaggctttccctaaggtgcctgtaatattagggcatatgggaggaagcaattggatgacagctgtagaacttgcaaaggaaatccaaaatctgtatctcgatacttcggcgtatttttctacatttgttttaaagatagtaattaatgaacttccattaaaatgtatttttggcacggatatgccatttggagatttgcagctatcaatagaagcaataaaaaaaatgagtaatgactcttatgttgctaatgcagttttaggtgataatatatcgagattattaaatatttaa

SEQ ID NO: 15575 - DNA, 1323 bp, Clostridium acetobutylicum
atgaaagaattatctaagaaaaacacattttttgtaggtctacttcttttctcaatgttctttggcgctggaaacctaatatttccaccatttttaggacaactatctggaaaatatgtatggatagcttttagcggatttattatcaccgctgttggactacctattttagctgtaataattgtatctaaatctaagggcttgtttaaccttgcagcacatgtaaatccaacctttgcactaatatttactgcattaatttatttatcaataggaccttttttaggaattccaaggacaggaagccttgcttttacaatgggcgtatcaccattcttaccaaaaagccttgcttcaagtccaataccacttttaatatacaccttaatatatttttcaattgcattttggcttagtttaacaccttccaaacttgtaaatcgtttaggaaaagtactaacccctatattgctagtactaatttttatagtatttataaaaagccttataactcctataggcgcttttggaactccaaagggagactattcgtcctttccattttttaagggcttttcagatggctatctaacaatggacgtaatcgctgctttaaactttggaattgtaatttcatccactttaaaatctatgggagttaaaagtgaaaaatctataatatcttactcaattaaagcaggtctaattgtaggtgctatgcttataataatttatgctatgctctcttatgtgggagcctcaagcagaactatttccttaaatgctcaaaatggcggtgaaattctaacaagtgctgcatctcacttatttggacattatggaataataatacttggtgtaatattttcacttgcatgtcttaatacagctacaggcttaataacctcctgcagtgaatattttacaactttaaccaaaaacaaattatcctataagacctgggtatttattttcgctttcttaagtatgctttttgcaaacattggtttaacaaaaatactttctatttctgtcccagttttaaatgcaatttaccctatggcaataatacttatgataatgtttttactaagtaatttatttaaaggttcaaaatatgtttatatcttaggaatgtctttcactggtatttttagtattttagattctttaaatcaaacattgataaaatctagtactataaatagtacctttaatcttttgcctctttacacaaaaggacttggctggattgtgcctgcactaataggtcttatactaggatatttaattcatattttcaaaaaatcccatacagcttaa

SEQ ID NO: 15576 - DNA, 1080 bp, Clostridium acetobutylicum
atgttagaaagacttgaattcatagaaagtaagtatgatgaactatctgtaaagataagtgatccatcagttatggctaatcaaagtgaatggcaaaagttatgtaaagaacattcggaagttgaaaacatagttttaaaatatagagaatacaaaaaggcaaaggaagatcttgaggcagataaagagatgcttagggacaaaatagatgctgagcttaaagaaatggtagaggaagaaattaaggaattagaaaagagcgttgtagactatgaagaagaacttagagtaatgcttctacctaaagatccaaatgatagcaagaatgtatttgttgaaataagaggtggaactggtggagaagaagctgcactttttgccgctgacttatttaggatgtatactagatatgcagaaagacaaggttggcatacagaagttatgagtgctaacgagactgatataggtggatttaaagaaattgtattcatggtaaagggaaatggagcttatagcaggatgaagtatgaaagtggaacgcatagagtgcaaagagttccaaatacagaatcaagtggaagaattcatacatcggctgctacagttgcagtacttccagaagttgatgatgttgatatagaaataaatcctaacgacattagaatagatgtatttagagcttcaggacacggtggtcagtgcgtaaatactacagattctgctgtaagaataacacatcttcctacaggtattgttgtttcatgtcaggatgagaaaagacagcttaagaataaagaaaaagcaatgaaggtacttagagcaagactttatgaaaaagcagaagcagagagaaatgcgggaatagctgaaaacagaagaaatcaggtaggaagtggagatagaagtgaaagaattagaacctacaattttccgcagggtagaataacagaccatagaataggacttacaatatataaacttgaacagttcctagatggagatatagacgaagttataaatggtcttataacggctgaacaagcagagaaaatgaaagagatgggaaatacaaaagattga

SEQ ID NO: 15577 - DNA, 1017 bp, Clostridium acetobutylicum
atggctggtaaggaacaaaaattaaccggggttcaaaaggctgccatactattcattactcttggaccggaagcttcagctagtataataaagaaactaccagaaagagaaattcaaagaataacttatgagatagcaaatatttctggtgtcaaaaatcaatataaacaagaagttcttcaagagtttatagaaatgaacaaggccaaagattatatagtagagggtggaatagattatgcaagagaacttcttgctaaagctttaggtaaccaaagggcaaaagaaattcttgaaaaagtggcagaagaaactgaacagtatagaccgtttgcaattgctagaaaggcagatgctcatcagcttttgaatgtcataatgaatgagcatcctcagacaatttcgctcatattatgttatcttcaagcagataaagctgctcaaataatgtcttcccttccagaggaagttcaaaatgacgtggcttataggattgcaaatatgagcaatacttcacctatggtgataaaggaaatagaaaaggttcttaacagtaaattatcttcagtagtaagatcagatcttactgttataggaggagttaagactcttgttgatatattaaatcaagttgatagaactacagaaaagaacattacagaaggtttggaaaaggaaaatccagaacttgcagaaaaagtcaaagaatctatgtttgtattcgaagatgttattacccttgatgatgcagcaattcagagagttcttagagaggttgataataaagatcttggaatggcacttaaaggatgttctgaagaagttgcagaagctatttatagaaaccaatctaagagagcttcagctgcacttaaggaggatatagaattcttaggacctgtaagacttgtagatgttgaaaaggctcaacaaaagatcgtctctgttataagaagacttgatgatgctggtgaaatcgtaatttcaagaggtggagaagatgcaattattctctaa

SEQ ID NO: 15578 - DNA, 1344 bp, Clostridium acetobutylicum
atgaaacagcagcttattatacaattgcttttctggggaatttggctggtgattcctcttattgtagatataatcggtggagtaatcggtgcaatattcataaccgtaagctattttagaaagaaaaaacttgatataggatatttgcctgatattacaatacttattcctatatataattcagaaaacactttggaaaattgtcttaattctgtaataaatcaaacctatccaattgaaaaaatatcagtgatgctcattaataatggcaaaagagataaagcgtacaatgttttttgttcctttcaagagagaaatccaagactcaaggtgtggtggcttgattcttcaagtgggaaagcaaaggctttaaataaggggatttatatggcaaatggaaagtacattataaatatagattctgatggtgttcttgataaagaggctattttaaaggttgttgagaagtttgaaactaatcctgatatttgcgcaatgactggtgtggttctaactgatccggagcttattgaagaaacaaaattgaaaaatttaagattaatccaacgctgtgaactttttgagtatatagaagcatttttaattggaagaggctttcaatcacaagtaaatatgatgtttactttagcgggagctttttcctgctatagaagagagattataatgaaaacacagctttataataatgaaactctcggagaagatactcatatgacatctcaaataagagagcttctagatggaaaaatagcactttgtgaagaagcgtttttctatgttgatccaatagatgacttagacaagctctatatacaaagacaaagatggcaaagaggtcaaatggaggtttcagccctttttaatgaaattgcaaacaagaatacaaagagatttataaatgttttgaaagttacaattattaaagatcattctttagtttttcctagattcatatggatatttgcaatgatgtatttagttttcttggactatcctttgacattggtggttggtgcaaatcttattttatatatagtttatgtcataacatctacaatttatttttttattgcaaagttgtttttgaaggaaaagaagcaaattaaggattatgtcaataaacactggtacattatattacttctacctatatataggtttgtggtttttttcatcagagtagcagggataataaatgctgttgaaaaaaatgcctcctggaatacaaaaaccttttcacaggaaagggaaattgtggatgtaagacttaagaaaaatttaagtttatattacagaattaaggggtggataaataatgggtaa

SEQ ID NO: 15579 - DNA, 2442 bp, Clostridium acetobutylicum
atgatgtttggtagattttccgacagagctcaaaaaatgatttattatgctcaggaggaagcacaaaatttcaaacatggatatgttggaacagagcatatacttcttggcattttaagagatgaaaatgggaaagctcaatctctcttagccaatatgggagttacaatagaaaaggtaagaaggcttatagaggagtatgaaggttttggggattctgatctttacaaagaagaaccacctcttacacctaggactaaaaggcttttggaaataagtttacttgaagctagaaatttaaaccataactatataaacccagaacatgtactattagcacttataagagaaagtgaaggagtagcatttactattcttggtaatcttggagtagattttgaaagacttagaaaagaaattttagatagtttatctggtagagaagagaacacgggaataaaaacaagttttagttcaaatacttcagttacgccaacattgaatcaatacggaactgatttaacacaaatggcattagaaggaaagttggatcctgttattggaagagataatgagacgcaaagaatattagaaatactttgtaggagaaccaaaaacaatccatgtcttataggtgatccaggagttggtaaaacggctatcgcagaaggcttagctcaaaagatagttgagggtaatatcccagaaatacttaaagataaaagagttattactttggatgtatcatcgttagttgcggggtcaaaatacagaggagaattcgaggaaagacttaagaaagttatgacagagataaaggcggctaaaaatgtaatactttttattgatgagattcatactattgttggtgcaggtggagctgaaggtgcaattgatgcatcaaatattttaaaaccttcacttgctagaggagaaattcagtgtattggtgcgactacaacagaggaatatagaagatatatagaaaaagatgcagctcttgaaagaagatttcagccagtagatgtaggagagcctagtaaagaagaagcagttcaaatacttgagggacttagggacaaatatgaagctcatcatggagtaaaaatcacagatgatgcaatagaggcagcagtaaatctttcaacaagatatatacaagatagatttttaccggataaggctatagatttaatagatgaggcagctgcaaaagttagaattcaaaaccttacagcaccgccagatttaaaaaatcaagaagaagagctagaaaaaactacacgagaaaaatcagatgcgataagacttcaggactttgaaaaagcagctaaacttagagataaagaaaagaagttgagaattgctattgaagaatttaaaaagaattggaaaaatacaagtgataacgaaaattatatagtaacacaaaagcaggttgctgcagttgttgctaagtggaccagtataccagttgaaaaactcacagagaaagaatcagaaaggttacttaaacttgaaagtatacttcataaaagagttataggtcaagaagaagcagttgagtatgtttcaagagcagtacgaagagctagagttggtcttaaggatcctaaaagaccaataggttcatttatattcttagggccaacaggcgtgggaaaaactgaattatcaaaggcattagctgaagctatgtttggtgatgagaataatattataagaattgatatgtcagaatacatggaaaaacatacggtatctcgtcttgtgggttctcctccaggatatgtagggtatgatgaaggcggacaacttactgagaaagtaagaagaaaaccttattccgtagtgctttttgatgaaatagagaaagctcacccagatgtatttaatatattactgcaaattcttgatgacggaagacttaccgattctaaaggaaagactgtaagtttcactaatacaataataataatgacttcaaatgttggagcttctacaataagaaaacaaaagactttaggatttgaaacggcaaaagatgcagtaagacaagaatatgacaaaatgaaagaaaacattatggaggaacttaaaaattcatttagacctgaatttttaaatagaatagatgaaatagttgtgttccataagctggaggaaaaagatcttagacaaatagtaaaacttatgcttgaatcagtaaaaggaagattaaaggaacaaaatataaaaattaattttacggaaaaagcggaagaagttctagcagaaaagggatttgatccgacttatggggcaaggcctttaagaagaactataataaaagctgttgaagataaactttcagaagagatattaaagggaacaataagtaaaaatgataatatttccgtagatgtggataaagataaagagttactatttacaaaagcttaa

SEQ ID NO: 15580 - DNA, 939 bp, Clostridium acetobutylicum
atggaatttaatcatgttcctgtattattggaagaaactatagaaaatttaaatataaaagaagatggaatttatgttgattgtacgcttggtggagctggtcattcctctgagattttgaaaagactttcaagtaaaggaaggttaataggaatagatcaagataaagatgcgcttaaggcagcaagcgagcgacttaaagagtataaaaatttgacttttgtacacgataatttttctaacataaaaaatatattagaagaacttaaaatagataaagtagatggaattttagcagatcttggagtttcatcctatcagctggatgagccagaaagaggattcagctatatgaatgacgccccacttgatatgagaatgaatagggatagtgaattttctgcatatgatgttataaatggatatgatgaagaaaaactttattcaataataaagaattatggagaagaaaagtttgctaaaaggatagctaaatttattgtggaaaagagaagtgaggaagctataaatacaacttttgagcttgttgatataataaaggcagcaattcctgcaaaatttagaaggcagggaccacatccggcaaagagaacatttcaggccataagaatagaagttaaccaagaacttgaaattttaaataaaacaatagaggattcggtcgataaattaaaaagtgagggaagaatatgtataataacatttcattctcttgaggatagaattgttaaaaataaatatagagagcttcaagatccatgtatgtgtcctaaagatataccaatgtgtgtatgtggaaagaaacctaagataaagattattacaagaaaaccgatagaggcttctagttacgaacttgaatataatcctagaagtagaagtgcaaaactcagagtggcagaaaaaataaatttgtaa

SEQ ID NO: 15581 - DNA, 1461 bp, Clostridium acetobutylicum
gtgaatacagcgcaaaatgaattatataaaaaaagatggataattttaatcacagtactatctgcaacacttatggcaacactcgatggaagcattgtaaatgtagcacttcctaatatgactttgaagcttcatgttagtggagcatcaattcagtgggttgttacaagctttcttataacagtagcagcaacgattttaatatttggaagacttggggatataataggtaaaacgaaggtatttaagtttggagtaattctttttactttgggatctcttttatgcggttttacaagttctcttgtagtacttgtagtagctagagtaatacaggcaataggagcagcagcaactatggcaactaaccaaggaattataactcaaacctttccaccaaatgaaagaggaagagccctaggcttacttggaacttttgtagcattaggagcaatgataggaccgccacttggaggacttataatatctctcgcaagttgggagtatatattcttaataaatataccaataggaatagtagtttttatattatgtattaaagtttttcctaaaacaaatgataagttagatgaaaaattagatactactggagcggttttatttacagtatttacagtattattatttggagctttagttcaaggtgaaacagtaggatacagcaatatatatattattttagcatttatagtttctttcttagctcttgcagcatttttgattatagaaataaaaaagaagcaacctttattggatttaagtatattttcaaacagtttattctcagttagtgttatatgtgcgtttacatcatttacagctattagtgcttcaaatataatacttccattttattttcaagatacgttaaaattttctgctgctatgactggaatttttatggtggtttctcctgtagtgttatctatagtggcaccttttagcggatatctttcagataaaataggttctgaaattttaacactaataggattatttttaacaagtgttggattatttcttataagtactttgacagcagcatcaccagtagcacttttaatgacatatatagtaataatgacaataggaaatggaatgtttcaagcgcctaacaatagtttagttatgtctacggtacctcgtaacaaacttggaattgcaggaagcgttaatgctctaataagaaatttaggctttgttgttggtacatcttttgcaacacttcttctatataatagaatgagcagtaaaatgggtcacagagtagttgattatataaaaggtagagacgatgtgtttatgtatggaatgaaatgggtgtacatcgctgcaggtgtgttctgtttaatgggagttataataacagcttttagattttataatagtaaaaaaaaatcaaaaagtgatttagacaagttaaaagataaggcagtataa

SEQ ID NO: 15582 - DNA, 369 bp, Clostridium acetobutylicum
atgatacaagcacaaacaatgttaaaggttgcagataattctggagctaaggaaataatgtgtgttagagtattaggtggttccaagagaaaatggggaaacattggtgatataatagttgctagcgttaaaagtgcaacaccaggtggtgttgttaaaaagggtgaagttgttaaggcagttgtagtaagatccgcaaagggtttaagaagagctgacggttcatatataaaatttgacgagaatgcagcagttttaataaaagacgataaacagccaagaggaactcgtatttttggaccggttgccagggagttaagagataaagattttaacaaaatattatcattagcacctgaagttctataa

SEQ ID NO: 15583 - DNA, 987 bp, Clostridium acetobutylicum
atgaagaatcaatggaacaatatactttccataggtgaaaaggtcttaaacggagaaaaaataactgctgatgaagctttaacgctttcaaaatctaatggaagcgatatatttttattgtgcagctttgccaataaattaagagaaaaatttaatggcaatcatgttgatttatgttcagttataaatgcaaagtcaggaaattgcagtgaggattgtgctttttgtgctcaatctgctcatcacaaagctaatgttagctgctatccactattaaatgaagacaagattcttgaaatggcaaagcaaagagaagcctatggagcaaggcattgtgatattgcaacaagcgggcttggctatactggagatgaaaaagattttcaaaccatacttaaagccttcaaaaaaatgaaggaaaacacaaatctaaaattatgtgcttgtcttggtactcttactgagaaagcaatgaatagcctcgcagctgttggtgtagaaagatacaaccataaccttgaaactgcaaagagtttttacaaaaatatagtttcaactcacggctatgatgaaagaataaaaactataaactatgctaaaaatgcaaaaatggaagtttgttctggaatgatcgtaggtcttggtgaaaccatggaacaaagaatcgaacatgctcttttattgagagacctaaatgtggatgcagtacctgttaacatattaaatccagtaaaaggaacaaaacttgaaaatgcaaaaccactttctccaatggaaataattaaaacatttgcaattattcgtttcatactaccagataaaataatacgctatgctggaggaagagaaaaaaatcttagaagccttcaacctcttggattcttgtctggcttaaatgggatgcttataggaaattatttgaccacaaatggacaaagtgtaaatgacgactttaatatgttgaaagatttagaacttgaatactaa

SEQ ID NO: 15584 - DNA, 189 bp, Clostridium acetobutylicum
atgaaagcatttgtagataaagaaacttgtattggctgtggtacatgtcccgcaatctgtcctgaaatatttgaaatggaggatgatggcaaagctgttgcctcagatgcagaaattgcaaacgatctaaaagaatcagctcaagatgcagcagaatcctgtcctgtggacgccatcatggtgagataa

SEQ ID NO: 15585 - DNA, 1659 bp, Clostridium acetobutylicum
gtgaattctgataaggcaatgaaaggagtagaaagagctccccacagatctctttttaaggctttaggttttatagatgaggaaatggatagacctcttataggaatagctaattcttacagcgaacttataccaggtcatatgaatcttgataaaatagttaaggctgtaaaagatggaataagaatggcaggaggtgttcctgtagaatttggaaccattggagtttgtgatggtatttctatgaatcataagggaatgagttattctcttccatcaagacagattatagcagatagtgttgagatcgtggctaaagcacatgctcttgatgggcttgtacttgtgccaaattgcgataaggtagttccaggaatgcttatggcggctggaagagttaacataccttcaatagtaataagtggaggaccaatgctttctggtagaacaaatggaagggtcacagatctaaactctgtattcgaagcagttggagcagtttcagcgggaaaaatgtctttagaagaattagctgagcttgagaatacggcatgccctacttgtgggtcttgttctggaatgtttacagcaaattcaatgaactgtctttctgaggttttaggtcttgcgcttccttacaatggaactataccagctgtattttcagaaagattaagacttgctaaaaaggcaggtatgaaaatagttgaattggttcaaaaggacataagaccaagtgacatacttacagaagctgcatttatgaatgcagtcgcaatggatatggcactagggggttctactaattcacttcttcatttaccagctatagcttatgaatgtgacgtggatattaatttcgataaaataaatgagataagtgaaaagattccgcatgtgtgtaagttaagtcctgcaggatttcatcacatagaggacttgcatatggcaggtggaataccggctgttgttaatggaattataaaaaaaggacttctaaatggagagtgtatgacagttacaggtaaaactttgtatgagaatgtgaaggatgcgaaaatcaaaaacattgatgtaataagaatagataatccttatagtgagacaggtggactttcagtattgagaggaaatttagctccagatggcgctatagttaaaaaggcagcagtagcacccgaaatgatgcagcatactggtccggctagggtatttaatagtgaagaggaagtttctaaggcaatacttggtggaaaaataaatccaggtgatgttgttgtgataaggtatgagggccctaagggtggaccaggaatgaaggaaatgctttcgccaacagcttcacttgcaggaatgggacttgataagagtgtggcgcttataactgatggaagattctcaggtgctacaagaggagcatccattggacatgtatctccagaagcggcagaaggtggtccaatagggttggttgaagagggagacacaattgaaatagatattgaaaagaaaactataaacctacttgttccggaagaaaaattaaaaaacagaaaaccggaaaaggttgaaaaacctgtgaagggatatttaaatacgtataggcagggggtatcatctgcttgtacaggagcagtttttcatagtacaaaggagtga

SEQ ID NO: 15586 - DNA, 762 bp, Clostridium acetobutylicum
atgaaagtaataagtgtatttaatcaaaaaggtggagttggtaagactacaaccaatataaatttatgtacatatttagccatgaaaggattaaaagtgttgactatagacatagatcctcagggtaatacaactagtggtttaggaatagacaaaagcacattggaattatcaacttatgatgcattaacaacggatgttgcattggaggatattatacaagaatcacagcttattaagaatttgtacattgctccatcaacagttgaacttgctggtgctgaagttgaacttataaacattgataatagagaaagaattcttaaaaacaaaataaaggcaatgaataagaaatttgattatatattcatagattgtcccccatcattaggattcataactattaattcattaacagcatctaatagtgtactaatacctatacaaactgagttctatgcattagaaggggttggacagcttgtgaatacagttcaactcgtaaaaaaatccttaaacaagcaactcgaggttgaaggtgttatactaacgatgtgcgacaatagaactaaattatcaaatgaagttgcacaagaagtcaagaagtattttagtggtaagctatataatacaactatacctaggaatataagattggctgaagcgcctagttatggattaccgatagttttatatgatgacaaatgtagaggggcagaatgctatcgaaatctagccaatgaatttcttagtaaccagtag

SEQ ID NO: 15587 - DNA, 1548 bp, Clostridium acetobutylicum
atgtcaaatgatgaaaagcaattgacaaaggaagaaatgaaggcaattaagcttcaagcaaaagaagaagctaagatgaacgatcttttaaaagagagaaggcaaaaactttccgatgcacaagaaagaggaaaggatccttttgatgtatataaagttgaaagaacacacacatcaaaacaaatcgttgataattatgatgagctagaggataaaattgtaactgtagctggaagacttatgtcgaaaagagttcacggtaaagcaggattttccgacatatatgatagatacggcaaaatacaactttatcttaaaattgacgatgttggagaagagaaattaaaagaatttaaaaccttcgatataggagatttcgttgtaataacgggaaaagtttttaaaactaagacaggggaaattactttacatgtaactaagcttgagcttattgcaaaatcattaaaacctcttcctgaaaagtttcatggacttaaagatccagatttaaagtatagacaaagatatgtagatctaattataaatcaagatgtaagagaaacattcatgaaaagaacagcaattataaaggctgtaagagagttcttggataataaggattatttagaagtagaaacacctgtattgtcaactattgctagtggtgcatctgctaggccgttttcaacacaccataatgctcttgatttagatatgcatttaagaatagctacagagctttatttaaaaagattaatagtgggtggatttgaaaaagtttacgaaataggtaaagactttagaaatgaaggaatagacgtaagacataatccagagtttacaatgattgaattatatgaagcatatgctgattataatgatatgatggaaattacggagaatatggttgcatatgcatgtcaaaaagtaaatggaactacaaaaataacttatgaaggaacggaaatagatttaacacctccatggagaagagtaactatggtggatatagttaaagaacattctggaatagatttttctacagtaaagactgatgaggaagcaagggaaattgcaaaagaaaagaaattagagttaaagaaggaattaaaagattgtacaaagggagacattctaaacgctttatttgaagaatatggtgaaaagaagctaatacagcctacttttgtatgtgattatcctgtagaaatttcacctcttacaaagaaaaagagaggaaatccagagtacaccgaaagatttgaaggatttatatatggtagagaaatatgtaatgcatattctgagcttaatgatcctatagtacaaaaggatagatttatgcagcagcttaaagaaagagaattgggtgacgatgaagcatatcagatggatgatgacttcataaatgcacttgaaataggtatgcctcctacagggggaatgggaatgggaatggatagattagtaatgttccttacagattcaccatctataagagacgtaatattattcccaacaatgaaaccaacaccaaatagagattag

SEQ ID NO: 15588 - DNA, 420 bp, Clostridium acetobutylicum
atggttatgtctagagatggtcttattcctaaagcactttctaaggttcatcctaaacataacacaccttatgtagctacagtaataactggagttacagcagctataatagcaggtttcttgccacttgatattattacaaactttttaagtataggaacacttttaagtttttcggtagtgtctttagctgtcgtagtacttagatacaaaatgcctaatatggaaagaaaatttaagtgccctggagttccttttacaccaataataacaataatatgctgtataatactattaactacgcttaagccaataacatggattgcatttttaggttggctgcttgtaggaatattagtttatatcttttatggatcaaagcatagttcacttgaaaaagaagaacagcaaattaagtaa

SEQ ID NO: 15589 - DNA, 615 bp, Clostridium acetobutylicum
atgaatcaaaaagaaagaatgctggcaggtcttccgtataaggcttggctagatggattattagaggaacgaatggataataaaaagaagatatatgagtataatcattgcaaaccagatgaaagtgaaaaaatagatgagttaataaaggatattttcggtaaagtaggtgtaggtgcacatattgaagcaccgtttcattgtgattatggaaaaaatattgaaatcggagataatttttttgcaaactacaactgtattattttagatgttggaaaagtgactataggcgacaatgtacaatttgctccaaatgtatctctatatacagcaggacatccaatacatcctgcttcacgtaattctggatatgagtatggtattagtataactataggaaataatgtttggcttggtggaaatgttgttgtaaatcctggggtccatataggggataatgttgttgttggttcaggaagtgttgttacaaaggatattcctgataatgtaatagcagttggaaatccgtgtaaagttattcgtgaaattacagaagaagaccgaaaatattattataaaaactatgagtttgatgttgatgattatactgtttaa

SEQ ID NO: 15590 - DNA, 981 bp, Clostridium acetobutylicum
atggaattattttccgaaatttatagttgctattataatgctgttacacaaatcgtaaatagctgcatcgaaacacctatttcaaaagaggctataaaaaaatttattgatgataatgctttcagtgaaagttcctttcatatccttccaaaattattaactggtgattggaacttattaagaaaagataacgataagtacatatcaaagctaaatagttccattaaaaacccagtaactaaacttcaaaagtcatggcttaaatctatcctccatgataaaagaataaagctatttttagataaggctgaacttgaaactttatataaaagcttatccgacgttgagccactatttgatataaatgatttttattactttgacattttttcagacggtgataattataacgaccctatttacatagacaattttcgtttcatattaaacgcattaaaaaataaaaaagctataacagtttcttttaaaagtggtagaggtattcatacaaatggtaacttctttcctattaagatagagtattcaagcaaggatgacaaatttagattacattgctttagcattaatgctagaaaaagtttaactcctcaagttataaatataggaaggatatcttcagttaaactttacaaatcaaccttaaacttttatttggacacctcaatttacgaaaaaattactagatgtacagaacctgttgtaatagaaatatctaatgagcgtaatgcccttgaacggtgtatgttaaacttttcagattttgaaaaatacacagagtacaacaaaacatctaataaatacataacccatatttattataataagaatgatgaaacagagcttttaatacgtattttgtccttcggccctgttataaaggtattaggtcctgaaaaattcttgaattccttaacaaaaagattaaaaaagcaattagaacttataaatatcgcagactga

SEQ ID NO: 15591 - DNA, 1377 bp, Clostridium acetobutylicum
atgaaaaagttagttgctataacatcttgtccaacaggaattgcacatacgtacatggcagcagaggcacttcagatggcagcagaagaaatgggtcataaaataaaagttgaaactcaaggttcggtaggagcagaaaacgtaataactactagtgatgtaaacgatgcagacgcagttattatagcagcagatactaacgttgataaatccagatttgctggtaaggtattaatagaagttccagttaaagatgctataaaggatccaaagggacttataaatacagcacttagctcaaacaaaatatacggaaacagtaatgaaaaatctaaagtagaagagaaaagagaagataagggcagagcttcaggagtatataaacacttaatgacaggagtttccttcatgataccttttgttgtagcaggaggaatacttatagcactaggatttgcaatcggcggaatatatgttttcaaaacaccaggaacaatcggagagacaatatttagtacaggaaaacaagcatttgcattgatgttaccagttttagcaggatatatttcattctctattgctgacagaccaggacttgttccgggatttgttggtggtgctttagcaagtactataggcgcaggatttataggagcgttgctagcaggttttatcgcaggatattttgttgtactattaaagaaatatataaaacttccaaaagcacttgatagtttgatgccagtacttataataccagtactttccacattatttatagcactcgtaatgatgtttattctaggcgacccagtaaaagcaatcaataatggacttacaggtttcttaaagggattaagtggagcaaatgcagcagtgttaggtatagttttaggatgcatgatggcatttgatatgggaggtcctttcaataaagcagcatacgtattcgctacaggaacaataacaactacaggaacaactataatggctgctacaatggcagcaggaatggtaccacctcttgcaatagcacttgcaacagtaataggaaagaagaaatttaatgagcaggaaagagaagcaggaaaagcagcatgggcacttggattatcattcataacagaaggcgcaataccatttgcagcagcagatcctcttagagttattccttcgatgatggcaggctcagcagtaactggagcattatcaatgatatttggttcaagacttgcagttccacatggaggagtatgggtattatttatacctcatgttgttacaaatttaggaggatatataatatcaatactagtaggtatggtagtatcagcgttattacttgtagctttaaagaaagacatagtaagaaaataa

SEQ ID NO: 15592 - DNA, 1479 bp, Clostridium acetobutylicum
atgaaaaatgttataaagataaatgaaaaagataatgttgtagttgctttaaatgatttaaacaaaggcgatgtaattgaaatagatggaaaagtaattacagcagaagagcctgtaaaaaaaggtcataaaattgcaattacagatatacaaaagaactctaatatatataagtatggatttcctattggtcatgcgttagaagaaataaaaaaaggtcaatgggtacatactcataatataaaaaccaatttggatggaataaaggattatgagtacaataaacaaacttttgagaatccatttaaaaatgaaaatttaacttttaagggttatagaagagaagacggaacagtaggaataagaaatgaattatggatagttccaactgttggttgtgtgaatggtacagctgatttaatagctgaaagatttaaaagtgaaactgagtttaaagatgtacatgtatttaagcataattttggatgttcacagcttggtgatgatcacaataacacaagaactatattaggtaacattgtaaagcatcctaatgcaggaggagtattagttcttggacttggttgcgaaaataatactatggagagtttcaaggaatcacttcatagctacaataaagaaagagtaagatttttaatagctcaagatgtagaagatgaaatatcttccggatgtgagttgttaaaagaattatatgaaaagatacaaaaggatgaaagagaagaggtatctatttcagaacttaaaataggacttaaatgtggagcatcagatggtttttctggaataactgcaaatccacttttaggaaagttatcagactttttaatagcacagggtggaacaactatacttacagaagttcctgaaatgtttggagcagaaacaatactcatgaatagggcaaaagatgagaaagtatttgcaaaaacggtaaacttgattaatgattttaaaaaatatttcatgagctataatcaacctgtatatgaaaatccttctccaggaaacaaagcaggtggaataactacattagaagataaatcattaggatgtacacaaaaatcaggaagctctgaagtagttggagtacttaagtacggagaaactttagaaaataaagggttaaatcttttaagtgcgccaggtaatgatttagtggcatctactgctcttgcatcggcaggatgtcatatggtgttgtttacaactggtagaggtacaccatttggaacttttgtgccaactgttaagatttcaactaactcagatatatataataagaagaaaaattggatagattttaatgcgggtgcacttttagaaaatcaatctatggatcaagtgcttaaagaatttattaattatttactcggagttgcaaacggaaatatggcaaacaatgagaaaaataacataagagaaatatctatatttaaaaacggtgtaacactataa

SEQ ID NO: 15593 - DNA, 1986 bp, Clostridium acetobutylicum
atgaagaaaaagtatagaggtttttatgatcaaaatttatcatatatctttattagtttaattcttataatattaatgtttgtgtatggtcattatagggatgctatattagctttaattgtcacattgttttttattggttatgatgttgaaaagttgagattaaaaaaagatgagtggaaaaactttatagaagatttctcatctagttcagatatagctgcgagaaatattcttataaatttgccatttccagtgataatagtcagtgaaaaaggaaatgttttatggtacaatcaaagtatttctaatgtatttaatgatgatattttaggaaacaacttgtcatcagtaatacaagataaagatttaagtaatttactatctaaagataataagccttgtaaaaattttaagataaaagaaaaatattatgatatatacagcagtagaatgaaaatttttgagaagaataaagaaatatttttaatatatttctatgatgttacagataggcatgaatttgaagaagaaatttcaaactgtaaaacatcagtgctactagttgaagtggataatttagatgaggtggtaaaaagtactcctgaagataagaaaccattacttaaggcacaaatagaaacagtgataattagctatgctaaacatataaatgccatgtttaagaaatattcaacaggtaaatacgttctagtgatccaagataagcagcttaaaaaggaagtagagaaaaggtttgagatattggatcaaataagagaaatagatatgcaaaatagtttagcagtaactttaagcattggtattggtaaatcaggtaatacacctattgaaaattacaactatgctgttttagctaaggagctagcgcttggacgcggtggagatcaggttgtaataaaagatggagagcagctgctgttctatggaggaaatacaaaagaagttgaaaaaagaactaaggtaagagcaagagtcataggacagtctttagtggaactagtaaaggaaagtacaaatgtttttataatggggcatgtaaatccagatatagattgcataggtggtgctataggattatatagtgtactaagcagtaaagtagatggagatgtgcacattgttcttgatgatactagttcaagtgttgaaggaattgttaatagacttgtagaaaattacgatgaatataaaaatgtttttatgagaagcagtgattgtatcgaacttatagatcaaggttcaattttgatattggatgatgttaatagtagaaattatgttctaagcgaaaaaatcttagaagaaataagtaaagtggttgttattgaccatcatagacgtgctgcaaattatataaaagatactattctaagttatattgagtcatatgcatcatctacttctgaattagttacagaaatgatacaatatatggatgagaatcataagcttaaaccaattgaggcagaggctcttcttgcaggtattgtagttgatactaagaatttttcttttaaaacaggggtaagaacctttgaagctgcagcttttttaaggaaaaatggtgcagatactattgagataaaaaagcttttttcaaatgacttagaaaattatataaaaaaatctgaaataattaagtctgctagggtttttcatggtaatattgctattgccatatgcccaaaagaaatagatagcaatataatggccgcacaagctgctgatgaacttttaaacataacaggcatgaaagcatcatttgttcttgttaagataaaaaacaacatacttataagtggaaggtcctttggagatataaacgtacaggtagtactagaagctttaggtggaggtgggcatataaccatggcaggagcaaaggtaaaggcgtcttctacagaggatgtgttaaacagtttggttaaggctatagacaaatacttagaggaaggtgaataa

SEQ ID NO: 15594 - DNA, 1023 bp, Clostridium acetobutylicum
atggaaaaattacttgaaataaagaatctaaacacctcattttttactcatcttggtgaagtaaaatcagtaagaggaatttcctttgaattaaataaaggagaagctctcggcattgttggagaatcgggcagtggaaaaagtgtaacgatgatgtcagttatggggcttcttcaagaaaatggaaagatagttgaaggtgaaattatattcaatggtatgaatattactcatgcacctgaaaaagaaatggaaaaaataagaggaaataaaataggaatgatatttcaagaccctatgacttctctgaatcctgttcttacaataggaaatcaaatagcagaaggtataaaaaagcatcttaatatgaacacaagtgaagcgattaaacgtgctatagaaatgcttaaattagttggtataccaagcccggaaaagaggatgaagcaatatccccatgaattttcaggaggtatgagacaaagggttatgattgctatggcaattgcatgtaaacctgagcttctaattgctgacgaacctactacagcacttgatgtaacaatacaggctcaaatacttgaacttatgaaaaaattaaaagaaaagatgaatacatcaataatattaataactcatgatctaggtgttgttgccaatttatgcagtaaaataaacgttatgtatggcggtctaattgtggaaaaaggtgatgcaagagaaattttttataatcctaagcatccatataccttagggcttttaaagagtataccagatcctacaaaggatagtaaagaaaagcttgttccaatagatggatatccaccagacctcttaaatccaccaaagggatgtccttttgcagcaagatgtccttatacaatggaaatatgtatggaaatgcctgttccatcttttaaaataggcgaaaaccatgaagctgcatgctggcttaatcatccggatgcaccaaaggttaatccaattaatgaaaggagagaagacaatgccacaagataa

SEQ ID NO: 15595 - DNA, 993 bp, Clostridium acetobutylicum
atgcttaattctgctgtgcttataacaattattattgtaattttggctatatcattcgattttcttaatggttttcacgatagtgctaacgctatagcaacatcagtttcaacaagagttttaagcatgaaatctgcagttattatgtctgctattttgaattttttaggagcattcatgagtgataaggtagctaaaactgttggagatggtataatagatccttctaaaatagtacctagtgttataatagttgcacttattgcagcgattatatggaacttaattacatggtatttgggaataccaagtagctcttctcatgcacttataggtggacttattggtgcagcagtaatgtataagactagctttggtgttgtaaattggattggattctttaataaaatagtactttggttatttttatcacctgtaataggttttgttgttggatatatatttatgatattaattgagtggctatttcatcgctctaaacccgcatttgtaagcagagtattctctaaagcacaaattgtatcagctatgcttatggctttaaatcatggtggaaatgatgcacaaaaatcaatgggtgtaataacaatggcacttatgagttctggtcttcttagctcctttactgtgccggcatgggttaaagcagcatgtgcaattgcaatggcatttggtacatcctttggaggctatagaattataaaaactatgggtatgaatatggctaaattagcgcctgtaaatggatttgctgcagaaacaggtgcagccgctgtaatattttcagctaccatgttccatgctccagtaagtacaacacaaataatttcaacatcaataatgggtgttgccgcatctaaaagaatatcctcagtaagatggatggttgcaaaggatattcttatagcatggattataactatgccagtatgtgcgggtattgcagcattattagcactttttataagataa

SEQ ID NO: 15596 - DNA, 957 bp, Clostridium acetobutylicum
atgatagataagcatggcagaaatattgactatttaagaatttcagtaacagacagatgtaatttaaggtgcatttattgtatgcctaaaatgaaaggttacatacaggaaaacaataagattagttgctcagatatttttaaattacttagagcagctgtttcagtaggaataaataaggtaaggtatacaggaggagagccactacttaatgaagagataagtaaaattatatatgaaacctcaaaattacctcaaattaatgacattgccataacaacaaatggtattttacttccacagatggcaaaagatttaaagaaagcaggattaaaacgagtaaatataagtcttgatactttgaaaagtgatacattcacaaaaataactaactttaatcaaataactaaagttatagatggaattgatacatgtttgaagcttaatttgaaacctgtaaaaataaatactgtattaataaagggaattaacgatttagaagttaatgattttgtaaatttatctagagaaatgcctgtagaaataaggtttattgaactaatgcctataggtgaaggagcaaaaatttatgaaaaaggtagagtgaatataaaggaattacttatgtctcgttcagatttaattcctatagaaagtcttcaaaatagtactgctaatatgtataagataaaaggtggaaaaggaagaattggatacataacacctataagttgtaaattttgctcaacatgtaataaaataagacttacatctatggggactataaaaccatgtttgcattctaatcaagaaatagatttgaagccttatttaaataatgaagatgttcttgtggagaaattaaaaactataatttttaacaagacctttcagcaccatataaatgaagaaaatattagcagaagcaaaaaaatgatgtaccaaattggtggatag

SEQ ID NO: 15597 - DNA, 702 bp, Clostridium acetobutylicum
atgtcagttatttcaatgaaacaattattagaagctggtgttcatttcggacatcaaacaagaagatggaatcctaaaatggctccatacatatttacagaaagaaatggtatatatattatagaccttcagaaaactgtaaagaaaattgatgaagcttacaacttcataagagaagtatcagaacagggtaaggatattctttttgtaggaacaaaaaaacaggctcaagaagcaattgctgaagaatcagtaagagcaggaatgcattttgttaacaacagatggttaggtggtatgttaacaaacttcaatacaataaagactagaattgcaaaattaaatggcttaaagaaaatggaagaggatggaacatttgatgttttacctaaaaaagaagttatcatcttaagaaacgaagaagagaaacttgtaaaaaatttaggtggaatagtaaatatgacacaatctaacattggagctttatttgtagttgatccaagaaaagaaaagaatgctatttcagaagcgaaaatattaggaattcctgttgttgcaattgttgatacaaattgtgatcctgatgaagttgattatgtaattccaggaaacgatgatgctataagagcagtaagacttataacttcaaaaattgcagatgcaataattgaaggaagacaaggcgagcaattagctgagtag

SEQ ID NO: 15598 - DNA, 309 bp, Clostridium acetobutylicum
ttggcaaagcaaaaaataagaataagattaaaagcttttgatcatacaatattagatcaatcagctgaaaaaattgttgaaactgcaaaaacaacaggagctaaagtagcaggtccagtacctctaccaacagaaaaggatgttgtaacaatacttagatccccacataaatataaggattctagagagcagtttgaaatcagaactcataaaagacttatagatataataagtccatcaccaaaaactgttgatgctttaatgagattagatttaccagctggcgttgatattgaaataaaactttaa

SEQ ID NO: 15599 - DNA, 537 bp, Clostridium acetobutylicum
atgaataatgttgttttgatggttgttgatgcgcagaatggattaatcaagaagaagccttataatcataagaatgtaattgaaaacattaaaaaacttattataatggcaagggctaacaataaagaggttgtatatgtacgacacgatgatggagaaggaacagagcttgagaaaggtacagagggatggcaaatttatagtgagcttgagcctaaaagtggggagttcattatagaaaaaaagtataatagtgcctttcatagaacagacctaaaagagtatttggaaagtaagaatactgataccattatattagtggggcttcaaacagaatattgtattgatgctacactgaaaagtgcttttgacaatgaatacaaggtaattattccgaaggatacaaatactacctttgataacgagtatttatctggagaaaagctctataaattttacaattataagatttggaataaacgttttgctagagtgatttccatggaggacacactaaatagatttatcattgactaa

SEQ ID NO: 15600 - DNA, 1329 bp, Clostridium acetobutylicum
atggaggcacccttaagagctatgcctcaaaacctggaggcagaacagagtgttttaggttccatgataagcgataaaaactgtatagcacaagcagctgaatccctaagaggagaggatttttatcgccagaatcatcaaattatttttaatgctatgttagaacttttccaaaaggatataccagtagacttgataacacttttagagcatttaaaatctacggataagcttgaagcttcaggtggaataacatacgtaactcaaatcagggattccatagcatctactgcaaacattcaatcttatataaaaatagttaaagataaggcagtgttaagaaaacttataaaatcttcaacggatataattgaagaaagttattctaagcaggatgatgtagagaaggtactagacagtgcggaaaaaagaatatttgatatagcagaaaataaagttacaagtgattttgaagcaatgaatgttgtacttgagcgtggttttgaacagatagagaaactttataacaacaaaggggaaataacagggattccgtctggttttcctgaattagatgataaaacatcaggatttcaaaagggagatatggttcttattgcagcaagaccttcaatgggaaaaactacatttgctcttaatatagcagagtatgcagcattaagggcaggcaagagcgtagtaatattttctctagaaatgtcaaaggagcagcttgcatacaagttactatgctcagaagctaatgttgatatgttaaagcttagaacaggaaatcttgaagatgaagattgggataatattgctagagcatcaggaccgcttgcagatgccaagatttttattgatgatactgctggagttagcgtaatggaaatgaggtctaaatgcagaagattaaaaatagagcatggtatagatcttatagtaattgactacttgcagcttatgagtggaaatggagaaagcagacagcaagaggtatctgagatatcaagatctataaaggcacttgcaaaggagatagggtgtccagttattgctctttcacagttatcgcgtgctcctgagcaaagaaatgatcacagacctatgctttcggacttaagagaatctggttctatagagcaggatgccgatcttgttatgttcctttatagagatgaatattacaataaggaaactgaacaaaagaatgttgcagaatgcataatagcaaaacagagaaatggtcctacaggaactgttaatcttgcttggcttggtcagtacagtaagtttggtaggttagatgtaattcatcaagaataa

SEQ ID NO: 15601 - DNA, 918 bp, Clostridium acetobutylicum
atggattactttcaagattttatagcagcattaagcaattttataaaaaaggataatcttaagattgacgtcccaatgaaaaaccatacttcttttaaggttggtggtccggtagacgttttagtgatgccagaaaagtatgaagaaattaatagaataatagaactttgtgaaaaatatgatgttaattactatataattggaaatggttcaaatttgcttgttagagacggtggactaaggggagtagctataaaattattaaaattgaataaacttcaaattggcaataataaaattatagctggatgcggagtacctcttggatatttaagcagaaaagcaagagataaatcacttactggtcttgaatttgcatgtggcattccaggaagtgttggaggagctgttgctatgaatgcaggagcttataatggagaaatttctaatgtagtagaaagtgttctcgtaatagacaataaaggtaaaatgaaaaggctttatagggacgaacttcagtttggatatagatcaagtgctatattgaaacacaaatatatagcattagaggtaacatttactttacaaaaaggtgatagggaaaaaatagctaatagaattgatgaccttatgagaagaaggattgaaaaacagcctttagaatacccatcagctggaagcacctttaagagaccagttggacattttgctgctaagcttatagaagatagtgggcttaagggtaaaggaataggtggagctcaggtatctgataagcattctggattcattataaataaaaatgatgcaactgcaaaagatatattagatttaataaaatttgtacaaaacactgtaaaatcaaaatttaatgttgaattggatacagaagttagaattataggtgaggacaaataa

SEQ ID NO: 15602 - DNA, 1143 bp, Clostridium acetobutylicum
ttgaaacaagaaatgctttcatttttaagtacaatcgatagcgcactttatgatctcacacgttatctatacgataaccctgaagaaagctttcatgaatataaatcctatagctatataacaaagcttttagaatcttataactttactaatattaaaaattacttagatataaacacagcttttttatcccagtttggagaaggacatccaaaaatatgtttcatatgtgaatatgatgcagatgttaattatggtcatatatatggatataatgctaaaactactatttctgttgcagctgctcttatgctttcacatgttattcctaaggttggtggaagtgttatattattaggttgtccaggtgaatttaaacgcggatcaaagacaacaatgtttaagcagggtacctttgaagatatggatgcagttttaaccgttcaaccacatactgtgactgcagaaagcggtacctctatagcctcactacctttaagtctaattttatcaaaaactaataatttaactaatacaaatgattcatcctcctcctttaatacagctttaattattttcaatactctaaatcatttaataaatatatcccaatataaatcatgcatagataatctcagtttatcaagtttagttaattcagagtctaaaagttctgagataacttttactctaaaatcttcatcttctgaaaatatactcggaaagcaagataaaattaaagagttcataatgggattatgtaatctagtatccatcgaatccgaattacatattaaggatactccctgcaaagagcttatatctaatgccactctttcaaggcttttttctcacaacttaaaagaaagcgaaataataaatataaatggagttaaaaatctctcttcttgtctaagccttggaattgtaagtcatgaaataccgtgcatacatccatatgtatcattaacgaaagattcttcaataaaatatggaacaaaggctttttcagatgaaacaattactccttatgctcataatataattatgaagtcctcaaaagcattagctcttacagctcttgatttaatagaaaataacagtcttttattcgaagcaaaaagtgaactaaatcataaataa

SEQ ID NO: 15603 - DNA, 2298 bp, Clostridium acetobutylicum
atggttactataaaaattaataataacgtacatattatattagaggtgatatatttgccaaggaataaacaatataaaaaaaataagcaagataaaatttctgaaactactttaaacagtgacatagcaggtatatcgatttttgcctttggagcatttgccgcagtaagtatgttttttaccagttttacaggaatcattggtaatggtatgaagaaacttttatttacacttgtaggcataggtgcatatatatttcctatattattgatgtttataggtgtttgttatttgataaaaaaaggaaaaataacttttagtaaaagattttacggagttaatataattattataaacacccttatgcttatacaaatgcagaaattatccttgtactataatggtaatattttagacggaataaagaaaatatatgaatcatctgatacatttcatggaggggtaatttcttatattcttgatgttccaatatataaactctttggtaaaggatactttgtgttatttataactctatacattatatcttttcttttggtttctgaaaaatcggcaggagaaattataagagaaaatcttaaaaagaaacctttaaagaaaactaagccttctgtagatgaaactaaaactatggattatgaaaatgataataaagataaggatgaaactttagccaaaaagattagtagtaagataaaaattgttgattttatgaaaaatgagggaaatgtagatagtaataagggacaagcattagaggaaattgcggtgtatgattctgcagaaaaaaatgagaatgaaagtaaagtaataggtgctgaacttgaagatgctataggacaaacctcctccaataattctgatataacctatgagtttcctccaattagtttattgaatgtgaacgagacttctaaactaaagaagagcgacaaaaaggaattattatctagtgcagaaaaacttactgaaaccttaaatagttttggtgtagatgcaaaagttatacaagtttcaaaaggtccttctgtaacaagatacgagcttcaacctagcgctggagttaaggttagtaaaataattaacctctcagatgatatagcattaaatttagctgcttcaggagttagaattgaagctccaataccaggaaaatctgctataggtattgaagttccaaataaagatttaactgctgtttttttaagtgaagtaatacaatcagaaactttctcaaactcaaagtcaaatttagcttttgcattaggtaaagatataggtggaaattgtgttgttactgatttaacaaaaatgccgcatcttttaatagctggtgcaactggttcaggaaaaagtgtatgtataaatactcttataataagcttactttacaaatgtgctccaacagatgtaaagcttcttatgatagatcctaaggtagttgaattgagtgtttacaatggtattcctcatcttctaattccagttgtaactaatcctaaaaaagcagcaggtgcattaaattgggcagtaaatgaaatgactaaaagatataaactgtttgctgaaaacaatgttagaaatatagaaggatacaacgatttatatactaaaaataaggttgaaagtaaactgccatggattgttataataattgatgagttggcagatttaatgatggtttgtccaaatgatgttgaagactatataggaagactagctcaaatggctagagcagctggtatgcaccttgtaatagctactcaaagaccatctgttgacgtaataacaggggttataaaggctaacattccatctagaatttcttttgcagtatctagtcaaatagattcgcgtactattttggatacttcaggtgcagaaaagcttttaggaaaaggagatatgcttttcaatccagttggagaatctaagccaattagaatacagggagcctttataaatgaggaagaggttgaaagagttgttggtttcataaggaatgaaagtactgaaactcaatataaagaagagataatagagcaaattaatagtaatgtttcaaaatctgagggcgatgaggatgaacttttagaagaagcattaaaaataattatagaaacaaaacaagcatcaacatcacttatacagagaaaacttagaattgggtacaatagagctgcaagaataatggatcaattagaggaaaaaggttatatatctgcaaaagatggaaccaaacctagaaatattttggtagacaaggatgatttataa

SEQ ID NO: 15604 - DNA, 579 bp, Clostridium acetobutylicum
atgataagatttcaaaagagaatggcaatattttttttgacaataagtatattgatcatatgtggagatattgaaaagattataagttttggaatagaatttgatgatattttatgcaatctgttttttatagggttgggaataatagggttccgtatctataggtggtataaaagacaaataaaaaaatacacagaactgttgaaagaagatagattagataaaattgaatacattatatatgatattgaaagagtgagaggtgtagtatataatacggcattttacattgatggtgtaaaatgtaagttaagatttccgcaatataaatgtaaggataatgacaattatgaatattatcttgagccaatatataaaaaaaatggtgagtttaaagattttatagcttatgcagataaaaaaaatgattataaaaaaagtatagaatctactaatgaaattacagaatgtgaagagaaagcggaaaaaaagcgtaaaagaaaaagattgaatgaatatgtaaatagcagaatggagctagcaaagaagtatgaagaggaagcaaaaaataaaatgtag

SEQ ID NO: 15605 - DNA, 1692 bp, Clostridium acetobutylicum
gtggattacaagaaagtaatagctgaaagaattaataaaattgtagatatggatgttgaggcactttataaaattatagagataccgcctaaaaaggacatgggtgattttgcacttccatgtttccaatttgctaaagtattaagaaaagctccaaatgctatagcagaagaagtatgtaaaaaaatagatcaatctggttttgaaaaagtagagaatttaggaccttatatcaatttctttgttgataaagcagattttgcaaaagaaacaatagagagtgttttaagtgaaagagataactacggtcgttcaaaagtgggagaggggaaaaaggtacttattgaatattcttcccctaatatagcaaaaccttttcatgtgggtcatttattcggtacagtgctcggaagttctctttataaaatattttcaatggaaggttatgactgtgttagaataaatcatcttggagattggggtactcaatttggtaaacttatatctgcatataaaagatggtgtgatgaagatgctctttataaggatccaataaaagaattattaagaatatacgtaaagttccataaggaagcagaaaaggatccactattggaagacgaaggtagaatgtactttaagagacttgaggacggagagaaagaagaagtagagctgtggacaaaatttaaagacttaagcttaagagaattcaaaaaagtatacaatcaaattggagttgagtttgattcatatacaggagaaagcttttatagtgataaaatagatgcaatagaagaagaacttaatgaaaaaggacttttgacagaaagtaatggagccaaggttgtaatgctagatgaatacaatatgcctccatgtataattaaaaaggctgatggagcaagtatctatgcaactcgagatttagcagcggctgagtacagaaaaaagacctataatttcgataagagcatatatgttgtaggacttgagcagtcacttcattttaagcaatttttaaagacgctagagcttgcaggtcatgaatggtcaaaggattgtattcatgtaggttatggtcttgtaagatttgcagaagggaagctttcaactagaaatggtgatgttatattccttgaagatttactaaaagaatcagttcaaaaaacaagtgaaattattgaagaaaaaaatcctgaacttgacaataaggaagaagtatctagaaaagttggaataggagcagttatatttacttatcttaagaatggaagagaaagagacataatatttgattggaaggaaatgctaagttttgaaggggagacaggaccatatgttcaatattcctatgcaagagcaaagagtattttgagaaagcttggagaagtaaaaggtaatgtaagttatgataaacttgtttcagcagaagaatttgacttgataaaacaacttaaaggctttaacggtgctattttaaatgctatagatagacttgagccatcggttataactagatatgtaatagaggttgcaaaggcgttcaataaattttataatgcctataatatttcaaatacatctgatgaagaattaaagaatgcaagacttgctcttgttgaggctgcttcaatagttataaaaaatgcacttagtctcataggaatagatgtagttgaagaaatgtaa

SEQ ID NO: 15606 - DNA, 1899 bp, Clostridium acetobutylicum
atgaatttaataactttagaaaatatatcaaagagttatggagaaaaaactcttttaaataaaatttcactcagcataagtgaaggcgaaaaaataggtctcataggtatcaatggtacaggtaaatcaacactcctcaaaattttatgtggaattcaggagtatgacagtggaaatataataacctcaaatagcttgtctatgagttatctttctcaaaacgaaaacttctacgacaatgccacagtactagaacaaatttttcaaggaaattctaaagaaatgaatcttcttagagaatatgagactgctcttgaaaattccgctatgcatcctgatgacgaaaaagttcaaaaaacacttcttaatttaactgagcaaatggatgcactagatttatggaatatagagagtaatgctaagacgatactcactaaattaggtataaaaaatttcaatgctaaaataaaaaccttatcaggtggtcaaaagaaacgtatttgtcttgctcaaactcttataactccttcaaaccttttagttttagatgagcctacaaatcatctagataatgaaacaatagaatggcttgaacagtacctaacttcaacaaaaagttctgtatttatgataactcatgatagatactttcttgacagaatttcaaataaaatctttgagctgtataacggaaatctttattcctacgttggtaactacagcgtttatcttgaaaaaaagctagaaagagagcaacttgaaatatcttcaaagcaaaaaaaggataatttattaagaagagagcttgcttggattaggcgaggtgcaaaagctagatcaacaaaacaaaaagccagaattcaaagatttgatgagttaaatagtcaagatgacactataattcaagataaaattgaaatttcaacttctggttctagattaggaaaaaaagtaattgaaattaaaaatcttaacaaatcctttaatggcaccgaattcataaaaaattttagtttcattttctcaaaaggagatagaattggtattgtaggacataatggtatcgggaagtctacccttttaaacattatatgcggcaaaacatcacctgatagtggaacaattgatttaggtgcaacagttaaaataggttatttttctcaagattcttcaaatatgaatgaaaatttacgtgttattgactatataaaagaaggcgctgaattcataagagattcaaataacgagctcataagcgcgtcaaaaatgcttgaaaaatttttgttttcctcagaaatgcagtggacacctatattaaagttatctggaggagaaagaagaaggttatatcttcttagaattttaatggaagctccaaatgtacttattttagatgaacctaccaacgacttagatatacaaacactaactatactagaagattatctccaatattttgaaggtactatactaacagtatcacatgacagatacttccttgataagcttgcgaacaaacttttaatatttaagggaaacggcgttattgattataatactggaaactattctgactaccttgagaaatcaaaatctgaagaaaagttagaaatggctaatacacctactaaaaataaagtaaaatcagaaaaacccaaatctacaaagcttaagttttcttttaaagaacaaatggaatatgaaaaaatagattccgtaattgaagctgctgaaaacgaattaacttcaattgaagctaaaattaattccgctggaagcgattatatgcttctagaagatcttatgcctcaaaagaaagagctagaggaaaaacttcaaactttatatgatagatgggaatatttaaatgaattagctgaaaggattaaaaacagctaa

SEQ ID NO: 15607 - DNA, 846 bp, Clostridium acetobutylicum
atggggataagtttgattcaggcagctatatttggattatttgcatgcctatcaagtatgcccggtatgggaggaactacctttggtaactataccttaggaagacctttagtagcaggtttgctagttggaattgttttaggagacgtacaaactggtattatagttggggcagcaattcaagttgtttatattgcactggttactccaggtggcactgtatctgctgatgtacgtgcagttagttatattggtattcctctagctgtagtagcaattaagggaatgggtttaaatccaagttctgcacaggcaactcaaatggcaactgcattaggggcagcagttggaaccttggggactgttttattttatggaacagcaactataaacttgatatggcagcatataggctggaaatcaatagaaaaaggtgattttaaaaagctttatttagttaatatgggattgccatgggtttctcacattatttgtagttttattccagcatttattattacaagaatgggttctagcatggttaaaattatgaaggtagcattgccaatgaatggtataccaatgaaaactttatttacagtaggaagtttgcttccagcagtaggaattgcaatattattaaaacaggttgtattaaaaccaagtgattttataaccttctttttaggttttactttggcagcagttatgaaagttaacttgattggagcagcaataataggtattttctttgcaataattaattatagaattagaatgcttcaactagaaaagccatctgcagctaaagcgacgggtaacgatgatgatgaggaggatatataa

SEQ ID NO: 15608 - DNA, 1581 bp, Clostridium acetobutylicum
atgtcagagttggttagtgaaatagaaaaaaggcgtacattcgccataatatcccacccagatgctggaaaaacaacacttactgaaaaacttttattatatggaggagccataagacttgcaggttctgttaaggcaagaaaggcttcaaaacacgcagtttcagactggatggaaatagaaaagcaaagaggaatatctgttacgtcttcagttatgcagtttaattatgaaggctattgtattaatatacttgatacccctggtcaccaggattttagtgaagatacatatagaacactcatggcagctgatagtgctgttatggtaattgatgcagctaaaggtatagaggctcaaactaaaaagctttttcatgtttgtagtcttaggggaatacctatatttacatttgtaaacaagatggatagagaaagtagagatccatttgaacttcttcaagaaatagaaaccgaacttggaataaagtcttatcctataaactggccaataggtgcaggtaaagattttaaaggtgtctatgatagaagaaaaaaagccgtacatgtttttaatggaggaaatcacggtcaaacagaagtagaggatgttgaaggagatgtaaatgacccttcactaggagaattattaggagaagcattgcaagaaaaacttgctgaagatatagaacttttagacatagctggagatgagtttgatatagagaaggttaggcagggagagataacacctgttttctttggaagtgctcttacaaactttggagtaaagccatttcttgaagaatttttaaaacttacaacaccacctactcctagaaattctgataaaggtgaaataaatgtatttgagaatgatttttctgcatttatatttaaaatccaagctaatatgaataaggctcacagagacagaattgcgtttatgagaatatgttctggtaagtttgaaaagggaatggaagtaaaccatgttcaaaaaggtaatactgtgaagcttactcagcctcagcagtttttagctcaagatagagaaataataaatgaggcttatgcaggagatattataggagtttttgatccaggtatttttaacataggagacacactatgcaaaagctctgataaattcaggtttgaaggaattccaatctttgcacctgaacattttgcaagagttagaactgtagatactatgaagagaaagcaatttataaaaggaataacacagatagctcaagaaggtgctattcaggtgtttaaagaagtaaacataggaatagaagaacttatagttggagttgttggtgttcttcaatttgaagtacttcagtacagacttgaaaatgaatacaatgttgatataaaaatggataggttaccatttaagtatataaggtggatagaaaaaggagatgctgaaaatcttacacttacatcagatactaaaattgttaaggatgtaaatgaaagaagtttactcttattccaaagtgaatggtctataagttgggcaatcgagcacaatgaagggcttgttctttcagatataagcaaataa

SEQ ID NO: 15609 - DNA, 702 bp, Clostridium acetobutylicum
atgctagaagctttaaaacaagaagtattagaagcaaatcttatgttgcctaagtatgggttagttgtattcacctgggggaatgttagcggtattgatagagaaaaaggtcttatagtcataaaaccaagtggagttgagtatgatcaaatgaaagctagtgatatggtagttgtggatctaaatgggaaggttgtagaaggtgacttaaatccttctagtgatactccaactcatatagtgctatataaagagttttcagatattaagggaattgttcatacacattcaccttgggctacatcttttgcacaagcaggagtttctattccagctgcaggtacaacccatggagattatttttatggtaatattcctgtaacttcaagaatgaccaaagaggaaatagctacagattatgaaaaacaaacaggagatgttatagtaagaacctttagaaaagagaatattaacccaaatgatgttccagctgttcttgtgaatgatcatgctccttttacctggggaactgaccctaagaatgcagtgcataattctgttgtattagaagaggttgctaaaatgacatatcattctttacagcttaatccacataacattgaaatgagtcaggatttgttagataagcattttaaaagaaaacatggtgcaaatgcatattatggtcaaaaaacaaagtaa

SEQ ID NO: 15610 - DNA, 1440 bp, Clostridium acetobutylicum
atgggaaaggtaactggatttaaagaatacgatagagaagagtcgccatctcgtccaatcgatgagagaataaaggactacaaagatgttcatatgggacttgacaaggaaaagctgaaaattcaaggtgcaagatgtatggaatgtggtactccattttgttcatggggctgccctcttggaaatttaatgcctgactttaatgacatggtatataaaggtgagtggaaaaaggcttatgaaaggatatctttgacaagctgtttccctgaattcacaggacgtatttgtccagctttatgtgaaggttcgtgtacattaagttacaattctgatgctgtttcaataaaagaaattgaacttggaattatagaggaagcctttaaaaatggatgggtaaagcctaagattccaaaggttagaacaggcaaaagaattgcagtaataggatcaggcccagcaggactttcggcagcagaagaacttaattctgttggacacagcgtggtggtatttgaaagagctgataaggtaggaggacttttaagatacggcattcctgattttaaacttgaaaagcatgtaatagatagaagaattgacgttatggaaaagtctggaatagagtttaaaacctctactaatgtaggttttgatgtgagtgcagaagaattacttaatgattttgatgtagttcttcttacaggaggctctaccatacctagagatttaaaagttgaaggaagagagaatattaaaggggtgcattttgctgttgattacttaaaacagcagaatatgagaaatgctggaatggaaattaaagaagaggaaataactgcaaaggataaagttgttgtggtaattggaggaggagatactggttcagactgtattggtactgcaataaggcagggtgctaaaaaggtatatcagtacgagataatggataaacctccagctcaaagggatgaaactatgccttggcctttatttcctagagtgtttaaaaccactacatctcatgaagagggctgtgaaagattattcggtgtttcaactaaaaagctagaaggaaaagacggtaagcttgaactccttaaaggtgtacaagttaagtgggaaaaagatgaaaatggaaaaatgtccatgaaagagatagagggctcagagtttgaaaagaaggtggatttgatacttattgctatgggatttgtacatcctcagcataagggtatagttgaagatttacagctgaaattagattctagaggaaatgtttttactgatgaaaactttatgacaagccgagaaaatgtttttgcagcaggggatatgagaagaggtcaatcacttgtagtatgggctatgcatgagggaagacaatcagcaaaagaaatagataaataccttatgggagaaacttctcttagaggatag

SEQ ID NO: 15611 - DNA, 969 bp, Clostridium acetobutylicum
atgttaagatatatagtgaaaagattgctgcaaatgattccaatattaataggtgtatcaattgttatatttataatattttcactggcaccaggagatatagttgataatatgggggtaaatagtcatatgacaacagctaaggcctctcaattaagacacctatatcatctagataaatctaagccacttcagtatttgtattggataaaggatgccgcttcgggtaattttggatattctcttgagtacaggcagccagtaagtactgttataaaaagctacatatggaattcgtttattctgtcatttatgtcttttatagcagcaatagttcttgcaataccaataggaattgtatctgctacaaaacaatattcagcttttgattctatttttacggtaatagctttaattggaatatcaataccagcgttttttatggggttactgcttataaaatggttttgtatagattttaagatatttccggtgtctggaatgactacatcaggaagcaatgcagcaggtataaaaaaatttggagatatattataccacatgtttttgccgtttttagttttaacctttgaaagtgttgcaagccttatgagatatatgagaaccagtatgcttgaggtcataagacaggattatataagaacagctagagcaaaagggcttaaggagaaggttgttatatataagcatgctttgagaaatagtctaattcctgtaataacaatattaggtatgtggcttccaggacttttctgtggggctataataacagagcaaatattttcatggcccggaattggaagggtaactcttcaggccgttagtcatagagattacccactgcttatgggatttaccatgctaattgcagtacttacgcttctcggaaatctagttgcagatgttgcttacgctgttgttgatcctagaattagacttgaacattaa

SEQ ID NO: 15612 - DNA, 441 bp, Clostridium acetobutylicum
atgaaacttcatgaattgaaacctgcagcaggatcaagaaaagctcctaaaagagttggaagaggtactggttctggcttaggaagaaacgcaggaaaaggagaaaaaggccaaaacgcaagaagtggtggcggagtaagaccaggatttgaaggtggtcagatgccattatatagaagattacctaaaagaggatttacaaatatatttgctaaaacaattacagcagtaaacgtagatagattaaatatttttgaagatggaacagaagtaacaattgatgcgctgatagaaaaaggaataattaaaaaagttaacgatggagttaagattttaggtaacggagaactcaaaaagaaattagtagttaaagttaataaatattccaaatcagcagctgaaaaaatagaggcagctgggggaaaagctgaggtgatataa

SEQ ID NO: 15613 - DNA, 900 bp, Clostridium acetobutylicum
atgaaaaatcacaaaaaactaattacactttcaatactacttttaattctcataagtttaattgctgtatacaatataaaaaaatacactaagccaaaatcagaaggcatcttttacaaagtagaaagtaacggaaactcattatatttgggtggtacaatccacattggaaaaaatgagcctattaaattttctaaagctgttgaaaatgcctatgaaaaatccactacattagttgtagaaaccgacattacaaacactagtacaatacgtaaatatggaaaagatgtaacttactcaagtggtgataatttatacaagcatataactcctgccgcaaaaaaacatattgaaccaattatgaaaaaattaaatttaaatcttgatacctacaaaaatgatactctaggttatttatacagtaccattcttaatagtgaattattatctgatgatgcaaacagctacggctttgattactattttctaaaaagagctaaaaatgataacaaaaaaattgttgctttagaagatgctaaaactcaagctgccgcaataaatgctggtggagatgcttatcaaaattatcaacttgaaaatatgctctatcctgatgatgctaaaaaagcttttaatactcaatataatgcagtcttaaatggtgatgtgaattattttgaaaaatacgactttggaaagaattcaaataataaagccgttcgagattattacaattctctaatattacaaagaaacattaacatgtataataaaataaaaagttatatatcctcaggcaaaaaatattttatagttgttggaaccggacacgtacttggacccgatggacttgtaaaaatgttaaagaaagatggttttacagtcacaagacttaaataa

SEQ ID NO: 15614 - DNA, 1371 bp, Clostridium acetobutylicum
atgtataaatgtgctttgatattagctgcaggtaaaggcaagaggatgaaatcagatttgccaaaggtacttcataaggtatgcgataaggaaatggtgaaccatgtaatagatactatgagaaaatcagaacttcaagatgtgaatgtggttataggtaagggagcagaattagtaagagaggccacatctaaaaaaaatataagctattctttacagagtgagcaattgggaacaggacatgcagttaaatgtgctgaggattttcttagaggcaaggatggagttgtagctatttttactggagatgcgcctcttataacagaggataccgtaaagaatttaattgattttcatgaaaaaggcggatataaggcaactattattacagctcttatagataatcctgaaggatatggaaggataataagaaatgtagacggttcggtaaaaaagatagtagagcataaggattgtacagaggatgagcttaaggttaaagagataaattcagcaatgtattgttttgatataaaaagcttacttgaaagcctagataaattaaataacaacaatgttcaaggcgaatactacctaactgatgttattggaattcttgaagaagagggcgctaaaataggtgctatatcagttccttttgaagaaattttaggcgttaattcaagacttcagctttgtcaggttggcaaggttatgcaaaaaagaataaatgaaaaacatatggaaaacggaagtacattaatagatcctgataacacttacataggtgctgacgttgagatagagagtgatacaataatatatccaggcaatgtccttcagggaaaaacagttataaaaacaggctgcgttttgtatcctaattcaagaatagaggacagtgtaatcggaaagaacgttacagttcaaagttctgtaatacttgaaagtaaggttggagaggatacaacagttggtccttttgcgtatataagaccagaaagtaatataggaaataaggttaggatcggagattttgttgagataaagaaatctactattggaaataatacaaaggtttctcatctaacatatatcggagatgctgaagttggtgaaggctgtaactttggatgtggtacagtagtagtaaattacgatggcaaggataaacataaaactgttataggaaataaatcctttataggatgcaacactaatttagtttcaccagtaacagtggaagataatacttatatagcagcaggttcaactataacaaataaggttccagagggatcacttgctattgcaagggcgaaacaagtagtaaaagaaggatgggttgataaaaaaggattactaaaataa

SEQ ID NO: 15615 - DNA, 831 bp, Clostridium acetobutylicum
atgaaggaatttaatacaagacaaatagttgaaaaatataattttagattttctaaaagattaggtcaaaactttttaactgataatactgtattggatgatatagttgaaaatgcagaaatacaaaaagatgattttattatagaaataggaccaggtgtaggaacacttacacgaagacttttagaaaaagccaaaaaggtttgtgctatagagcttgatgaaagtttaatacctataataactaacgagatgaaagaatatgataattttacactgatacataatgatgcgttaaaggttgattttaataacataataggtgaggagcaatctgtaaaattagttgctaatcttccttattatgtaactacacctataatatcaaagcttctcaatgaaggatataattttaaatctcttacaataatgattcaaaaagaagttggagatagaattgcagcaaagcctagtacaaaagattatggtgcactaacattacttgtccaatattattgtgatgttaaggttgtaagagttgttaaaccttcatgttttataccacagcctaaggtagattctcttgttataagattagataaacttgaaaagcctagagttcaggttaaggatgagaaattattttttaatgtaataagaagcgcttttaatatgagaagaaaaacattgtggaatgcaatgaaaggtctcaagctatccagtgaagatttagagaaggcatttgaggcagctggcattgattctaaaaggcgtggagaaacactttctatagaagagttcggaaaattgtcagacgaaatatacagataa

SEQ ID NO: 15616 - DNA, 921 bp, Clostridium acetobutylicum
atgatttctgcaagtgcagttaaagaattaagagaaagaactggagccggaatgatggcttgtaaaaaagctttaagtgaggctaatggagattcagaaaaagcagtagaaatactaagagaaaaaggattggcagctgctgcaaaaaaagcaggcagagtagcatcagaaggattggttgttgcttatgtaaatgaagatggaaaaagcggagcaattgctgaagtaaactgtgaaacagatttcgtttcagcaaatgaagatttcaaagctttagcagaaaacatcgttaaattagcagcaaaaagtaattcaaacacagtagaagaattattagaagaaaactatgtagatggaagcagtaaattaaaagatgttataactgctttaattgctaaattaggagaaaatattaatttaagaagatttactaagttttcaaatgaaaatggaacaatccaaagctatatacatggtgatggaagaattggagttcttgttaacttaaacgctgataagatttctgatgaagttcatactttagcaaaggatatttgtatgcaaattgctgcagcaaatccattatatttagatgaaacttctgttgaccaaacagcattagacaaagaaagagaaatatacaaagttcaagcattaaatgaaggcaaaccagaaaaaattgttgaaaaaatggttgaaggaagaataaagaaatacttgaaggaagtatgtttattagatcaagtatgggttagagattctgatttaacaatttcaaaattggtggctaaaaaatcaaaagaattaagtgctgctatttccatagctgatttcgtaaggttcgaaagaggagaaggaatagaaaagaaagaagaaaattttgctgaagaagtacaaaaacaaatgcagcagagcaaataa

SEQ ID NO: 15617 - DNA, 597 bp, Clostridium acetobutylicum
atgattattgtaataattacagttatggtttcttttttgtgtgggtcaataccaacaggatacttgattaccaaaaagcttagtggaattgatgtaagaactaagggcagtggaaatataggttctacaaatgttaaaagagttgcaggaactaaaatatcaatgattactcaagtaatggatattttaaaggggataattcctgttcttttatgtatgttaatagctagtaaaataaaattaccaatatcaacaagtatgtatctttctattattgtaatagcagtaattttgggacatgattacactccgtttctgggctttaatggaggtaagggtgtaaatacaacggttggtgcattttttttgcttgcgccagcagcagtattggctggagctgtagtttattttgtactgcgtttgttcacaaaaatagtatcaattaagtcaattgctgtaggcataacaatgccaatcgcatgcattgctctaagattaccaattgaaataacagtttgtgcaataatagcttgcggtttattgatacttagacataaagacaacctgataaggcttgtaaataatgaagaaaaatag

SEQ ID NO: 15618 - DNA, 2010 bp, Clostridium acetobutylicum
atgaacgaaaaagaatcaaatattttaagaatgcaggaacttatagaggaactaaataaatattcatatagctattatgtattggataatccaattgtagcagataaagaatatgataagagatatgatgaacttgtagaacttgaggaaaaaacgggtataacatatccttattcaccaacaaatagagttggtgatgtcattttaaaacaatttcaaaagtatacacataaaagtaggctttggagtcttgataaggcacaaagctttgaagaaatcatagattggcacaacaggaataaaaaggcagtggctgaatataatagtaaccatgaagataagcttccagagcttaaatatgttttaactaaaaaatttgacggacttactataaactgcacatatgatgagagcggtgttatgataaaagctgctacacgtggaactggagttataggtgaggacataactagtcaagcaaagactataaaatctataccacttaagataaaaaatggctctgtggttgaggtacatggagaagcaataatgactaaaactgcttttaatgagtataataaaaaagcagaagtacctcttaagaatttgagaaatggtgcagcaggagcacttagaaatctaaatgtaagagaaactgcaagaagaaatctatcggcttttttttacgatgttggatataatgaaggtaaagcctttaaatcctacatggaaatgatgaatttcataaaagagatgggatttccagttgatgaatatttaaaagagtgtaatactattgaagagataaataaagaaattcaatatgtaggagatataagaagtagtcttgattatgatatagatggagttgtaatagtaattgatgactatagaacaagagaatatcttggatataccgtaaaattcccaaagtgggcaatagcctataagtttgaggcagaagaagctacaacaaagcttttggatgttgaatggaacgttggaagaagtggaagagttagtccaacggcaattttagagcctgtagagctagcaggagtaattgtaaaaagagctacattaaataatatggatgacataggaagaaaaaaagttaagataggttcaagagtttttgtaagaagatcaaatgatgtaataccggaaattatgggagttacagaagagacagagggagaaacgaatgaaatagaagcaccaacaatatgcccatattgcggcagtgaaatagtaaaagaaggtgtacatttattttgtgaaaatactttgtcctgtaaacctcaaatggtaaaaagtatagttcattttgctagcagagaagctatgaatatagaaggctttagtgagaaaacagcagaacaattatttgagaaattaaacataaaaagtatatctgacttatatagaataactaaagaagaattaatgtcattggataagtttaaagataaaaaggctagtaatcttataaatgctatagagaaaagtaaaaaatgtgatcttgcgtcttttgtttactctctcggtataccaaatgtaggtaagaagacagctacagatttatgcaagcaatttaaaagctttgagaacataaaaaaagcttcctatgatgaacttattttagttcaagatataggctcaattgttgcagaaagtattgttgaattctttaaacaggaaaaaatagagaaaagtcttaatgaattatttgaacttggagtaactccattttatgaagaaagtgaagttgttgaaaatgcatttacaggcaaaaccgtagttgcaacaggaacgcttcaaaactacagtagaacagcaataaaggaaaagttagagagtcttggagctaatgtagcaggaagtgttagtaaaaaaactgattatgtgatagctggtgaaaatgctggttctaaatatgataaggcagttcaacttggagttaagatattaacagaagaggaatttgaacaattaataaataatatgtaa

SEQ ID NO: 15619 - DNA, 2826 bp, Clostridium acetobutylicum
atgcgaaataaaacaaagatgacaaattctaagagtttttcggaaaaatttgataagaaaatgaaaaagtctcgtctgattgaatcaggtgttatcctttttctgcttgtttgtgtggctggtcttacgtttttgctgaataggaatcttcataaacaagtacaaacagtacaaactacaaagccgattattgctctagttaatgaagatcagccccaaacgtttaatggcacaaattataactttggtgaaaccttcgtgaaccttgtgtcgaatgacaataagtataattggcaagtcctgtcacgctcggtagcaaacaaagcctatgctgatggttctgttgatgctgttatttatcttccacaaaatttcacgcacaatattttaacacttcaggcattaaatcctcaaaaagcggagctagattataaagtacttgcatctaagtcacagctgaacaataaactcttgcaagataagatcgtgaatgtgctttatgatttcaatacttccattgtcaagatgtattatgcttctgtggcaggaaatgtcgcaaatgcacaaacgaatatgggcaatgttgttaagagtcaaggcacgctcctctcatcacttaatgataatgtgtatggaccttttcagacaaccaacgagtcttatagttcagttgtttccattgcaaatggtttgaaatctgaaaatgatagttggattcaagaacaaaacagctttaccaattcagtcgttaatctgttgaacgaaagtagttcttcattcaacggaatgctaccaaatctaaccaattattttgatacccaaaggaagatcactgatattaaccttacaaatgccaatcagggtattactaatcaagcaaactcggataaaagctactattatgaccagtacacagcagcatataataaggcggtgcaagccgtgcagcagtttcataatacggatgcttctggcaatgaaacaggtgtctatgcaaaattaaaaaatcaaatttcgagttataacactttgattagtggggtacatgacaacattggtacacagattgatagtttgacaggcaaacaaacaacactattaaatcttgaaaaagatatgtatttacgattctacggacaagatattagtccaacaccagataaaactgattttactagtcttgaaacagcagataatgcaagaagtgcaatggctaaaatgattgcaacttcctttggcaaaagagataatatctcgggaacagcttatcctaaaacgataaacaatctcttgagtaatttgtcagtaaatgtgggggactatgatactctcttagctacactagtgaagaatggttctttgacgccacaacaaaaggatacctatgaagctaagttgggggttctaaaaaattatgctacagcatttggaatcaaaacagctactgcagattttagtgctgctccaacggtaaataatagtaatgagaattttacaaaacaaattacaattaccgtacccaaagctactgaatatactttaaaacttcaggcttcaaatggactttctaactcagggatttctatagttggaaaacctacggggacaggtgcaatagttaacccagataattctgtgactttggataatcgaacaacaagtataaccgacagtaaaggtaatgtcacgactgcaccgacaactagtccgatgacttacgttgttacatataaagtggatttaggacaagcagcaagtggaacggtaacagcgagcgttgataatggttcaggtggtacagattcgtctgttgaaaattttggtcttattcctgcaaatgcaatttctgaatatgcaggaggcagtcagtttggctatatctcgaccttactcaataatattgatactgcaagtagtctgattactttcctttatggagcaccaggggcaacttattctgatataaaaagctgtactaaggtttctgactttcaagaagcaagtcaacaatctattttcaagatgtatggtaatatggacgtcactcaaattatgagtcgattgagcgatgatgatgtgaagcaattcatgaattatggaaaagccaacattaaaaatgttacggatactctgacaacgttgaattcaaatattgcaagtattcaaaaagagaaagcaaccttgagcgataatttgccaagtaattactttagtcaagtgtcaagtgatttgcaggcttggtataatcaaacaatggatacgctgaatgcagaatacaaagcgtggacaacaaataatacaatattacttcaagaaaaaccttggaaggaatataaccaaaacgatcttgttctttgttatgataaagaaggtggggattcactttatagcactatttctgacatggtgaattcaactgcgaaacaagctgaagatacggcggcaagtgcacaaatcatcaagagtaatgcagctgagttcgatcaaatggtggatacggtcaccaagacacagaatgatgcaaagaaggtcattgataatacgaataatctgttaagtacagggaacgatgacttcaaaaatagtcaaaactactataaaaactttgcagctactttatctaacacaaggacagatggtgtaaaggcggataatatctttaatttctttgctaagccattgtccacaaaagatattaccccaaaattagctaatattactaaggactttgattggcgatgggttgttatcttcgtgataggactccttgttggtgccttaggtaagacttggatacgacataagccaaagtttgaagaaaaataa

SEQ ID NO: 15620 - DNA, 372 bp, Clostridium acetobutylicum
atggcgagaatagccggtattgacctaccaaaagaaaaaagagttgaaataggtctaacttatatatatggtataggactaacaagttcaagaaaaattataaaagctacaagtgttaatcctgaaactagagttaaggatttaactgaagaagaagttaatgcattaagagattacattaacaagaacttcaaaatcgaaggtgatttaagaagagaagtagctttaaatataaagagattagttgaaattggatgctacagaggaatcagacatagaagaggacttccagttagaggacaaaaaactaaaacaaatgcaagaacaagaaaaggtccaaagaaggcagttgcttctaagaagaaaaaatag

SEQ ID NO: 15621 - DNA, 3516 bp, Clostridium acetobutylicum
atgagacttgatgggcttatgcatcctctgaaaggtagtaataaatttcaagatgctatttataaaataaaaagtaatgaatttcctatggaattgtccggaatttctgaatcgggaaaaagttatttaataagtgggttgtatgaagaattagacaacccttttttggtgattacagacagtgactcggaagctaagaagatatatgaagatctattattttacacacaaagcgtatattatcttccaacaaaagaagttgtcttttataatatatatgctgtatctggagatttaaggtgggaaagattaaaggttataagaaaaatgatgtctagaggtaagaaaataatagtaacctctgttgaaaacttagcagcggtttatttgcctgtagagttatataaagaatatacctttaaactgaccttaggtgatacggttgaggcaaaagaacttcaaaaaaagttggttcaatgtggatacgagcatgttgaaagtgtagatgctaagggacaattttctattaggggaggtatagtggatatatattctcctatagatgatgttccttatagaattgaattttttggtgacgaaatagaatcaataagaagttttaatactgaatcacaaaggagtatagaaaaggtaaataagatagaagttttcccagcaaaagagataatacttactgatgaagcattgaataaaggatatgaggctattaaagatgaattgaatcagtcgcttgatagacttaagggcaataatgaagaaagctataataagcttaaagaaaccatggagtataatcttgaagccttaaaagaaagagctggatttgaaactatagatacttttattccatatttttatgataatacatctagtttttttgattatcttaagaactctatcatttttgtagacaattatgaaagatgtaaaggaaagatagatagtgtatattgtgaatttgagcaaaattatgaaaacttccttgaaagaggagatatccttccaaagcaaggtaatataatagtttctaaggaaaatatatatgaaatattaaaaacagaaaaaagaataaacttagaatctataggaagagcagctaataataactttaggactggaatagcatttgaagaaatcactctttcaagttatcagggacaaatggatctgctcattaatgatataaaggaattgaaagaggaaaagtatagaacggttatattatgtggaacaaaatctaagggacaaaggcttgttgagacgcttggtgataggggaatcgagagtgtgtataaagacagcattcttaatgtagattatggggaggttgtcatatcacctggaagtcagcttagaggtttcaggtatccggagataaggctatgtgtaatttcggataaggagatatttggaacagctaaaaagaagaaagagaaaagaaaaaataaaaaaggtgtaggaaagattaaaagctttacagagcttaaacctggcgactatattgtacatgttaatcatggtattggtgtattcaaaggcataaagcagcttgaagttcaagggcataagaaagattatctagagcttagctatgcagttgatgataaattgtatgtaccagtagaacaacttgatttagtacaaaagtatataggaagcgaaggtaaggtacctaaggtaaataagcttggaagtagtgaatggactaaggctaaaaataaggttaggaagtccataaatgagatagctgaggaacttgtaaaattatatgcagtaaggacaactgttaatggttttaaatattcaaaggatactgtttggcaaaagcagtttgaagaagaattcccatataatgaaacacaagatcaacttcttgcaatagatgaaataaagaatgatatggaaagtggaaaagtcatggataggcttatatgtggagacgttggatacggtaaaacagaagtcgccataagagctgcctttaaaacagttatggatgggaaacaagtggcttttcttgtaccaacaacaatacttgcagaacagcattataataattttaaaaaacgatttaaggattttcctgtcgaggtagacatggtaagtaggtttagaagtcaagctcaacagaaggcaacttttaaagccttaaaagaaggaaacattgatataataataggaactcatagaattttaaataaagaaattacttttaaggatttgggacttcttataatagacgaggagcaaagatttggagtttctcataaggaaaagcttaagaaatttaagaagaatatagatgttttaactttatcagcaactcctataccaagaactcttcatatgtcacttacaggagttagagatataagcgtaattgaaacgcctccagaagaaagatatccggtacaaacttatgtagtagaatacaatgatcaattaataagagatgcgataatgagggaaattggaagagatggtcaagtattctttgtgtacaataaggtggagtcaataaaggaaatggctgctaatttagggaagcttataccggaagctagaattgcaatagctcatgggcagatgtctgaaagagaacttgaaaaagtaatgattgattttatggaaggaaattatgatatattactttgtacaactataatagagactggaattgatatacaaaatgtaaacacccttataatttataatgctgataagatggggctttctcaactttaccagcttagaggaagagttggtagaacaaataggatggcatatgcttattttacttacaagaaagataaaattttaacagaggttgcagagaagaggcttaaagcaataaaagagtttactcaactgggatccggattcaaaattgcaatgagagatctcgaaataagaggcgctggaaatataatgggatctgcacaacatggacatatggctactataggatatgatttatactgtagaatgttagaagatactataaaggaaataaaaggtgaaattcaaaatgaacctgttgaaaccactgtggatttaaaagtagatgcgtatataccaagtttatatattgaagatgaaactttgaaaatatcaatatataagaagatagcagcaatagattcctacgaagaaatgatggatgtaaaagaagagcttgaagatagattttcttcaataccacagtcagttaataatcttatgactatagcttatttaagaagtataggtagacaattaggtattctggaaataaaggataaaatgactcagcttgaaattaaatttgagagcaacgacagagttaataaaaaattaataaatggactgcttaagaattacagtaagtctattttgtttaaaatgggcgataatccagtgattttgtataatttaaaagatgtaaagagggaagatatgttagaaaatttacaaaaattcttaaaatatatgaaatctctagttgaaacaaattaa

SEQ ID NO: 15622 - DNA, 840 bp, Clostridium acetobutylicum
atgaaaaagtttaaagagtatttatatataacattaggttttctaatagtagccgcttcagttaagttcttttttgaaccaaataatatagctggaggtggggtaacgggatttgcaataattataaatgaattttttaaaaccctttcagtaggtttaattacatttgtgttaaatgcagtgttatttgcagtagcaatgatatttatagatggaaactttggaattaaaaccttgtattccagttttggactttcagtttcattatggattatggataaatacatagtatgtccaccgttaactaaaaatttactactggcgactttgtttggaactctaatatcaggtataggaatgggaatttgttttaatcaaaatgcgtccacaggtggaacggatatacttgctaaaatgatgaataagttttttcatatggatatagggaaagcacttcttttggtggattttgttataacactttttgcaggatttacacttggggcagatcttggaatgtattctttactttcagttataataggaggctttgttatagataatgttatagaaggattgaatatatgcaagaagataatggttataagtgataaaaatgacgcaataagtgaatttataataaaagaactagaaagaggatgtacaattatagatggaaaaggtggttatactggcaaggatacttacatattatatactgtactcaatagaaaagaatttataaggcttagaatatttataaaagaaactgatccaaatgcttttataacaataagtgatgcaaaggaagttcttggagaaggttttaaagaaatttag

SEQ ID NO: 15623 - DNA, 4524 bp, Clostridium acetobutylicum
atgacaagaaatattggatatcctgaaaagcaggggctatatgatccagcttttgaaaaggataattgtggaattggctttattaccagcataaaaggtgaaaaaagtcatgacatagtaaaaaaaggtatagaaattctcgttaacttaacgcatagaggggctgttggcgcagatacaaaaactggtgatggagcaggaataatgctgcaaattccagatgaatttttcagaattaactgtgataatcttggtattgaacttcctgaaagtggtaaatatgctgttggaatgatttttctgcctaaagaaacagcattatcatatcaatgtgaaggtatacttgaaagagcagtagaagaacaggggcagaaggttttaggatggagagttgttcctagagataacaggtctattggggaaacagcaaagggcagtgagcctgttataaagcagatatttataggaagcaattgtgaaaaccaaactgattttgaaagaaatctctatataataagaaaaagagctgaaagtgaagttaaaagactagtagaaagaggatcggagtacttttatatatgcagtctttcaagtagaactatagtgtacaagggacttttgcttgcagatcaaataaaaagcttttatatggatttaaacgatataaatttcaagagtgctattgctttggttcatcaaagatatagtactaatacttttcctacttgggatttagctcaaccatttagattcttagctcataatggagagataaatactataagagggaatagaaattggatgaatgcacgtgaaggtgttttaaaatctgatgtttttggaaagaaaatatctgatttatttcctatagtaaacccaaagggaagcgattcaacttctttggataatacatttgaacttttagttgctgacggaaggccactagcacaggcacttatgatgcttattccagaggcttgggaaaacaatgaaagcatggagacatggaaaagggcattttatgagtatcagggaactttaatagagccttgggatggtccagcagcagttgcatttacagatggtcagcaggttggagctgttctagatagaaatggacttagaccagcaaggtatcttataactaaaaacaatatagctgttttggcttcagaagctggtgttttaaaatttgagcctgaagaaatagcttataaagggagacttaaacctggaaagatgttccttatagatacaaaagaaggaagaataattgatgatgaagaaataaaaaaatcaatttgtttagataaagagtatgaaaaaatagtagaaaagaataaatttactttagatgattttgaagcaactgttggagaagaagtagtaaatgatgaagttttgaaagaaaaacagcaggcttttgggtatactcttgaagacttaagggtaatacttggccctatggcagctactggtaaagaacctttgggatcaatgggaaatgacgctcctttggccgttctttcaaataaatcacaactgctttttgcatactttaagcagctgtttgctcaagtaactaatcctcctatagaccctatacgagaggaaatggttacatctcttgtgaattatataggttctcaaggaaacatattgaataaagatactgaagctgttccttttatagaaataaattctcctattttgacagatcttgaaatggagaagattaagaatcttagaaataaggatttcaagacaactacaatacctattacatttaaatatgatacaggaattgacggatttaaagaagcacttgagaagatttgtgaaagagcttctaagagaatagaagagggatttaatgtaattgttctaagtgataagcacatagattcctatgaggcagctatacctagtttacttgcattaagtgctgttcagcatcatttaataaaggaaaaaactcgtacaaaggtatctattgtagttgagactggagaagcaagagaaactatgcattttgcactgctcgttggctacggtgcaacagcagtaaatccttacattgcttttgagtcaattaggcaaattgtaagggaaaaggatattgaagtagaaagtcaagaaaaagctatagaaaattatatttatgctataaatcatggaatattaaagatattatctaaaatgggaatatccacacttagaagctatcatggtgctgaaatttttgaagcagtaggacttagcagtaaacttgtaagtgaatactttgaaggaacaccatctagaattgaaggaataggcatagatgaggtagcaaaagaagtattaaatagatataaaaatgcttttaataaaataagaaaaccagtatctgttttaagcgttggaggacagtattcttggagaaaaaatggtgaatatcatttgttcaatccagatactatatatagacttcaggtttcagctagaactggaaactataaaatgtttaaagagtattctcatattataaacgatcaggacaagaatctttgcactataagaggcttgtttgaattcaaagacttaaaacctataccacttgaagaggtggagcctgtaaatgaaatattaaaaagattttcatcaggagctatgtcctttggttcaatcagcaaggaagctcatgagactatagctatagctatgaatagaataggcggaaagagcaacagtggtgaaggcggagaggataatgaaagatacaaggctgatgctaacggcgatttaagaagaagtgcaataaagcagatagcttctgctagatttggagtaacagcagagtatttagtaaatgctgatgagcttcaaataaaaatggctcagggagcaaagcctggtgaaggaggacaactcccaggaagaaaggtagatgtcaatatagctaaggtaagacattctacaccaggaatagaccttatttctccaccaccgcatcatgatatatactctattgaggatttagctcaacttatatttgatttaaaatgtgtgaacccttcatcaagaataagcgtaaagcttgtttctgaagttggagttggaactgtagcagcgggtgttgctaaggcacatgcagattcaatacttataagtggtcatgatggaggtacaggtgcatcacctatatcatcaataaaacatgctggaattccatgggagcttggattatcagaagcacagcaggtactgcttttaaataatttaagaagcagagtagttcttcaaacagatggacaattaaaaacaggtagagatgttgtaatagcagctcttcttggagcagaggaatttgtttttgcatctaccatacttgtatccttaggatgtgtaatgcttagaaactgccatcttaatacttgtgaaatgggaatagcaactcaagaccctgaacttagaaaaagatttaaaggaaaacctgaatatgttataaacttccttacatttatagcacaggaagtaagagagtacatggcacagcttggctttagaactataaatgaaatggttggaagagttgataaaatacaggcaaagaatgctgtaagtcactggaaggctaaagggattgacctttctaaaatattatacaagcctgacatgccaaagagaataaaaccatattgtacagtagctcaagagcatggtttagatagaataatggactacaagttaattcaaatagcaaaagatgctttgaactctaagaaaagtgtggttggaaactttgaaattaaaaatgtagatagatcagtgggagctatgctgagtggtaaaattgcaaagatatacggagaaaatggacttccagatgatactataagatttaatttctttggttcagcaggtcaaagctttggagcttttggaatgaagggtatgacaattgtgcttgaaggagaagccaatgattatgttggaaagggcttatcaggagccaaaatagtaataaaaactcctgaaagagcaagttataagcaggaagaaaatgttatagctggaaacaccattttatacggagcaaccagtggaaaactattcataaatggaatggttggagaacgttttgctgtaagaaatagtggagcatatgctgttgctgaaggtacaggagaccactgctgtgaatatatgactggtggaattgctgtggtacttggagagacaggaagaaactttggagctggtatgagtggaggtatggcatttattcttgatgaaaatgacacttttaatgataaatgcaaagctgaaactcttgaaattactagtgactacgatgaggaagatgaaaaagttcttcgtggcttaattgaggagcactacaattacactaatagtgataaagctaaagttatattagaaaattggggcgaatataagacaaaaataaaaaaggttattccaacagcatataaattgatacttgaaaaatcaaaacaaaaagctgctgcagttaatatgtaa

SEQ ID NO: 15624 - DNA, 2430 bp, Clostridium acetobutylicum
atgtctgataatactaagactaacagtagaaataaatctgttaaaagaacaaaaaaagtgaagaagaaaaagaagtttggcttctttaaaaaattgtttactatattattttgcctttttattttattatctgttgcagcttctggagtaatatttgcaatagtaaaaacatctccaaatttagatataaatggtacaatattaaatttagatcagccttcacaattatatgatgataacaataacccaatggatacagttgtaacaaaccaaagacgttatgttgtcagtataaaggatatgcctaaaaatttatcaaacgcttttgtaagcattgaggatgaacgtttttacaaacacagtggaatagatactaaaagaatacttggtgcattttacaacgacataaaatcaaaaattcacaaacaaaatagtatccaaggtgcatcaaccataacgcaacagctcataaaaaatagaatgtttttaaacgattcattagaaaatagaatttcatttaaaagaaaaatacaggaagcttatttatccataaagcttgaacaatcactcagcaaatcccagatactggaagcgtatatgaatacaatttttcttggtgttcaagctaacggtgtagaggcagcttcacgacaatattttaataaaagtgctaaggatttgaatttaattgaatgtgcctttattgcaggccttgcacaaagtccatcagcatattatcctttttcgcaaaatgtagctaaaaatccaaatatatatttagatagaacaaagctagttttgtataaaatgagacaaaataactatatagatttttcaacttatcaaaatgctataaatgaccttaacaataataaattagctttttctcagcaaaagatttctaacaagtatacctatgagtggttttctatacctgttgtaaaccaagtaaagcaagatttaaaatctcaatatcattatactgatgaagaaatagattcacttcttagagatggtggactaaaaatatatactactatgaacacatcaatggaatcaaatgtacaaaacatattagacaacaacagcacattaaaaagctatagctatgcagataaaaacggtattattcaacctgaagctgctgcaactttatttgattatcacacaggagaaataaaggctattgtaggtggaagaggccaacaaccaccttcatcgtataatagagcggattcaagtaactatttacgttctgtaggttctagtataaaacctcttacagtttatgcaccagcaatagatactaaacttgcgacagaagatactatagttaatgattccccactttcatcggatgttgcagaaaagtatgggtcaaatggggttccatataatcctcataacgatgatggtggttattcaggtccagtaaatttaaagacagcattaaccaagtcaataaatcttgtagcaataaagttagaggataaattaggactttcaacaggagcagcttatgctcaaaaatttggtcttactcttaacaatgatgataagagtagtattgctgcattatctcttggtgaaattagaggttcaaatacaactactatggctgccgcttacggtgtatttggaaataacggattatattcagaacctaggctatatagaaaggtagtagataaaactggtaaggtacttctggagaacaactattcaactagaaaggttatttcaccacaatctgcttacataatgtatgatttattaaaaggtcctgtaagtgcaggaggtactggtagttatgctagatttggtgacatgccggtcgctggtaaaacaggtactgcatctgattctaaaaatttgtggttttgcggtttgactccatattattctgctgcagtatgggtcggaaatgaccagccaactaaactcagtttaggaagtaatgatgttgctgaaatatggggcgaaattatgaaaatggcaaatgtaaatttaactgttaaagatatcgatgctcctggtggggtaacaaaaattggagattcatattatatagatggtactagtccatctaatttatctggggatgattcttcatcttcaactgctagtaaacctcaaacaccaactactaacactcaaaataatacgaacaataatgttgctaatccaaatagtaacaatacaactaatagtaataccagtaactcaacagagacaccagcacaaaatactcagcaacctactcctacaccaacaccttctaccaataatacgcctggtaatacaaacactaataccaatactaacaataacacgaatacaaatactaatactaataacaataacacaaataactcaagttctggaaataacaatccaccaaataataacacaacaaatactaataaataa

SEQ ID NO: 15625 - DNA, 1023 bp, Clostridium acetobutylicum
atgaataataaggatttgtggataaaagaagaaattatatggagtgagcataaatgtatacgttttgctgcaggtggatatgaagcactaataatacctgatgtaggtggaaatgttgttgaattaaaagatactaataagggtgtaactattcttagaacaccaaaaaaagatttgaagtttgaagattttaaaaatagaccacaggtttatggtcttccagtattatttcctccaaacagaatagatgatggtacttttaaactaggagataaaacatataagtttcctataaatgaagctaaaaataataattatatacatggatttataaagaatagcaaatggacagtacataaaaagaaaatagatcaggataaagcattagtagaggtcgtttttgattttacaaaggaaaatgaagcttataaatatttttctcatgaatttcaatttaaattaagttatgagctttcgagtaaaggattaaaacaaactacgagcgttgtaaatttaagcagcgaagaaatgccattatcagttggatatcatagtgcatttaatgttcctttcatagaaggaagtgaagacagtaactgtagggttaaaatttcaatcgataagttctggaaacaggattcaagaaatcttcctacaggagaaagttttgcacctacaggagaacaaaaagaatatttagaaaatggagtagccgtagcttcacatcctatagaatctttattttctttaaaggatattgatgttaatggtaagacttttagaggagcatgtatagaagatgcttcaaagaatacaagagttgtttatgaaatgagcagtgaatataaataccttgttatatggaatgatatgggtgataaaaagtatgcttgtatagaacctcaaacaagtattataaattcacctaatgtaaaattagatagaagtgtatctggttttaaaactcttaagcctaatgaaagctggagtggagtttgtaaattatatatagagaatatgtaa

SEQ ID NO: 15626 - DNA, 1011 bp, Clostridium acetobutylicum
ttgattatagagaaaaaaagagaaatgaaacatagactagtactacttattataatacttcttacagttttaaccatagtcattagtttaggtataggtgactatgctctttcatataacaatttgattcctactttattaggacaaggctcatttaaagatgagtttgttttatttgatttgagatttccacgaatggcaataacaatattatccggtatggctcttgccctatctggcgcagtccttcagaatataacaagaaatgatttggccgatcccggtataattggaataaactctggagcaggtgttgctgtaacagtattttttatgtatatgccaattgattcaaaaactttttcttatttagttccaataatagcctttataggcgcactaatcactgcagttattatatatctgcttgcctacaaaaaaaatgagggtgttcagccattgaggctagttctactaggtgtaggtctttcaatggcgctatctggacttatgatagttattatgtctcttgcagatagatcaaaagtagattttatatctaagtggttagctggaaatgtctggggattggattgggcttttgtcttggctatatttccatgtatagttatattagtgccatatatattgtacaaatctaataccttaaatattattaaattaagtagagatgtatctataggcgtaggcatgtcaattgaaaaagaaagatttaaactacttatggcttcagttgcattatcttcttttgccgtttcggttactggaaacatatcatttataggactcatggctccacatatagcaaaggcattagttggacatagaaatcagatgtttataccaatagcaattttaatgggcggatggcttttattattagcagatactattggacagcacttacttcagtctggaaatataccagcaggaatagtagtttcggtaataggtgctccttattttatatatttacttttaaagaaataa

SEQ ID NO: 15627 - DNA, 1281 bp, Clostridium acetobutylicum
atgctagaatttactaaaagatcacttatgaataagtataatataaatgaaagagtattagagttatatgaaagagcattaaatgatgttgaaaaggaatttaagtactatgatgaaattagagagtataatcagttaaaggtgcttaaggcttttcaagaagaaagaataagtgaatctcattttactaattcaagtggctacggatataatgatataggaagagattcacttgatagggtatatgcaaatatatttaatacagaaagtgcatttgtaaggccacatttcgttaatggaacacatgcaataggtgcagccttatttggaaatttacgtcccaatgatactatgatgtctatttgcgggatgccttatgatactcttcatgacataattggaatggatgatagtaaaaaagtaggatcgcttagagaatatggtgttaaatacaaaatggttgatttaaaagatggtaaggttgatataaatactgttaaagaagaacttaaaaaggatgacagtataaagttaattcatattcagcgttctacaggatacggatggagaaagtctctaagaatagctgaaatcgctgaaataattaaatcaataagagaagttaatgaaaatgtaatagtatttgttgataactgttacggtgagtttgttgaagaaaaagaacctacagatgttggtgctgatataattgcaggttcattaattaaaaatatcggaggcggaatagccacaacagggggctacatagcaggaaaggaagagtatgtaactcaagctacctttagggttacagttcctggaataggaggagagtgcggctctactttcggagtaatgagaagtttatatgaaggactttttatggctccacatgttacaattgaggcagttaagggtgcggttttttgcgctagaataatggagctcgcaggttttgatgttcttcctaaatataatgataaaaggacagatattatacaggctattaaattcaatgacgagaagaagcttatcgatttcataaaaggaattcaaacagcatctccagtagattcttttgtgcaatgtgaagcttgggatatgccaggctacgaagataaggttataatggcagctggtacatttgtacaaggagcctctatagaattgtctgcagatgcacctataagagaaccgtacataggatatcttcaaggcggtcttacttttgatcatgctaaacttggagtacttatagctctttctaaattaataatgtaa

SEQ ID NO: 15628 - DNA, 1047 bp, Clostridium acetobutylicum
atgaaaacacataaactattatccatagtcctagcaagtgttcttttaacctcttcctttactggatgcacttttgctagcaataaaaaaaagataacaccggatactgcaaatgctcaaaatgcttctactagtgttgaatctcctattacaaaagcttcaaagaaggttcttccctcagttgttggagttactacaacctatattgagagagataatacaaaaaaagaaggtgtaggctctggaatgataatcgacagcagtggctacattctaacaaataatcacgtagccggaatgactagcaaagatttaaaagtttcactttacgatggaagttctattggagcaaaaccattatgggctaatgaaagcttagatttatctattataaaaatagataaaaacaatcttcaagccgtaacccttggtgattcctctaaagttgatataggagaaactgcaatagccataggtaatccacttggattaaactttcaaagaactgttacctctggaatagtaagtgcagttaatagaactgttgaagcaggcgaaggagttttcatggaagatttaattcaaacagacgcttctataaatcccggcaacagcggtggacctttaatagatgcaaatggaaatgtcataggtgtaaactcggcgaaaataactagtgctgaaggtataggctttgctgtacctataaacatagttaaacctgtacttaaaagtttaaagacaactggtcaatttaaaactcctgtaattggaattataggacttgataaatctatgaatggctaccttaatttaaattttgaaaaaggaatctatgtttataatatatctcctaatagcggagctgctgctgctggaataaataaaggcgatatcattctttctgtaaatggaaaaaatattaacacaatgaacgaattaagagagtctatatataccattggtgccaataacactgtaagcttaaagcttaaaaccgcttctggcgaaaaaacagttaatgtaaaaatacaaagctcaacttaa

SEQ ID NO: 15629 - DNA, 1041 bp, Clostridium acetobutylicum
ataaaaaataatgtacaaaaaggatgtgatataatggcggctactataagggatgttgcaaaacttgcaaatgtttcgccttcaacggtatctagggttctaaatgacagtaataaaataagttgtgaaaccaaggagagagtgataaaggctataaaaaaattggactatcatgccaatgccatagcaagaagtttggcaaataactcaacaaaaattcttgggcttatagtaccaaatgaggctaagaacctatttagaaatccgttctttataaaagcaatgagagggataagtttatgtgcacatgaaaacgagtactatataatgtatgatttcggaagcagtgaaaaggaagaggtctctcttataaaaaaatatgttcagagtaagcttgttgatggtattatacttttgacagtaagaaaaaatgataagtgtatagactttttaaagcggcttaagtatccatttgttgttattggaagacctgaagaatcaaaaggagttatgtgggttgataatgacaattttaaggctatgtatgatcttgttgatggtttaattaaaagaggtgctgaatctatagcttttattggtgccgctaaggaaatgaacatgtcaagggatagacttgatggatataaaagagcattgcttgcccatggaagagaagtagatgaggaaattatagttgagcaaaagagctttacagaagaagaaggttatacggctatgaagaagatattagaggtcaaaactccatctttggtagtaactacagatgatttattagcttttggtgttctaaaacttctaagggagataggtgaagaaagtatatcagttgtaggatttaacaatattccgttaggtgaatatcaaaaccctccacttgcatctgttgatattaatgcagagaagcttggttaccatgctgctaagctgcttatcgatagtgtaaataaagaaattgaaaaaaatcattttataatagatacttttcttaaagaaagagaatccataaaattatcaaaataa

SEQ ID NO: 15630 - DNA, 633 bp, Clostridium acetobutylicum
atgactattccaaatttaaataaaatatatccaagaagtaatgattaccaaactgtatatcttaaaaatgttattacaagaaaaaatatagaagttggagattatacaatctataatgatttttataatgacgcaagagattttgaaaaaaataatgtactatatcagtatcctataaatggtgataagttaataattggaaagttttgttcaattgcatgcaaagcaaagtttcttatgaacagctcaaatcacagtatgaaatcactatctacctatacattcccgatattttatgaagaatgggatttagacgttaaaagaataacggaggcatgggataataagggggatattgtaataggaaatgatgtatggataggttatgatgctgtaattatgtcaggagtaaaaattggtgatggtgcgattattggagcaagagcagtagttactaaagatgttccgccttatactgttgctgcaggtgtaccagcaagggttataaagaaaagatttgatgacgacgtgatttcaaagcttttaaaaattaagtggtggaacttgccgtacgaaaagattagagaaaatattcaatattttaaatccggaaacattgataaattaatttaa

SEQ ID NO: 15631 - DNA, 642 bp, Clostridium acetobutylicum
ttgtttaccggtattatagaggaaataggagaaattaaaactataaagaaatatgataattcaataaggattgctataaaagcttcaaaggtaatggaaaatatcaagcttggagatagcatagcagtaaacggagtatgccttacaattgtatcttgtgaaaatggagaatttgatgttatgccagaaacatatagggtaactaatttaaaaaaattgatttcaggaagtaaagttaatttagaaagagctttggcattaggagatagatttggtggacatatagtaacaggacatatagatgggttgggaactatagagagtataaaaaaagatgcgatagcaattgaatataaaataaagactaatagagaaattacaagcaatcttgtttataaaggttctgtagctatagatggagttagtttaactttaggagaagtacaagaagattattttaaattttatcttattcctcatacccaggaaaaaacaactttaacacaaaggagtaaaggttatagtgtaaacatagagtgtgatgtattatcaaaaaatattcgaaattttgtgaatatccagaatagtacaaaaggttcgtgtataactgaaggtttattaaaggaaaatggatttatgtaa

SEQ ID NO: 15632 - DNA, 558 bp, Clostridium acetobutylicum
atgattaaggaagtaattgttgttgaaggaagagatgatataactgctgtaaaaagggctgtagatgcagaaatgattgcggtaggtggttttggtataaattctaaaattataagtaaaataaaagaagcgcagaagcgaaggggagttattgttttaaccgatccagattttgctggagagaaaattagaagtataataagtaaaagggttaaaggtataaaacatgcgcgcatatctcaaagtgaaggtacaaagaacggagatataggagttgaaaatgcttctccggaatctataatacgagcacttaataatgctaaatgtgaaactcagaaaaagacatatgagtttaccattgaagatatgttattctttaaattagtcggaaattcggaagctaaaaaaagaagggatttagttggaaatgagcttggaataggttattcaaatggtgcacaatttctatctagattaaataactttggcatatcaaaagaggaacttataaatgccgttaatacagttaataggagatattatgatgaaggaatttaa

SEQ ID NO: 15633 - DNA, 975 bp, Clostridium acetobutylicum
atgtttgataatgatatatccatgagtttagtaagagtaacagaagcagcagcactacaatcttcaaagtatatgggaagaggagataaaattggagctgatcaagcagcagtagatggaatggagaaggcatttagttttatgccagtaagaggccaggttgtaataggagagggagaacttgatgaagctcctatgctttatataggtcaaaagcttggtatgggaaaagactatatgcctgaaatggatatagcagtagatcctttagatggaacgattttaatttctaagggactacctaatgcaatagcagtaatagcaatgggaccaaaaggaagtttacttcatgccccagatatgtatatgaagaaaattgttgtgggacctggagcaaaaggtgctatagatataaataaatctcctgaagagaatattttaaatgtagcaaaggcattaaacaaggacatatctgaattaacagttatagttcaagaaagagaaagacatgactacatagtaaaagcagctatagaagttggagcaagagttaagctatttggtgagggcgatgttgcagctgcacttgcttgtggttttgaagatactggaatagacatacttatgggaattggaggagctccagaaggagttatagccgcagcagctatcaagtgcatgggcggagaaatgcaggctcagcttatacctcatactcaggaagaaatagatagatgtcacaaaatgggaatagatgatgtaaataaaattttcatgatagatgatttagttaaaagtgataatgtgttttttgcagctacagcaataacagaatgtgatcttcttaagggcatagtattttctaaaaatgaacgtgcaaaaacccattccatattaatgagatctaaaactggtacaataagatttgttgaagctattcatgacttgaataaaagtaaattagtggtagaataa

SEQ ID NO: 15634 - DNA, 2610 bp, Clostridium acetobutylicum
atgagcatatctcctatgatgcaacagtatttatctattaaggaaaatcataaagattgtattttgttctttagggtaggcgatttttatgagatgttttttgaggatgcagaagtcgcatctagagaactggaattagttcttacaggtaaggattgtggacttgaaaagagggctcctatgtgcggagttcctcatcatgcatatgctatttacgctagcaaacttgtttcaaaaggatataaggttgcagtagcggaacagctagaagatccttctttggcaaaaggaattgtaaaacgagatgttataaaggtacttacacctggaacatatacagattcctcttttcttgaggatacaaagaataactatataatgagcttgtttatacatgacaaagtttcagctatgtgttttgctgatatatcaaccggagaatttaacttaacagagacagaattagatttcgaaatcatactgaatgaaatatcaaaattttcaccaaaagaattggttcttcaggagaatttagatgataaactagtagataaaataagagaaagatttgatgttgtttataacagatttagtaacgaatattttaaagagcatagaaatgaaaatttaaaagctcaattttctaattatgccgaagttaatatgacagaaggattaaaaagttgtgctaatggtcttataaaatatataatagatactcaaaagactgcattaactcatatagatgaacttcaaaaatatgaaatagtggactttttaagtatagatataaattcaagaagaaatttagagcttacggagacgcttaaagataagagcaagaagggatctttgctttgggtccttgataaaacaagtacggctatgggtggacgacaaattagaaaatggatagaaagacctttgatagatgatgaaaaaataaatttaagacttgatgctgttgaagaaatgttaactaatgtatcatataatgaagatttaaaggaattgttaaaacaggtatatgatatagaaagattggcaggaaaaatatcaagtaaaagcgttaatgcaaaagaaatgatatctttaagaggttctattgaaaaattgccagctataaaaaagcttattaaaaactttaattcagagcttctagttaatatggaaaatgcacttgatgatttaggtgatatttataaattgttatatgaatcgataaatgacaacccctccttatctataaaagaaggaaatataataaaagaaggatataataaggatatagatgaattaagacttgctaaatctcatggaaagcagtggatagcttcacttgaaaacactgaaagagaggttacgggaataaaatctcttaaagtaagttacaataaagtatttggatattatatagagattactaaatctaatttgaatttggttccggaaggcagatacataagaaagcaaacacttactaatagtgaaaggtatataacgccagagcttaaggaaatggaagaaaagattcttggagctgaagagaagctagtccttttagaatataatgttttttgtgaaataagagaaagaatagaaaaagaaatagatagaataaagggaagcgctaaaattctatcagagcttgattgtatctgctcttttgctgatgtagctagggaaaataattattgtaaacctgtaataaaaagggatggaacattagttataaaggaaggaagacatcctgttgtagaaaaagttatagctagtggaaattttgtagctaatgatactgtgataaataattctgataatgtaatgatgcttataacaggtcctaatatggctggaaagtcaacctatatgcgccaagttggccttatagttctcatggctcaaatagggtgctttgtaccggcaagtgcagctgaaatatctatatgtgataagatttttacaagaataggtgcatcagatgatttgaatgcaggtaaaagtacatttatggttgaaatgtgggaagtatctcacatacttaaaaatgcaactaaaaatagcttaatacttttagatgaagtagggcgaggaacaagtacttatgatggtcttagtatagcttggtcagttatagagtacatatgtaaaagtgaaaatttaaaatgtaagacactctttgcaacccattatcatgaacttactaagcttgaaggagaaatagaaggacttaagaattattctattgctgtaaaaaaggtgaatgatgatataatcttcttaaggaaaataatttcaaaaggtgcagatgaatcttatggtatagaagttgctaaaatagcaggtcttcctgaagaagtcttagtgcgtgcaagggaaatacttaaggatttagaagaagctaagcctaagacagcagaaaatactgaagacaaaaaaacaaatatagttaaagaagaaccaaaaaaagattcatatcagattgattttaattaccttgaaagagaatctattttaaaggaacttaaagatactgagataatggatatgaatccgatagaatgtatgaataaactgtatgaatttataaagcgtgccaaaaaactttaa

SEQ ID NO: 15635 - DNA, 786 bp, Clostridium acetobutylicum
ttggatacagtaataaaaagtaaggaaaactctattataaaagaagtaaagaagttgaatgaaaaaaagcatagagatttaaagaaaagttttattgtagagggcttaaggtttgtgagagaagctcttgaatctgattttaaaatacaatatttgtttgtttctgagaaaaactacgataaatttattttaaaagagcttaaagagctaataaaaaaggaatttcaggtgattaaggttactgaaagcatactgaaagatatatgtaatacacaaacacctcaaggtatagtggcagtagtgcaatataaggaagtagcttggaaattaactaaaggattttatatgcttgtagataaggttcaagatcctgggaatatgggaacaataataagaactgcaaatgcagcaggagctttaggagttataattacaaagggaacagttgatatttataacaacaaaacacttagggctaccatgggatctatatttaaaatacccataatatttgaggatgataatttttcaaagataaaggaacttaagaaaaacggatttaagattattgcaagctcacttgatacagaacataatttttatgatgtttcacttaatgaaaaacttattattgcagttggaaatgaaggaaatggaataagtgataaaatagtagatataagtgacactaaggttaaaatacctatgccaggaaacgtggaatcccttaatgttggagtggcggctgctattatgatgtttgaatatgttaggaaaatgatgtag

SEQ ID NO: 15636 - DNA, 1023 bp, Clostridium acetobutylicum
atggaaaaattacttgaaataaagaatttaaatacctcattttttactcatcttggtgaagtaaagtctgtaagaggaatttcctttgaattaaataaaggggaagctctcggcattgttggagaatcgggtagtggaaaaagtgtaacgatgatgtcagttatggggcttcttcaggaaaatggaaaaataatagatggtgaaattatattcaacggagtagaccttgtaaaagcttcagagaaagaaatggagaagataagaggaaataaaatgggaatgatattccaagatcctatgacttctttgaatccagttctaactgtaggtgagcagttaacagaaggaataaaaaagcatcttaaaatgagttcagcagaggcaaataagcatgctgtagaaatgcttaaattagttggtataccaagtccagaaaaaaggatgaagcaatatccccatgaattttcaggtggtatgagacaaagggttatgattgctatggcaattgcgtgtagaccagaattattaattgctgacgaacctacaacagcacttgacgtaacaatacaggcgcagatacttgagcttatgaaaaacttaaaagataaaatgaatacatcaataatacttataactcatgatttgggcgttgttgctaatctgtgtactaagataaatgttatgtatggtggaacaatcatagaaaaaggtaatgcaagagagattttttataatcctaaacatccatatacctggggacttttgaagagtattccagatcctacaaaggatagtaaagaaaagcttgttccaatagacggatatccaccagatcttttaaatccaccaaagggatgcccttttgccgcaagatgtccttatacaatggaaatatgcatggaaaaatctgctcctgcctttaaaataggtgaagatcacgaagcagcatgctggctcaatcatccagatgcaccaaaggttaaggaagaagaaggaaggagtaaagacgatgccacaagataa

SEQ ID NO: 15637 - DNA, 1881 bp, Clostridium acetobutylicum
atgataaaatatttttccggtgattatgatgtaattgtgattggaggaggtcatgctggatgtgaagcagctcttgcagcatcaagaatgggatgtagaacacttatgtgcactatgaatctagatagtatagctatgatgccatgtaatcctaatataggtggaacggctaaagggcatcttgtaaaggaaatagatgcattgggcggtgaaatgggagttaatatagataaaactttcatacaatcaagaatgcttaatatatcaaagggacctgcagtacattctttaagggctcaagctgataaggtaagatattcagaggttatgcgaaatgtgcttgaaaatcaagaagacttgtatttaagacaaatagaggtgatttctcttgatattgaagatggtaaggtaaaaggaattgttacgaagaatggagcatgttttacagctaacaccatagttttagctactggaacttatttaagatctagaataataattggagaggttaattatagtggaggcccaagtggactatttcctgctaatgaactttctcaatcattaatagatgtaggaataaaactaagaagatttaaaactggtactccagcaagaattaataaaagaagtgtcgatttttcaaaaatggtagaacaacctggagatgaaagaataataccattttcatttttaaacgacaaactagaaaaagagcaaatatcttgctatttaacttataccaatgagaaaactcatgaggttataaaggaaaacatagataggtcaccattgtataatggtacaataaaaagtgtaggaccaagatattgtccttctattgaagataaggtaatgcgttttccagataaacagcagcatcagatatttatagagcctgaaggtgaaaatacaaatgatttgtatgttggtggaatgtccagttcattaccagaagaagtacaaataaaaatgctaaaaactgtgcctgggcttgaggatgttgaaatacttaaaactgcatatgctatagagtatgattgcattgacccaactcagcttaagctttctcttgaatttaaagacgtaaaaggattattcggtgctggacaatttaatggaagttctggatatgaagaagccgcttcacaggggataattgcaggaataaatgcagctttaatggttaaaaataaagagccacttatattaggcagatctgatggttatataggagttcttatagatgacttagtaactaagggaactaatgaaccatataggatgatgacatcaagagctgaatataggcttctattgaggcaagataacgctgatttaagacttactgaattaggtcataaaataggtttagttgatgaaaatagatacgaaaaatttataggaagaaaaaatgcaatagaagaagaattaaataggttaaaaaaggttcaaatcaccaataaaaaagaagttaatgactttttagaaggtttaggatcagtttctttaaaaaaacctataagtttgtatgaattaatcagaaggcctgaattagattatgataagttgcaaactttggatatagatagaaaagatttggcacaggatataatagatgaagttaatataatgataaaatatgaaggatatatagaaaaacaacttgagcaagtggatcaatttaaaaaatttgagaaaagagttataccagaggatattgactataattctataaaaaatttaagaactgaagcgattcaaaagctaagtaagttaagaccagtaaatttagggcaagcatcaaggatatctggagtttctccatctgatatttctgttcttatgatttatttagattattattttaaaaataagtaa

SEQ ID NO: 15638 - DNA, 666 bp, Clostridium acetobutylicum
atggagctaggtgcaaagacagtattttcgatgaagcttggaagttacaactttgctataacagaaactgtagtattacagtggattatcatggcagttataatattacttgcaatatttcttactaaaaatcttaagaaagtaccaaataggaaacaaagcgtaatagaaatgattgttaacttaataaatggattggtaaaagaaaatatgggagagaaattcatgaatttcgttccaattatcggtactatggcagtgtttatacttttcttaaatttaacagggctagtaggtatcgaaccagcaacaaaggatattagtgttacagcaggctttgctttagtaagtgcatttttaataaatgcaactgcaataaaaagaattggtgttggaggatatattaaatccatttttagtcaaggacctataatggttcctatgaaccttttagaaaaggttacaataccagtatcattatgtttgcgtttatttattaacatgcttgttggtgccatagttatgtcacttatttattcaacaccagctaaaattttattgccagtacctcttcatgggttctttgatatgtttgatggtgttttacaagtttatgtatttgtgcttttaactatgatatttactaagctaggaatcgaacattaa

SEQ ID NO: 15639 - DNA, 1848 bp, Clostridium acetobutylicum
atgtcaaaagtaattggaattgatttaggaacaacaaattcatgtgtagctgttatggaaggtggagatccagcagttatagcaaattcagaaggtgcaagaacaactccttcagttgtatcttttcagaagaatggagaaagattagttggacaggttgcaaaaagacagtcaatcacaaatccagataaaactataatatcaataaaaagaaaaatgggaactgctgaaaaagtagccatagatgataaaaattatacaccacaagaaatttcagctatgattcttcaaaaattgaaggcagatgcagaagcttatcttggagaaactgttacacaagcggttataacagtaccagcttactttaatgatagccaaagacaggcaacaaaggatgcaggaaaaattgcgggacttgaggttcttagaataataaacgaacctacagcagcatcacttgcttatggtcttgataaaatggatactaatcaaaaaattcttgtttatgatttaggtggtggtacttttgatgtatcagtactagaacttggtgatggtgtttttgaagttaagtcaacaaacggaaacactcacttaggtggagacgattttgatgagaaaataatggattacattgcagaagaatttaaaaaagataatggaattgatttaagaaatgataagatggcacttcaaagattaaaagaagctgctgaaaaagcaaaaattgaattatcatcttcaactcagactaatataaatcttccatttataacagctgatgcaacaggtccaaagcatatagatatgaatcttacaagagcaaaatttaatgaattgacagaaggcttagttcaagatactatagagccaatgaaaaaagcacttagtgatgcaggactttcaataaatgatatagataaaatagttttagtaggtggttcaacaagaattcctgcagttcaagaagcagttaaaaactatacaggaaaagatccatcaaagggtgttaaccctgatgaatgtgttgctattggtgcagctattcaagcaggagttttaacaggagatgtaaaagacgtattacttcttgatgttagtccattaacacttggaattgagactttaggcggagttgctactcctctaatagaaagaaatactacaataccaactaggaagagtcaagtattctcaactgcagcagataatcaaccatcagttgaaataaatatagttcaaggtgaaagaaaaatggctgctgataataagagccttggaagatttactcttgatggtatagcaccagcaccaagaggagttccacaaatcgaagttacatttgatatagatgctaatggtatagtaaatgtatcagctaaagataagggaacaggaaaagaatctcatattacaataacagcttcaacaaacttaagtgatgaagaaatagataaggctgttaaagatgcagaaaagtttgcagaagaagataagaagaaaaaagaaaatattgaagttaaaaacaatgctgatcagatagtattccaaacagataaagctttaaaggatcttggagacaaagtatcagctgaagataagtcaaatatcgaagctaaaaaagaagcgctaagcaaggtaaaagatggagacgatatcgaagcgattaaaaaagcaacagaagatttaactcaagcgttatatgctataacaactaaaatgtatgagcaaagcggagctcaaggtgcaccaggagcagatccaaatgcaggagcttcacagaaaacaaatggcggcgctgatgataatgtagtagatgctgactttaaagtagataatgataaatag

SEQ ID NO: 15640 - DNA, 789 bp, Clostridium acetobutylicum
ttgatacttgatgatattgttcgtgataaaaagctccagcttatagaggataaaaaggcgcttagcttagatgatataaaatcaaaattgaattctttaaatttagataagagaaattttaaagaagctctcgaaaaagaaaatatatctataatagcagaaattaaaaaggcatcaccatctaagggagttataagggaagattttaatcccgtaaaaataggacaaatttatgaaaatataaacatagatgcagtgtcgattcttacggaaaagaaatatttcctgggaaaaaatgaatacattaagattgtaaaagaagtgaactctaaacccatacttagaaaggattttatagtagatgaatatcaactttatgaagccaagcttataggagcagacgctgttttgttaatagcagcagtacttaaagataagctggaatgcttttacaatagaacactggaacttggacttgattctataactgaggttcataatgaggaagaagcaaaattagcgtctgaaattggttgcagcataataggaataaacaacagagatttaagggatttttctacagatattacaactacaaagaggcttatgaaatacgtaccaagggatagaataattgtttcagaaagctcaataaaaacaccagaagatatattgtatttgagatcaataggagtgaatgctgttttaataggtgaaacctttatgagaaatatagatgatttaaagggtataaatgaatttttaaagaaggctaaggataatggttaa

SEQ ID NO: 15641 - DNA, 468 bp, Clostridium acetobutylicum
atggctaaaaagaatacagaaaataataccttagctgataatagaaaagcatggcatgactattttattgaagaaacatatgaatgtggagtagaactcgttggcacagaagtaaaatcaataaaaaatggaaaagctaatcttaaggatagttatgcagaaataagaaatggagaggtttttgcttgtaatatgcacgtaagcccatataaagaaggaaatatttttaacgtagatcctttgagaaagagaaggctgcttcttcataaaagtgaaatagataagcttttaggatttacaagtcaaaaggggtatactttagttcctatagcattatatttaaagaatagaagagtcaaggtaaagttggcggttgctgtaggtaagaagaattacgataagagggacgctttaaaggaaaaagatgctagacgtgaaatagatagagctatgaaaaataataggtag

SEQ ID NO: 15642 - DNA, 954 bp, Clostridium acetobutylicum
atgattcgatatatagtaaaaagactgtttttcatgataccgataataattataacttcttttataatatatatgatatttacacttgcacctggtgatatagctacgtctatgaatataagtcctaaagaaaaagctgaaatgagacataaataccatcttgatgagcctaaggtaattcaatattgtaaatggctttatggagcgtctcatggtgatttgggtaggtcgtataaattaaatcagccagtgaaaagtgtaattaataagtatatatggaactctttttatcttcaatttgcatcttttatactagcaatattaatagcaataccaattggagcaatatctgcaataagaaagcattcgatttttgattctggatttactgtattttctttagtgggaatttccatgccaacctttttcttgggacttatattaatgaagtggtttgctgcagatttgaatatatttcctgttgaaggaatgacagcaacaggggagaatttccatgggattaaaagacttttagatatactatatcatatggtgctaccatgtgcagttttaactattgtaaatgctgcaacacttataaggtatgtacgagctagtatgctagaagttataaataaggactatataattacagcaaaagcaaaaggtctaaatgaaaaagtagtaatatacaagcatgctctaaaaaatgctatgatacctttggtgactatattcggtatatctattgctaatttgttcacaggagctatagttactgaagaaatatttggctggcccggtattggaaagttatctttagatgctgttttgcaaagagactatcctttgcttatggggataaatatgattgttgtaattttaacatttgtgggtaatttggctgcagatgtattgtatgcagtcattgatccaaggataaaatataagtag

SEQ ID NO: 15643 - DNA, 1539 bp, Clostridium acetobutylicum
atgaaaaagcaaactttaataaaaggaaccttaatattaggtattacaggtatatttgcaaaaatcttagggatgtgttttaggtggcctcttattatgcttataggtgatgagggaataggttactaccaaatgtcatatcccttgtatatgttttttatagcaatagcttcaggtgtaccagttgctatttcaaagatggttgcagaaagaaatgctgttaatgacagagaaggcattattctagttttaaaaaaggcagttttgcttatgctaattatgggtggaggcttcagtttatttctaataattttttcaagacagttggttcatttttttaattggaatgagaaatcatactattcattaataggcatatcattagcgccgattataatatccctggtaagctcatttagaggcttttttcaaggtatgcagaatatggtgcctaccgcagtatcacagataattgagcaaataggaagagttttagtaggagttggacttgcatacatacttttgccaaaaggaatagagtactctgcagggggagcggcttttggagcagtatttggggcagggattgctggtgtatatttattcataaaatatactagagctaaaagtgagtttaagggcgtaaagacaggaagaaattataaaatattaagtgaattattatacatagcaataccaatatcaataggatcagcagttagcagtataatgagtcttatagattccatattagtaccacaaaacctaattaaagctggatttaactatagtgaggcaactaaattatatggtcagcttacaggtaaggcttttgtacttattaatgttccacttacactttctattgctttatgtacatctcttatgccagttatttcagaggcttttgtacttaatagaatggatgaattaaaaggtagaatagaatcagctctaaagatgtcaatgttaatagctattccatcttttgcgggtttattttttatgtctaatcaagttatgacaataatatttcctggacattcaagtggtggagatatactaaaatacttaagtattagtataccttttatcgtactttcacaggtgactacatcggtgcttcagggagttaaaaaatatgctatccctgtcataaatctgtttttggcttgtattcttaaggtggtaataaataactatttagttcctataaagatgttcaatgtttacggagcagttattggcactattagtggatatatgttatcctgtatattgaatgtaattgctgttaaaataatttgtaattttaaaataaaatggtatgatataataatgaaaccggcgtacgcatctattttgatgattataggagttatgttcttatatatgaatatttatactaaaactatgaatatgttacttagctttggtatatcagtattttcaggaataatagtgtattttatatttattattctgtttggtgtattcgattataagagaataaaaactagatttaaaagttttaggtga

SEQ ID NO: 15644 - DNA, 864 bp, Clostridium acetobutylicum
atgttagtatcagcaaaagaaatggtagataaagctagagaaggtaaatatgctgttggtcaattcaatatcaataacttagaatggactaaagcaatattattaactgctcaggaaaacaaatctcctgtaattttaggtgtatctgaaggagcaggaaaatatatgggtggttatcacgctgtagttggaatggttaacggattaatgaaagatttaaatataacagttccagttgcattacacttagatcatggtagctatgaaggtgcttttaaagtaatcgaagctggattttcttcagtaatgttcgatggttcacactatgatatagctgaaaatatagaaaagacaaaagaagttataaaagctgctaatgcaaaaggactttctgttgaagcagaagttggtgccataggtggagaagaagatggagtcgttggaagcggtgaagttgcagatcctgctgagtgcaaaaaaatagctgatttaggcgttgatatactcgctgctggaatcggaaatatacatggtgtatatcctgcaaactgggctggattaagatttgacgtattagaagacataaaaaatgcagtaggaactatgcctcttgttttacacggtggtactggaattcctgatgatatgattgcaaaagctatatcacttggcgttgcaaaaatcaatgttaatactgaatgccaattagtatttgcagaagctactcgtaaatatattgaagaaggaaaagataagcaaggaaaaggctttgatccacgtaaattattagctcctggttttgaagcaataaaagctaaagtaaaagaaaaaatggttttatttggttcagtaaacagagcttaa

SEQ ID NO: 15645 - DNA, 1074 bp, Clostridium acetobutylicum
atgaaaaataaaaatagaatagtgactttgttaacagcagttttagttatatctgctgttatttttatgcctttaaatattcatgcacaaatttataaaggtgtggatgtgtatgagtatgataatatttcaaattatcagcaattaaaaagcaatggtgtttctgtagtcattcagaaagctacagaaggtttgtgtcacaatgacagtctgttgaattatagatataatgctataattcaaaatggttttaaagtagggtattatcactttgcagataatacagggcaacctgtagctgaagcacaacattttttatcaaaagttcaagggcttcatagtgacacaatattgtggcttgatatagagaatgaatctaattggactaaatggcaagcaattgattacacaaataaatttataggttacgtgcaatcacaaggttatagaataggactttatagtggactttcattttattatgaatatctaaaaggtaatattactaatgtgcctttatggttagcttcatatggtagacagcctgctcaatttcctaatatagtaagttggcaatatagtgaaaatgaaagaataaatggcgttgttggagatattgatttagattattttaatgatagtatctttacgggacaagcaccgcggatggtacaatctaacatgcaagtccaaacatacaacagaattaaaactatacaagctcaattaaatgcagttttatattctagcaagctcgttgtagatgggatacaaggtaatgcgactacacagcaaattagagtatttcaacaagtctgtggtctaaaaacagatggcatttggggacaacaatgtgtaaatgcaatacaacagatttatggaaaagatttatgcggcagaccttatattcatagaatacctactcgtattattcaatataatatgggcatacagtttgatggtatatatggacgagataccgcaagtcatgtacaagcatggcaatcatctcatagtttaaaatcagatgggttgtttggttctcaatcgtggttaactttattgtcaaaataa

SEQ ID NO: 15646 - DNA, 360 bp, Clostridium acetobutylicum
atggctagagtaaaaagagcagtaaatgcacgtaaaaatcatagaaaggttttaaaacttgctaaaggttattatggtggaaaaagtaagttatttaaaacagcaaatgaatcagtaataagagcacttagaaatgcttatgttggaagaagattaagaaaaagagattttagaaagctttggatagcaagaataaacgcagcaacaagaataaatggtctttcatattctaaatttataaatggaataaaattagcaggaattgatatgaatagaaagatgctttctgaaattgctataaatgatcctaaagcgttctcagaattagttgaagtagcaaaaaaacaaattaacgcatag

SEQ ID NO: 15647 - DNA, 1338 bp, Clostridium acetobutylicum
ttggataaattaaaatttggtttagttagtttaggttgtgataaaaatagagtagatagtgaaatcatacttggttctatgaatagagattatgaaatcgtaaatgatcctagagaagctgatgtaattcttgtgaatacttgtgggtttatagaatctgccaagcaggagtcaataaatacaatacttgaaatgaataaatataaagaaaagtataattgcaaaatgctaattgcaactggctgcttaacccaaagatatggtaaagaattaaaagaacttgtacctgaaattgatgctatactaggagtaaatgattataagagtttggatgatgctatagaggatttttttaatttaggaaaaaaagatatctactgtaattatagtgatcaatctataaatgaaggaaaaagaattataactacaggtgaatattcatcttatgttagaatctcagaaggatgtaataattcttgctcttattgtataataccaaaaattcgaggaaaatatagaagtagacaatttgaaaatattattgatgaggtaagagaattatcggagaacggaacaaaagaagtgattcttatagctcaagatactactagatatggtgtagacttatatggaagaaagaggctacatgagctattaaaagaaatgtcattaattcaaggtattgaatggataagaatcatgtattgctatcctgaagaaataacagaggaacttatagaagaaatagcctctaatgaaaaagtgtgcaattatatagatatgcctattcaacatataagtgataatattttgaaaaatatgtttagaaaaacaagaaaatcggagatattagataaagttgaaaaaataagaaaaaaagtgcctaatatagccataagaacatctcttatagttggtttccctggagaaacagaaggtgattttaatgaattatgtgattttgtaaaagatgctaacattaataatcttggagtttttagatactcaagagaagaaggaacaaaagcggcattaatgccaatgcaaatagctgatacggtaaaagaaaaaagagaagaagatataatgcttattcaacagcaggtatctaaaaatttaaatgctaaaaagattggcaaagtttacaaagttatagttgaggggtttaatggtgattattggtatggtagaaatttcgagatggctcctgagatagatggtaaagttttttttaagtctcaatcggagattaaagttggaagcttcattaatataaaaatcacagagaacctagaatatgatttaataggggttgtgtataatgaatttagcaaataa

SEQ ID NO: 15648 - DNA, 996 bp, Clostridium acetobutylicum
atgttaaaggatgctattaaaaaaattgttcgatttgaaactttaagtgagaatgaagcttatggcgcgatgaatgaaattatggacggaaaagtaagtgaaatagatatggcagcttttttaactggtcttagaatgaagggtgaagaggtagaagaaatattaggctgtgcgagggccatgaaggagcatgctgttaaagtagaggtgaacaatttatacgctatagatacctgtggaacaggaggagatggtggaaaaacctttaatgtgtccacttgctcaagcataattgcagcagcgggaggagttaagatagctaagcatggtaatagggcaggttctagtaaaagtggaagtgcagatgtattaacagagcttggggtaagtataaatctaaagccagaagaggttaaaagagaaattgaagaaaagggtatggcttttatatttgcacaaagttatcacaaggctatgaaaaatgttgcccctgtgagaaaaagccttggtttcaaaaccatatttaatcttttaggaccacttacaaatccatgcaatataggtgggcaggtgcttggagtatttgatcaaaaattaactcatccattagcagaagttctccttaagtgtggattagaaaaagcaatggttttaaatggatgtgatggcttagatgaaataactataacaggctcaacctttgtaagtgaaataaaagacggaagaataaaagattatgtaataaaacctgaggattttggaatcaagcgttctaaaattgaggatgtaaggggcggaactcctaaggaaaacgcagagataataatagatattttaaagggaaaaggtggacctaaaagagatattgcagttttaaatgcagcagcagccctatatattgggaaaatcacagaaaacttaaaggacggagtaaggctagcttgcaatattatagacagcggtaaggcgtttcaaaaatatgaagaacttgtatag

SEQ ID NO: 15649 - DNA, 135 bp, Clostridium acetobutylicum
atgtttatgacatatcagcctaaaaagaagcaaagaaaaaaagaacatggctttagaaaaagaatgagtactttatcaggaagaaaagttcttaaaagaagaagactaaaaggaagaaaaagattgacagcataa

SEQ ID NO: 15650 - DNA, 528 bp, Clostridium acetobutylicum
atgatatgtgaggtttgtcataaaaatgaggctaatgttcatataacacaaataataaatggagataaaagagaattaaatgtatgtgaaaactgtgctcaaaatattcaaggagttaatatagcttctgatattgactttatttctccattctcttttcaaaatattttaagtggaataatggattatattggaggtagttctcaaagcactaaatgtgaagaattggtatgtaaaaattgtggaactacttatagtgaatttaaagataaaggattatttggatgtagcgaatgctacaaatactttaattcaatgttattacctattataaatagggttcaaggcaacgttgaacacaacggtaaaatacctaaaaaagcaggaagaaaaataataaataaaaataatatactaaaacttaaggcagaacttcaaaaagctgtgcttgaagaagagtatgaaaaagcagcagaacttagggataaaataaaaagccttcaagaaaaagatggaggtgaaaaatga

SEQ ID NO: 15651 - DNA, 1011 bp, Clostridium acetobutylicum
atgaaggtgtatcctaaagtatcaatagtaatgccagtatataatagtgagaggtatttagcagaagctatagaaagtattttagatcagacctataatgattttgagtttataatagttgatgatggttctactgatgaatcttataacataatatctagctacgctaataaagacaacagaattattgtgatttcaagagaacataggggacttgtcgattcattaaatgaaggtataaacatagctagaggaaaatacatagcaagaatggatgcggatgatatatccattaataatagaatcgaaaaacaatttgagtttttagaattaaacaaagatgtagatatattaggtactagaatagaggcttttggagatatagatgagaagcaaaaaacaatttataatagtgcattttcaataaaatttgattcacaaaatatagaacaggtttttttaacttcatgtgctatacctcatccttcagtcatgtttaaaaaggatagtatcgtaaaattaagaggatatagaaaagaatatgatactgcagaggattatgatttgtggttaagggctataagaaatggatataagatagtgagaatggatgaatgcttaattaaatatagggttcacaataaatctaaaacagcagtggaaatgtttaatcctaagatggttgaatatactatgaaagcaaagatagattatataaatgataccaataaaaaagacaaagttgattacttaatttggggagctagtacgggaggaaaacttgtaaaaaaggttgttgagagcacaactgataaatttaatttaattggatttattgataaatataaagaaggagaggttgatgaatgtaggatttataagccagaggatttaatgaaattacatagtgattatgtcttcattgccacattgccaggtaaagaagaggctgatgagttcttaaaaaattgtggacttaaaaaattcaaggaatatataagtctagtataa

SEQ ID NO: 15652 - DNA, 912 bp, Clostridium acetobutylicum
atgagagttaaaaaagctataataccagcagcggggttaggaacaagatttttaccagcaactaaggcacaacctaaggaaatgcttcctatagttgataagcctacaatacagtatataattgaagaagcagtacaatcaggaatagaagaaatacttgttattacaggaagaaacaaaagagctatagaggatcattttgataaatcatttgaacttgaaagtgaacttgagagtcataacaaaaaagaacttcttaaggttgtaaaagatatatctaatttagctaatatatactatatacgtcagaaggaaccaagaggccttggacatgcaattaattgtgctagaacttttgtaggtaatgaaccatttgcagttttattaggtgatgatgtagtaaatgcaaaggtaccatgcttaaagcaacttataaattgttataatgagtataaaacttccatattaggagttcaaagggtgcctaattcagaggtgtcaaaatatggtatagtaaatggcatgcatatagaagatggagtttataaggtaaaggatttggttgaaaagccaaaacaagaagaagcaccttccgatttagctatactaggaagatacataataactccatctatatttgatatattagataacactaaaccaggtaagggtgatgaaattcaacttacagatgcacttaaaacacttatgaaaacagaagcaatgtacgcttatgtattctcaggaagacgatatgatgttggagataaattaggtttccttcaagctacagttgagtatgcattaaagagagaagagcttaaaaaaccatttatgaactatttatttactataaaagataatcctaattttaaatctttatatgacgaattaaacaaaaagagtaaatag

SEQ ID NO: 15653 - DNA, 840 bp, Clostridium acetobutylicum
atgaatatgaaaaaaattattacctttctttcaattagtgcatttctagtttcttgcctttcgggatgcacagccattaattcacactcatctacaataaaaaaaacatcagtggcttctacaaaaaaaagtaataaaaggataactgttttagccgcagctagtcttactgaaagctttaatgaaattgcaaaagacttcaaaaaagacacgggaattgatgtttcctttgactatgcaggtagtcagcaactagaaactcttatcaatcaaggtgcaacagctgatgtatttgcatctgccagcacaaaaaatatggacgatgtaaggaagtcaaaacttgtttcatccccctctatttttgttaaaaacaaaattgtggtttgccaaaataaagatagtaaaaagaagatatccaaattatctgatttaggtattaacaatttatctttagtaattgcagataaatctgttcctgtcggtcaatacttttataaatcccttgataattctatagccaacaattcaataagttcagaagataaaaacaaaatactaaaaaatgttaaaagcaatgaacttaacgtaaaagacgttgtaagtaaggttcttctcggtgaatcagatgctggtgttgtgtacaaaacagatataactgaacaaaacatatcaaaattaaatacaataaacttaaaagagtttgaaagtgttacagcaaattatccaattgcagttgtaaattcttctaaagataaaaactccgctaaaagctttatagactatgttatgtctaataagggtaaaaagattttaaaaaaatatggattttcaatgccttag

SEQ ID NO: 15654 - DNA, 963 bp, Clostridium acetobutylicum
ttgaaaaaaataagatggggaatattaggacttggaaatattgcaaataagtttgctcaaaccataaaatctatggattcagtggagctttatgctgttgcctcaagaaataaaaagaaagctgaagcctttggaaaagagtatgaggttccttctaagaaatgttatggaagctatgaacagcttgttgaggatgaaagcatagatgttgtatacatttcagtgccacatgtgtttcacaaagaactctcaatactatgcctaaagaatgggaaagctgtactatgcgaaaaacctgtcactatgaatgaaaatgaaattgaagaagtaataagaattgcaaaagaaaacaggttgtttttcatggaagcaatgaaaactcgatttctaccaattaatcagaaaattaaaagcttaattagtgaaggaagaataggagaagttcgtttattgcaagctgattttgggtttaaagcagaattcaatcctgatggaaggttgtttaataaggaattaggtggaggtgccctgctagatgttgggatttataccatatcttatagctcgtttgtttttggaaatcatcctaggagtatcaaaagtaatttttatataggaaaaacaggaatagatgaatgcgtttcaataaatttagtatatgaaagtggaaagcagtctcagctttatgcggccataaatcttgataccacaagaactgctaacattatcggaactaaaggaagaatttgtgtacctaagttttcaaatgctaatagagcttatattttggttgatgggaaagaagaaaaaatagagatgccatttgatataaatggatttgaatatcaggttaaagaggtaaataaatgcattttggagggaaagcttcaaagcgaaattatgagttggaaagactcaattgaaataatgaaaattattgatgatgttaaaaagaacttctaa

SEQ ID NO: 15655 - DNA, 1596 bp, Clostridium acetobutylicum
atgatgcaaaaaattcagcgctttggagctgccatgtttgttccggttttattctttgctttttatggtatggttgttggattttctattttgtttacaaatcaagatattatgggttccatagcagcaaaaggtacagcatggtatagcttttggtatgtagttcagcaaggtggatggacggtgtttaatcaactacccttattgtttgtagttggattaccaattgccttagctaaaaaagcacaagcccgtgcctgtctagaagctctattaatatatttaacatttaattattttattaatgctattcttactatttcaggttcaagtttcggagttaactttaatttacaacctggagttagccatggggtatcaagtgggcttgcattgattgcaggcataaagacgcttgatactggtatgataggtgcaattttaattgcaggtatagctgtgtatctacatggtaagtttttcgaaaagagattaccagtttacttaggtatttttcaaggttcagttttcgtggtgatgataggatttttcgtaatgctaccaacttctttgttaatgtgtctagtttggcctaaggtccaatgcggcataggagcgttacaagggttcttagcttcatctggagttataggcgtatggatatatacatttttagaacgtatcttgattccaacgggcttgcaccattttatctatggaccatttgtttatgggccagcagtagtacctgatggtattgcttcatattggccaaagcatttatcagattttgcaacaagtgctcgttcattaaaagatatgttcccagccggcggttttgcactgcatggatcttctaaggtatttggatgtactggtatagcattggctatctacagcactgcaaagcctgaaaagaaaaaaattgtagctggtttacttataccagcaacaataacagctattgtagcgggcattactgaacctcttgagtttacgtttttatttatagctccagcattatttgcagtacatgctgtgttggctgcaactttagcggcaatagaatatgcatttggtgttgtaggtaattttggagggggattaattgattggtttgcacaaaactggctgccattatttaagtatcatccagttacttatataactcaaataataataggattatgttttacagcaatatatttcttagtattccgtttcttaatattaaagtttaattttgctactcctggacgagagatagatgatgaagaaacaaaactttatacaaaagctgattataaggcaaaacaaggcgcagctgaggaagttaagaatgatgaaatagatggaagtcaagctatgcaatttttacaagccttaggtggaagtgaaaatattgcagatgttactaattgtgcaactagactgcgtgtatctgtaaaagatgaaagtaagttattaccagatagtgttttcaaaaaagctggagcacatggagtggttagaaatggaaaagccattcaagttatagttggattatcagttccgcaggtaagagaagagtttgagggattacttataaagtcataa

SEQ ID NO: 15656 - DNA, 408 bp, Clostridium acetobutylicum
atgaggatactcggtattgatgtaggcaataagactataggagtagcacttagcgatccacttggatttacagctcaaggtataactactataagaagaaaaaacgaagaagaagatataaaagaattgaaagaattgtgtgaaaaatatgaagttgataccatagtgtgcggtcttcccaaaaatatgaatggtacaattggatttcaaagtgaaaaagtgcttggattttgtgaagttattaaacaaaacataaatgtacccataaagatgtgggatgagagattgacaactgtaactgcaaatagagcgatgcttgaagctgatctttctagaaaaaaaagaaaaaaattagttgataaagtagctgctacatatatacttcaagggtatctaaacagtatttaa

SEQ ID NO: 15657 - DNA, 1257 bp, Clostridium acetobutylicum
atggacaagttagttgttaatggaggcaatcctctttttggaagtgttgaaatcggaggagctaaaaatgctgcagtagccatacttccagcagcaataatggcaagtgaaggaatcagtgttattgataacataccagatattcaggacattcaacgtcttgaaagaataataactagtttaggatgcaaagtaaaaagagtacaaaataccgttgaaatagatagtacaaatcttacaagtgtaaatgcagatactgaagatggtagtaaaatgagagcgtcatattatcttataggagcattacttggtagatttggaaaagcaaaggtggaacttccaggaggctgtcctataggggtaagacctatagatcagcatataaagggttttgaagctcttggagcaactgtaaaaataagtcatggaaccgttgaggctcaagcagataagcttataggcacaaatatatattttgatgtagtgagcgttggtgcgactattaatttgatgcttgcatctgtttttgctgagggaactactgttcttgaaaatgcagcaaaagaaccccatatagttgatgttgcaaattttcttaacagcatgggagcaaatataaagggagcaggaactgatgttataagaatagcaggagttgaaaagcttaaaggctgtaattatagtgttatacctgatcaaattgaagctgctacatatatgatagcaacagcagcctgtggtggatgtgtaactattaaaaatgttataccaaagcatctagaatcaatttcagcaaaattaatagaaatgggagctgacataaaagagggagatgattatgtaactatagagtcgcataagaatcttaaaggagttaacataaaaactcttccttatccaggatttccaacggatgcacagcagcctatgagtacactactttctatttcacagggtagaagtatagttaacgaaagcatatgggaaagcaggcttaaacatgttgacgagcttaagaaaatgggagctaacataaaggttgaaggaacagttgctataatagatggagttgaaaaacttacaggtgctaatgttaaagctactgatttaagagcaggagctgctatggtaattgctgcattagcggctgaaggtgtaagtgaaatatcatgcatagagcatatagatagaggataccctcatatagaggataagtttaaagaactcggagcaaatataagaagagaaaaaatataa

SEQ ID NO: 15658 - DNA, 426 bp, Clostridium acetobutylicum
ttgagtttaagtatagaacaaattatggaaattattcctcatagatatccaatgttattggtagacagagttgaagaaatagaaccagggaaaagagcagtgggatataaaaatgttacttttaatgaacagatatttcaaggtcattacccaggtaaaccaataatgccaggagttcttatgattgaagcattagctcaacttggtggtgttgcaattttaagtttagataagtataagggaaagaagcctatacttggagcagtaaagaatgctaagtttagaagaatggtagttccaggtgatgtactaaagttagaaattgaaatagttaaagttaaaggaccagctggaataggaaaaggaatagcaacggttaatggagaaaaggcagtagaagctgaaattacatttatgatagtatag

SEQ ID NO: 15659 - DNA, 558 bp, Clostridium acetobutylicum
atgataagtgatataattaaagaattagaagaaaaaatgacaaaaagtatatcagctttaaaaaaggaattaacatcaatgaaagctggtagagcaaacccagctatgcttgatagaattgaagttgactactatggaacaatgacaccattaaatcaacttgctaatatatcagtacctgaatcaagagttctcatgattcaaccttgggataaatcagctatgaaaagtatagaaaaggcaatattgatttctgacttggggttgaatccatctaatgatggtacaacaatgagacttgttattcctgaactaacagaagaaacaaggaaaaatatagtgaaaaatgtaaagaaagctggagaagatggcaaggtagctttaagagctatacgtagagatgcaaatgataaagtaaagagcttgaaaaaggataactctataactgaagatgaaatgaagagtgcagaaaacgatattcagaagaaaacagattcctatgttaaagaaatagataaaatggttgaagcaaaggaaaaagagattatgtccatatag

SEQ ID NO: 15660 - DNA, 1269 bp, Clostridium acetobutylicum
atgaaaaaaccgatgactatgacacaaaaaatacttgcgaaccatgcagggcttgattatgtagaggcaggacaacttataacagctaaccttgatcttgttttaggaaatgatgtaactacaccagtagctgttaaagcatttaaaactatgggaactaacaaggtgtttgataagaagaaagtagctatagtaccagatcatttcacacctaacaaggatataaaatcagcggaacactgtaagatgataagacaatttgctaaaagtaaagaaatagagaactattttgaaataggtgaaatgggaattgagcatgcacttatccctgagaaaggacttgctgttcctggagatgtaataataggagcagattcacatacctgtacctacggagcactcggagttttttcaacaggcgtcggaagtactgatatggcagttggaatggctacaggtaaagcttggtttaaggttccagaggctataaaatttgttcttaaagggaagccagcaaaatgggtgtctggtaaagatataatactccacataatcggaatgattggtgttgacggagctttatataaatcgatggagtatacaggtgatggtctagagtatctttcaatggatgacagatttacaattgcaaatatggcaatagaagcaggagctaagaatggaatatttcctgtagatgaaaagactattgaatacatgaagggtagaagtgatagagaattaaagaaatttgatgcagacgaagatgctgaatacagcagggttatagaaatagatttaagtacattaaagcctacagttgcatttccacatttacctgaaaatacaaaaactatagatcaggttggagaggttaatgtagatcaagtagtaattggttcatgtactaatggaagaatggaagacttaagaattgcagcttcgatcttaaaaggaaagaaaattaagaagggaataagacttatagtattcccaggaactcaaaacatataccttgaagctatggaagaaggactagttagaacatttatagaagctggcggaatagtaagtaccccaacttgtggaccttgccttggaggtcatatgggaatacttgcagaaggagaaagagctatatctacaactaatagaaactttgtgggtagaatgggacatcctaagagtgaagtttacttagcaagtccagcggtagcagcagcttcagcaatagcaggaaaaatagtatcaccagaggaggttttataa

SEQ ID NO: 15661 - DNA, 1161 bp, Clostridium acetobutylicum
atgttcagacatataagacctgtatgggctgagatagatttagataatattgcatataatatgcagcaaattagaaggtgttcaaaaagtgatgaaataataggggtagttaaggctgatgcatatggtcatggagctgttgatgtagcaccagtacttttggagaatggtgcaaatcgtcttgcggttgctgtgataagcgaagctgtagaactgagaaagtcaggaattcaatgtccgataatgattttaggttatacacccttaagtttggtggatagtattataaaatacagtatagaacaaactgttttttcatatgattatgcagaaaagctatctgaggcagcaaggcaaaagaatataacgcttagaatccatatagcattagatacagggatggggagaataggatttttgccaacagaggaaagtgtatgggaagtttataaaataagtaaactttcaaacataataatagaaggaatattttcacacttttcaacatctgatgagacaaataaagaatatacgtatgcacaattaaagaagtttgaatggttttataatgaattaagaaagaaaaatattaaaataaatataagacatataggcaacagtgctgccataatggaattgccagaaactcattttgaggctacaagacctggcattatactatatggatactatccatcaaatgaggttgacaagaataagttaaacttaaaacccattatgacacttaaaaccaatgtggttcatataaaaaaaatgatgcctggtgaatatgttagctatggcagaaagtttaaatgtgaaagagagagtattatagctacacttcctgttggatatgcagatggatataccaggatgctttcaggcaaggcaaaagtaataattaatggtaactatgcgcctgttatcgggaggatttgtatggatcaatgtatgatagatattactgatcttccaagcgttcaagttggagacgaagttgtaattatgggtgaaagtgatgataaaaaatttacagcagacgatatggctgaaatcataggaacaataaattacgaagttatttgtatgataagcaagcgtgtaccacgcgtttatataaagaatggggaagttgtaaaaataaggaattacgtgtag

SEQ ID NO: 15662 - DNA, 534 bp, Clostridium acetobutylicum
atggataataaaaaaacctctatggaaaacaaaataagtgaagcatctgataccatatactatggagaatacgaaaaattaatagttaatatattgactgtaaaaaaaccaagtcctccaatccttgctatagatacaacaaataacgtagttacagtaacaaatgcaatagtagattcccctgtaaagaaaacctcttcaaattggaaaggtacccttcttttagatggatatatagataatactgtaacctatcggactgcttcgaatacttcttcaaataccataagcggaaatataaactttctgagcactagaatatattttcaaataagaccaacagttctctcccctactcagtttagtaaaaaatcaaatgtagaagtaatttctgcctatgttgaaagcgaaaaaaaagatttaatagaacaaaatgctcttccagaaaactaccccgcttgggccataacctacaataaactatctcaaaaaatattagttaaggttcaaataaaaatcacaagcactaaataa

SEQ ID NO: 15663 - DNA, 651 bp, Clostridium acetobutylicum
atgagtaagttaccagagatagggacaaagatttcgctaacagataaagcttatgaaataatcaaagatgctattatgactaatatttttaaaccaggtgaacttttaattgaagaaaaattagcagaacagcttgcaataagtagaactccacttagagctgctctaagaaaattagcgtatgaccatttggttgaaataaattcatctagaaatgtaattgtagcaaacataggtcaaaaggatgttgaagaaataactgttgttagagaggttttagagcctttagcagtaaaagagttagagaataatataggggaagatgaacttaaaaagcttgaagaaatactttgtaggcagaagaaagcagttttggaagataactatgaagaacttattaaaatggaatatgaatttcatgtggctataggagagctaacgcataataagtggctacatggaatgcttaaggatataaatactattgtacaaagatatcttatattatcaggaagcttaaataagtataaagaagttgcaattaaggagcacgaagtaataatttctgaaataagacaaggaaattatgataaagcggtggaaagtatgaagtgtcatatatcaaatgtatcaagtagaatgcttaaataa

SEQ ID NO: 15664 - DNA, 651 bp, Clostridium acetobutylicum
atgcaaagaaaaaagaaattaaaaattgttaatccagatatatatgaagagttagaagaagttctagaaggggaaattattgtagaggatgattcttacatagaattaaaaagctttgaaaatgtatccttagaaaataaacaggcaaagaaggtttcaataagtcaaagtatatttaagaatgtatcatttaataatactagctttaagggcattgatttaacagatgttatatttgaaaaatgcgatttgtccaatgctgattttacagaatcagttatatacagaactcaatttaagaattgcaaactaatggggataaatttatcagagggaaccttaaataatgtgacttttgataattgtatggctagatactctatatgtactctccttaggtgtaagaatgtactttttaaagaatgtacttttacaagtacggatttctacaaatcccagtttacaaatgttgagtttttaaattcagaattgattgaggctcaaatgcacgaaacaagccttaagggtattgatttaacaagctgtagtatagatggaattggtctcaatattgaagatttaaaaggatgtatagttggtcctgagcagttaatgtgctttgctaatcttctaggggttatacttaagtag

SEQ ID NO: 15665 - DNA, 1257 bp, Clostridium acetobutylicum
atggatataaaagattacgttattaacatagctaaaaattctaagcttgctgcaaaaaaactttcttacgcagacactaacaccaaaaataaggcccttatagaaatgagtaaggctcttttagaaaataaggactatatattatctcaaaataaaatagacattgaaaatgcagaaaaaattggtacttctaaagcacttatagatagacttactttgaacgataaaagaattactgacatggcagaagcacttataaaaacctcctctcttcaagatccaattggagaagtaataaaaatgtggaaaacacctgatgagcttcaaattggtcaaatgagagtgccacttggagtcattggaataatctatgaggcaagacctaatgttactgtagatgctgctgctctatgcataaaatccggtaactcagtaatactcagaggtggaaaagaagctataaattctaacactgctattgcaaaaataataaaaaatgctgtagtaactgctggtcttccagatggttcaattgagtttatagatatcaccgatagagaaaccgttaatgtaatgatgagattaaatggtcttatagatgtattaattccaagaggtggagcagggctcataaaaagtgttgttgagaactcttccgtacctgtaatagaaacaggaaccggtaattgtcatgtatatgtagataaatatgctgattttgataaggctgaaagaataataataaacgctaagcttcagcgtccagcagtatgcaatgccatggaaagtcttttagttcacaaggatgtagctcatgaatttcttcctagaatttcgagtaagcttaaggagctaaaggttcaaataagaggctgcgctgctactcagaaaattgtaaaagatatagttcctgctactgatgaggatttcggaaaagaatttttggacttaatattatccgtaaaggttgttgattcacttgaagaggctattgatcatatatttaaatatagtacaaagcactctgaagcaataataaccgaaaactatactaacgctcaaagatttttgaaggaagttgatgctgctgctgtatatgtaaatgcttcaacacgattcacggatggcgaacaatttggatttggcggcgaaataggtataagcactcaaaaattgcatgcaagaggtcctatggggttagaacagcttactacaacaaaatatgtaatttatggagatgggcaaataagaaaataa

SEQ ID NO: 15666 - DNA, 771 bp, Clostridium acetobutylicum
ttgaatattacaacgcataataaaatactatacgaattaacttcatctctattagctttaattgcatctattatgttaatcatagaattatcagttaaactatccaacgaaactctatacatatttgatacaatcgataatattatcttaattatttttacgatagactatttcttaaggctttatatatcaaaagataaaaaaaaattcttcaaagaaaacataatagacttactttcaatcattccatttaattcaatttttcaaggctttagattgttaaaaatatcgaaattattaaaatttacaaaactaattaaatttctaaaattatttatggcattttctctgctactaagatttaaaagccattttacaaaatttgtaaaaaccaataattttcactatgttatttatactacaatatttgtgctgattactggaactataggaatgcatttaacggagggactttctttaggaaatgctctttggtggagctttgttactataactactgtgggctatggagatatatctccttccactccatttggaagagtaatagcgagtatacttatgcttataggcataggttttttaagtatgcttacaggaactatctcaaccttctttattagtaaaaagaatggtataagctacagaaacgaaataattgaaaatataaaatctaaattagataactttgatgagctaagtactgaagatataaatgatatttgcagcatattaaaaactcttaaaaattaa

SEQ ID NO: 15667 - DNA, 876 bp, Clostridium acetobutylicum
atgggtatggatagaagtgatatgaataaaaatctcgctcaaatgttaaagggtggagttataatggatgttattaataaggaacaggccataattgctgaaaaggcaggggcatgtgcagtaatggcactagaaagagtaccagctgatataagaaaacaaggtggagtagcaagaatgtctgatcctaaaatgataaaagaaattagggagtctgtaacaataccagttatggcaaaggttagaatagggcattttgttgaagccgagattcttcagtctttaggaatagattttatagatgaaagtgaggttctaactccagctgatgattcttatcatattgacaaaaaggcctttaaggttccatttgtttgtggagcaagaaatcttggagaagcacttagaagaattggggaaggagcttcaatgataagaacaaagggtgaagcaggtactggaaatgttgttgaagctgtaaaacatatgagaacagttatggatgaaataaggagagttaaaaatgcagctaaggaagaaattatgacaattgcaaaagaattaggagctccatatgatctcgttcaatatgtttggatgaatggaaggcttcctgtagttaattttgcagcaggcggtgttgctactccagctgatgctgcgcttatgattagacttggtgcagaaggagtatttgttggctccggtatatttaagtctgaaaatccagaaaaaagagcgagagctattgtaatggcagcagcttattacgatgatcctaaagtgcttgaagaagtgtcggaggaccttggagagcctatgtatggacttgaaataagtgacataaaagatagatatgcagaaagaggctggtaa

SEQ ID NO: 15668 - DNA, 657 bp, Clostridium acetobutylicum
atgcttttgaggttaatgccaagtatgtacaagataatcagaaagactttagcgctaattgggatagaattagtaagaactatggtactgaccagaaacgaatggctgatgctagacagaaggaagcgaatcagcataaaggtgtttggaaagttatttggagttggtgcagtggtaataggagcagttgcaatttttgcgacagctggtttgagtgctggagcctatggggtatccaatgttgttgagggtggccaaatcatggttactggtgcagataaagctttcaatccgctgagagatactctttttcaaggaaatcaaagtgcttatgatacctttggaaatgtggcagtatttgtggtaggttcagtgattgcagttggagctgctttgaaagcaggtcaagcagtatctggagcagtcatagcaggtgttgggaaaacagctgtaacaacagccgttggtgtaggaactaactttgtggttgcacctatagcaaaaagtctcgcgaaatctgcgggtattgactcaatctgggcgaatgacatcggtattgggactggttttgctacatcagtatttacagctggtaaggtatataaagcatgtggtactggggccgatgaagctaaaattatggaaaatttagaataa

SEQ ID NO: 15669 - DNA, 1080 bp, Clostridium acetobutylicum
atgaaaaaactgaaaatagtaatgacgggtggaggttctgctggacatgttacccctaatttagcacttgtgccaaaactaaaggagctaggatacgaaatagagtatataggaacaaaggatgggatagaaagaagtataattgaaaaagaaaatataaagtataattgtatatccagtggaaaattaagaagatatattgatattaaaaatttttcagatccttttaaggttattttagggatatttcaatctgttagtatattaaggaagaaaaagcctaacatagtcttttctaaaggaggttttgtgtcagttcctgtggttatagcagcacatttttgcagaataccggtaatagctcatgaatcagatataacacctggacttgcaaataggatagcagttccttactgcacaaaagtttgtgctacatttccagaatctcttaacaatataaaagggaataagggaatattaacaggtactcctatacgagatgagttatttaagggaagtaaaattaagggacttgaaatatgtggatttacaggtgagaagccagtacttatgattataggtggaagtttaggatcaaagattataaatgatacagttcgtgaagctttaaataagcttataaaaaaatatgatatagttcatatttgtggaaagggaaatatagatgaagctttaagtaaacttaaggggtataagcaatttgactatatatcaactgaacttcctcatgtaatgaatgctgcagatttagttatttcaagagcaggggctaatgctatttttgagcttttagcattaaaaaagcctaatttattgatcccattatctaaaaaatcaagcaggggagatcagattttaaatgctatgtcatttgaaaaaaatggttacagtatggtggttcaggaagatgacttaacaccaacgttgcttgtagagaaggtcattaaacttgaaagcgataaggaaaaatacaagaaagctatgaattcaagtcctgtaaaaaatggtgtggaaaatataattaaagttattgataaatataaaaaatgtaaaatatag

SEQ ID NO: 15670 - DNA, 1470 bp, Clostridium acetobutylicum
atgaataaaataaaaaaatttaatgttaaagatgatagaaatttatctatgctaatggatttttatgaattaaccatggctaacggatacttactaaaaggattcggtgataagatagtatattttgatgtattttatagaaagaatccagatggagcaggctttgccatagcagcaggattacaacaaataatagattatataaaaaatttaaaattctcagaagaggatattgagtatctaaaagaaaaaaatatgttttcagaggactttctaaaatatatgaaaaattttaggttttcagggagcattaatgccattccagagggaacacctgtatttcctaatgaagcacttataacagtaaaagcaaaggccattgaggcacagttaattgagacaatgttactaataacaataaatcatgaatgtctaatagctactaaaacaaatagaattgttagagcagcaaaaggaagaccggtattggaatttggtgcaagaagagcacagggatatgatggagctgtatacggagcaagagcttcatatataggcggagcagcaggaacagctacaacactttctgaacaaatgtttaatgtgccagcttctggaacaatggctcattcatggattcagttctttggagatgaatttgaagcatttaaagcctatgcagaaatttatcctgacgcatgcactttacttgtagatacctataatgtactagagagtggtattcctaatgctattaaagtagcaaaagaagttttagagcctatgggaaaaaggttaaaaggaataaggttagatagtggagatcttgcatatttgtctaaaaaggtaaggaaaatacttaatgcatcagggcttgaagactgcaaaatagtagtatcaaatagtttagacgagtatataattgaagatcttattgcacaaggagctaaaatagatgtgtttggtgttggtgaaagaatgattactgctaagtctgatcctgtatttggcggagtttataaacttgttgcagttgaagaggatggacaaatagttccaagaattaagctttctgaaaatgctgaaaaaataacaaaccctggttataaaacaccttggagattgtatgataaagaaacaggaaaggccatagcagatgttattaccttagctcatgagaaaatagatgagaataaggaatatactatatttgatcaagagaatatttggaagaagaaaaaaataacaaaatttgtagctagaaagcttcaagttccagtatttattgatggagaatgcgtgtatgaaagcccaacacttgaagaatctagagagtattgtgaaaagcaattagatacgctatgggatgaagttaagagatttgttaatcctcataaatattatgttgatttatcaatggagctatggcatgtaaagcaggaattaattcaaaagtatagagttaaataa

SEQ ID NO: 15671 - DNA, 1284 bp, Clostridium acetobutylicum
atgttatcaaccttacgtaatgcttggaaagttccagaattaagaaaaagaatgttatttacaattgcgatggttctaattttcagaatgggaaattatattcccgtttctggagtagacacatcaaaaatattgaatttaacaaaccaatcaggctctcttttcggactttataatatgatgacaggaggagcttttagtcaatttagtatatttgcaatgggtgttattccatatattaatgcatctattataatgcagttattgacagtagctataccttcacttgaacaactttcaaaggaaggtgaagaaggaagaaagaagatacagaaaatcacaaggtatatttcggttcctttggctgcacttcaatcacttacattttatgcagtaataagaagtgctggagcaatgcaaactaattctaagttaagtgtgttcttaataatattaacacttacagccgcttcaacattcttaatgtggttaggcgatcagataactgacaaaggaataggaaatggtgcatcacttataatatttgtaaatattatatctagatttccatctactatttataatatagttaagttacaatcggctgatactgtgaatatagttgaaattgttgtagttgctgttatagcttgcgtattatttgtaggagttgttatagcaagcttggcagaaagaaggatacccgtacagtatgctggaaaggcagttggaggaaaagttgcaagaaagcaatcttctcatattcctattaatatgaatgcatcatgtattatagctataatatttgctatatcagttatgatgtttcctacaacaatttctcaattttggcctacagcaaaaattactaaatttttaactggaagcgagtatagtccatttaagcaaaatacaataccttatatgttattgtaccttgtattaatattgttctttacatggttttatactcaaataacatttaagccagaagaaatgtctgaaaacatccataaatcttcaggttttattccaggaataagaccaggtgaacctacaactagatttatagaaagagtgcttgataaagtgtcaattttaggtggattatttgcttccgttatagctatagcacctatgatagttgaagccaacggttcatttcaaggcatacattttgcaagtactggattattgattgtagtaggagttgcactagaaaatctaaggatcatgcagtcacaattgactatgagacattatcatggatttttaaatgaataa

SEQ ID NO: 15672 - DNA, 444 bp, Clostridium acetobutylicum
atgaaagtaatattattaaaggatataaagagcgtaggaaaaaaaggggaagttataaacgtatcagatggatatgcaagaaattttttattccctaggaaattagctgaagaagcaaataactctaacatgagagttttaaatttaaagaaggatgcagaaagaaaacagaagcttcaagaaacagaagaagctcaaaaacttgctaatgaacttaagggaaaggttttaaagctttctgcaaaggcaggggaaaacggaagattatttggagcaataacaagcaaagatatagctgctgaaattaagaaacaatttaatgtagatatagacaagaaaaaagtaaattcagagactataagaaaattaggaaattatgaaattgagttgaaattatatcctgaaatttcaacaaaaataaatgtattgatttcagaaggttag

SEQ ID NO: 15673 - DNA, 954 bp, Clostridium acetobutylicum
atgtcattttcatctaaagttaaaagcgaagtttgcagatatgatgattatagtaagggtgaagctattgcggttttgtcggctgtgatgaaggccagcggaacattggctctagagggaaatagaaagataagctttaaaatcatcaccgaaaatccggctatagcaaggctcatttttaaattattgaagaagtattttgatatacatactgaaataatgatgaaaaaaagcaattctcttaagaaaaataacgtatatgttgtttccataacagaggatatgggggtaagagaactacttaaaactgttggagttatgaaaaatgaggatggtatagtaacattaagctatgatattccagagtttgtagtaaaagatgatgaaagcagaaaaatgtacataaggggagcttttcttggaggcggtagcgtaagtaatcccgagaaaatgtatcatcttgaatttgtaactcataatgaagattatgcttctaatcttagggatttgattaatacctatggattgaattcaaaggttatacagagaaaaaacagctatgtagtttatataaaagagggagagcaggtagtagatttacttaatataataggagcgcactcgagccttttagaattggaaaatataagaataataaaagagatgagaaacaatattaataggcttgttaactgtgaaactgccaatttaagtaaaactgtaaatgcttctgtaaggcaaatagagagcataaagcttatagaaaaacaaataggactttctagattgcctgaaaaccttagagaagtggcaaaacttagattgaactatccagatgaatccttaaaggagctcggtaagatgctggaacctccagttggaaaatcaggcgtgaatcatagactaagaaaaatagaaaagatagcagaagagctcagaaaagaggggagatag

SEQ ID NO: 15674 - DNA, 288 bp, Clostridium acetobutylicum
gtgggcgaaactagtgataaaaataaaaaggacttgataatcaggcttagaaaaatagaaggtcaggtaaagggaatagaaaaaatgatagagtctgatacatgctgtaaaaatgttctggttcagattgctgcagtcaaagctgctgttaataaaataggaatacttatgcttcaagattatgctaaaaaatgcatgaaggatgaacttaaagaaatgggtgagaaggaattaaatgattcaaatattgatgacataatttcagccataaccatgttcgtaaagtaa

SEQ ID NO: 15675 - DNA, 1086 bp, Clostridium acetobutylicum
atgaaatatgttgatgaatttagaaatggggattatgcaaaaactcttgtgagattaatacagaaacttactaagaaaaaaataaatataatggagatatgcggcagtcatactatggctatatttagatatggaattaaagatatacttccaagtaatataaggttgatttctgggccggggtgtcccgtttgtgttacgtctcaaggttatattgatactgctttagagctttctttaagtagagaggttatcattgcaacttttggagatatgataagggttccgggaacaaaaacttctctaatgaaaagaaaagctgagggagctgatattaaaatagtttattcaccaatggatgcattgactttggcagaaaataatccgttaaaaaaagtagtctttctttctgtaggttttgaaacaacaacacctattacagcaattacaatattggaggctaaaaaaagaggtgttaagaatatattttttttgacgtcaaataagatggttcctccagttatgaggacacttgtagaagataaggaacttaacataactggttttttacttcctggaaatgttagtgctattattggaaaaaaaccatatgaatttttgagcagtgagtataatgtatctggtgttgtaacaggctttgagccgttggatatacttaagggcttaaaggtacttatagatattataaataacaatgcttcagtaatagtaaatgaatataagagggtagtaagagatgagggtaacgttacggcattaagatatataaaagaagtatttgaagttactgatagcacatggagaggaatagggaacattgaaaaaagtggatataagattaatacagaatatgagcaatttgatgctgtaaaacagtttaatataaattataaagaatgcgatagcagttctgaatgtagatgtggagatatacttaaagggaaaataactccaatagaatgttcgctatttaaaaaagcatgcacacctgatcatcctgtaggttcttgtatggtgtcttatgaaggtgtatgtgcagcgtattataaattccttaatacatga

SEQ ID NO: 15676 - DNA, 1224 bp, Clostridium acetobutylicum
atgtcaaatgttttagatgagttaattgagcgtggatacgcaaaacaatttacacatgaagaggagacaagaaagttactctcagaggaaaaggtgactttttatatagggtttgatccaacaggagacagtttacatgtggggcactttattgcacttatgcttatggctcgtatgcaaaaagcaggacacagaccaattgtacttattggtggtggcacagctatggttggtgaccctactggaaagacagacatgagaaagatgctaactagagaagaaataaatcacaatgttgaatgtttaaaaaagcagatgtcaaggttcattgacttcagtgatgataaggctattatagtaaataatgctgagtggcttatggggcaaaattacatagagtttttaagagaagttggagtccatttttcagtaaataaaatgcttacagcagaatgttttaagcaaagaatggaaaaaggattatcatttcttgaatttaactatatgcttatgcagggatttgatttctataagttaaatgagaaatatgattgtaaaatggaattgggcggagatgaccagtggtcaaatatgatagctggagttgagctcataagaaggaaatcaaataaaaaagcatatgctatgacatcagcgcttttaaccaatagtgaaggtaaaaagatgggtaaaacagagaagggtgcattatggcttgatgcagaaaaaacatctccatatgatttttttcaatattggagaaatgttaatgatgcagatgttgaaaaatgcctttctatgcttacatttttaccaatggatgaagttagaagactggcttctctaaaagatcaagagataaataaggcaaaagaagtattggcttatgaagttacaaaacttgtacacggtgaagaagaggctaagaaagcattaaattcttctaaggctttattcggtggcggaactaacatggataatgttccaacggtttcaattccggaagatatgctttcaagttctatattagatgtattagtccatacaaagataataccatctaagggtgagggaagaaggcttgtgcagcaaggtggaataacccttaacgatacgaaagttgaagactttaactacgagataacaaaagaagacttcaatgatgatggttttgctcttgtaagaagaggaaagaaaaaatactataaaattgtaattggctaa

SEQ ID NO: 15677 - DNA, 2367 bp, Clostridium acetobutylicum
gtgaacgagaaatcacttagagtacttgaatattttaagataaaggatggaattaagaaatatataagtactagtgcagcaaaaaagcttatagatgaacttgagccttatggtagtttatatgaagttaaagaacacatagaagaaactaaagaggcatttgaattgttgatgaaaaaaggtgcacctccatttgagggagcatatgatgtaacagaggcagtcagtatggctgaaaagggattctctttggcaccagggcagctattaaaggtaggaagcatgcttagatgtgctagaaaatttaaagagtacataagccataaagaggaagaagaaagctatagaataattgaagatatatgcagtggaataataccactaaaaaatatagaggataatatttttaatgcgataataggtgaagaagaaatatctgacaaagccagtactgcactttatagcataagaagaagtcttaaggacaaaaatgcatccataaaagataaagttaatgcaatgatgaggagttattcaaaatatcttcaggagaacttatacactataagaggggaaagatatgttattccagtaaaagctgaatataaagctcaagtaccaggacttgttcatgatcagagttctacgggagctacactttttatagaacctatgggacttgttaatttaaataatgaaataaaggaacttatgctaaaggaaaaggcagagatagagagaatccttagagaattatcggccctaatatataaaagcatagttgctgttaagaataatgaaaaaatagtaacagaattagattttatatttgcaaaagccaagtacgctagttccataaacgcaacagctcctcatgtaaatgataaaggagtaattgatatagttatgggaaggcacccattaatagatccagctaaggtagtgcctctgaatatatatatggggagagaattcacttcattagtaataacgggaccgaatacgggaggtaaaactgtaactcttaaaactacaggacttcttgaagttatggcaatgagcggtcttatgataccagcaagggaaaactcaactataagcttttttaaagaggtatacgctgatattggagatgagcagagtatagaacaaagtctttctactttttcttcacatatgacgaatattgttagaataattgatgatgcagatgaagattctttggttttatttgatgagttgggagcgggaactgaccctacagaaggagcagcactagctatctctatacttgaggctttgaggaaaaggggaacaaagatagttgctacaacacattacagtgaacttaaggcatacgcgctgaaaactgaaaatgttgaaaatgcttcagttgaatttgatgtagagactttaagacctacatataggcttttaataggaattcctggaaaatcaaatgcttttgagatttcaaagagacttgggttatctgattatataattgaagaagcaagaaaaggtatatctaaggatacgcttgagtttgaggatttgattcaaaaccttcaaacacgaagcgtaaaggcggaagaaaatttgagaaaagcagaatttttaaaggaacaagcagaaaaattcaaagaaaaatatgaagaaaaggtatcatctattactgaaactagagagaaagcactgcatgaaggaagacgtgaagcaaaaaaaataatagaagaagctaagtcagaagcagacaagattttaaaagacatgagggaaatggagagacttgggtattcttctgaagcaaggcagagacttcaagaaagcagacagaaattaaaggaaaagcttaacaatgcagaggaaagcttgaacataagtgagagggatcaaggagaggcgcttaagtcagttaaggaaggagaggaggtatttataccatctcttaatatgaagggaattgtaatatctactcaggacagtaaaggagaagtcggaattcaagctggtataatgaagataaatgttaaacttaaagatttaaggaaaaccaataataacccaatatccaaaaaagaaaaggctgttaagaagagagaagcaaggcttaatttaaaatcagttgctcaatctattgatttaagagggcttgattccgaagaagctatatataaaacggacatatacttagatgaagcatatatggcaggattggggtctgttacagtaattcatgggaaaggcacaggagtcttaagaaacgctataaatacaatgcttaaaaagaattcacatgttaaaagttataggcttggaaattttggagaaggcggtacaggagttactgttgttgaattgaagtga

SEQ ID NO: 15678 - DNA, 1182 bp, Clostridium acetobutylicum
atgaagatacttataacaacagatacctactatcctatgaccaatggagtagtggtttctattaataacttatatagacagcttaaaaccttagggcatgatgttagaatactagctttgtctccggatggaggagagaaggtagtgggagatgtcttttatctcagctcttttgccataggtatttaccctgatgctagaataatgaaacctattaaaaataaaatagtgggtgaaataataaaatggaggccggacattatacactcacaaactgaattttctacaatgttggtagctaagtatataaaaagaaagctaaatataccggaggtgcacacctaccacactatgtatgaagattatcttcattatcttttgtgtggaagaatactaggtaaggctgggatttcaaaagtaacacagaagctattaaacagctgtgaagcagttatagcgccaacagaaaaggtaaggttgaaattacaaagttatgatgtttcgactaatatagatgtagttcctacaggaattgacataaaaaaatttcaaaaagaactgaacaaagaggaaaaactcgagcttttatcaaagtatgaattgacagaggaagatactgttctcgtttatgttggtagaatcgccgaagaaaaaaatattgaagaggttataagactttatagaatggctttgaagctttttaaaaatataaaacttcttatagttggaggggggccgtatttgtctaagctaaaaggcataattataaaaaatagactttcagaatatgtaaaatttacaggcatgatttctccagataaaatttgtaagtactataagcttggggatgtttttgtgacagcgtcaactagcgaaactcagggaataacgtatgtagaagcactttctagtggtttgcctatcatatgtaaatgggatatgtgtgtaaaaggattaattgtaaatggacaaaatggttttgcttataggaaggatgaagaatttttgagggcgcttaattatgtgatttacaataaaaaattcaaaattcatatgatggaaatgcttcaagaaaagattaaggagtattcaactgagcgttttgcaagtagagttcttttaacatataatgaggcgcttatggaaagtgatgactgttatttagtatcaaagcaagcttga

SEQ ID NO: 15679 - DNA, 192 bp, Clostridium acetobutylicum
atgtcaagaaaatgtgatatatgcggaaaaggtcttgttgctggtgttcaatacagtcattcacaccgtcaatctaaaagaacatggcttcctaatataagaaaaatcaaagccgttgtagatggtactccaaaaactatacatgtatgtactagatgtttacgttctggaaaagtacaacgtgctgtataa

SEQ ID NO: 15680 - DNA, 3492 bp, Clostridium acetobutylicum
atgaaacccataagagttagaattaaaggattaaacagctttgagaatgaacaggagattaattttgaaaaactaacaaagagaggactatttggaatctttggacctactggaagtggaaagacgacaatacttgattcaataaccttatcactttacggggaagtggcaagaaaaagttcaaactttatgaatacgaattgtaatagccttaacgtaagctttgaatttcagatatcaggaaaagaaataaaaagatatttagtggaaagagaatttagaagagataataaaacaggaagtgttagaagtaagtcagctaaaattgttgatattacaggggatgaggttgaagttttagaagaaggagctaaaagtgtaaatgaaaagtgtcaggaaataattggactgagcttagatgattttacgagaactgttgtacttcctcaaggaaagtttagcgaatttctaaaacttgaaggaaaagaaagaagaaatatgcttgaaagactatttaatcttcaggaatacggggatgagctttcttttaaattagctagaaaaataagaaaagaaagagaaaaggaaaatgttttagtaggagaattaaagggatatgaaaatataaatgaagatgttctaaaggaaagaagagagcttttgaaagaaaataatgatttctttaatgaagcttcaaaggagtatctaaaggcagaagaggaatacaatgaaggaaaagaggtttggggtcttcaaattgaaatagaggaaaaaaatagagttcgtaaagatcttatggagaaaaaagatgaaatagacttaaaggaaaaaagagcccgtttaggtgaaagttcgtcgaaggttaagccttacattgataattatgaaaatactttaaaacaaattgatatattaaaagaacaaatcctttctcgtgagaacacaatgaaagctataagcttggaaaaagaggacatggagaaaaaattaagtattgcaaaggataataaggaaaaagcacttcctaagtttatgattaaacatcacattatattagatgcaataaaagaaaaagatcttttggataatataaagcttgaaaagaaaaggctccaaggaaaaatagaaaagcttagtttagaggcgagtaacaaagaagaattaataaaacagaacataaaagatatagactcattaactttgaaaatacagaatttggagagtaagattgataatcttaaggttccagaagaatataaaaataaaattaatgaaggaatatttttattgaggaattatgatgaaaaattaaaacataaaaataagcttggacttgattgtgataaatttcaagttgattttgaaaaagctaaaagtaaaaaagaaatgctttttaataagttagaggaagagagaagtaaattagatacatacacaaaaaagcttcaggatttaaataaggactttcctaaagatgatgtacttcttacatttcaagaaaaattaaatgattctaggcaaaaatgggctaagtatagtgagtataatgaaagcttaaaggcaagcttaagggttgtagaaaattcagagcaagttctaagaaccaaaaaagaggaaatgacaaaattagaggataaaatatcaaaagttaatattaaaatagagtctttagagacggaaaacatggctcatgtacttagagaaaagcttaagagtggagaggcatgtcctgtatgtggttctgtgcatcatataaaagaaggatttaaggaagttgacctaaaggctttggaaacacttaagagtgagctcgaaggctttgaaaaaaaacgtaagtttgaaaatgaagaaatagttatgtgtgaagctagcattaaagtagaagaaaaaaatattaaaaagcttaatgagagcataaataaccttggagaagagtttaaagaagtttctcttgaaagtatggaaaagaaatttaattatttaaaggagaaagtaaacaaatttaatttagaaaaaatacaacttgatgataatataaaggacttaagtgaacgctcaaataaaattgaagttgaatatcagaaggaaaagacagttgaaaagcagtgtgaaaaacgtattgtagatttaaaaagcgaattggaagaggctattaaagaatttaatgaagtagcatatacaatagaaaatttaaaagctgaactaaagattcaagattttaaatttgaaatgaaagaaatattggaaaaggaaagagtaagggtagaggcagaaggtgaaataaaggatctaagaaaccttttaaacataagacacacagaaaaagagcagctaatggataagtgtagtagactaaaggaggagcttagcaaaaataaagctgagcttaaggaaaaagataaaataataaacgagaaaatagaactaataaaaaataaagtaggagtattagataatttatacgaacttaaagaaaagatagagggtacaattaaaaaaattgaagaacagtataatttatgtgataagaaaatgaatgaaattgaggacaaatacagaaagtgtagtgatgaaataataaagtatcacagtaatttgtccagtctcaaggataggaaagttaatgatatagacaaattaaataaaatacttatggaagaaaaatttgaaaatatagagaaagctaaggaaaattatctaaacgataaagaaataaatttgcttaaaagcgatgttgaaaagtataaaaatgaactttcaaaggtaaatggagctgtggaggttttaagcaagaagcttaagaatagaaaattaacggaagaaaagtggatagaaattcaaaataatagagttgagaaagcttccaaggcaaaagcgcttcaagaaagaagtataaaacttgaggaagaggttaaaaacatagaaataaaacttaaggaacttgggaaacttcttaaaactaagcaagagttagaacataaattaagtcttttagatgatcttgaaaaattatttaagggtaaaaaatttgttgaatttgttgcattaaatcagcttaaatatatatcaatagaagcttcaaaaagattaaaggaaatcactggtggaaattacggacttgaagtagatgataatggaaagttcattataagggattataaaaatggaggagctaaaagagatgcttcaactttgtcagggggagagacttttgtaacctccttagcgctggcgctttctctttcaaatcaaatacaactaaggggaagtgcaccacttgaattatttttcctggatgaaggttttggaactttagacagcaaccttcttgaggtagtaatggattcgcttgaaaaaatacacagtgaaagactttctgttggaataataagtcaccttgaagtaataaaagaaaggatgccagtaaggctcatagtaagccctgcggaagctggagttggaggaagtaaagttaaacttgaaataagctaa

SEQ ID NO: 15681 - DNA, 267 bp, Clostridium acetobutylicum
atggcaaatattaaatcagcaaaaaagagaataaaggtaatcgaaactaaaactcttagaaataaaatgattaaatcagctttaaaaacttacataaagaaatttgaggctgcttttgaagcaaagaatgttgaagaatcaaaaactgcatttgctactgtatctaaagctttagatatggctgcttcaaaaggtataattcacaaaaataaagctgctagaaaaaaatcaagattagctttaaaattaaattctttaaatgcataa

SEQ ID NO: 15682 - DNA, 435 bp, Clostridium acetobutylicum
atgaaatcgtacttagcgaaaccacaggaaatcgaaagaaaatggtatgttattgatgttgcaggtaagccacttggaagagctgcaagtcaaatagcttcaattttaagaggaaaaaataagccaatatacactccaaatgttgatactggagattacgtaatagttttaaatgcagaaaaagttcttttaacaggaaaaaaagcagatcaaaaaatgtttagacaccatactttatatccaggtggattaaaggaaatgtcatataaagatgcaattgctaagaaagctgacttcgtattctatgaagcagttagaagaatgcttccaagcggtgtattaggaagaaaaatgattaagaaattaaaagtatataaaggcgaagagcataataatgaagctcaaaaacctgaagttttagagttgaaatattaa

SEQ ID NO: 15683 - DNA, 954 bp, Clostridium acetobutylicum
atgaaaatctttagaaaaaaatccctggacaagatgatggttagtgctgaaaaaacccatcttaagaaaacccttaaaactaaagatatagcagcacttggtataggtgcggttgtaggggtaggaatatttgtagctacaggtacaggggcacataaagctggacccggtattattatttcttttttactagcaggtatagtagcttgcctttgcggattatgctactcagaacttgcaacaatgtttcctgtatcaggtagtacgtactcatatgcatacataacttttggagaaattgtagctatgatagtgggttggtgcttaacgtcagaatacttggttgcgtgtagtgctgttgcttcggggtggtcaggaacctttataggtatactgaaaaatgcagggatagtccttccaaaggttattactgcgtcgccgagtaagggcggaattgttgatttaccagctgttcttataactcttatattgacatatatattgtattacggaatgaaagaaagctcacgtgtaaataacataattgttattgtgaaaatagcaattatagtaatgtttttagtacttggtgctacgcatataaaaatgactaattacaaaccatttgctccttttggatttaaaggaatatttgcaggagcttctgttatattcttctcatatattgggtttgatgctatttcaactacagcggaagaagctgaaaatccaggaagagatgtttctagaggacttataatttgtcttgcagttgtaagtatactgtacatttcagtggcttttgttttaacaggtatggttcattacgataaaatagttacagaggatgcagttccagcagcacttgccagtgttggaataaggtggggatcggctttagttggaattggtgcaattctaggaatgatatcaactatgatagcagttctttag

SEQ ID NO: 15684 - DNA, 366 bp, Clostridium acetobutylicum
atgaaatttgataataaggcacctatttatatacaaataatggataaaattaaaatagatataataaacggaaccttaaaaccaggtgataaacttccatctgttagggaaatggcagttaaatttaaggtgaatcctaacacccttcaaagggtttatcaggagcttgagagagaaaatataacctatactcaaagaggtacaggaagttttgttagagaggactctgatatgataattaatttgaaaaaggaaatggcaagtgaggttattgaaaactttattgaaaatataaaagaatttggttttggtaataaagatatattaaaaatcgttgaagataagcttaatgaggaggaaaaatag

SEQ ID NO: 15685 - DNA, 1497 bp, Clostridium acetobutylicum
atgaataaaagaataaaagtcttctttttagtctttttaattgtaattttaggttgcttcacaaatgttttcgctactaataatagtgacgctattgaaataggtacctctaatctaaatggtactgctgtaaatagcgctaaagttggaaatcaactatttcatccagaagtaggttgggcaagatatgacgatactaatccaaaaatgttatttaaaggatcatttaatgattacccatctaatgtatattacaatggttcaacaaaatatggtattggaactgcactaattaaattttacggttctaaatttagaattttaatgagttataatccagatagaagtaattctaactttgtaactgttgatggtacaaaaataggtcaatttgatcaaataaaaggctctctaatacctcaagctttaggatttcaagaaaataatttaactgaaggtgttcatgttgtacaaattgatttaggaaataattctacactggatgcattcgatatagatgattctggttatctaattcaactagacaaaaatttaaccttaaataaaacatcagaaacattaaccgttggacaaactgatactttatcacaagtagtagttccagataacgctcctgataaatcactaacttggacctcaagtgatccttcaattgccaatgttgatacttttggtaaagttacagctgtaaaagccggctcagctattattactgccactactaatgatggtagcaatttaacctcttcttgtgcggttaatgtaaaagattccaacactacaatatcactaaacaaaactactgataatttaactgtgggtgctaatgatactttaactgctactattacacctactgatgcagtagataaaaatgtaacctggacttcaagtgatccttcaattgctactgttgatgcttctggtaaaattacagctgtaaaacctggaactgttactgttactgctactactgataatggtaaaacagcttcctgcaatgttaccgtagaaaataatactgttaatttaactatatttatgcaggactcaactacaagacagtatactataacaaaagatgaattcactaaattcacaaattggtacaatcttagggcaaatggcggtactttctctgactcttacacatttaacttaccagtagatgcctcctcatctgttataagacgtactgtatactttactaccatagaatcttttgaaattatttccgacgatgttcctgtagaagaaagaaacaatactttaactttactaatgaaaaattcaactataagaaaatattctttaactgcaagtgaagttaataactttaacaattggtatgatcttagatcaaataaccaaactcttcaatcttactatatattcaatgttcctgcagatgatttttcacctgctagaaaagattatattttatttaataatataacagattctcaagttcagtaa

SEQ ID NO: 15686 - DNA, 369 bp, Clostridium acetobutylicum
atgacaatagtggtaaaacgaggagatatattctatgctgatttgagtccagtagtaggctctgaacaaggaggaatacgacctgtcataattattcaaaatgacatgggtaataagtacagtcctacggtgattgttgcggcaataacatcgcagataaataaagcaaagcttccaacgcatgtggaaatttcttcagaagattatggtttaaacaaagattctgttgttttgcttgaacagataagaactttagataaaagaaggcttaaagaaaaaataggtcatatgacagatatggatatgaaaaaagtggatgaggcgcttttaattagtataggtcttcaaaatatgtttgagagtgtatag

SEQ ID NO: 15687 - DNA, 1140 bp, Clostridium acetobutylicum
atgaaaagcacaaaaattttaatcttgggtgcaggtcctgcaggattttcagctgcaaaagccgccttgggtaaatgtgatgatatcactatgataaatagtgagaagtacttaccttattacagacctcgtcttaatgaaattatcgcgaaaaataaatctatagacgatattctcataaagaagaatgattggtacgaaaaaaataatataaaagttataacttctgagttcgctacatcaattgacccaaataacaaacttgttaccctaaagtctggagaaaaaataaaatacgaaaagcttattattgcaagcggttctattgcaaacaaaattaaagttcctcacgctgacgaaatatttagcttatacagttacgatgacgctctaaaaataaaagatgagtgcaaaaataaaggtaaagcatttataattggtggaggtatcttaggtatagagcttgctcaggctattattgattctggaacccctgcttcaataggaataatactagaatatcctcttgaaagacagcttgacagagatggaggactattcttaaaagataaacttgaccgactcgggataaaaatatatacaaattcaaattttgaagaaatgggagatttaattagaagttcctgcgtaatcacagcagttggagttaaaccaaacctagattttataaaagatactgaaatagcttcaaaacgtggtattctagtcaatgatcatatggaaacatccattaaagatatctacgcttgcggtgacgttgctgaattttatggaaaaaatcctggtctaattaatatagctaacaagcaaggagaagtagctggtttaaatgcatgcggagaggatgcttcatattctgaaataataccttctcctatattaaaggtttctggtatttccattatatcctgcggagacatagagaacaataaaccttcaaaggtattcagatcaacacaagaagataaatacattgtatgtatgctaaaagaaaataaaattgatgctgcagctgttattggtgatgtaagccttggaacaaagcttaaaaaggcaattgattcttcaaaaagttttgataatatctcatctttagatgcaatattaaataatttatag

SEQ ID NO: 15688 - DNA, 891 bp, Clostridium acetobutylicum
atggaaaaaagaagttttcttaaaaaactcaaaacagaatatgttggaaggggatttgctactatttgtggagtttttatagttattttaaccctttcaattattttttttattgcatctaaaggcatatcaacatttaccaaaaggcattattctatttttgattttttaatgtcaagtacatggaaaccagatagtaaaactcctaagcttggagcatttatattcctagaaggatctacaatggtatcaattggagcggtaattttaagtacacctatggcaattgctttagctgtatttatgaatattatatcacctaagcttggagatagagtattaaagccttcattagagctctttgttggaattccatctgtagtttatggatggattggggtaacggttttagttccttttataaaaaatcattttggaggagttggcttcagcttaggtgctggaattttagttctcagcataatgattttgcctacaattgcaagtctatcttcagatgctataaaaaatgtacacaatgaatatatcgaaggctcatacggattaggtgccacaagatggcaaacaatatataaaataataataccatcaagtaaaaatggaatacttacaggaattgttttgggacttgcaagggcttttggagaggcattagcagttcaaatggtaataggtaatacagtaaaatcagctcaaggacttttttctcctactaccactttgacaagcgtacttacaatggatatggctaatactccaaatggaactgcatggaatgatgcactttggtctcttgcgtttttacttcttgtaatttcgtttatatttatagtaattataagatttatagggagaaaaggtgaggtttaa

SEQ ID NO: 15689 - DNA, 1275 bp, Clostridium acetobutylicum
atgttagatttaaaaagaataagaactaatccagaagaaataaaaaaggcactaacaaacagaggagaagatttcgatatttctgtcatagatgagcttgtatctcttgacgaagaaagaagaaaaaatcttgtagaggtagaaaatttaaaaagtaaaagaaataaagattctggcgagatagctaagcttaaaaagtcaggacaaaatgcggatgaattacttgctgaaatgaagaagatttcagatgatataaaaggaatagatgctaaggtatcagaaatagatgaaaaaatgcagtacataatgcttagaatacctaatataccacatcctagcgttccagaaggtaagtcagatgaggaaaatgtagaaataagaaaatggggagagcctagaaaattcgactttgagtttaaagcacactgggatataggaacagatttagggcttcttgattttgaaagaggaggaaaagtcgcaggttctagatttacattctataagggacttggtgcaagacttgaaagagcagttataaactatttccttgatactcatgtagaaaaacacggatatactgaaatcctcccaccatacatggttaatagagttagtatgactggtactggacagttgcctaaatttgaagaggatgcttttaaagtagataatggattctttttaattcctacagctgaagttcctgttactaatatgttcagagacgaaatattaaaagcagaagatttaccatataagtttgctgcatacagtgcatgctttagatcagaagcaggctcagcaggaagagatacaagaggacttgttcgtcagcatcaatttaataaggtagagcttgttaagtttgccaaaccagaagaatcttatgatgaacttgaaaaattaactcatgatgcagaggaaattttacaaatattaaatattccttatagagtggttagaatatgtaagggagatttaggctttacagcagctttaaagtacgatatagaagtatggatgcctagctacggaagatatgttgaaatttcaagctgtagtaacttcgaggatttccaagcaagacgtgcaaacattaaatttagaagagatccaaaggctaaacctgaatttgttcacactcttaatggatcaggtcttgctgttggaagaacagttgcagcaatactagaaaattatcaaaatgaagatggaagtgtaaatgttccagaagcgttaaagaaatatataggaaaagacgttataagataa

SEQ ID NO: 15690 - DNA, 1608 bp, Clostridium acetobutylicum
atgaaaactaaatacatattcgtaacaggtggagttgtttcgtcattagggaaaggaataacagcagcttctctaggacgacttcttaaaaatagagggcttaaggtatcaatacaaaaatttgatccttacataaatgtagacccaggaacaatgagtccgtatcagcatggtgaagtattcgtaacagatgatggtgctgagacagatttggatttaggccattatgagagatttatagatgaaaatttaagtaaaaatagtaatgttactacaggaaaagtttattggtcagttataaataaagaaagaagaggagattatcttggaggtacagttcaagtaatacctcatataacaaatgagcttaaagagagagtatatagagttgcaaaagaaaaagatgtagatgttgtaataacagaaataggaggaacagttggtgatatagaatcacttccattccttgaagctattagacagataaaatatgaagttggatttggaaattcatgttttatacatgtaacacttttaccttatcttagaaaagcaggagaaataaaaacaaaaccaactcaacactcagttaaagagttaagaggaataggtattcaaccagatattatagtttgcagaacggaaaaagaaatatcaaaagatgttagaagcaagatagggttattctgtaatatagatggagattctgttatttcaaatctagatgcagaaaatttatacgaagttccattaatgcttcatgaccaaggattggattctttagtttgtaaaaaattagaacttgaatgccaagaagtggacaattctgagtgggaaagcatggttaagaatattaaaagtctttcaggagaagttacaataggacttgtaggaaaatatgttgaattacatgatgcgtatatatcagtagtagaatcgctaaatcatggaggttttgcaaacaatgtttctgtaaatgttaaatggattaactccgaagaggtaacaaaggataacgttgatagtgtattaagcgatgttgatggtatacttgttcctggaggttttggagatagaggtattgagggtaaaattgaagcgataagatgggctagagaaaataaaatacctttctttggaatatgtcttggaatgcaatgtgccgtaattgaatatgcaagaaatgttttaggacttgaaggagcacatagttcagagatagatccacaaacaaaataccctgttatagatcttatgccagatcaaaaggatatagatgacaagggtggaactatgagacttggattgtatgcatgtaaattatcaaaagatacaaacgcttatgatgcatatgaagaagaagttatatatgagagacacagacatagatatgaattcaacaatgagtttagaaaaagattaactgaagaaggattaattcttgcgggcacaagtccagatgataggttagtggaaatagttgaaattaaagatcatccttggtttgttggagtacaatttcatccagaatttaaatcaagaccaaatagaccacatgctcttttcagggattttataaaagttgcgtgtacagtaaaagaaaaataa

SEQ ID NO: 15691 - DNA, 2538 bp, Clostridium acetobutylicum
ttgattaatgaaaatagggcagcaagcggtttgtcagaagaggaggctaaaagattacgaaaaaaatatggctataatacaatacaaaaaaagaagaatatttcaatgataaagatattcttatcacagtttaacgatgttatgatatgggtacttatagccgcaactattatttcaggacttatgggagaaaaggcagatgcgttaaccataattgtaattataataatgaatgcaattattggatttgtgcaagagtttaaaacagaaaaatcattagaggcgctaaaaaaacttacagcaccaacaacaaaagtaataagaaatggaagcataagaataatggatgcagctaatttagttccaggagatttagttgttttggatacaggagatagaattcctgctgattgtatattaattgatgggacaaacatgatggtggacgaatcgctacttactggggaatctattggagtatctaagaataataaggatagcaacttgtatatgggaactacagtacttacaggaaggtgtcaggcaagagtaattaaaataggaatgacaacggagatgggcaagattgcaaatatgcttgataacatagatcaagaaaagacaccgcttaaagagaagttagcatctttaggtaaaatattagttatactgtgtatagtaatatgtgtggttgttacagtgcttggaataataagaggtgaggataaatatgaaatgttcctcttaggagtaagtttagcagttgcagcaattccagaaggacttccagctatagtaactgtagcattagccattggtgtttctagaatgcttaaaagaaatgcacttgtaagaaaacttcccgcagttgagacgctgggatgtacatctataatatgtagtgataagacaggtactttaactcaaaataagatgacagtaaaagctatgtattttaataatcagatttatgaaaaagaactatattcagaagaaagatttgaacttcttaagagaactttcatatactgtaatgattgtgattacaattttaaagaaaaaggtattgataagtgtctttttggagatccaacagaaacggcattaataagagcattttttaaagatactggaaaactaaagaagtttatttcagaggaaaagaggataagagaggaaccttttgattctaagactaaaatgatgactgtaataagcaaaggtgcaaatggaacaagtttatacttaaaaggtgctccagagagggtaatagaaaagtgtaagtatatatatataaacaataaggtggaattatttacttcaacatataaatccaaagtgaattcggtacttgaaagtatgtcaaggaaagcattaagatgcattgcttgtgcatacaaaaaggagaacataaataaagatggagacatgatttttttaggaattgcaggaatgattgatccaccaagattagaagttaaggatgctgttcttaaatgtagagttgcaggcataactccagttatgataacaggagatcataaaaatacagcatttgctatagcaaaggaattgaatatatgttcagatgtatctgaagttataagtggtgaagagcttgataagttaagcgaaaaggatttatataaaaaaacagacaaaataagagtttttgcaagagtaagtccagaacataaacttaaaattgtaagggcatttaaaaagaagaataaagttgttgcaatgacaggtgatggagtaaatgacgcaccagcaataaaagaagcagatatagggatatcaatgggagtatcaggtacagatgtaacaaaagaggcctcttcaatgatacttttggatgacaactttgctacaattgtagcagcagtagaagagggaagagttatatataataatattaggaaatttataagatatcttttgtcatgtaatttaggagaggtattaacaatgttcctatcatcagtatttaatttacaaactcctctattacctatacaaattttgcttataaatttggcaacagatggtcttccagcattagcgcttggagtagatccaccagataaggatattatggatgataagcctagagacagaaaggaaggaatcttttccagaggacttagtgaaaaaattattataagaggatgtcttataggagtttgtacaattttatcatttttggtaggcctatacatgggatttggattaaagacaagtagaacaatggcgttaggtacattaatcatgtcccaattagtacacgtttttgaatgtagatctgaaaagcactccctatttgaaataaaattatttactaatatataccttctaggagcagtcagtatttctgtaataatgcttgtatgtgttgtttatatcccatttatggaagtgctttttcatacttctgcattaagtattactcaatggattatagtactatttttctcaagctttatagcattgataaacagtctatatttgtatcataataaaagcaaaaatatataa

SEQ ID NO: 15692 - DNA, 576 bp, Clostridium acetobutylicum
ttgataaattatatatggtttatatttatatttgtaggtaccattgttggcgttttatctggaaatggaagtacgctttcgtcatccataataaattccaccgagagctcagtaaaattaatgatttcgcttttggggataatgtgcctttggtgtggagtaatgagaattgcagagaaaagtggacttacagacaagttgtccatagttttaagacctatattgaagatagtatttaaggatataagtaaaaacaacaatgtaatgggaccaatgattatgaacataacttcaaatatgcttggactaggaaatgctgcaactccatttggaataaaaactatggaggaaatgcagaaaataaataaaaaaaaaagtacagcaactaacgatatggcaaaatttcttgttataaacgcagcttgtatacagcttttacctactacaataatatctattagggcagcctgtgggtcttcaaacccagctattatagtaattccaacaatagtaacttcagttacagtagctataatgggattaatttattgtaagattcttcaaagacatttttag

SEQ ID NO: 15693 - DNA, 1152 bp, Clostridium acetobutylicum
ttggagatttttttatttgcttgcaagtttattaaattcaaggaagtgtttaaattgaatgaggcttttatgaaaagagctttagaaattgcagaaaaggggagtggatatgtaaatccaaatcctatggttggagcagttatagttaaggacaataaaatagttggtgaaggttatcatgagaaatttggaggaaatcatgctgaggtaaatgctttaaatatggctggaaaagatgcagagggctcggaactatatgttacgttagaaccatgttctcattatggtaaaactccgccttgtgcacttgcggtagttaaagcgggaataaaaagagtgataattgccatggaagacccaaatcctttagtaagtacaaaggggataaaaatactaaaggaaaatggaatagaagttattacaggcgttatgaaaaaggaatcagaaaagttaaatgaagtttttataaagtatataacaactaaaaggccatttataactatgaaaatggcatcaaccctagatggaaaaatatgcactgtttcaggagaatcaagatggataagcggacaaacatcaagaaaatatgttcatcatttaagaagcaaatatatgagcataatggtgggagtaggtacggctattaatgataatcctcttctcacaactagaatagaaggtgaaaatgtaagaagtcctatagctattattgtggactcaaagcttagggttccaaaggatttaagaatttttaatacattacaggagagaaagattattattgcaactactgaatatgcagataaaaataaggaaaatgagcttataaatatgggagtttcaattataaaaacacctaataaaaatggtcgtgttaacttagattatctactagatgaattaggtaagataggtatagatagtgttttactcgaaggtggaagcgaattgaatttctcttttataaaggaagaaaatatagataagataatgtgctttatagcgccaatgatagtaggaggagaaaaagctaagggtgcagttggaggtaaggggatagaaaagcttaaggattcaataaagatatatgatatggattctgaaaaaattggagaggatatcttagtgtcaggatacctaaataggggatga

SEQ ID NO: 15694 - DNA, 1059 bp, Clostridium acetobutylicum
atgaaaaacttaaaagacttacttaaaatacttgttgaaaaagaaggttcagatcttcatatttctgttaatgttcagccggtaattagaataaatggtgagttaaatgtattaaacgataaaaataagataactaaggatgaagtaaaaaattatgctatgcagctgcttggtgatgactatgataaatatttgaaggcaggagaatttgatgcgtcatacactcttaatggtgttggtatgttcagagttaatgtgtataaggaaagaggaaacgacgccatagctgttaggaatattccatcaaaaattttaagccctaaggaacttgggtttccagatgtttttaatgatttaataaatgctaaaatgggacttgttcttgttacaggaccaacaggaagtggaaaaagtacaacagttgcatcaattataaatgaatttaatttaaatacaaaacgtcacataattacacttgaagatcctatagagtatgtacataagagtaataaaagcttaataaatcaaagggaaatcggaaaagatagtggttcatatgtggcagctttaaaggcggccttaagagaggacccagatgtaatctttgtaggagaaatgagagatatggaaactattactgcggctattacggcagcagagacaggtcatctagtactttcaacattacatactattggtgcggataaaaccatagatagaataatcgatgtatttcctgagcataatcagacgcaagtaagaattcagcttgcctctgttcttaagggagtagtttctcagcagcttttaaagaaaaaggacgagtctggaagaataccagcatttgaaataatgaccttcacaccagctgtacaaaatttaataagggaaggaaaaactcatcaaatacagtctcttattcagacaggaagcaagtacggtatgataactatggataaatgtataatagatttgtataaaaagggaataatatcgtatgaaaccgctgtgcagtcaagtgtagataaagaattcgtgactaaaatgcttatactataa

SEQ ID NO: 15695 - DNA, 1482 bp, Clostridium acetobutylicum
atggaattcaaaaagaattttgatattaaggatgacagaaatctgacaatgctagtggatttctacgaacttactatgggaaatggatacttaaataaaaatgtgggaaataaaacagcctattttgatatgttttttagaagggttcctgacaacggtggctactgcataatggctggtgtgcaacaactaacagagtacctttctaatttaagatttacaaaggaagatatagattatctaagaagtaaacacgaattttctgaagaattcctttcatatcttaaagactttaaatttgaatgcgatgtatgggcagtaccagagggtaatcctgtatttccaaatgaacctcttgtaactgtaaaaggccctgcaattcaagctcaatttgttgaaactatgatactattaacaataaatcaccaaactttaatagccacaaaagcaaacaggatatgcagagctgctggaaacagacctgttatggagtttggttctagacgtgctcaaggctatgacggagctatttatggtgcaagagcagctgttataggcggttgcagctcaactgcttgcactatatctgagcaaatgtttggagttaatgctgttggtaccatggctcacagttgggttcaattatttgataatgaatttgaagcttttaaagcttgggctgatgtatatcctgaaaattgcgtacttttagtagatacttataacgttttaaaatcaggtcttcctaacgctataaaagtttttgatgaagttttaaaaccaaaaggtataagacctagcggaataagaatagacagcggtgatataacttatcttacaaaaaaatgcagaaaaatccttgatgaagctggatacagcgattgtaaaattgtaatttccaattcattagatgaacatataataacagatgttcttcttcaaggcgctgaagttgacagtttcggagtaggcgaaagacttataactgcaaaatcagaacctgtttttggaggagtatttaagctttgtgctgtagaaaatgacgaaggaaatatcgttcctaaaatcaaaataagtgaaaaccaggaaaagataacaaacccaggcttcaaaaaaatctacagattgttcgataaggaaacagacaaggctttagcggatttgattactttaaatgatgaggtaattgatgaaactaaacctcttgaaatatttgatcctatttacacttggaagaaaaagaaattaacgcattactatgttaaagatttaagagttcaattatttaaaaaaggagaactcgtatatgaaaatcctgaagttttagaaataagaaatatagcaaaaaaagaaacagaaaagctttgggctgaagttttaagacttgaaaatccacatacttattatgttgatctttcaaaaaagctttgggatctaaagcacaatttacttgaaaaatattctaatgcatttaatagctaa

SEQ ID NO: 15696 - DNA, 588 bp, Clostridium acetobutylicum
atgatttatgtagttactaatagaaaattagctaaaaataaagatctacttggttgtgtcgaaaaggtgcttaagtatggtgcttgcagtgtaattcttagagaaaaggatttaggttatgacgagttgtatgaaatagctaaaaaaataaaatttattactgataagcatagtgctaaattgattgtaaatggaagcttaagagtggctgaagaagtaaaagcatatgcatatcattcaagttttgttaattttataaataatggtggaagtaagattataaaaaatggagtgtccattcatagtttagaggaagctaaaagagctgaagaaaacggagcggattatgtacttgctggcaatatatacgaaacagcttgtaaaccgggattaaaaggtagagggcttgaatttgtaaattctatatctaaaaatatcactatacctgaaattgccattgggggtattagtgaagaaaatgttcaagaattaataaattcaggtgcaaatggtgcagcggttatgtcctctgcaatgaaaaatcctgctgtaattaaaaaaattataggaaagcttaataagaaatag

SEQ ID NO: 15697 - DNA, 1176 bp, Clostridium acetobutylicum
atggcaatttttagagattacagtattaatcctacagaacatgatagaactataggggataggagaagacatagagaactggttgaaaaagctattaaggataatcttgctgatatagtatcagaagaaagtataattggagaaagtaaaagtaagaaaataaaaataccaatacgaggccttaaagaatataagttcctttatggaaataacagttcatctgtaggaagcggaactggaaacgaaaaaaaaggggatattataggaaaagagcaaatgggcaatggctctaaaggaaaaggtaaaggtgcaggaaacagcgagggagaagatatttatgaaacagaagtaactatcgaagaagttttttcgtatcttcttgaagacttaaatttgcctaatcttgataaaaagaaatattctgaaatagtaacagatagttcaaagaaaaaagcaggttatcaaaagtatggtataaggccaaggcttgctaaaaaaagaacagttatagaaaaaataaaaagagagcagtcaagaaaaagagcaataaaagaattaggtaaggatgataaggtagaaagattaccgttcagtgaagaagatttaagatatcatagaataaaagaaaagccaaaaaaagaatgtaatgcagcaataatgtgtgtaatggattgttctggttcaatggatagtacgaaaaaatatcttgcacgttctttctttttcatactctctaagtttataagaatgaaatatgttaatgtggaaatagcgtttatttcacactctacagttgggcgtgaagtaactgaaacagaattttttcacaaagtagaatcgggcgggacatatatttctagtggattaaatacggctatggatataataaaggaaagatttaatccagctacgtggaatatttacggattttacgtaagtgatggtgataatttcactgaggacgatgaaagagcaataaagtctatgagaaagttctgtgaaattgcaaatatgattggttatgctgaaattttaccttattcatattcaggaacgatgaaatacaagtttgataattatgtaaaggataaaaacttcatatcttcaaccataagaaataaggaagatttatggcctgttcttaaaaaaatgctcataaaggaattaaaggagtga

SEQ ID NO: 15698 - DNA, 432 bp, Clostridium acetobutylicum
atggatcttaattctatttatacagaaataataactgaacacaatgcatcaaaacacaataagcacaaaattgaagatgccactttagttgaaaacggtcataatccaagttgcggagatgatataacccttcaacttaaaattgaaaataatgtcattgaagatgctgcttttattggcgttggatgtgctatttctcaagcttctacctctataatgatagatcttataaaaggtaaaactgttgaagaagcaaaaaagcttgttgaaacctttattggaatgataaaaagagagataacagatgaagctgagcttgagcagcttgaggatgcattagcatttaaaaacatttcaaatatgcctgcacgtgtaaaatgtgccgtactagcatggcatacttttgaagaatgcattaacgaaaaaaaataa

SEQ ID NO: 15699 - DNA, 1005 bp, Clostridium acetobutylicum
atgagtgttacgataaaggatattgcgaaaatagcaaatgtttcgcatactaccgtttcaagggctctaaacaatagtcccgtgataaacgaagaaacaaaaagaaaaatattggaaatagccaaaaaacttaattatgttcctaattttaatgctaaaagtttagtgttaaataaatcttataatataggtcttttcttctcaagcataagcaaaggtacttctccaagcttttttcatgaagttgtagagggagtaaatagtattatagaagaaagctataatttggttattaaagggatagataattgcaatgactttaattacatatctaaaaaaagattcgatggaataatattggtaagtcaaagtgaaagtgataattccttcatatatgatgttattaataaagagatacctatagttgttctaaatagagaaattgaggaacaaaatgttataaatataattgcagcagaaaaagatggtgcatataaggctgctgagtacttgattaaaaatggacatagtaagattgcaattatagaaggtaaagctggttttaaatcatcagtatatagaaaaatgggatttattaatgctttaattgataacaatatagaaattaaaaatgaatattttcaagcgggaaactatgatgttgaaagtggtttttctgccatgaaaaagtttttaaaattaaaagataggcccactgcggtattttgctctaatgatgatatggcagtaggagctgtaaaagcaattgagcttgaagggctacgagttcctgatgatatttccttagtaggatttgatggtagtatattctgcgagtatgttactcctgcaataactactattaggaaaccatcaagagagattggcatagtaggtgctaataaaatgcttgatgtaatagacgaaacagaatttaataaaaagaagatttatataggtacagaactcattgtaagagattctgttaaaaatttaagtaagtga

SEQ ID NO: 15700 - DNA, 738 bp, Clostridium acetobutylicum
atgagtaaggatttagcaatagaagttaaagaattaaaaaagagctatggttctaatgaagtattaaaagaaataaatcttacaattgatagaagtgaggttgtatgtataataggaccttcaggttcaggaaaaagtactcttttaagatgtatgaatagacttgaagaaataacagcaggacagttaatgattgatggaaaagatatatcagataaaaatattaacatagataaattaagagagaacgtaggaatggtgtttcagcattttaacctattcccgcacttaagcgttttaaaaaatataacctttgcaccaatagagttaaataaaatgtcaaaagaagaagctgaaaagacagcattcaagcttcttgataaggttggtcttaatgataaggcaaatacttatccagataagctttcaggaggtcaaaaacagagagttgctatagctagagctcttgctatgaatccagatataatgctttttgacgagcctacttcagccttagaccctgagatggttggagaggttcttggagtaatgaaggatcttgcaaaagaaggaatgacaatggttgttgttactcatgagatgggctttgcaagagaagtagcagacagagttatatttatggctgatggatatatcgttgaacaaggaacaccagatgatatatttaaaaatccaactcaagatagaacaaaagattttttaaataaagtattatag

SEQ ID NO: 15701 - DNA, 621 bp, Clostridium acetobutylicum
atggctagatatactggagctgtatgcagattatgcagaagagaaggtttgaaattattccttaagggtgatagatgctatacagataaatgtgcatttacaagaagaggttatgcaccaggagtacatggacagagcagaaagaaaatttcaaactacggattacaattaagagaaaaacaaaaagcaaaaagaatatatggagttcttgaaaaacaatttagaatatactataaaagagctgaaagaattaaaggaatatcaggtgaaaacctacttaagcttttggaattaagacttgataacgtggcttacaaattaggctatggtagctcaagaaaagaagcaagacaattagttactcacggacatttccttgtaaatggaaagaaagtagatataccttcatatacattaaaagttaatgaagtagtatctgttagtgagaagagtagaggaactgaaaaattcaagacttttgcagaaaatccaaagactttaccagcatggattgaagcaaactatgataattttgaagcgaaaatagttgcagagccaaatagagaggatatagatactccaattaaagagacattgatcgttgagttatatagtaagtaa

SEQ ID NO: 15702 - DNA, 1026 bp, Clostridium acetobutylicum
ttgcagttagaagattttgattattacttaccagaagaacttatagctcagcatccttgtgataaaagagatgagtgtaggcttatggtagtagataaaaaaagtggagaagtagagcatagaatttttaaagatgtaatagattatttaaatccaggagattgccttgtactaaatgatacaagagttttgcctgcaagacttattggaaataaggtaggaacaggcggaaagatggagtttttacttctaaagagaattgataaagatacgtgggaaactcttgttaaaccaggtaagcgagcaaaagttggagccgagtttgagtttggtggtggagttttaaaggcagtaattaagagtataggagaagacggcaatagagttgtggaatttaagtatgaagggatttttgaagaaatacttgataagcttgggcaaatgccactcccaccgtatataacagaagaattagaaaataaagaagagtatcagactgtatactcaaaaaataatggatctgcagcagcacctacagcagggttgcattttacaaatgagctattagataaaataagagctaagggaataaaaactgtatttttaactcttcatgttggtcttggtacatttaggcctgtaaaggtagaaaatatagaaagtcaccatatgcattcggagtattatatgctttcaaaagagagtgctgatactataaatgaaactagaaaaaatggtggaagaattatatctgttggaacaacttcaactagaaccttggagactattgcagatgaaaaaggaaatgttagagaacagtctgggtggactgatatatacatatatcctggatataaatacaagatagtagatgggcttataacaaatttccatcttccaaagtcaacattagtgatgcttgtcagtgcattatcttcaagagataatatactgaatgcgtataaaatagctgtagaaaatagatatagattctttagctttggggatgctatgtttataaaataa

SEQ ID NO: 15703 - DNA, 1050 bp, Clostridium acetobutylicum
atgcagagaattgagactagaaaagttaaagttggaagtgtatatgtaggaggagattctagggtaacagtgcaatcaatgacaaatactgatactagagattctaaaaagactatagaacaaattaaaaaattggaaatagccggctgcgacatagtaagatgtgcggttcctgattttgatgcagcttcttccttaagtgaaataactaaaaatgttaaactacctgtagttgcggatatacattttgattacagattagcacttgaagctataaaaaatggagtttcagctttaagaatcaaccctggtaatataggaagtaaagaaagagtggagcttgttgcaaaaagtgcaaaggaaaagaatattcccatacgaataggagtaaattcaggttctcttgaaaaggacattttaaacaaatacaaaagagtttgcagtgaagctttagttgaaagtgccctaaatcatgtaaaaatattagaagatgtaaattttaatgacatagtaatatctataaaatcttctaatgttcaaatgatgatagatagctacagattaatttcaaaagaagtaaactatccactccatcttggtgtcacagaagcaggtactatatggcgaggaactataaaatcctccataggtataggaactcttttaagtgaaggtataggtgatactataagagtatctcttacaggagatcctgtagaagaagttaaggttggtagagaaattttaaaaacttttggatatcttaaaagcggagtggaatttatttcttgtcctacttgtggaagaacttctatagatcttataaaaattgcaaatgaagttgagaaaagattagaaaagactaataaaagcattaaggtagcggttatgggttgtgttgtaaatggtcctggagaagcaagagaagctgatataggtattgcaggaggaaaaggagaaggtctcatatttaaaaaaggagaaataataaaaaaagttaaggaagaaaatctagttgatgaacttatgagggagatagacaatatgtag

SEQ ID NO: 15704 - DNA, 3501 bp, Clostridium acetobutylicum
ttgaatcgattaaccaagttttcgcttaagaatatgtttgtaatatttcttataataattttgattacagttggaggactttattccacaaaaactataaatatggagtctatgcctaatataaacataccagttgtaacagcagtaacggtttatccaggtgcatcgccagaacaggttgcaagcgatatatcgaggccagtacaaaaagcaatttcagggatacagggcatacaggatgtaaaaactacatcaaatgaaaatgtatctgtagtagttgctcaatttgattattcggctgatatggataaagctcagaaaaatgtagaggatgctgttaataagattaaatttccagagagtgctaagaagtcaacaatttctagaataagtatgggaagtgcacctataatgacttattctataaatagcactaaaagtatagatgaattaactaagattgttaatgataagattgagccaaagctcagcggaatttctggagtttcaagtgtagagatgcaaggaacttccaatgatgatatatatgtaaaagttgataatgataaacttaaaaataatggacttactttatcagatgtgaagactgcacttcagggaaataatatatctattccagcaggaagtgtaaacgtgggagatagtactcttccaatagaaatgaccaagaagctgtatactactgcggatatagaagctatgcctatagctgttattccaaatcaaaccaaggttgtaggagaggcatttcaacaggttcagggaggaatgacacaattaggacaggctgtcggtcaactaggacaaaatatgggacaattaggacaggctgttggtcaaatgggccaaggcatgggacaaatggggcagatggttggaggaaacacacagtccatcgcaatattaaatcaaatgcaaaaagcgcaatctcaaatattattagagcaggaggttttgactaaccctacctcatcagctcaagataagactaaggcgcaggcaactataacagcagctcaaggtatgcttcagcaggctcaagctcagcttgataaacttatgggcgcgcaaatagaaagtagtaaagctttaagcagctcagctggatcattgaaaaccgcagctccaagccaaggaacagcaaaatcaagctctgcaccaagcttaggcagtagttcttcttcaagcagttcaaatgcatcgcagattaaagttgtataccttaaagatgtggcaactgtaacaagaggaagtgcagataaaagttattttataagatcaaatagtaaaaacagtatcatacttaacatttataagacagatgatggaaatacagtaaatgttgcaaaagatgtagcaagtgctcttgaagatttacaaaaatccaacaacggcattaagtttaataagataagtgattcatcaaaatacgttaaggattctgtaaatggaatggttagagagggagttttaggagctctttttgcaatagtagttatagcatttttcttaaaaaatataaaggctaccataatagctgtagtttctataccactttcaatacttatagcacttatacttctacctagatttggaataactttaaatataatgtcactttcgggaatggcggtggcagtagggcgtatagttgatgactccattgttgttattgaaaatattcatcgaaggattctaaaagatgatgttgaaaagggcaagataattcaagtagcagcagacgaggtttcctctgcaattacatcatcaacagtaaccactgtagcggtattcttaccactagctatgataagcggaatggttggaaaagtatttgtgccttttgcggtaacagtagtaatatgtattttagcttcacttttagttgcagtaacagtagttcctgtaatgagcagacttatgatattaaatgaaaaaccgaagcctgaaaaaggtgaaggagctatagtaggtttctacaagaaagttcttaatggagcacttaatcatagagcagcagttatgggagtttcagtagttttatttgtactatcgcttttcctcattaaaggtataggtattcaatttttaccttctagttcatcaaatgtgttaaatggaacaataactacagcaccaggaacttccgcagaaaaaactaatgaagaagctttaaaattcgagaaatatcttttaaatagaagtgatgtaaaaacagtggtaagttcaattggtgataatagttcaagttcatcctctgcaatgtctatgcagggaggaaattctggtaagataactatagttcttaaagacggagttaataacgataaatcagcagatgaaattataaaaaaagctacagatatgtcaagcaaaaatactaaatttgctgttacagttcaaagctttacaagtggcagtaaggataatgttgaaatagttgtaaacggaaataacatgaaggatataacagcggcagcaagtaaggcaacagaagctcttaaaggagtaaaagaacttacaaatgtaaacaatacgctttcaagcaaaaaaccagaaatttcagttgcaatagatagcgcaaaagcagcaaatgaagggctatctccaatgattgcagcaggaatggttcagggtatcatgaactacaataatgttactacaatacaatcaggaaaaaataatgtaaatgtgtatttgggatatgacaataaggacattaattccctagataaggttaaaacaatacaacttcaaggagcatctggaagctttaatttaagcgatatagcagatgttcaggttgcagatggacctgtaagcgtagaggagcttaacggaaaccaatatgcatcaattacagcagatgtaaaaacaaaggatactcaaacagcatctaaaaatgcgatggaaaaaataaaatcaattaagggaattccaaacggggttacttttacccagaacggaagtgctaagagcataagtgatagtttctcacaaatgggaatggcaatgcttgtggctgtgtttatggtttatatagtaatggtacttgcctttggagaacctaaagcaccatttgcaatattattctcactaccatttgcagctatcggagcaatagtagctttatttataacaagacaacctttgggtattccagggcttataggaatgcttatgctcataggaatagtggtaaccaatgctatagttctgttagatagggtgcagagcaataggaaaaaagggatgctggtacgtgaggcacttattgaagcaggagctataagaatgagacctatatttatgacagcaatagcaacagtaatggcacttacacctcttgcggcaggtttctcagagggagcagtaatttcacaaggtcttggtatagtagttataggaggtcttgtggtatccacaatacttacacttataatagttccagtaatgtatagtgttcttgaaagagattaa

SEQ ID NO: 15705 - DNA, 198 bp, Clostridium acetobutylicum
gtgaataaagaatttgatttaggttatattgttgaaatgaaaaaacagcatccatgtggaacaaatcgatgggagattataagagttggtgcagatgtaaagataaaatgtgttaattgtggtagaataataatgcttccaagaagtcaatttgaaaagagattaaaaaaagttttagaaaagaaagaagaaaattga

SEQ ID NO: 15706 - DNA, 747 bp, Clostridium acetobutylicum
atgggagaaaaacttttacaaattaataatatacatgcagaagctgatggcaaagaaatattaaaaggtttagatttaacagttggaaaaggtgagattcatatagtaatgggacctaacggtgctggaaaatcaactcttatgaatgtaataatggggcatccaaaatataaaattacgaacggaaatataaactttgagggtgaagatataactgatcttaaaacagatgaaagagcaagaaaaggaattttcttatccttccaaaaccctgaagaagttgctggaataacagctagtgatcttataagaagtgctaggactcaggctgaaggaaagccaataaagctaatggcttttagaaaagagctaaaagagaaaatggcattactagaaatgaatgaaagttattcagaaagagatttaaacgtaggtttctcaggtggagaaaaaaagaaaaatgaaatattacaaatgttaatgttaaaccctaagcttgcaattttagatgagacagattctggtctagacgttgatgctgttaaaattgtttcagagggaataagtaagtttaaaaatgaaaataattctcttcttataataactcacaacagcaaaattcttgaatctttaaaacctgattttgttcatgtattattggatggaaaaattgttaaagatggagatatctctttaatgaatgaaataaatactaagggttttgttgactttaaaaaaatggtttaa

SEQ ID NO: 15707 - DNA, 1032 bp, Clostridium acetobutylicum
attttgttaggaggaaattttattatgggtgaaaataaaaaggtcatatttagtgggattcaaccatcaggtgaacttactataggaaattattttggagcaattaaaaactgggttaaacttcaggatgaatatgattgttattattgcatagtcgatttacatgctataacagtaaagcaggaagcaaaagatttaagaagaagaacacttcagcttattgcaacatatattgcatcagggatagatcctgagaagaatacaatttttatacaatcacatgttccggcacatgttcaagcacaatggattcttaattgtatgtcgtatgttggagaactttcaagaatgactcaattcaaggataaatctaagaaatatgaggatacaggtattggagcaggacttttaaattatccagttttaatggcagcagatatacttatttatcaagcggacttagttccagttggaaaggatcaaactcagcatattgagcttactcgtgatttggctcagagatttaattcaacttacagtgagacttttaaaataccagaaggatatataccaactggtggagcaaaaataatgagtcttcaagaacctctaaagaagatgtcaaagtcctcagataatccaaacagctttattttaataatggatccaccagaagttataaaaagaaagattgcaagagctgtaactgataatgtaggagttgtaaagtatactgacgatcagccaggagtaaaaaatcttatgaatataatgagctgttgcacaggtatgagtgtaaaagatatagaggataaatatgaaggacagggatattctaaattcaaggaagatgttgcagatgcacttattcaagaattagaaccaattcagaataaggtgaatgagcttttgaaggataaagcatatcttcaggacatatgtaaaaaaggagctcaaaaagcgtcctacatagctaataaaactgtatctaaaatgatgagaaaagttggatttatattgccagaaaaatag

SEQ ID NO: 15708 - DNA, 345 bp, Clostridium acetobutylicum
atgttagatgttataaaagaaatagaagcagaacaaataagaacagatcttccaagctttaatgttggagatacagttagaatcgaagttagaatcaaagaaggcgagaaggaaagacttcaagcttttgaaggaactgtaatcaaaagacagaacggcggtcttagagagactttcacagtaagaagagtagcatacggagttggagttgaaagaacattccctttaaatgcacctgttattgctggtcttaaagttgtaagaagaggtaaagttagaagagctaaactctactacttaagagatagagttggtaaagctgctaaggtaaaagaaataagataa

SEQ ID NO: 15709 - DNA, 570 bp, Clostridium acetobutylicum
atgtggtcatatgataaaattacagattacttaatgaataatttaggtgaaaagagatataaacatagcttaggtgttatggatactgcagttagacttgctggaatttataatgaggacacagaaaaggccagaatagcaggacttgtacatgattgtgcaaaaaaactacctggtgagaagattattgaaatatgtaccaacgaaggctatgaattaggagatgaggatataagaaattcttatcttctccatggtcttgctggaagaattttagctaaaaaagttataggaattgatgatgaagatgtacttaatgctatagagtttcacactacaggaagacccaatatgtctctcttggagaaaataatatatatagcggattatattgaaccaggtagagaatttaaaggtgttgatgagcttagaaaagcagcagatgaagacttgaataaagctcttttaatgtcttttgataatacaattaagtttgtaattgataagggtggttttttacatcataatactatagaagcaagaaattatttgatttctagaaaggggtag

SEQ ID NO: 15710 - DNA, 765 bp, Clostridium acetobutylicum
atgtttaagataaatgccttgaacaatctgtttgttcagttttttgattcaataaataaattcgtttataatattgtaccggataaaaactattcttatggtctagcaataataattcttaccataataataaagactttgcttgtaccatttagtataaaacagattaaatcttctgttcttatgaatgcgttacagccagaattaaaaaagcttcaaactaagcttaaaagtgatccacaaaaattgcaacaagagacaatgaagctatacaaagagaaaaatgttaatccttttggaggatgtttattattaattatacagtatcctattttaattgcgttatattatgttttttatagtttacatataaaaggaatagggtttttatggatacatgatttatcgcaaaaggctacattcagtaattggactacatggattttacctatagtatctggtgctactacatatttgtcaggtatattaactatgcctccgagttcagatcctgcccaaagaaaacaaactactactatgaatataggaatgtccattttcttactttggatgagttggaactttagtgcggcacttgttttgtattggacggtaagtaatttattccaaatggcacaatcaaagattattattactgcagtaacagcaaaattagaagcagaaaaaaacagcgtagaggatagcagtaatattatttcacagaatattgataataagaagaataaaaagaacaagaaaaaataa

SEQ ID NO: 15711 - DNA, 525 bp, Clostridium acetobutylicum
atgaatataccaaacttactcacccttttcaggttttttttaataccgtgttttatatttgcttttttttctcgttcaaatgattctttaattaattcggcaataatattttttatagctggttttactgatatattagatggatatatcgcaagaaaatttaatgaaataactaaatatgggactgtaatggatcctctagcagataaactcatgctcttaacagttctatgttgtttaactataaaaggctacataccattattaatattgctaataatgctagcaaaagaattttctatgattataataggtgtatttctctacggtaaaaacataattattcctgctaatatatggggtaagttatcaacccttattttttatgttgctattttgttttttacatttagcaagttcctaggaacttatctattatacatagctattcttggtgctgttgttgcctatataaattactttttgatttttttatcaaaatacagacaaaatgctaccaaataa

SEQ ID NO: 15712 - DNA, 1545 bp, Clostridium acetobutylicum
atgaataatactaataaattaataattactatagtttgtttagttattataataactatagttgaaatgtatatcagaagaaaatatgcttgggctaaaatttctaaggccgaagaagatgcaaagaaaataaaagaagacgcaaaaagagaagccgagacactaaaaaaagaggctactttggaagctaaagaagaagcacataggctaagatcagatctggataaagaaaccagagaaagaagaaatgaaattcaaagacttgaaagaaggaatcttcaaagagaagagaccttagacaaaaaaaatgatttgcttgaaaagagagaaaacggtcttaatgaacgtgaaaactcaatacaagaaaggcagaacactatagaacagctctataaagaagaacgagaaaagctagaacagctttccggtttgacttctgaagaggcaaaaaatttacttttagaagaagttaatagagaaattaaacatgaaaaatctataatgattaaagaagtagaacaaaaagctaaagaagaagcagacaaaaaagcaagagaaattattacgtatgctattcaaagatgtgcagctgatcacgttgcagaatcaacagtttacgttgtatctcttcctaatgatgaaatgaaaggtagaataataggtagagagggtagaaatatacgtgcaattgaaacccttaccggtgtggatttgattatagatgatactccagaagctgttattttatcaggatttgatccagtaagaagagaagttgctaaagttgctcttgagaagctgatacttgatggaagaattcatcctgctagaattgaagaaatggttgagaaggcaaaaaaagaggttgaaaataatattaaagaagaaggcgaacaggctactttcgagacaggtgttcacggtttacatagtgagttaactagacttcttggaagattgaagtatagaaccagttatgggcaaaatgttttaaaacattccatagaggtatcttatcttgctggctttatggctgcagagcttggaattgatccaacttttgctaaaagagctggtctccttcacgatattggtaaagcagtagatcatgaagttgaaggacctcacgctttaataggtgcagaagtttctaaaaaatatcatgaacttcctcttattgtaaatgcaataggagctcatcatggtgatgtagagccacaatcattagaagctattttagttcaggcagcagatgccatatcagcagctagacctggagcaagacgtgaaacattagaagcatacattaagagattagagaaattagaagaaatagctaattcttatgaaggtgtagagaagtcatatgccattcaggctggaagagaaatcaggattatggttaaaccagaaacagttgacgatgcgggttcaatagagatggcaagaggtattgttaagaagattgaagaacaattggaataccctggtcaaatcaaagtaaatgttattagggaaactcgcgcagttgaatatgcaaaataa

SEQ ID NO: 15713 - DNA, 354 bp, Clostridium acetobutylicum
gtgttaaacaaggttcaatcaagaaaaagacgtcacttgagagtacgtaataaaatttctggtactcctgaaagaccaagacttgctgtatatagaagtgaaaaaaatatatatgcacaggttattgatgatgtgaacggtactacattagtttcagcatcaactttagataaagatttctcagctaaggctggaagtaataaagaagctgctaaacttgtaggaggaatcgttgctaaaaaggctttagataaaggaataaagcaggttgtttttgatagaggtggatacatatatcacggaagaatcaaagaacttgctgaagcagcaagagaagcaggattagagttctaa

SEQ ID NO: 15714 - DNA, 636 bp, Clostridium acetobutylicum
atggaggaagatagtttttacacaaagggtgaagaaattgcaaatgctataacgcatttagttggtgcagctttagcaattgcagcaattgttattctagtagtttttgcagcgaggaatgggaatgcatggtatgttgtaagttattctgtttatggtgcgtgccttttcatactatacttattttctactctatatcacagcatctttaacaaaagagcaaagaaagtttttaggatatttgatcatgcttcaatatatatactaattgcaggaacatatactccattttcattaacggttcttagacatcatggaggttggataatattttctgttgtctggatagcagcaattattggaatcacactaaaggtttttttctgtggtaaatttgaaaaattatctacattactctatgtaataatggggtggatgattgtaatatactttaaaaccttattagcatctatgccttttacaggaatagtatttttagttgctggaggaatagtatataccctaggagctctattatttctattcgataaaattccatacaatcatgccatatggcatctatttgtaatgggtggcagcgtatgtcacttcttcgcagtcttgtatttgttataa

SEQ ID NO: 15715 - DNA, 666 bp, Clostridium acetobutylicum
ttgggtataacttataacctgcagaaggtaaaagaaaaaattccaaaggaagttactcttgtagctgtatctaaaaccaaacccattgaagacattaaagaagcttatgaacaaggtattagagattttggagaaaataaagttcaagagcttatgagtaaatatgatgaaatgaatagcgatgttaggtggcatcttataggtcatcttcaagttaataaggttaaatacatagtgggaaaggtttttttaatacattctcttgatagtataaaacttttaaaggaaatagaaaaacgttataccaatgaaggtttaaaagccgatgttcttatatatgttaatataggaagagaggaaagtaaaactggaattttagaagaaaatttagaggctttattagatgaatgccaaaaatgtaatagtgtaaatgtaaagggattgatggcagtaatacctgtaggtgatgataatagcaatagacattactttagaaagatgaaagctatctttgatgatttaaaacataagaatataaaaaatgttgatatgaagtatttgtctatgggtatgactcatgattatgagattgctatagcagaaggcgctaatattgtcagggtaggagaaggtatattcggcaaaagagactacaataaaatatag

SEQ ID NO: 15716 - DNA, 2094 bp, Clostridium acetobutylicum
atgggacagaaattagtaatagtggaatctccagccaaggcaaaaaccataggtaaatatctggggaaaaactacattgtagaagcatcaatggggcatgtaagagatcttcctaaaagtactttaggagtagatatagatgataattataatcctaaatacataaccattagaggcaagggtgaattattggataaactaaaaaaggcagcaaagaaatgtgacaaaatatatcttgcaaccgaccctgatagagaaggggaggctatctcttggcacctttcaaaggttttaaagatagatgaaagtgaaaagtgcagaatagaatttaatgagataaccaagaatgcaataaaaactgcaataaaatgtccaagaaaaattaatattaatcttgtagatgcacagcaagcaagaagagttcttgacagattagttggatataagataagtccaattttatggagaaaggttaaatggggactaagtgcaggtagagttcaatccgttgctcttaaaatggtatgcagtagagaaaagcttataaatgatttcaaaccagaagaatactggagcatagatgctcaagtatataaacaatctaaaaaagataagtttacaataagactaacttcatttaaaggtaaaaagataaaaataaataatgaagaagaaaatgaacaaataataaatagtattaagaaagatgagtttaaagttgaaaatgtaaaagagggcacaaaaaataagaatactcttccaccatttactactagtactcttcaacaggatgcaaataaaaaacttaacttttcaacaaagaagacaatgtctgtagctcaacagctttacgaaggaatagatgttaagggacatggtacaatcggtcttattacttatatgagaacagattcagttagagtatcaaaagaagctcaagaggcagctaatgattatatattaaatgaatatggtaaagagtatttacctccaagtcccaaattatataaaagtaaaaagaatattcaagatgctcatgaagcaattaggccaacttatatagagcttactcctggtatggtaaaatcaagtttaaaggatgatcaatataagctttataatttaatatggtctagatttatggcaagtcaaatggctaattgtattttaaatacgttatctattgaaataaaaaatggtgagtatacatttagggcatcaggtagcaatgttaaatttgaaggttttatgagagtttataagtacaatattgaagaagatgaacataatgaaaaaattccgttgttgcaaaaaggtgatttgttacatacagacaagatagatggcaagcagcattttactcaaccacctgctagatttacggaggcttcattagtaaaaactcttgaagaaaatggaattggaaggccaagtacatatgcgcctattatttcaactcttatcgatagaaaatatgtaaagaaggaaaaaaaggctatattccctactgaacttggaaatatagtagataatatattaagcgattattttaagcaaattatagatattgagtttaccgctgatatggaaaataagctcgataatgttgaagaaggaaaagaaaactggaaagaaattgttgatgaatactttaaacctttgaaggaagcaattgatattgctgaaaaagaagttgctaaaataaccatagaggatgaggttacagatataaagtgtgacaaatgtggcagaaatatggttattaaacacggaaggtttggagattttttggcatgtccaggatatccagattgtaaaaacacaaaacctattgtagaaaaattgaaagtaaaatgtcctaagtgcggtggagatgtaattgtaagaagaagtaaaaaaggaaggaaattttttggatgtagtaactatccagactgtgattttgtaagctggtttgaacctacagaagaaaattgcccaaattgcggtagctttatggttaaaaaatttagcaaggctaaaggatactatcttcagtgctctaaccaagagtgtaaatatgaaaaatctaatcctgatcctgacaaaaaataa

SEQ ID NO: 15717 - DNA, 336 bp, Clostridium acetobutylicum
atggaggctaaagctatagctaaatacgttagaatgtccccaatgaaagttaaaatcgttcttgatttaataagaggaaaaaatgtaaatgaagcttttgctatattacaatatacacctaaagatgctgcagttgttataaacaaagtgctaaaatctgcagtagcaaatgctgaaaataattttaatttagatggaaacagattatatgtttcagaagcatatgcaggtcagggacctacattgaaaagatttcaacctcatgcacagggtagagcattcagtataaagaaaagatcaagtcacataacagtgattgtaaaagaaagagattaa

SEQ ID NO: 15718 - DNA, 522 bp, Clostridium acetobutylicum
atgagtgaaaaagctaaatggtatgttgtacatacatattccggttatgagaataaagtaaaagcaaacattgaaaaaaccattgaaaacagaaatttgcaaaatctaattatggatattcaagttccacttcaagaggaagttgaagaaaaggatggaaagaaaaaagtaactttgaaaaaagtatttccaagttatgtccttataaaaatggtaatgactgatgaatcatggtatgttgttaggaatacaagaggatgtactggatttgttggcccaggatcaaaacctgttcctttgactgatgatgaagttaaatcaatgggcataagggaaaaagtagctagcatagatattgttgttggtgaaaatgtaaaagttatttctggtccacttatggatcaagtagctctcatccaagaaatcaatttagaaaaaggcaaattaaaaggcttagttaatatgtttggcagggaaactcctgttgagcttgattttaatcaaatagaaaaactagattag

SEQ ID NO: 15719 - DNA, 588 bp, Clostridium acetobutylicum
atgtacagaccaaaggaccacggatgggttgaggttattgtaggaccaatgtatagtgggaaatcagaagaacttataagaagaataagaagagctaaaattgcaaaacaaaaaattcaagtttttaaacctgaaatagataacagatatagtaaagaagatgtagtttctcatatgggagagaaggaacaggcagttgcaattaaaaatagtagagaaatattaaaatattttgaggaggatacagaggtaattgcaatcgatgaggtacagttttttgacgatgaaatagtagaaattgtaaataaaattgcggagagtggtagaagagtaatttgcgctggacttgatatggattttagaggtaagccatttggacctataccagagcttatggctattgcagaatttgtagacaagattcaggcaatatgcgttgtatgtggaaatccagcaactagaacgcagaggttaataaatggaaagccagcgttttatgatgatccggtggttttgataggagcaatggagtcttatgaagcaagatgtaggaaatgccatgttgttccacaaaaaaaagaggtgtaa

SEQ ID NO: 15720 - DNA, 1071 bp, Clostridium acetobutylicum
atgagtggagtttgggggaataaaattaaattatcaatttttggagagtcccatggaaaggcgattggaattgtaataaacggacttgaaccaggagtagagcttgaccttgaatttataaattctgaaatggagagaagagcacccggaagaacaaaatattcaactcaaagaaatgaaaaggataactttgaaattgtaagtggattttttaatggtaaaactacgggaacaccactttgcgcaattatatggaatggaaaccagcattcaaaggattattctaatgtaaaggattttgcaagacctggtcattcggattatactggatttatcaaatataaaggctttaatgactatagaggcggtggccatttttcaggaagacttacggcaccattggtatttgcaggtgccgtagcaaagcaaatactttttaaggataacattataatagggagtcatattcttagtataaaggatacaaaagagaagtattttgataaggtaaatatagatagtgaaacacttatatcgttgacaaagaaggcttttcctgttttagatgataaaaaaggtgaggaaatgaaggaggttatacttaaagctaaaaatgatttagattctgttggaggtataatagaatgctgtgctttaaaccttccagcaggaaagggtgacccgttttttgattcttgcgagagtatattaagtcatatgctattttcaattccagcagtaaagggtgtagaatttggagaaggctttaatataaccaaaatgaaggggtcagaggctaatgacgatttttataccaaaaatggaatagtaaaaacttattcgaataacaatggtggtatattaggcggtataacaagtggaatgccattggtgtttagagctgcttttaagcctactgcttctatttacaaacctcaaaaaactataaacatgaaaaccatggaaaatgaggagataagtataaagggtaggcatgatccttgcattgttttaagggcagtacctgttgttgaggctgcatgtgcattatccatattagatattatttga

SEQ ID NO: 15721 - DNA, 1989 bp, Clostridium acetobutylicum
atgaacattgatgaattatcaataaataccataaggattttatcagctgaagcaattcaaaaggccaattcagggcatccaggtaccccactaggagcagcacctgtagcgtatacactttggtcaaagtatttaaaacacaatccttcaaatcctaaatgggtcaatagagatagatttattttatctgctggtcatgcatctatgcttttgtattcacttcttcacttatttggctataagatttccatagatgatttaaagaattttagacaatgggagagtataacaccaggacatcctgaatatggagttaccccaggtgttgagataagcacaggacctttaggtcaaggtatagctaatggtgtaggtatggctattgcagaagcacatcttgcatcaaaattcaataaacagggttttgatatagttgatcactatacatatgttttaagcggagacggctgtatgatggaaggaatagctagcgaagctgcttcttttgctggaactttaggattatcaaaactaatagtaatatatgatgataatgatatttcaatagaaggaaatactgatatagcatttaaggaaaatgttggagaaagatttaaagcatatgattggaatgtaataaacgttgaagatggaactgacgtaagtagtttaagtaaagcaattgaaaaggcaaaacagcaaaacgataaaccatcaatcattatagctaaaacagtaataggctttggctcaccaaatcaaggaacagctggagttcatggctctccactaggagaaactggagtaagtggattaaagaaaaatttaaattggaattatgaagaagaattttatgttccagaagaagttaaagagcatataaaaaagcttcaaaaaacatttgaagaaaatgaaagtaactggaatgaacttttaaataaatataaagaaaaatatcctgatttatttgatgaatttaatgcttggatgaatggtgaagtaaaagtaaagctagatgaaattgatgcatttaaagagttagaaaaacctatggcaacaagagattcatcaggaaaagcattaaatataatagcaaatgtagtgccaaatttaataggtggatctgctgacttagcaccatcaaataaaacatacatgaatgataagggtgatttttcttctgatgatagaagtggatcaaatcttcactttggagtaagagagcatgctatggctgctattgcaaatggagtatctgcacatggcggactaaaaatattcgtatcaactttctttgtattcagtgattatatgaagggtgcaatgagaatgtctgctcttatgaatctccctgttgtgtatgtgcttactcatgatagtataggagtaggagaagacggaccaactcatgaaccaatagaacagttagcagcacttagaagtatacctaatttaacagtattgagaccttgtgattcaaaggaaactgtagaggcatggaaatacgcattagaaagagaagatggacctacagcacttgtacttacaaggcaaaagcttcctttgtataatgaaactggaaaaggtttattaaaaggtgcgtatacactaaaagattctaaaaaggatgttccagatatgcttcttatggcttcaggctcagaagttgaattggtgtatgaggcacaagaagaacttttaaataaaggaatagattcaagagttatcagtgttccatcctttgaacttttcgataagcaggataaggcttataaagaaagtgttatgccaagcagcgttagagctcgtgttgcagtagaggcagcatcttcatttggttggcataaatatactggaattgatggggaaatcatttcaatagatcattttggagcttcagcaccagctgaaacacttttcgaagtgtttggattcactaaggaaaatgttattaagacaagtgaagaagtgctaaaaaataataaataa

SEQ ID NO: 15722 - DNA, 2187 bp, Clostridium acetobutylicum
atgggaaaaatacttgttttagctgaaaaacccagtgttgcaagagatcttgccaaagtgttaaaagcaaatattaataagaaaactcatttagaaggaaataaatatgtagtaatttgggcattagggcacttggtttcattagctgaccctgaaagctacggtgaaaagtataaaaaatggagtatggatacacttcctatgcttcctaagaatatgaagttaagtgttttgaaaaatacatcaaagcatttctatgatataaaaaaggttatggaaagaaaggatttagacgaacttgtaatagcaacagatgctggacgtgaaggtgagcttgttgcaagatggataattgaaatggcaaagtggaaaaagccaataaagcgtctttggatatcctcacaaactgatagggccgtaagagatggatttgcacatttaagagatggccgtgattacgaaaatttatataaatctgcaaagtgcagatcagaagcagattggtttgttggacttaatgttacacgtgcactaacttgcaaatataatgcacagctatcagctggtagagttcaaacacctacgctctatatgattgtttcaagagaagaagagataagaaaatttaaaccaaaggactattatactatagagggaaaggtaaaaagcttctccatgaattggcacgataaatctggagattttaaaatatttaacaaagagagagctgaaaagatagaagctctagttaaaggcagcaaaggaaaaattgtagatgttagtgaaagtaaaaagaaaaaatattctccagcattatacgatttaactgaacttcaaagagatgcaaatagattctttggattttcagcaaaagaaactttatcaataatgcagagactttacgaaaatcataagcttttaacttatccaagaacggattcaagatatattcctcatgatgttgtagcaactcttccagatagattgagagctatttccataggaaagtattcaaaatttgcagcagaaatattaagaagtaaaataaatgttcacaaaggctttgtggatgattctaaggtaacggatcactatgctataattccaacagaagaaagaccagcgcttggggctttaagcaatgaagaatttaaaatatatgatttagttgttaaaagatttttaagtataatgcttcctccttttgaatatattcaaactacagtgaaggcagaggtagccggagagatatttatagcaaaaggaaaggttgtaaaatccaaaggttggaaagaagtttacgacaaaactgaagattttgaagagaagagtgaattaaaagatcaaatgcttcctgaaatgaataaaggagaagatataaccttcagtacagtttctattaaaaaagggcaaactaaaccaccttcaagatttacagaagcaacacttttgtcagcaatggagaaccctcaaagatatgttagcatggataaaatttctgcaaaaacacttggagagacaggtgggcttggaactgttgctacaagggcagatataatagaaaagctttataagactttttatatagagaaaaaaggaaatgaaatagttccgacatcaaagggaaaacaactagttaatttagtaccttctgatttaaagtcacctcttttaacggcaaaatgggaaggacagcttgatgctataagcaagggaaaattaaatggagtaagttttgttaatgaaataaaaggatatgcttctaagcttgtagatgatgtaaaaggaagtaaggacacttttaaatatgataatttaactggaacaaagtgtccagagtgcggaaaatatatgcttcaggtgaatggtaagaagggtagaatgcttgtatgccaggatagagagtgcggacatagagagaatttagctatgttcacaaatgtaagatgtcctgaatgtcataaaaaacttgaacttagaggagaaggagagggcagaatatacgtgtgcccaaactgcagctttagagaaaagtattcttctttccaaaaaaggtttaagggtaataataataaagttaataaaagagaagtttcaaattatatgaagaagatgaaaaaggaagcagaagcaccaattaataatgcctttgcagatcttatgtcgatgtttaaagataaaaattag

SEQ ID NO: 15723 - DNA, 978 bp, Clostridium acetobutylicum
ttgaagggtatagatatttattcgggacaaggcaatgttgagttctccaaagttaagcttagtggtgtagagattgtttatataaaagctactgagggtgtaacgtatgtagataaaacaattaggcagtttcaaagtgatgctaaaaatgcaggacttaaagttggattttatcattttttaagagctaataatcctataaatgaagcggataattttttatctgctatttctgggttaagctacgattgcaagctggctattgatgttgaagctactttaggtcaaaccacaaatcaaataagctcaaatgtaagaaaatttgcagattatttaaagggaaaaggactggatgtttgtatttacacttatactaacttctataaaaataatttaaataatagtgttaaggatttacctttatgggtagctgaatatggtgttacaaggcctagtataaatactccatatgttggatttcaatacactgaaaatggttctataagcggagtgtctggtgctgtagatttgaatgaatttaatgatggtatttttataaattcagacagcagaggtgaatttataataacaggatcagatacagttaaaattatacagcagcagcttaatacacttcttaagaaaggtcttatagtagatgggataagtggagcaagtaccacagctgctattaaagaattccaaggagctatggggttagcacaggatggaatttggggaccgaaaacggttgcagcagttacagaaatttattctaagccaacagatggtgttaaattcaagcattatgagtatgccacaagatatattcaatacagagtaggcggcaaattagatggagtgtatggacctcaaactgaggctaatgtaaaggtatggcaatcaaatcatggtttaaatgcagatggaattgttggaaatgacacatggaataagctattaaatgaaaattcttaa

SEQ ID NO: 15724 - DNA, 360 bp, Clostridium acetobutylicum
atgaaggaaaatagaatacgaaaaaatgccgagtttagaagagtatatagaaaagggaagtctttttcaaatagattgctagttttgtacgtctataaaaattatatattaaaggatataaatagaattggaatatccgttagtaaaaaggttggtaagagtgtagttagaagtagagtgaaaaggttaattggagaaagttatagattgaattctagtaatttaaaaaaaggtcatgattttgttattatagctagaacagcttgcaatggtaaacgttattcagatatagaagattctataaaaaatttgtttaataaggcaggcttagttatatatgatgagaagaatattacttaa

SEQ ID NO: 15725 - DNA, 1107 bp, Clostridium acetobutylicum
atgctaagtgttattaaaactgcaattgcaaccataataatatcaattatatccggattattactagaatacgttaaaaacgttaaaaacgtggctcctaaaatattgtgtactgtaggaaaatgtgtatccttacagatgaatggaaagaaagtttttgcatatattgttactgttagtaacatgtcaaaaaatacagttcatgagttaaccttgaacatacaaagccaaagaggcagccttaatattgctgatgcaaaaataacaaaaggattaaaatttgattcttcaatagaatataatactgttgacatttccatgccttttttaagtaaaggtgataagttttcagttacagtatatgtagaaactcctaataaacctcatattgtattaagatcacctgaaaattttaagcaggtagattccatggatcaaaaaggggtactagcttcagtatttagtatgcctaaaaatgtagctgaaacaatcttaggttcaaaggatgaaaaaggtggaacaggtaccaatagaggacttagtaagaataaaaaggtaattttagctgttgcatcaattgctctagttattcttgctgcagttgctgtaaaattaagtttccaagatgattcacctaataagacacaagctaatagttcaaaagctaatactgaaagcaagccagcaaatacaacaaagcctacaggaagtacacctacaacaagtacaggttctaatgattcaaagagtggaagtagtgtgaattcagaaactaatccgtcaaaatctggatcaaacaaaagtacaggtacaacttcacaaagtggtggaagcggtacaggtacagatacaaagcaaagcacaggtagtggaacgaataccaaagagagtggtaatagtaatagcaatacgaatacatcgagtggaacaagtacagacacaaagacatcaacaggtgaaacaacaggaggttctagtacaaattcaggaacaaatacgtcaggcggaacaacaaatacaaatcaagatactaaaacatcaggtagtggaacaagcagtaattcgggttcaactactacaacaaatggaacaacttcaggtaattaa

SEQ ID NO: 15726 - DNA, 564 bp, Clostridium acetobutylicum
atggaaaaattaataacttctccaattagacaagaagaaatacaagatttaagagctggggatagagtgcttataagtggatacatttatacagcaagagatgcagcgcataagagacttatagaacttctaaacgagggaaaagatcttcctattgatattcaaaatcagattatatactatgctgggccaacacctgcaaaaccagggaaggtaataggatctgctggtcctacaactagtggtagaatggatgcatttgctccaaggcttcttgatatgggtttaaagggcatgataggtaaaggagcaaggtcaaaggaggttgttgaatctattattaaaaataaggcagtgtattttggagcagtagggggagcagctgcacttatttcaaaatctatagtggaatctaaaattatagcttacagtgatttaggatctgaggctataagaaagcttaaagtaataaaatttcctgcagtagttataattgataccgttggaaataatctttatgaaataggaagaaaaagttacctggataaatttgtgcacgaataa

SEQ ID NO: 15727 - DNA, 564 bp, Clostridium acetobutylicum
atgatttatataaaggatgaggaattcataaggggagattgcccgatgactaaggaagaggttagaatccttagtatagcaaagcttgaaatagaagaggatgacacgcttttagacataggagcaggtacaggctctattagtatacagatgagcaaatgtaccccaaagggaaaagttatagcaattgaaagagaagagaaggcgctaaaggtacttgaaaagaataaagaaaaatttaaagcacataatctttatataattaaaggtgatgcatcacagcttaatttagatgaaagctttgatggtgttttcattggaggaagcagtggaaatattgataaaataattaaaagttatgccttaaaattaaaaaaaggtggaaaaatggtgatgaactttataactttagacaatctttatagggctattgaaaccttaaaggaattaaattttgaggtggaatgttctcaaatagcagttagtaaaatgagagctaaaagttatatgatgctttcaaataatcccatttttatagtaacgggaaaagtaatggagggataa

SEQ ID NO: 15728 - DNA, 1401 bp, Clostridium acetobutylicum
atggagatttttagaaagaagactgctgaggattttcaagatgaagccagcagtagtaatcttaaaaggggacttacaagttttgatcttgcggcgatagggataggcgctgtagttggaacaggaattttcgtatccactggacaaggagcaaaattagcaggtccatctgtagtgatttcatttttagtagcagctgtaacctgtggattatgttctcttacgtattgtgaactttcatctatgttttctgtatcaggaagcacatattcgtattcatatattgcttttggagaaattatagcatggataataggttgggatttaatgcttgagtatttggtagcggcttcagcaatttcttcaggatggtccagcacgcttattggtatagtaaaaaactatggagtaaatgtgccagatgctcttacaaaatcacctttatcaggtggaattgtagatttaccagcaatttttataactttggtaataacgtttctattatacagaggagttacagaaagtgctaagataaataatgtaatagttggagtgaagatatgtataatagctctctttgtatttttaggaattactcatgttaaggttacaaattatcatccttttgtaccatatggtgttaatggaataatgtcagcggctgcaataatatttttctcatttatagggtttgatgccatagcaacaactgctgaggaaacaaaagatcctaaaaaggatgtgcccaaaggacttcttatatgttttggagtagttgttgtgttatatatgtcagtagctataatactcacaggaatagttccttatactaaaattgatataaataacgcattaccaggagccttatctagcataggtataacatggggatcagcgcttgttggagttggtgcagtattaggtatgatttcaactttattagttataatgtatggtcagataagaatatttatggttatgtcaagagatgggctccttccaaaggtattctcaagcgtaaacaagaagcacagtactccgggattatgcacggtaataacaggagtgttggtatccataatagcaggtttcttgcctctaaaaatgataatggagctttgtaatataggaactttatttgcgttcatacttgtatcttttggggtaatagttttaagatatactatgcctaatgttgaaagaaagtttaaatgtccaggagttccatttactcctttagtaacagcattcttctgcttttacatgatgattcatcttccgctgtttacatggttaagattcggtgcatggcttcttatagggtttgtaatttattttgtttatggttctaagcatagtaaaatgacagctagggatagaggtaaagaagaagtaagctga

SEQ ID NO: 15729 - DNA, 966 bp, Clostridium acetobutylicum
ttgatagtatcgaaaaatgatgatggggattttgatacaatacaaaaagcagtggacagtgtgtctaagaacaataagaaaagggttattataaaggttaaagctggagtttacaaggaaaaactaagtataagaaaaccttttataagtctaattggtgaagatgtaagtagcacggtcataacctttaatgattcagctaataccttgatggctaataaagagagaatgagaacttttaactcctatacaatgtttgtggatggcgatgattttatttgtgaaaatataactgtagaaaataatgcaggagacggagatctagtaggacaagcagttgcggtttatgctgatggcgatagaatgatttttagaaactgtagattattagcaaaccaagataccctatttacaggaccacttcctccaaagcctatagagggaaacaattttggtgggccaaaggacggtatgaaaagaagagatgtaaggcagtattatgaaaattgttatataagaggagatatagactttatatttggttccgccactgctgtattcaataaatgtgagattttttctaatgataaaaataaagaggttaatgggtttatagcagcagcctcaacgccagaaggaaaagaatttggatatgtattcttggattgcaaattcataagtgatgcaaggaagcatactgtttatttaggaagaccttggagagactatgcaaaaacagttttcataaggtgttttatgggagaacacatcattccagaaggttttcataattggaataaggcaaatgctgaaaaagaaagctactatgcagagtataaaagctatggtccaggtgcagcaaatgataaaagagttaaatgggcgaaacttttaaatgacaaggaagtagaaaagtattccataaccaatattcttaagggaaatgatgattggaaggttatttaa

SEQ ID NO: 15730 - DNA, 150 bp, Clostridium acetobutylicum
gtgagagtaaaactaacactagcttgtactgagtgcagacagagaaattacaacacaatgaaaaataagaaaaatgatccagatagattagaaatgaaaaaatattgtccattttgccacaaacatacacttcataaagagacaaaatag

SEQ ID NO: 15731 - DNA, 1407 bp, Clostridium acetobutylicum
ttgagtcttaatggattttatttgcttcctcaccctccaatagttgttccagaggttggaagaggggaagagaaaaaaatagagaatacaactaaaagctttgaagctattgcaaaagatatagcaggtaaagctcctaatactattataatagttacacctcacggtactatgtttcaagactatattgcactagcctatgaagatgaaatatcgggaagctttaaggattttcgtgctcctaatgtgtcaatggagcttaaaataaacaaagagcttacaagcaaaatatatgaactcgcatacggagaaagaataccttcagtaatggctacaaatgatattttgaaaaaatacaatacgtctgttttcttagatcatggttgtatggttcctttgtactttataaataaatattataaggaatataaaatagtacatattacttatgcagctctaagtgatattgagttatatagatttggaatgaacgttacaaaagcagtagaagaattaaatgaaaatgctgtttttatagcaagtggtgatttatctcacagattaagagaggatggtccctatgggtataatccagctggagaaaaatttgataaggagcttttaaataatctgaaggatggaaatgtagagggagtttttagtatagataaggatacagtttataatgcaggagagtgtggaagacgttctgtagcggttcttcttggaacacttgagggaaagaagtttaaaggagaaattttaagttatgagggtacctttggagttggatacggagttatgaagcttgaagctttttctaatgatacttcaaaattaaaggaattagagagaataagaaaagatgaatatgaaagtaaaaaacaagaaaaagatccatacgtaaaacttgcaagagaaagtcttactcaatacttaactactggggaggccattgaagaaattccagactatgtaacggaagaaatgcgagatctaaaaagaggggtatttgtgtccttaaaaaaatttggagacttaaggggatgtattggaactatattcccagtgactgataatattgcagaggaaattataagaaatgctattgaggcggggttaaatgatcctagattttatgaggtaggaaaagatgagcttgtggacatagacttttcagtggatgttttagatgagccagagagtgcgacaagagaagagcttgatcctaaaaaatatggagtaattgtaacacatggacgaaaaaaaggacttttacttcctaacctagagggagttaatacagttgaggagcagcttgaaattgcacttgaaaaagcggatatagattctcatgaggactatacaatagaaaaattcatggtaacaaggcataaggaaagttaa

SEQ ID NO: 15732 - DNA, 711 bp, Clostridium acetobutylicum
atgaactacgatttaacaaatccatacgaaattgcaaaatacataaaagaggcaaaaaaaacaacaccacttaaagtatacgtaaatggtaacttaggcgactgtacagcagatgatattgactgctttggaacagatgacttttacattttatttggtgaaagtgacaaaatatcagctttcttagaatcacatggggataaaattaaaaaattcaaaatagagcaggatagaagaaactcagcaatacctttaattgatatgacaaaaatagatgcaagaattgagcctggagctattataagagataaggtatccataggaaaaaatgctgttataatgatgggtgctgttataaacataggatcagaaataggcgaaggtgctatgattgatatgaatgctgtcgttggtgctagaggtaaaataggaaaaagagctcatattggtgctggagctgtaattgctggagttttagaaccacctagcaaatcaccatgtgagattggagatgatgttctaataggcgctaattctgttatactagagggagtaaagataggtgctaattctgttatagctgctggttcagttgtagttgaagacgttccttctggtgttgttgtagcaggaactcctgctagaataataaaagaagttgatgataaaacaaaagataagactcaaataatggatgatttaagaaaatag

SEQ ID NO: 15733 - DNA, 687 bp, Clostridium acetobutylicum
atgagtaaagttactttttattttatgagacatggtgagacaataataaatagggctggaagagtacaaggatggtgtgatggagtacttacagatgaaggaattagagtagcagaatatgcgggagagggacttagtgatattgaatttaaagcattttacagtagtgatttagggagggctataaaaactgcaagaattgtacttggcaaaaataaaagaagtgaaaatgctgaattaaaggaagtacctgaattgagggaggtatattgtggaaagtatgagggggaatttgagaaggtaatgtttagtgacatactgaagtatttaaaggtagagtctattgaagaagcactaagaaaagttcctaattttgaaagagcttatgtagatagttgtgccgcaatggacgagactaatgaagcagaggattatgatattttgtctaaaagaatcaataaagctattaccgatataggagaagagacttcaaaaaatggaggaggaaatgtcttagtagtagtacatgggggaatgcttagggttttacttagaaatttagggtacaagcaacatatacataatatggagaactgtagtatttctactgttcaatatcaagaggggaaatttagaattttatctataaatgataatagctataaaagaaggggaaaggaaatgtaa

SEQ ID NO: 15734 - DNA, 1620 bp, Clostridium acetobutylicum
atgataaaaaaaggaatatctgcctcaaaaggatatgctataggacatgtttttattaaagccgataatgaagttaaaatagttgaaaaaaagataagtgatatagaaagcgaaaaagctagactccaaggtgcagttgaaaaagcaagagagcaactcacaaaaatcaaagaaaaagcagaaaaagatttaggtgctgataaagcagcagtatttgaaagtcatatgatgtttcttgatgatccagattttattggttcagcagaaaatataatctcagacgaaatgattaatgctgaaaaagcacttgaaaacgtaatgaaaaattatgtagcaatctttgaaggcattgaagatgaatatgtaaaagagagaattgcagatgtaaaggatgttggaaatagagttttacaaaaccttgcaggaaacgatatgacttctcttgcagatgtagataataacacagttgtagttgcacatgatttaacaccatcagatacagctcaacttgataaaaatagagtaataggtttcttaacaaatataggtggaagaacttcacacagtgctataatggcaagaacacttgaaataccagctgttgttggtcttcaagacatagtagaaagtgttaagaacggagatacaatagtagtagatggagcagaagggattgctataataaatcctgatgaagctacattaaaagagtatgaagctaaaaaagcagaatatgaaaagaaacaagaaaaattaagagaactaataaatgttgaaacaagaactaaagaaggaaaaagagttgaagtttgcggtaatataggaaaggctaaagacgtagaggctgttcttcaaaacggtggagatggagtaggtcttttcagaacagaattcttatacatggatagagatcaaatgcctacagaagatgagcaatttgaagcttataaagctgtagtagaaaaaatgggcgaaaaaccagttgtaattagaactttagatataggtggagataaaaagcttccatacttacctcttccagaagaaatgaatccattccttggatacagagctataagactttgccttggaagaaaggatatcttcaaaattcaattaagagcgcttttaagagcttctgtatatggaaacttaaaaataatgttccctatgatatcttcacttgaagaattcttaagtgctaaagaagttcttaaagaatgtatgggcgaacttgataaagaaggaaagaaatacaacgctaaacttgaaacaggaatcatggttgaaatcccagcagctgctgttaattcagaagaacttgcgaaatatgttgatttctttagtataggaactaacgatcttatacaatacactttggcagcagatagaatgaatgagaaggtttcatacctttacaatccaatgcaccctgctgtacttaaattaatcaaaatgacaattcaatctgcacacaaagaaggaaaatggtgtggaatgtgcggagaaatggctggagatgaaaaagcaataccaactctagtagagtatggcttggatgaattctcaatgagtgcatcttcaatcttaacagctaaagaattgataatgaaagcctaa

SEQ ID NO: 15735 - DNA, 924 bp, Clostridium acetobutylicum
ttgaaaaaaatattaatttcaataatgataataatgatgatatttggaagtgcttgcagtcaaaatagtatcaaaacttctaaagatacaagtaaagaagctgaaacaattacatacaaatcagaaaatggtccaataaaggtaccagcacatccaaaaagaatagtcgcactaaacggaagcacctctggagatatcatgaagctaggcggaaatatagttggtgttgaaaagtactcaatggcaaatcctttgtataaaaaatatttaaaaaatgctactgtagtatctgatgaagacttagagaaaataattgaattaaaacctgatttaataatagcaggttcaactgataaaaacctagacaaactatctaaaatagcccctaccgtttcttatacctacaataaacttggttatttggatcaagttattgaaattggaaaattaataaataaaaagaaacaagcacaggaatgggtaaataattttaaaaagagagcctctgatgctggcgaaaaaatcaaaaataaaataggcaataactcaacagtaacaattttaggtggagataacaaacagttatatgtttttggaagcaattggggaagaggaagtgagatactttatcaagctatgggtctaaaaatgcctgctaaagtgaccgctaacgccttaaaaccaggatattatgttatttcatccgaagttctccctcaatatataggagattatttaatttacatcaaagattcagcagcagacaattcatttcaaaatactgatacatataaaaatattccggcagttaaaaacaatagagttcttgaagttgacgcaaataaattttactttaatgatccaatctcattggactatgagttagacacatttattaattattttttaggaaatagtaaataa

SEQ ID NO: 15736 - DNA, 1296 bp, Clostridium acetobutylicum
atgaaatcatatgttgaaattgttgacgtaatggcaagacaaatcttggattcaagggctaatcctactgtcgaagtagaggttgttcttgaagacggaacagtaggaagagcgtcagtaccttcaggagcatccacaggacagtttgaagctgtcgaacttagagacaacgataaagctcagtacttaggaaaaagtgttctcaatgctgttgacaatgtaaatgagacaatagcaacagagcttataggaatgaatgtatttgaccagacattaattgatcagacaatgcttgaaattgatggaacggaaaataagtcaaagcttggtgcaaatgcaatgcttggagtatcacttgcagtagctagagcagcagctgaatacctaggaattagtctttatcaatatcttggaggagttaatgctaaagttcttccagttccaatgatgaatattgtaaatggaggaaagcatgcagataacaatgttgatttccaagaatttatgataatgccagcaggagctccaagctttagcgaagcccttagatcatgcgcagaggtttatcacactttaaaatctttactacaatcaaaaggacttgaaacagctgttggagatgaaggcggatttgcaccaaatcttaatagtaatgaagaagcaatacaaattattttggaagctgtaactaaggcgggatatgagccaggaaaagatatgtttatagcaatggaccctgcttcaacagaattttatgagaacggaaaatacaatcttaagggcgaaggtaaggtttatacttcagaagaaatggttgaagtttacgcaaatttagtggaaaaatatcctataatatcacttgaagatggtatggctgaagaagattgggatggatggaagctgttaactgacagaatcggagataaagttcaattagtaggagacgatttatttgttacaaatactaagagactttcaaagggaatacagcttggagtagctaattcaatactcataaagttaaaccaaataggaactcttacagaaactttaaatgcaatagaaatggcacaaagagctggatatacagcagtagtttctcatagatcaggagaaacagaagatactacaatttcagatcttgttgtagctgtaaacgcaggacagataaaaacaggagcaccagcaagaacagaaagagttgcaaaatataaccaacttcttagaatagaagaggaacttggcgaagttgctgaatttagaggtttaaatgccttctacaatataaaaaaataa

SEQ ID NO: 15737 - DNA, 1806 bp, Clostridium acetobutylicum
atgagtataaaaaaagatagtataaaggtatatgatatgacctgcacctcttgtgaaaaaaagattgaaaaagcactaaaaactctccctggtgttatatctgttaaagccagtttcgttaaacaaattgttactatagaatatgatgatacaatttgcacaatacaaaaaatcaaaagtgaaataaatagtgctggttacagaacagaagctaaaaatatttacaaaatagctggatttgctttaattgccctatttatggtttttatgagcacctctacttctggctttgatataacctcaaagctaaaaggagctacatacttcataatatttattgttggagtactaacttctattcattgtgttggtatgtgcggcggtatactgctttctcaaagtattaccaaagaaggaaacaaaagctcttcaataaaatcagctatactttataatagtggaagagttttatcctatactatactaggaggaatagttggtgctcttggttctgtatttaatctttcactgggcttaaaatctttcttacagatattcgcagccgcatttatgattattatgggactaaatatgagcggttttagtctttttagaaaaatacaactaaaattaccttttccaagacgcatatttaaaaaagctccaaagacaccattctttattggtatgttaaatggtttaatgccttgtggccctctgcaaactatgcagctttatgcgttaagtacgggaagtcctataaagggtgcactatccctatttgtattttccctaggtacaattcctttaatgatgacctttggtgttttgtcaggttttataagcaaaggaagtactaaagttttattaaaattcagcggaattcttgtgatggttctaggtataataatgggtggacgtggattagctcttgctggtgttaatgttcctactgttagtagcataaagaactccgttctggcttcaccttcaaaagacactaacaactcagcttctaaagcaaaaattgttaatggagtacaggtaattaaaatgacagctgatgaaaatggctataccccaaatggattgtatgttgaaaaaaacaaacctgttaagtggattatcgatgggaagtccttaaattcctgcaatggaacaattgttattcctgatttaaacaaagagatcactttaaaatcaggtgagaatgtaattgagtttactccaaagggcaaggacatttctttcagttgttctatgggcatgattagaggagtaataaaggttgttgacaatgtagcttcagttgatacctcaaaaaaagattcttcaattccaaaaccaagcagtggaatgagttgttgtactggtggaagctctgcctcttctagctcccaagcttcaagtatttatggcagtgatatatcaaaggttcctacagctaacttggttaataaggctaacttaaatggaaattctcagtctctaacacttacgggaaagggctacgaatttcaacctcttatatctgttttaaataaaggagtagagacaaaattaagtgtagatttaaacggttttgataaccctaatggagaatattctattatagatttaaatacacgccaaactgtaactacctttaatggaaagaaaggcatcgtggaagtagattttaaaatagatactagcggtagttatggaattgttaaagacaataacatgatagaagcattagaagtagtagacgatttaaatacttcagatttagaacaaataagaacaaaatacttaggcaggtaa

SEQ ID NO: 15738 - DNA, 1458 bp, Clostridium acetobutylicum
atggagctgtataagctaaaagcgcatgagcttaaagatatgatttcaaaaaaggaagttaaggttgaagaagttaccaattcctttcttaatagaattgaagaagttgatgaaaaggtaaatgctcttctatatgttgcaaaagaagaagctgttaatactgcaaaagaattagataagaaaattgaaagcggagaaagcttaagtggactttcaggagtacctgtagcaataaaggacaatataagtgtaaagaatatgcaaaacacatgtgcatctaaaatacttgaaggatatgtgtcaccttatgatgctacagttatagaaaatttaaagaaaaataatggtgttataatcggtaaagctaatatggatgaattcgctatgggatcatctactgaaaatagcgcattcaaagtatctaaaaatccatggagtttagaaagagttccaggaggttcttcaggaggttccgctgttgcagtagcctctcttgaagcaccaatatcacttggtactgaaactggaggttctgtaagacagccagcatccttttgtggtctagttggtcttaaaccaacatatggaagaatatcaagatatggagttgttgcttttggatcaactttagatcaggttggaatgtttgctagagatgtagaggactgtgcacttttaacacaaaatatagcaggacttgataagatggattttacaacagtagacactcctgttcaagattattcaaaaagtttaaataaggacttaaaaggtagaaagataggtattcctaaggagttctttgaagaaggtttagatgaaggtgttagagaggcagttaaagaagctataaaggtttttgaggaaaacggtgcagaggttaaggagtgttcacttccgttatcagactatgcacttgctgcatactatattatttcctcggcagaagcttcatcaaatcttgcaagattcgatggcgtaagatatggatatagagatgcagaagcggaaaatgctttggatttatatgtaaagtctagaagcaaaggctttggagaagaagctaaaagaagaattatgcttggtacatatgtgctttcaaagggctattatgatgcatattataaaaaagctttaaaggttagaagtttaataaaaaatgattttcaaagagcatttaaagaatttgatgcaataataacacctacaacgcctacaccagcatttagaataggtgagaagacaaaggatgtactttcaatgtatatgtcagatatatatacagtaccagttaatatagctggaattccatctatatctgtaccttgtggatttgtttcaggtcttccagttggacttcagataatgggaaattattttaaagaagatacattatttaatttagcttatagttacgaacaatctactaaatggcatgataagattgctaatttatag

SEQ ID NO: 15739 - DNA, 399 bp, Clostridium acetobutylicum
atggttatgacagatccaatagcagatttactaactcgtataagaaatgctaatgttgttagacatggagtagttgagctaccttcttcaaaaattaagaaggcaatggcaaacatattgcttcaggaaggttacttaaaagatatagaggagtacaatgacggagttgtaccaatgttaagattatccatgaaatatggaaaaggaaaagaaagaatagttactggtttaaagagaatatcaaaaccaggattaagagtttattgcagaaaggaagaaattcctaaagtattaaacggacttggaatagcaattatatccacatctaaaggaatagttactgataaagaagctaggaaattaggattaggcggcgaagtactttgctacgtttggtag

SEQ ID NO: 15740 - DNA, 297 bp, Clostridium acetobutylicum
atgtatacaaatagccatgatataattagaaaacctgttataactgaaaaaagtatggctgaaatggcagataaaaaatacacctttatagtagatccacatgcaaacaaagtacaaattaaaaaagcaatcgaagaagtttttggagtgaaagttgagaaggtaaatacttcaaacatactcggaaaaacaaagagagttggagtgcatgttggtaaaagagcggattacaaaaaagctatagttaaattaactgaagatagcaaagcaatcgagttctttgaaggaatgcaataa

SEQ ID NO: 15741 - DNA, 870 bp, Clostridium acetobutylicum
atggatggaattttaaacatatttaagccaataggactaacatcctttgatgtagtaagacaagtaaaaaaaatctccaaagaaaaaaaagtagggcatacagggacacttgatccattggcatcaggtgttttgcctatttgcattggaaaagctactaaaattgtggattttgtaatggaaggtaagaaaatatacgacgcagaaatgaagctcggtgaaataagtgatacttatgatagagaaggtaagattttaaaagtaaatcaagttacttcaagtgaaaataatatagttgaagctattatgagttttcaaggtgaaattcttcaagtccctccaatgtactcagcactaaaggttaatggtatcaaattatatgatttagccaggcagggaattgaaatagaaagagcttctagaaaaatacacatatatgcaattaagattttaagtatagatattccttttgttaaattccgtgttgagtgctctaaaggaacgtacataagaagtttatgttatgatataggtaacaaactaggatgtggagcattaatgtacaatttaacgcgagtgtcatccggaaatttcaattcttcattcagcattccattggaagatcttaatgagcaaaatattacggaaaatataattaatgttgataaatgcctggaaaattacgatgaaatagcagtagatgaaaaattcgaaaaattattggtaaatggcgtaaaagtatcagacagaagattaattgaaaaaattcctgataacaaaacttatagagtctataatatggaaagaaagtttttaggtcttggaaatttaagtgaagaaggatttaaaataattaaattattaacctag

SEQ ID NO: 15742 - DNA, 981 bp, Clostridium acetobutylicum
atgtatccattaaaatttgaacacttatactatgaaaaaatttggggtggaagagatttagaaaaattcagaaatgatttacctgatggaaatataggagagagctgggatgtagcgtgtcataaaaatggaactagtgtaatttgtaatggagaattcaaagggaagaaacttgatgaattaataaaagaaaaaagtactgaaataatgggaactaagctttctaaggaatggtttcctttacttattaagcttataaatgcaaaatcagatctttctgttcaagtgcatccaaatgatgagtatgcaaagaaagtagaaaatgatatgggtaaaacagaagtttggtatgtagttgatgcaaaagaagaagcagctctagtagtaggaacgtcaggaaattgtactaaggaatcgcttaaagaggcaatagagtcaggaagtttagataaatatatgaatagaatacctgttaaaaagggtgatgtttgccttgtaagaagtggtatgattcatgctatatgtggaggagttacaattgctgaaattcagcaaaatagtgatactacctacagggtatatgactacaatagaggaagggagcttcatgtagaaaaggctcttgatgttataaatttaaatcttaagggtaagaaaaataaaggaataagagttacaaaagaaggatatgaaaaaacatatttttgccttggaagagatttttcccttgaggtttatgatgtattagaaaaggtaactgaaaaaagtgataaagagagattttatatatttacgtgtgttgatggtgaaggagaaataatatataaaggtggaaaagaaaaaataagctttggagagagtattctaattccagcagctcttggtgaatacacagtaaagggaaaagttaaatttataaaaagctatgttcctgatgtaaataaggttgagcgtgaaattttagatgaaataagctattaa

SEQ ID NO: 15743 - DNA, 231 bp, Clostridium acetobutylicum
atggtacttgataaagtaagagaagttatagcaaatcaaataagtgttgataaagagaccatagatatggcaacatcttttggaaaagatttaaatgttgactcattagatttatttcaaataataattgaattagaagaaaaatttgatattcaaatagaagatactgaaaatataaaaactgtaggagatgcagttaagtttattgaagcacaactaaaaaagaagtag

SEQ ID NO: 15744 - DNA, 1818 bp, Clostridium acetobutylicum
ttgaaaaaaaagagaaaaaacccaagactcgttttaggaaaaaaattattaacggtcctttttatcttttctatagttttttccgcacttatttttagacttttttttataatgtttgtgcattctgatacatataaagcaaaagttttaaatcaaagagtaagcaaaattacactttatcctaagcgcggagacatattagataggaatggaaacaaacttgctacaagcataagtgactatagagtggatgttgatatgaatactctacgtgaatctctaaaatttgaaaaaatgacattaaaaactctttccgataaattatcaaaaattttaggtacatcttctgacaaaatatattcaacactttcggcaaaatcaccagatggggtaccactaagatttgtaaatcttgctagacaaattagcaaaacaaaagtggacaatataaaagccttaaatataactggctttatttcctctgaggattctattcgtgaatatccaaacaataactttctttcaagtgtacttggatatactagatcagacggaagtggtgcttctggcgtagaattatcctacaacaaaactttagcaggaataccaggctataaaagtgttgaaactgatgttacaagaaaacaacttccttatggaacctataaatacgtagcacctaaggatggaaaaaacgtagtacttacaatagacaagaacattcagttaatagcggaacaggcagctcagcaagcattgaccgataataaagctaaagctgttaatataacagtaatggatccaaaaactggtgaaattttagcaatggtaaataagcctgattataacccaaatactccttatgcaaaacaagacggagtatctactgatgttgcaaatctttttcaagcaaatgctgttcaacaaacctttgagcccggttctatctttaaggtagtaactgcttatactggtcttgctactggaacagtaaaagacaccaatgctatggattttgattgtaacggaagtttaagtgttaatggaaccatcattcactgctggcagttatctggacatggatatgaaaactttgttgatatcttaaagcattcctgtaatgttggttttatgcaactcggacaaagaattggaaaggacaatctgcttaaatacatacacctatttggatttggtcaaaaaactggcatcgatttacctggcgaagcaactggaattgtaagagacactgataaagtaaatttagtagatttatcaaacatagcctttggacaaggtatttccgttacatctgtacagtatatggctgctcttaactccatagcaaatggtggaacttggataagacctcatgtaatgaaagaaataactgaaaataaaaatggacaggctgttactgatagcaaatactccaactacggaaaaagaaacatattagatcctaatataactacaatgcttaggggctatctagaaagagtagttagtgataatgatggtgttggtaagaacgctgacattcctggctaccacattgcaggtaaaacaggaacagctcaaaaggctgatccaaaaacaggcggatattcagctggaaagtatatgtcatcttttgcaggtatggcaccatcttatgatcctcaggttacattacttgtttccgttgatgaacctagcaatggaagctattatgcttctgatactgcagctccagttgtaaaacaaatttatcagcaaatttttgattatctttctctaaacggaaaactaaatttatcaggaaatccacaaaattaa

SEQ ID NO: 15745 - DNA, 1716 bp, Clostridium acetobutylicum
atgaaaaaaattatagttgttattgtattaattattttatggttaggtatacataattatctgtttaataataaaacagttagggtaaatgtttataaaggaaacataaatttaaagaattatgattttgacaaaaataaaattgtaaaattagaaggtcaattagaactttacaataacaaattgctaattccatctgagttgaagggagagaaaagcagtagatatttaacggtgcctagtgaattaaaagatcagcttaaaggaaaagttgatgagtatatgacgcttcacttaatggtgcaagctaaagatgatgtagtttatggcttaaagatagatgagcttttaatggattctaaagtttggataaatggaattctacaggataaagctgggatagttaacaagagttattatagtgaaagacaggtatacttacctggatactactattttaccgcgaaaaatggcattatagatatagtaattcaaccttcaaatcacataaatatttttcatgtgattaagcctatatattttagtacaaaagataaaattatgaatgaatttataataaatgcaagcatagatcttatagtgtttggtgggttaatagttacagagttaatatttttaattatagcttttaagcttaaaaaaagcaaagtattactatacctttcaatactaggagtttttgttcaatttaaatgtctttttcttaatgaaataataatagtacacttatttccatacatatcttttgaaatattgagtaaaattgatgttctgacaaactatttatggataccagtctatgtattgtttataaagaagaaattttatgatttatctaataaaatagtttatggaatattcgttttttattttgtatatataacaatgtgtattgtaacagataatatactttatgataaatttatgttttttgctcagcctatattgtacattataataattattatattagtgtttttaataggaaagataagaaataaagtagtaggaagtggagtgtcaattgttgcattttctatagtaatattaaattgtataaatgattcaccagctgatggcggggcagtatatagcagatcaagttttgtaatatcaatgtttattcttatacttattgaaacttgtacaatagtagctaagtattgttccgaaatcattcaaattgaaaaattgagacatgaaaataagcttatatatgaaaaatccataaaagataatcttacgggaatgtataatagaaaccacatagaggaaatactggataaagagattagtgattacattagatataaaaaattatttactatacttatgatggatatagattattttaaatcaattaatgataagtatggtcatttagtaggagataatgttctgagtgtagtaagtaatgctataataagaaatttaagaaaagaagattttgttggaagatatggaggggaagaatttatagttgtttttccaaatacagataagaaagaggcttttataatagcggaaagaattagaacagacatagagaatctgttatttgaaaatggtataagagtgactataagtggtggaatatatgaaaactccagttttagtaagaaggtatgtatacataatgctgatagacttttatattatgctaaagaaagtggaagaaatagaattaaaatgtag

SEQ ID NO: 15746 - DNA, 831 bp, Clostridium acetobutylicum
atgaaaaataccactgaaacatttaaaaattctaaatttaaaaaagagaagctcgttatgttaacagcctatgattactcaactgcaaagataattgattcctgcgacatcaatggaattctcgttggagattctcttggcatggtatgtctcggatacgaaaataccttaagtgtaacaatggaagacatgattcatcatacaaaagctgtagtacgtggtgcaaaaagcacccttattgtagctgacttaccttttatgtcatatcaaacttcagtttacgatgctgtttttaacgccggtaggcttgtcaaagaagctggtgctactgccattaaacttgagggcggtgctttagtctgcgatagaataaaagcaatcgtggatgctcaaattcctgtaatgggccatattggtcttactccccaatctgtaaatgcctttggcggttttaaaattcagggaaaaaatatctctaaagcaaaagaactaattgaagatgctaaaaagatagaagcagctggagcctttgctattactttagagggtattcctgagaaacttgctaaaattataactgaaagcattacaataccaactataggaattggtgctggtaaacattgtgatggtcaaatacttgtttatcaagatatgcttggaatgttttctgatttggcgcctaaatttgttaaaagatatggtaatataggtgacgacatgaaagaagcttttaatagttatgcaaaagaagtacgagaaggcacatttcctgacgaagctcactcatttaagattgatcagagcattatagacgaaattaccaaataa

SEQ ID NO: 15747 - DNA, 1584 bp, Clostridium acetobutylicum
gtgttaactgtaaataatgtaagtttaagatatggtggcagaaaactctttgaagacgtaaatttaaaattcaccccaggtaactgttacggaataattggagcaaatggagctggaaaaagtactttcttaaagatattatccggagaaattgagccaaacacaggagatgtttcagtagatagcaatactagaatctccgttttaaagcaggatcactttcaatatgatgaatatgaagttttagaaactgtaataatgggaaatgaacgcctttactcaatcatgaaggaaaaggacgctttatacgctaagccagattttagcgaagaagatggtatcaaagcctctacactagaaggagaatttgcagagctaaatggatgggaagcagaatctgaagctgctacacttcttcaaggtctaggcatttcaactgaacttcacagcaaaaaaatgtcagaattaattggtggagaaaaggttaaggtgcttttagcacaagctcttttcggtaatcctggaatattacttctagatgagcctactaaccatcttgacataaaatcaattgcttggcttgaggaatttttaatagattttgaaggaactgtcatagtagtatcccatgatagacatttccttaataaagtttgtaccatgatagccgatgtagactatggaaaaataactttatatgttggaaactatgatttctggtataaatcaagtactctcgctcttgaaatgacaaaggatcaaaataagaaaaaagaagaaaaaattaaagaattaaaagacttcatagctagatttagtgcaaatgcttcaaaatcaaagcaagctacttcacgtaaaaaaatgcttgataaactaaatcttgaagacatcaaaccatcaaatagaaaatatccttttataggttttaaaccagaaagagaaccaggaaatgatattttaactgttgagaatctttcaaagacaattgatggagaaaaagttttaaataacgtaagctttatagtttctaaagatgataaaatagctctagttggagataacgaaatagctcaaactacactattcaaaatactttctggagaaatggaaccagacagtggaagctataaatggggaataacaataacaaatgcttattttccaaaagataattcagagtacttcaatgactgtgatttaagtttagttgattggcttcgacagtattcagaagagaaatccgaaacttatataagaggttttttaggaaggatgcttttctctggagaagaagcgcttaaaaaagcgagtgttctatctggaggcgaaaaagtaagatgtatgcttgcaaaaacaatgcttacaaacgcaaactttttaatgtttgatcaaccaacaaaccatcttgacctagaatctataacagctttaaataatggtttaacaaattataagagtaatttaatgttcacatcacacgaccatgaatttattcaaaccatagcaaatagaattatagaaatcactaacgatggaataattgatagaaaatgtacttatgatgagtaccttgaaattcaataa

SEQ ID NO: 15748 - DNA, 1011 bp, Clostridium acetobutylicum
atggaaaatatgtttagaagagttatatttgaaaagaaagctttagattatccaatgggacgtgatattttaaggcaatttgaaaatacagatatagaaataagatattcagaaacgggaagaataactggaataccaggaaaagatgaggcgcagtctttttttgaggggaaaaacacacttgtggtaggggttagacgtgaactagattttcaaacctgtaagccatctgcaaattatcaattacccatcgtaagtgggtgtgctgcaatgtgtgaatattgttacttaaatactcatggaggcaagaagccttatgttaaaatcaatgttaatttagatgatattttaagtaaagcaggtgagtatatagaaaaaagaaagcctgatattacagtctttgaaggggctgcaatctctgatccggttcctgtagaaagatacagtggggcacttaaaaaggctattgagtactttggcaaaaatgaatattctaggtttaggtttgttacaaagtatgcggatataagtgaattgctggcggtacagcataataatcatacaaccataagatttagcataaatactccaagagttataaagaattatgagcataggacatcaagtcttgaagatagaatagagtcagcctataatattttaaatagtggatataaaactgggtttatagtaggccctgtatttttatatgaaaattggaagaaggaatatgaagaactcttaaagaaagctagtgataaattaggagataaagaattagaatttgaaataatatcccatagatttactacgagcgctaaaaataaaatactaaaggtttttccgaatactaaacttcctatggatgatgaagctagaaagtttaaattcggtcaatttggatatggaaagtatgtatatgataaagatgacatgcaggaaattaaagaattttttattaacaatataaatttatattttaacaaggcaacaattaagtatataatttaa

SEQ ID NO: 15749 - DNA, 894 bp, Clostridium acetobutylicum
atggcagataaattagttaaagcaactgctaaaaatggagatgttagaataattgcagccataacaacagatatggttaatgagggggttaaaactcataagtgcgcacctacagcagcagcggctcttggtagaatgcttactgcaggagttcttatgggagcacaacttaaagcagaatctgacagcattactcttaagataaatggtggcggaatagctaaaagtgtaacagtaacatcttatagcgatgctcatgtaaaaggatatatagcaaatcctaatgcagatttgcctgttaatagtcaaggaaaactagatgttggaggaattataggaaagaatggaaatttgcttgtaattagggatatggggttaaaggaaccatatgtcggtcaagtacctatatatactggtgaaataggtgatgatattgcatattactatgtgaattcggaacaaacaccttcagcagttggccttggagtgcttgtagataaggatttatcaataaaagcttcaggtggatttataatacagatgatgccaggagcagacgacttagtagccgatcttataacctataggcttcaagaaataccttcaataacagatcttatagccaaaggaatgtccgtagaggatatactagagtttatttttgaagatatggatttgaaaatattagatgaaggtatagttcctgaatacagatgtgattgttcaagagatagagttgaaaaggcacttataagtattggaatgaaggatttaaaagagatatatgatgatggtaaacaggaagaagtagtatgtaacttttgcaacaaaaaatatgtatttaccaatgatgaggtaggaagtctcataaaaagattagaaaataataaataa

SEQ ID NO: 15750 - DNA, 912 bp, Clostridium acetobutylicum
atggaagttttaaatgatagttttaagattaaacttaactgtagaacttatgttacaataggaagttttgatggcattcatatgggacatttaagtttaataaaaaaagcaatatctcttagtaaaaaaaataatactatgagtatgcttagcacatttaaagaacatcctcttaatgttataaataaatctattgttcctaaaatattaatggataatgaaaccaaaatagaaatattaaagtccattggtttagacattttaaatttttttgattttaatgaagaaataatgaaaatgatgccagaagactttatattaaatatgataaatcattataatatagacggtataataaccggatttaatcatcgatttgggtataagaattcaggagatatacatttattaaaaactttaagtgaaaaatatggttttgaactttatgtcttgcctccagtgtcttttaaaaatgacatggttagcagcactcgtataagaaactgtatatccgatggaaatatagaagaagcaaatcaaatgcttttgagacctttttcaattaaagccaaagttattcatggaagagaaattggcagacaaataggatttccaactgcaaatttaagttatgataataaatttatacttcctaaaataggagtgtactatactacagttgagtataataaaattacctataagggaataacgaacgttggcactaatccaactgtaaatggtgataaacttactattgaaacttatatcttagattttaatcaaaatatatatgatgaagaaattcgagtgaattttgtaaaaaaaatacgcgaccaaatcaagtttgaaagtatagaacaattgaaggttcagttggaaaaagataaaaaatttgcatataagcaataa

SEQ ID NO: 15751 - DNA, 762 bp, Clostridium acetobutylicum
atgatatttgatgctcatgcacattatgatgatgatgaatttaatgaggatagagataaagttataaatgaacttaaaagtaatggagtaataggagtattaaactgtggttcatctatggaaggaacactaaagtctgttgaactagcagaaaaatatgattttttttatgcggcagttggtatacatcctgaatatgcagataaatttgatgaaaatacattaaaagaaatagaagcattgactaagagtagcaaggttaaagcaataggtgagataggattagattattattatgatgaaaatccacctagagaggttcaaaagaaagtatttataaaacagatggaactagcagaaaaacttaatttacctgtaattattcatgatagggatgctcatggtgatactttagatataataaagcagtttccaaaggttaaaggtgaaattcattgcttttctggaagcgtggagtttgctaaagaatgcctaaaacttggatattaccttggttttactggagtagttacttttaaaaatgcaaaaaaagtagttaaagtggtgagagagattccactagataaaatacttgtagagactgattgtccttacatggcaccggttcctaatagaggaaaaaggaatagatcagagtatattgagtatatagtagagaaaatagcagatataaagagcattttaccaataaatgtaaaagaacaaactgcttctaatgtcagaaagttgcttaatgtataa

SEQ ID NO: 15752 - DNA, 393 bp, Clostridium acetobutylicum
atggcaaaagtacaatatatgggaacaggaagaagaaaagaagcagtagctagagttagacttgtacctggtgaaggtaaagttgtaataaataagagaagtgcagaagattattttggacttgaaactttaagatttatagttaatcaacctttaaatcttacaggaactaaaggaaaattcgatgttttagttaatgtacatggtggtggattcacaggccaggcaggagctataagacacggaatttcaagagctttattaaaggctgatgaaactttaaaaggtgaacttaaaaaagcaggattcttaacaagagatccaagaatgaaggaaagaaagaaatacggtcttaaaaaggcaagaagagcaccacaattctcaaagagatag

SEQ ID NO: 15753 - DNA, 741 bp, Clostridium acetobutylicum
atgaattttttacatggactggtaaataactatgctcagtttttttcacttaaagtactaattgctactttatcagacccatcaaatttgatgatgatatttagcttgattatactagagggcttattatcctcagataatgcggtggtattagcaataatggttaagcatttaccaaaaaaacagcagaagagagcactcttttatggaatatggggagcttatatatttaggtttattgctattggagtaggtacatatttaataaaaatatggtgggtaaagttaattgcggctctatacctattaaagatgacttatagccattttgcaggaaaagcagaagatgatgatgtagatgaatcgaaggtttcaaaaaaaggattctgggctactgtagcaacagtagaattaatggatatagcctttagtatagatagtgtgtctgcagcttttggagtatcaagtaaggtttgggttttgttcttaggagcggtttttggaatattggcaatgagaggtgtagcacaaatatttgtggctcttatagaaaaggtgcctgaaatggaaagttcagcatatgtgttaattggaattataggtataaaaatgttattgaatttaataaatattgaaatacctaatactattttctttggagtaatagttgttgtttttggtggaactatagcatttcactatatacgacaagcaggtgttaaatctcaaaaacagaattaa

SEQ ID NO: 15754 - DNA, 246 bp, Clostridium acetobutylicum
atggtaaaaatcagattaaagagaatgggtgctaaaaaagctcctttttacagaatagttgtagctgattctagaagccctagagatggaaagttcatagaagagttaggatactacaatccaactacagagcctgttactttcaaagttgatgctgacaaagttaatgcttggatgaaaaatggagctcaaccatcagaaacagttaaaaagcttttagataaaagtggagtaacaactaaatag

SEQ ID NO: 15755 - DNA, 1098 bp, Clostridium acetobutylicum
atgagattgggaattgtaggtttaccaaatgtaggtaagagtactttatttaacgccataacaaaagcaggagcagaatctgcaaattatcctttttgtactatagaacctaatgtaggagttgtatctgttcctgacaagaggcttgacgttcttgaaaagatgtataattctaaaaagaaagtccatacaagtatagaattttatgatatagcaggtttagtcaaaggagcaagcaaaggagaaggacttggaaataaatttttatctcatataagagaatctgcagccatagtacatgttgtaagatgttttaaagatgataatatagtgcatgtagatggaagcatagatcctatacgtgatattgagaccataaattttgagcttatattttcagaccttgaagttcttgaaaaaagaatagaaaaaactaccaaaacagctcgctccggtgataaaaaagctaaagatgaacttgttatattagaaaaattaaagaaacatcttgaagatggaaaatctgtaagaactcttgaattcactgatgacgaagctgaattcgttaaggggctttttctcctaacttcaaaaccaattctatatgctgctaatgtatctgaagacgatatactatccggtaatgtagaaaatgatatggttaaatctgttcaagattatgcaaaacgtgaaaactctgaagttattcctatttgtgccggtcttgaagaacaactttcttcacttgaagaagaagaacaaaaagaaatgctttctgaatacggacttgaagactctggtctaaatagattaatagaaagaagttacaagctattaggacttatgagcttcttaaccgctggtcctgaagaagtaagagcatggactataaatcaaggaacaaaagcacctgctgctgctggaaaaatacatacagacatcgagagaggctttataagagctgaaatagtttcctatgatgacttgataaactgtggctccgaagctgctgcaaaggaaaagggtctttatagactcgaaggaaaagactacataatgcaagaaggcgatgtagtattctttagatttaatgtgtaa

SEQ ID NO: 15756 - DNA, 480 bp, Clostridium acetobutylicum
atggactataaagaaatagaagaacttataaaaaccattgataattccggacttacatatcttgaaatagagtcaaatggaactaaaataacaatgagaaaaggcacaagtaatgaagaaagcacaagtgtagttcaaaatgctcagattcaagaaaataaaatagagagagtagttactacacaaacccatgatgatgataaaaaagtaatagataagcctagcgtagacgatgaaaacataagagttgtaacttcacctatagtaggtactttctatgaatcttcaggacctgactcagaagcttttgcaaaggttggaacacaagtaaaaaaaggtcaaactctttgtataattgaagccatgaagcttatgaatgaaatagaatctgaatttgatggtgaagttgtagaagtacttgttaaaaatgaagaaatggtagagtacggtcaagaattatttaaaatagctttgaagtaa

SEQ ID NO: 15757 - DNA, 1914 bp, Clostridium acetobutylicum
atgattaaagtaacacttaaagatggaaaagttatggagtttgaaaatacaacaactccaggcgatgttgcaaaagcaataagtccagggctttacaagaaggctatttctgctaaaatcaatggaaagagagcagaattaatgaccaacattgataaagattgcaatcttgaaatacttacttttgatgatgaggatggaaaatggacattaagacatacagcttcacatatattggctcaagctataaaaagactttatcctgaagcgaagctagctataggacctgcaattgattcgggattttattatgatatcgatgcagatttttcatttacagaagagatgtttgctaagatagaaaaggaaatgaacaaaataataaaagaaaatcttaagcttgaaagatttgagttgcctagagaaaaagctatagaatacatggaagagaaaaaagaaccttataaggtagaacttataaaagatcttccagaagatgctgtaatttcattctataagcagggggaatttgttgatttatgtgcaggacctcatgttgaatcaactgcaaaggtcaaagttataaaacttatgtctgtagcaggtgcttattggagaggaaatgaaaaaaataaaatgctccaaagaatatatggaactgcatttactaaaaaagcagatcttgatgactatataaatatgcttgaagaagctaagaagagggatcatagaaaaataggaaaagaattagacttatttactatgcatgaagaggggcctggttttccgttctttcatccaaagggaatggtactaaaaaatcttttacttaattattggagagaggttcatgataaagctggttatgatgagataagtacacctataatattaaatgaagctttatggcatcagtcaggccactgggatcattataaagaaaatatgtattttaccaagatagatgaagctgattacgctataaagcctatgaattgcccaggatcaattcttgtttataaggataatatacattcatatagagaacttcctataaagcttgcagagataggacttgttcacagacatgaaaagtcgggagcacttcatggacttatgagagtaagatgttttaatcaagatgatgctcatatatttatgactaaagaacaaataacagaagagatacttggagtaataaagcttatagattctttctataaagtatttgggtttgaatattatgttgaattatctacaagaccagaagattcaatgggaagtgacgaagattgggaagcagctacaaatggacttataaatgcacttaatgctgcaaacttggagtatatagttaatgaaggagacggagcgttctacggacctaaaatagatttccatcttaaagattgtataggtagaacatggcagtgcggaacaatacagctcgatttccaaatgcctgaaagatttgatatcaactatattggagcagatggagaaaaacatagacctgttatggttcatagggttgtttttggaagtatagagagattcataggtattttaatagaacactatgcaggtgcttttccaacttggcttgcaccagttcaagttaaagtaatgaatataactgacagtcaagtagaatatgttgatgctataagtgaaaaattaaaagaagcgggaataagagttgaaaaagatgttagaaatgaaaagataggatataagataagagaggctcaacttaaaaaagttccttacatgattgtaataggggataaggaaataaaagaaggtataatctcagtaagaagcagaaaagaaggagatttgggatctatgaatattgaggatttcatatttagaataaatgcagaagttaaggaaaaaataagttcaatctaa

SEQ ID NO: 15758 - DNA, 1131 bp, Clostridium acetobutylicum
ttgtacacacttttaaagaaaactggtaaagtcagaagaggacgatttgagactgttcatggaacaatagaaactcctgtatttatgaatgttggtacgcttgcagctataaaaggcgcagtgtcctccatggatcttaaggaaataaattgtcaagttgagctttcaaatacatatcatctaagtcttcgtccaggtgatgacgtagtaaaaaaattaggtggtcttcataaatttatgaattgggataggcctattttaacagattctggtggatttcaagttttttctttggcagaaataagaaaaatcaaagaggaaggagtttatttcaattcgcatattgatggaagaaagatatttatgggaccagaagaaagtatgaagatacaaagtaatcttgcgtctactattgctatggcttttgatgaatgtgttgagaacccatctccgagagaatatgttgaaagatccgttgagagaactactagatggcttgtaagatgtaaggaagagttagacaggttaaattcgcttcctgatacaataaataaaaagcaaatgctttttggtataaatcagggaggagtttatgatgacataagaatagagcatgcaaaaactatagctaaaatggatttagatggctatgcaataggtgggcttgcagtaggagaaactcatgaagagatgtaccgcataatagatgcagttgttccacatttgccacaagataagcctatatacttaatgggagttgggactccaagtaatatacttgaagcagtttcaagaggagtggacttttttgattgtgttctacctgctagaaatggaaggcatggacatgtatttactaaacacggtaagataaatctaagaaatgaaaagtttgaattagatgcttctccgatagatgaaggatgtcaatgtccaacatgtaagcactatagtagagcttatataagacatttatttaaagcaaaagagatgcttgctatgcgcttatgtgtactccataatctttatttctataatacacttatggaagatatacgtaatgcaatagatgcagattgttttgaagaatttaaaaatgagaaattaaaagcatgggctggaaaagcttaa

SEQ ID NO: 15759 - DNA, 612 bp, Clostridium acetobutylicum
atgaatttagcaaataaattaactttaatgaggatttttttagttcctgtttttctaatattcattgtagtacgtcagattccatatggaagaagtatagctacagctattttcataattgctgcaataacggataaactggacggctatatagcaagaagtagaaatcaggtaactaaatttggtaagataatggatccacttgcagataagcttttggtatcttctgcactgatagctttagtagaatttcatgtaataccagcatggattgctattgtaataatagctagagaatttgcagtaacaggacttaggagtgttgcagcaggtgaaggaattgtaattgctgcaagttggtggggaaaaatcaaaacctttattcaaatagtgacaataatatttgcacttttattcataaatttaaggaaaaattacgattttagaaaatttgtagatcaatttgctttacttagcaaccattctgctcaggtagagaaatttttaagatatggtacggatataacactggctatagcctttattgtaactcttatttcaggaatagattacttttacaagaataggcatgtatttataaatgataaataa

SEQ ID NO: 15760 - DNA, 273 bp, Clostridium acetobutylicum
atggctagagataacggaaacaaagatagagacggaaaaagacctaatggtggaagaaacagaaaaatgaaaagaaaaatctgttctttttgtatggaaaaaagcgaaagcatagattacaaagacataaataagcttagaaaatacgttactgaaagaggaaagattcttccaagacgtatttctggaaactgtgcaaaacatcaaagagagttaacaatagcaataaagagagcaagaaacattgctttattaccttttacaacagagtag

SEQ ID NO: 15761 - DNA, 795 bp, Clostridium acetobutylicum
atgactaggttatatactgacatgcttaacgtcgcttatgacaataatttgattgttaaaaatcttagtataaaaattccagataaaaaaataactacaattataggtgctaatggttgtggaaaatccactttacttaaggcgttaactcgtataattccaactaaaactggaacaattcttttggatggaaaaaatattttaaaagaaaatacaaaaaccttagctaagaaaatagccattctaccacaaacccctgagagtacagatggaataactgtagccgaacttgtttcctatggacgttatccctatcaaaaaggttttgggaggctttcaaaaaaagattatgaagttattgactgggcactggaggtaactggaactaagaattacaagttcagacaactagatgcactttcaggaggacaacgtcagagggcttggatagccatggcattagctcaagaaacagatattatttttcttgatgaacctacaacttatttagatatggcacatcaactagaggtattagaacttctgcaaaaacttaataaagaacaacatagaacggttgtaatggtattacatgacttaaatcaagcagctagattcgctgattacataattgcccttaaaaatggaactatagtaaaagcaggaaaatgtgaagaggtaataactaaaaaagtacttatgaaagtgtttaatatcgacgctgaaattggaatcgatcctagaaccactaaaccaatatgttttacatacaacttaatcaaggagatgaagtaa

SEQ ID NO: 15762 - DNA, 1860 bp, Clostridium acetobutylicum
atgtataacatacttgataattatgaagatgtagatgatataaaaaatatgagcagtgatgagcttaaagaatttgctagtgagataaggaagtttttgatagataagatttcaaaaacaggaggtcatcttgcctctaatcttggcgtagtggagcttaccttaagcttgcacaaagtattcaatttgaaaaaagataaaataatatgggatgtaggacatcaagcctatgtacataaaatcttaacaggtcgcaaggataaatttgatagtcttaagcagtttaatggactaagtggctttccaaagaggaatgaaagtatttatgatgcatttgaaacaggtcatagtagcacatctatttcagcagcttcgggtattgcaagagcaagggatctgtcaaaagataattatgatgttattgcagttataggtgacggtgcacttacaggtggtatggcacttgaagctttaaatgatattggatacaagaaaactaatgttataataatacttaatgacaatcaaatgtctatcgcaaaaaatgttggaagcatatctaagtacttaaataaaataagattagatcctaaatacaacaaattaaagaaggatgttaaaactaaattacaaagaactaatatagggtcagaggtagctaattccatcgaaagaatcaaaggtggaataaagcaaatggttgtatcaggaatgttttttgaagatataggaataaaatatcttggtccaattgatggacataatattgaagaactaactagtgttatatcaaaagctaaggaaattaaaggacctgtgatattacatgttaagactcaaaagggaaaaggctatagctatgcagaagaaaatcctaataaatttcatagtataggcaaatttaattctaaaacaggagaagcactttcaaagccaaaggatacatattctaaagcctttggtaaggcaatggttcaaatggctgagaataatgataaaattgtagcgattactgcagcaatgactgatggaactggattgtgtgaattttctaagaagtttccacaaaggttttttgatgttggtatatctgagcagcacgcagttactatggcagcgggattagcagctacaggatataagccagtctttgcagtgtattcgacatttcttcaaagagcatatgatcaagtgcttcacgatgtttgcattcagaaattaccagtagtgtttgcaatagatagagcaggtattgttggtgaagatggagagactcatcagggagtttttgatatttcatatttaagtagtatacctaatatgactataatggctccaaagtgtgttgaagaattgaattatattatgaattgggcagttaagcaaaattatcccattgcagtaagataccctaagggtggaaatgatatttcagatgttttggcacctttaaaggaatttagacacggaaaatgggagatattaaaagatggaaaagatgtagctattgtagcagtaggaaaaatggttcaaagggctatggtagttagagatgaacttttgaaatatggaatcgattgtgctattataaatgcaacttttataaagccaatagataaggataccttgaatagatttgcaagagataactataaatttgtggttattgaagataatgtccttcatggagggattgggagcttaatactcgaacatctaaatgatatgaaatttaaaaatgatgttttaaatttaggctttaaagatgagttcataactcatggaaatatcgaaattttatataaactatatgatcttgatatagaaggcatatgcaaaagaataatttcttttaaataa

SEQ ID NO: 15763 - DNA, 855 bp, Clostridium acetobutylicum
atgttagttacaacaaaaggattattggttaaagctcaaaaggaacattatgcagtaccagcatttaatatacacaatcttgaaacatttagggtagtggttgaaacagctagtgcattaaattcgcctgtaataattgcaggaactcctggaactatagaatatagtggagaggattatttaatagccattgctaaggaggcggcagcaaagcataataatataccaatagcaatgcatttagatcactttgaagatgtggaaagacttaaacattgcatagatgtaggatttacttcagctatgatagatgcttcaagaatgtcatttgatgacaacattaaagttacaagagaagttgttgagtatgcacatttaagtggtacagttgtagaggcagagcttggaatgcttggaggaagagaagaaaatgtagttgtagatgaaaaggatgcaatgtacactaaccctgatgctgcaaaagaatttgtagagaggacaggaattgattctcttgcggttgctataggaactgcacatggactttataagggtgagccaaagcttgattttgaaaggcttaaggaaataagagaaaaagtagatgttcctttagtacttcatggagcttcagatgtaccagaaaatttagtgaagagagcgattgaacttggaatatgtaaggtaaatattgcaactgatctcaaaatacctttctctgatgcggtaaaagaatattttaaagaacatccagatgcaaatgatccaagaaactatatgactcctggaaaagaagcaatgaaggaaattgttattaaaaaaattaagatgtgcggcagtgagggaagagcttga

SEQ ID NO: 15764 - DNA, 1764 bp, Clostridium acetobutylicum
ttggaaaaatggtttatgaaaaatataaaagcggattataaagctattgctaaagcatttggaataagtgaggttataggtaaactccttattaatagaggaattaaggatgtaaaattaattgacagttttcttaacccaagatttgaaaaaatgcataatcccaaagatatgaaggacttaaaaagagcttctgaaatactgaaaagcaagatagattcaggtaaaagaataagaattataggagattatgatgtagatggcgttataagtacttatttgctatttacagcattaaagagatgtggggcagatgtagattatgatataccagacagagttaaagatggatatggaataaacatacatattatagaaaaatgtatagaggattctgtagatactataataacctgtgataacggaattgcagcaatagaaccaattaattacgctaaggagtgtaaattaacagttatagtaacggatcatcatgatataccttttatagaagaggaaaatggacaaagaagttttattagttcaaatgcagatgcaataataaatcctaagcaaaaggagtgtaaatacccatttaaaggtttatgtggagctggagttgtatttaagcttatagaagtgctttatgatgaatttaaaatacataagaaagaattctatggtttgtctcaatttgttgctattgcaacagtatgtgacgttgttgatttagtagatgaaaatagaattcttgttaagaatggacttaaacttcttaacgaaactaggaatgttggtttaaggtcactaataagacagacaaatatcgaagataagaaaatttctacatatcatcttgggtttgtaataggaccatgtataaatgctactggaagactggactctgctaaaagaggaattgaacttttaataagtgaaaatgaagatgaagctagtaggctttctaaagaactttttgattttaataatgaaagaaaagaaatgactcaaaagggtgtagatactgcaatagatttaattgagaatactgaaatgaaaaatcatagagtatttgtaatatatgttcctgagattcatgaaagtatagttggaatagttgctggtagaataagagaaaaatataatgttccaactatagtacttacaaagacggaaaacggtgctaagggttcaggaagatctattgaaggatataatatgtttgaggaattaattaaatgtaaagatatacttttgaaatttggaggacatcctatggcagcaggattgtctttagagatagaaaatattgattgcttaagggaaagattaaacgaaaatactacattaagcgccgaggatttaatacctaagataacacttgatatggggatgccccttgaatatataaattatgattttgtgaaagagttaaatatgctagagccttttggaaagtctaatccaaaacctatgtttggagaaaaaaaagcaaaggtagttagtgcaaggattataggaaaaaatcataatgttttaaaattaaaatttctttctaagaatagaagatatatagatggaatatattttggagatatagaagagtttgagaaaatagtaataaataattacggtagtgaacaaatgaataaaatgtatagtggcatcgaaaataacatttatttagatatagcattttatcccgatataaatgaatataatggaaaagtaaatattcaaataatagtacaacattttaggtag

SEQ ID NO: 15765 - DNA, 1668 bp, Clostridium acetobutylicum
atgcgacgagaaaaagataagattaaaattatacctctaggtggggtggatgaaataggaaaaaatcttacggttatcgaatacagagaggagatagctgttatagattgcggtcttagttttccagatgaagaaatgttcggtatagatttagtaatacctgatgtaacttatttaataaagaatagggaaaaggtaaagggaatatttttgactcatggacatgaagatcatattggtgcgttgccttatgttttaaaagagttaaatgttccggtatatggtactaaacttactattggaatagttgaaactaaacttaaagagcataatttgcttagtaaagttgatttaaaggtagtaaagcctagggatataattaaactcaatagcatgtctattgaattcataagacaaagtcatagtattgcagactctgtagctattgcaatacatacacctatgggtgtagttcttcacacaggagattttaaggtggattatacacctatagatggatgtgtagcagattttgcaagatttgcagagcttggcaagagaggtgttcttgctatgatgtgcgacagcactaacgtagaaagaccaggatatactatgtcagaaactacagtgggggaaacttttaacactgtatttacaaaggctaaaggaagaattatagttgcaacttttgcatctaatattcacagaatacagcaaatagttgaggccgcagaacgctataatagaaaagtagcggtttcgggaagaagtatggaaaatatagtagctgtagctattgaacttggttacctaaaagttaaggaaggtgttttaataggcattgatgccataaatagatacgccgataacaaaatagttataattactacaggaagccaaggagagccaatgtctgcacttacaaggatggcagctcaggaacacaaaaaagtaaaaatacaggaaggcgatatggtagtaatatcagctaaccctatacctggaaatgaaaagttggtttcaagagttataaatcaattatttaaaaaaggtgcagaagttatttatgaagctttggcagatgtccatgtttcaggtcacgcttgtcaagaagaacttaagctaatgcatactcttataaagcctagattttttataccagtccatggagaatacaggcatttaaaacagcataaagagctggcaaccaatttaggaatgcctaaagctaacgttgtaattccagaaatcggtggcgttatagaattaacaagaagcagcataaagaaaaccgatactgtagttgcaggtaaagtgtttgtagatggtcttggtgtaggtgatgtaggaaatatagttttaagagatagaaaacatctttcacaggatggaatagtaacagttgttgttactatagaaaaagtaagtggtactgtaattgctggacctgacattatttcaagaggatttgtgtatgtaagagaatctgaagatttaatggaggagtcaaaagaaattgtaaagacagcactgcttgaatgtgaagaaaagcacattacagagtgggcaactataaaatcaaacataaaggatgtattaagaatattcctttatgagagaacaaagagaaagcctatgatacttcctataattatggaagtgtaa

SEQ ID NO: 15766 - DNA, 2703 bp, Clostridium acetobutylicum
atggatatcaactacgaaagacctgatccatattatcttttaaacaaaatagataaggaagaaaaaaataagaatagaggcaaattaaaaatcttttttggctatgcagcgggtgtaggtaaaacctatgcaatgcttagagctgctcactatatgaaagaacttggaaaggatatagttatagggtatatagagcctcacgcaaggatggatacaatgtcacttacaaaggggcttccacagataccagtaaaaaatatagattataaaggagttatactaagggaatttgatgtagataaagcgcttttaagaaagcctgaaataattcttgtagatgaattagcgcatactaatgcaaaaagtcaaaggaataaaaaaagatggaaggatatagaggagcttttggatgcaggaattgatgtgtacaccactttaaatgttcagcatatagaaagcttaaatgatatagttgcaaatataactcatgtttcagtaagagaaactattccagacaaggtatttgatgatgcagataaggttgaattaatagatatagaaccagatgagcttttaaagagatttacagacggtaagatatataggaaagagcaggttaaaagggcattcaataatttttttactaagaataatttatatgcattaagagaaattgcccttagaagaactgcggatagagttaattttgaaatagaaattgcaagattatcaaagggtcaaattacagtaatggcaacctcagatcaaatacttgcgtgtataggaacctcaccatcttcggcaagaataataagaactgctgcaaggatggcagaatcctaccattcaaagtggatagcactttatgttgatactggtagaagcttaggtaaagcagataaggaaaccctcaatgcaaattttaatctggtggagcttttaggtggggaacttgttactgttcatggagaaaatgttgcagaccaaataataagatatgcagagcttagaaacactactaaaatagtaataggaaaaaatcataaaagaacaggaactctcctgcatttttatgctaaggatgtagtagataagcttatggattcaaattcttatatagatgtctatatgataccgaattcatcttattatagagatcacaaaaatagtattttatcaaaaataagtattcagcataaaggatcagttaaggatgtattaaaagcaataataattatggcaattactacagatatagctgaactttttagttacatgggctttaaggatgtcaatgttataatgatatttatacttggtgtaataattgtatatatggcaactaaagggcaaattatggggataatatcatccatagcagctgtattagtgttcaattatagatttactgaacctaaaaattcttttatagtttatgataaaagctatcttgttacctttccaataatgatgattgttgcattcataattggaagtcttactaataaggtgcaaaaggaagctcaagattctaatatgagggaaaaaaggactcaaactttgtatatagtaagtggtaagctattgagtgctgttggaacctccgaggttgtgtccataggtataaagtatatatcaagattagttaatagaaatgtaatatgctatttggcagacactagtaataagctttcaacaccatttgtatataaaaaggataaaggagccaaggaagaaatcatcatgagtaaggatgaaaatgctgctgcctactggacctttttaaatggaaaagaatctggatgtggaacaagtactttttatagagcaaaagggtactacattcctataaaaattaaaaataaagtacttggagtaataggtgtatcgtgtccaagtggtcctttaagacctcaaaaaaaggctgtggttgatacagttacaggtcaaatagctattgccctcgatagagagatactttcaaaggaacaagaaaaatctaaagttgaaatagagcgtgaaaggcttagaagcaatctcttaagatcaatctcacatgatttaagaagtccacttgcaggtataaagggagcggcaagtactatacttgaaaatggagaacttatagatgaaaagagaaaacaggagcttataaatggaatatatgaagatactgaatggcttataagattaattgagaatttgcttagtatgacaaagtttgatgaggggaatacaaaaataaaaaaagatgtggagttagtggaagaggttgtttccgaagcagtgcaaagaagctctaaatacttcaaaaatcataagataaaagtaagtgtgccagaagatgttataatggtatcgatggatggaagcttaattgaacaagttataataaatcttttagataatgcttcaaagttctcacctaaaggttctactatagaaattaaggtttacgaaaaaaagaaggatgttgtttttgaaataatagatgaaggacagggtatttcagaggatatacttcctaatatatttgatagattttttacaaatggaagcaaaatatcagattcaaggagaggagtaggacttggactggctatttgtaagtctatagtagaagctcatggaggaaaaatagaggctgttaacaaaggtagtggaggagctatctttaagttcaatattcctaaagagttatag

SEQ ID NO: 15767 - DNA, 567 bp, Clostridium acetobutylicum
atgaaaaaatggcatatgatgtcattaattgcttcagcaaatgtcatgatatttctaactgcatgtggacaaattgctgtgaacaaaaatacaaataacttttcaaaaactactgtacaaacaataaaagcatcacaaccgtataaggttcctaaactagccgaaaagagaaaagatgaattaatagttggtatagagaagcctgatgatggaaaaatggtacctttgaattcggggtccgtttataatcagtatatgtgggagatgatgtatgaatctcttggagatgtagatgaaaagggagagcctataccaggaattgcaaaatgggatatatcaaaagatggacttacttatacttttcacataaaggacaatgttaagtttagtgatggaacacctctaactgctcaggatgtggaatttaccttcacttatttatgtgacaagctatgtagtagtattacatttgacccttcaacagtagatataaagggttggaaggattactacgatggaaaagcaaataaagagcaggaatacaaattaaagattccaatactataa

SEQ ID NO: 15768 - DNA, 1098 bp, Clostridium acetobutylicum
atgaagattattataaaagaaaatgaaagaggatacctgtttaaggatggaatattcataaagctactaaatccaggtaagcattcgtatatatgggggaattatgagattaaaaaggtgaatgtagatagcatgaaagaaatatctacatcggatatggatatttttttaaaggatgagaattttaaaaaaagcgtggttaagatagatataccagatggcaagcttgccgtacactacgtaaatggcagaaaattaaatgttttagtgagtggtgagtatgcttattggaacattataaaaaagcatacctttgagcttattgatatttcaaaaccagaggttcaagagagtattgatagaagcttatttaaatatatgccagtaagcttgtacacaaagattgaagtttcagagggccaaagagcagtagtgtattttaatggtaaatttcacaaagaactttcaagtggagtatattatttctggaacagctgtattaaggtcacgtatcagcttgtggatataagggttcagaagcttgaggtattgggacaagaaattttaacaacggatagagtttctctgcgcattaattttgtgtgtgattttagagtggtggatgctgtaagtattacttctaaaataaaggattatgcaactcaactttataccttttcacagatggtaataagagagtatattgggaaatttaaattcgatgatatactaaatcaaaaagaggaaattggaggatttatactttcaaggcttaaggaaaaagaaagagagtattacgtggagttcataggtgctggtataaaggatataatacttccaggagaagtgagggatataatgaacaccgttttaatagctgaaaagaaagcacaggctaatgttatatcaagacgtgaagaagtagcatctactaggagtttattaaatacggctaaacttttagatgaaaatgaaacgctgtataagcttaaggaaatggaatacttagaaagaatatgtgataaggtaggaagcatatctctttcaggaggaaataacctcctaggacaattaaatgaactgctttgtcaaaaatag

SEQ ID NO: 15769 - DNA, 1050 bp, Clostridium acetobutylicum
atggataatgaaaaattaaaagccattgatgcggctatgagtcagatagagaaacaatttggaaaaggcgctataatgaaacttggtgagcaagacatcttaaatattgatgcaatttcaacaggatgtttatctttagatatagcacttggaataggtggagttccacgtggaagagtagttgagatatatggacctgaatcatcaggtaaaactacagttgcacttcatatattagctgaagcccaaaagaagggtggagctgctgcatttattgatgccgagcatgctttagatcctcaatatgcaagagctttaggagtagatatagataacttagttgtatctcaaccagatactggtgagcaggcacttgaaattgctgaagcacttgttaggtcaggtgcaattgatgtaattgttgtagattctgtagcagcacttgtaccaaaagctgaaattgaaggtgaaatgggagattctcatgtaggtcttcaggcaagacttatgtcacaagctcttagaaaattaacaggttctataaacaagtctaaatgtatagctatatttataaaccaacttagagaaaaagttggaataatgtttggaaatcctgaaactactcctggaggaagagctcttaagttttatgcttctgtaagaatggatataagaaaaatagacactataaaacagggcgaagaaatgattggaaatagagtaagagtaaaggtagttaaaaataaagtggctcctccatttaaacaagcagaatttgatattatgtataatgaaggtatatctcgtgaaggaaatatagttgatgtaggagttaaagaaaatatcatccaaaaaagtggtgcatggttctcatatggtgatataagacttggtcagggaagagaaaatgctaaattattctttaaagaaaatatagatattagatctgaagttgaaaataaaataagagaaaagtacgatttacctatacaaaaagttaaaaatgaaaagccaaagattgaaaaaggaactgaaaataatacaaaataa

SEQ ID NO: 15770 - DNA, 1155 bp, Clostridium acetobutylicum
atgaaagcacttcattttggagcaggaaacataggaagaggttttataggttatttactgtataagtctaattacgaaactaccttcgttgatatatttgataaagtagtggatgatatcaataaatataaaagatatacagtaataactttgagtacatctaagaataaggagaaagttgagaatgtacgagcagtcaatttgaaagatagtgttgctcttgaaaaagaagttttagaagctgatttaataactacatcattaggattaaacaatttaaaaagtacaggagagcttttaagaggattccttaaaaagagatcagaaatcaatgacaagccacttgatataatagcatgtgaaaatgcactatttgcaagtgatgtactaaaaaaagctatacttgatggtgcagatgaagagttgaaaaaatacttggaaaaaagtgttggatttccaaattgtacagttgataggattgtgccaaatgtggacatagaaaaagaattgcctatagatgtagcagtagaagatttttatgaatgggatatagaaaaaaataaggttaaaattaataacaagataattggtgcagaatatgttgaaaaattagacccttatcttgaaagaaagttattccttttaaatggtgcacatgctacaattgcatatttaggatatcttaaaggatataaatatatacatgaagctataaaagataaggaaattaataagattatagttggttttcatagcgaagcggtacaagctcttagtgaaaagcataaaatagatatacaaatcttaaaggaatattctaataaacttctaaagagatttgaaaatgaatacttaaaggacgatgtaagtcgtgtaggtagagatccgatgagaaaattatcgtctaatgatagattgataactcctttaaaattatgttgcgatttgaaaatagattttactaatatattatttggagttgcttctggatatctatttaattataaagaggatgaaaaagctcaaggaattcaaaacataataactaaagagggaattaaaaaagctatttcaaatgtatctcaaataaaagaaggagattatttgaataatatgatagcgtacaagtatgaggagctaaaaaagcaaaattaa

SEQ ID NO: 15771 - DNA, 765 bp, Clostridium acetobutylicum
atgattttattaacaaaaattactttgcttttgttttcaagtattttctttagttatatattatatatgaaatctcatagctttaaaaagatagaaccacgaaaatgcagcttaaatctcatgattataggaatggcatttattgttgtgggagaatttttgaattttatatcaagctttgtaaaatacagagttgatatatatgtttcgttttgttttattttaggagctattctctttgttatatttgctataatttttttaaactctgtagataatacccttaagtgtctctacggttgtgtatatgaggatgcaatgacaggagtttataatagaaacgggattaaaaagatttttaaagatactattaataaggaagataacttttttgttatgagttttgatcttgatgaaactaaaataattaatgataattttggtcatttagtcggcgatgagtatataataagtgcggctagagctataaaggaagtcttaggtgccaaaggggttgtaggacgaactggtggagatgaatttgctgccatatatatttctacagaccaagaggaacttaaaaaagttaaaactcatataaataaaagggcttcggaaatttttaatgggtcaaatataaatattagtatggggttttcaacctataaaaaagatggaaagaatatgaaggaactttttgatttagctgataaaaggatgtaccaggacaagaaaaacaaaagaaaagcagatcaaaggttttaa

SEQ ID NO: 15772 - DNA, 1107 bp, Clostridium acetobutylicum
atgaataataaatttttgattatcttaaaaactatattttttttatatgtcttgattcagctttgtactaatggtgttggtggaggtattatagtaataatatttttaaccaatgtaattctctttgtcctaaaagaaagatttctcaaattaaggtatggtgcagttgtggaacttatcagtgttataatatcaggactctttaacagttattttgtatttttacttcctggcgttatatttgatttagtttatgatgaattttatttaggaatagcgttggctttgataggtattatatattttagagagtacagcaacttgaatttttcggtattttgtttgatatcaggtatgcttgcatattgcttgataaatatgagaaaaagagaagaactatacaggaagacctttgatgatgaaagaagattagtatatgagcttgaaaatgctaaaacaaggcttatgaattcatctttagaagtagcacatatggctgagataaaagagagaaataggattgcaagagatattcatgataatgtaggacacagtatagcaggaacttatatgcagcttcaagttgcactgaaattatatgataaggatagtgagaagtcaaagaaaattttaaaggaaagtacagaaaggatttctgaagccctgacacttataaggaatacagtgcataatatagttcctaaggagaaggtaggaatagaatatataaaaaatataataaataattttaagttctgtagtgtggatttttcatatactggtagtgaggaattggtgtctgcaataaatatgcagattatagccttgaatgtaaaagaagcacttacaaatgcattaaaatattcagcagctaccaaggttattgtaaatatagacataaatgataagtatataaggctttacataaaagataatggtgtaggttgtagtaagatgaaagagggactaggtataagcggtatgagagagaggatacgaagcgtagggggaagtatatctacaagtggagagaatggatttttaatagtatgtataattcctataaataacgggggaggaaaaatatttgaaggtattaatagttga

SEQ ID NO: 15773 - DNA, 3726 bp, Clostridium acetobutylicum
atgatacatcctgtccaagttggtaaaagaactagaatgagtttttctaaactcgatgaaattggggtaatgcctaatcttattgaggtacagttggattcatatcagtggtttttagacaatgggcttcaagagatatttgatgacattaatccaattcaagattatacaggaaatctcatactagaatttattggttacaagctcgatatggataatatcaaatattccgttgaggaatgtaaagaaagagacaccacttatgcggcaccacttaaggttaaagtaagattacttaataaagaaactggtgaagtaaaagaacaagaagtatttatgggtgattttcctttaatgacagagcagggaacatttataataaatggtgcagaaagagttattgtaagtcagcttgttagatcaccaggagcttactacgattatatagtagacaaaaatggtaagaaattattttcagcaacagtaatccctaacaggggggcgtggttagagtatgaaactgattcaaacagcgttatccatgttagaatagataagacaaggaagttgccaattactatacttgtaagggcaatgggatttggttctgatgccgaaatagttaattattttggagaagaagaaagacttaaggctactatagagaaagacaacactaaaactagagaagaggctcttcttgaaatatataagagacttagacctggtgaaccaccaaccgttgatagtgcattttctcttataaattctttgttttttgatcctaaaagatatgacttatctagggttggaagatacaaattcaataagaaattagcagttagcataagaatagctaataaaacagctgccaaggatattgtgaaccctgaaacaggtgaaattattgtagaaaaaggtcaaagaataagtaaagaaaaagcgttagaaattcaaaattcaggtataaattcagttgatatttcagttgacgacaatataataagagttattggtaataattttgttgatataaaaagttacataaagtttgacataagcgatttaaatattagagagctagtatattatcctgttctcaaagaaattttggagaactatacagatgaagaagcgataaaagaacagcttaagaagaatgttcataagttagttccaaaacatattatcaaagatgatatgtttgcaacagtaagctatgagttaggattagcttacggaattggtaatgtagatgatatagatcatcttggaaatagaagagttagatctgttggtgaattgcttcaaaatcaatttagaattggtctttcaagaatggaaagagtagttaaagagagaatgactattcaagatcaagaagttataactccacaagctcttataaacataagaccagtggctgcatcaattaaagagttctttggaagttcacagctttctcagttcatggatcagattaatcctctatcagagcttacacataagagaagattgtctgcgttaggacctggaggactttcgagagaaagagcaggatttgaagtaagagacgttcatcactctcattatggaagaatgtgccctatagagacaccagaaggacctaatataggacttataaactcacttgcaacatatgcaaaggtaaatgagtatggctttgtagaaactccttatagaactgtagataaggagcaaggaagagtaactgatgaaattcattatattacagcggatgaagaagatcgttgtttaatagcaagagctaatgaagctttagatgaaaatggatattttatagataaaaagataactgtaagagctccagatgaagttttagttgttcctgcaaatgaagttgatttaatggatgtttcagcaaggcagatggtatctgtcgcaactgctatgattcctttccttgaaaatgacgatgccagccgtgcccttatgggatcaaacatgcaacgtcaggctgttccacttttgaaacctcaagcgcctgtagttggtactggtatagagcataaagcagcggtagattcaggaattctacctaaggctagaaatgccggagttgttgagtatgtaagtgcaaatgaagtaagagtaagacgtgatagtgatggcggagttgacacatacagacttcttaagtttaaaagatcaaaccaaggtacgtgcataaatcaaagacctattgtagaaaagaatgaaaaggttgagaagggaactgttttagcagatggacagtcaactgatttaggagagattgcacttggtagaaacataagaatgggattcataacatgggaaggatacaactacgaggatgctatgcttatatcagagcagcttgttcgtgatgatgtgtttacttctatccatatagaagagtatgaagcagaagctagagatacaaagctaggacctgaggaaataactagagatataccaaacgttggtgaggatgctcttaaggatattgacgaaagaggaataataagaataggtgctgaagttagatcaggtgacatacttgttggaaaggttacaccaaagggtgaaactgaacttacagcagaagaaagacttttaagagcaatatttggtgaaaaagcaagggaagtaagagatacatctcttagagttccacatggagaagctggaataatagttgatgtaaaaatattcacaagggaaaatggtgatgaattacctcctggtgtaaatgagcttgtaagatgttatattgcgcagaaaagaaaaatatctgtcggagataaaatgtcaggaagacatggtaataagggtgttatttcaagagtattacctgaagaagatatgcctttcttaccagacggaagacctcttcaaatatgtcttaacccacttggagttccttctcgtatgaatataggtcaggttttggaagttcatcttggctgggctgctgctaatctaggatggcatattgctacaccagtatttgatggagcattggagccagagatagttgaatgccttaagagagcaggatatgctgaagacggtaagactgtactatatgatggtagaaccggagaggcttttgataatagagttacagtagggtatatgtatatacttaaacttgcccatctagttgatgataagattcatgctagatcaactggtccgtactcgttagtaacacaacagccattgggtggtaaagctcaatttggtggtcagagatttggagaaatggaagtttgggcacttgaagcttatggtgctgcacatacactccaagaaatacttacagtaaaatctgatgatgttgttggaagagttaaaacatatgaggctatagttaaaggtgaaaatatacctgaaccaggaataccggaagcatttaaggttcttattaaagagctacaagcattatgccttgatgttaaagtgttatctgataataacaatgaaatagaattaaaagaatcaatagaagatgaaactgaagatttggatgttaatatagagggtaatgaagattctaaagtggaaccaataaggccacaagatgttcaagaaaatgtcagcggagaaaatgtagatgctggctatgaaaatgaagatgtagatatcgattatgaagatttagatatagatgatctgaaaaatggattagggcttgaagatttcaatgatgaacattaa

SEQ ID NO: 15774 - DNA, 288 bp, Clostridium acetobutylicum
atgaataagtatgaaactttatttatacttaacccatcattagatgaagaaggcataaatactaatgttgaaaaatttaagtcagtaatcacaaatggtggcggagaagttgaaaatgtagatttatggggcaagagaaaacttgcttatgaaatagacaaagttaatgaaggaatctacgttttagtgaattttcaatctgatgcacaattgccaaaagaattggatagagtgttcagaattagtgacagtattataagacatttaattattagtttggaaaaataa

SEQ ID NO: 15775 - DNA, 645 bp, Clostridium acetobutylicum
atgaaaaaatttagtatattaaatggtaggaataaattcactaaaagagctaaaataaaatctaataagatgaaactgctcataggagctatggggcttattttgtgctgtgaattattagtaggagttgtatataagttacatgataaaaaaacagttgaacaaaaaaagatagaggccgagaaaacgccaagtaaagctaaaaagaaaaatactacaaaagctgaaagcaagcctgaagttaaagctgctacaaatacacagaacgctacagtaccacaatcaaaggatagcaatcagaaagtagatacatcaggggcagctaatagtccatcatctaatactgcaagtaataaaactagtaaaagtagctcgccaaataatacatcacaaaaaccaaataataatcgagttggacaagaaagtaaaaatgttacacagtcacaaactacgagaagaacaactcagactacaactccagctgttcatcctacgcaggagccttcacagccagttgtgaatgagccacagcagccggcagtccaaaatcaagatcaacagaataaaattactagtcaggatgaaattgatgcatccaaaagtcaagatgaaataatgaaagaaattcataataacggaaattaa

SEQ ID NO: 15776 - DNA, 1788 bp, Clostridium acetobutylicum
atgggagaatctttaaatggattgaagcgaaccattatgtgtggagaaataagagagaaccatattggaaatagagttgtagtgatgggatgggtccagagaaaaagaaatcttggagggttagtattcgtagatttaagagatagagaaggtatacttcaagtagtttttggagaagaaataaataaggatgcttttatgaaagcggatttagttaaatcagaatattgtatttcagtttctggaactttagtcaagagagaatcgccaaacccaaatatgccaacaggaatggtggaactaaagggcgaagaaataaaaatattgtcagaaagtgagacaccacctatttacataaaagaaaatcttgatgctgctgaaaatataagactcagatatagatatcttgatcttagaagaccagatatgcagaaaatttttaagataagacataagactacaaaaataataagggatttcatggatgaagagaacttccttgaaatggagacacctatacttactaagagtacaccagaaggtgcaagggactatttggttccaagcagaaattataatggaaaattttatgcacttccacagtcaccacagttatttaagcagcttttaatggtttctggatacgataaatattttcaaatagcaaagtgctttagagacgaggatttaagggctaataggcagccagagtttacacaagtagatatggaaatgtcatttgtagaagaagatgatgtaatagaattaaatgaaagacttatacagaaggtatttaaggaaatggcgggagtagaggttaaacttccaatagagagaatgacttggaaaactgctatggaaaagtacggttcggataaaccggatttaagatttggtatggaaatcaatgatataagtgaggctgtaagtacttcagattttaaagtatttaagtcagccatagaagaaggcggaagtgttagagcaattaaagcaccaaattctgcagatatgcctagaaagaagatagataagttaggggagtttgtaaaaacttacaaagcaaaaggtttagcatggatagcattaaaagaagatggaataaaatcacctattgcaaagtttttaaaagaggaagaattaaaggcaataatcgacaaagttcaagggaaaacaggagatcttatacttatagtagcagataaaaattctgttgtattccagtcattaggagcacttagattagagattgcaaaggaactcgaaattttaaaggataataaagaatttagatttgtttggattaccgaattcccactattatcatacaatgaggaagaagaaagatttcaagctgaacatcatccatttacaatgcctatggatgaagatatagaatatcttgaatctgatccgggaagagtaagggctaaggcatatgatatagttttaaatggagaagagcttggaggaggaagtgttagaattcatgatactgcacttcaagaaagaatgttcaaggttcttggttttacaaaggaatcagcctgggaaagatttagttttctactagaagcatttaagtttgggccaccaccacatgctggtcttgcttatggattagatagacttataatgttccttgcaggtactgaaaacatcaaggacgtaatagccttccctaaaaatcaaaatgcattctgtcctcttacagaggctcctaatgttgtagatgaaaatcagattgaggagcttggaataaaagttgaaagtaaagaagaagaataa

SEQ ID NO: 15777 - DNA, 1728 bp, Clostridium acetobutylicum
atgtcatacaaagaaaaatttaaagcatggttagattctgaatatgttgatgttgaaactaagaaggaattagaagcaataaaggatgaaaaggaaatagaagatagattttataaggacctggaatttggaacgggtggacttagaggagtgattgcagcaggaagtaatagaataaatatatacactgttggcaaagccactcaagggcttgcagattaccttaataaaaactataataatgcgtctatagccatagcacatgattctagaataatgtctagagagttcgcagaaagagcagcaagtgttttatgtgcaaatggtataaaaacttatttatttgattcacttagacctacacctatgctttcttttactgtaagacatttaaattgcaaagcaggaatagtaataactgcgtctcacaatccaaaacaatataatggatataaggtttataacgaggacggaaatcagcttacagataatgctgcagctgaggttttagattttatagaaaaaacagaagatttttcaggtgtaaagcttatagatataaagaaagctgagaaggatggaattcttgatatcatcggagaagaagtggataaggtttacatagataaggttaaagatttaacaataagaaaagatatggttaaggaaagcgcaaaagatttaaaaataatatatacacctattcatggttctggaaatattccagtaagaagagtgttaaaggaattaggctacgaaaacctaacagtggttaaggaacaggaaaagccagatggtaatttcccaacagctccatatcctaacccagagcagccttcagtatttaatatagctcttgagttagcaaaaaaagtagatccagatgttatatttggaactgatcctgattgcgataggataggtgttttagttaagaataagagtggagaatataaagtgcttacgggaaatcaaacaggagttcttttaactcactatataatctcatctcttaaagatactggtaagctaccagctaatggtgcagtaataaaaactatagtaacctctgaaatgacacgtaagattacagaggattatgacatgaagcttatagatgttttaactggctttaaatatataggagaaaaaattaaggaatttgaagaaactaattcaaatacttatttgtttggtttcgaggaaagctatggatgccttgcaggtacttttgtaagggataaagatgctgttgttgcagctacattggtatgtgaaatggcattgtactataagaataaaggactaagtctcgatgatgctcttaatgaattatatgagaaatacggtttctataaggagaaattagtatctatagagcttcaaggtaaagagggtcaggaaaaaatacaaaaagccttaaattacttaagagagaatatgtcagataacgtagcaggagtaaaaatagtcaaaaagtttgattataagagtagtgtagagaaggatatacctaaaaatgaagaaaagaagattgagctccctaagtctaacgtacttagatttattttagaagatggttcttggtttgttgtaaggccatctggaactgagcctaagatgaaagtttatctagcagtagcaggtacaaataaagaggattctgaagctagaatgaataaatttaacaatgatgttatggatatcattaaccaggcttgcaaataa

SEQ ID NO: 15778 - DNA, 444 bp, Clostridium acetobutylicum
atgttaatgcctaaaagagttaaacatcgtaaggttcagcgtggtagaatgaaaggtaaggctacaagaggtaactttatcgcatatggtgattttgcaattcaagctactgagtgtgcttggataacaagtaaccaaatagaagctgccagaatagctataaatagatacgttaaaaggggaggaaaactttggataaagattttccctgataaaccagtaactcaaaaaccagctgaaacccgtatgggatctggtaagggttctccagaatattgggtagcagtagttaaaccaggaagagtattgtttgaaatgtctgatgttaccgaagagcaagcaagagaagcatttagacttgcatcacataaacttcctataaaaactaagttcgtaactaggaaggactttgaagaaatgggtggtgaagcaaatgaaggctaa

SEQ ID NO: 15779 - DNA, 714 bp, Clostridium acetobutylicum
atggaactaaataatacaattgctacacctttgtacaaacaattagaaaaaaaactgcagcaagaaatagatagtggtaaaagacctgctggaagccgtcttccaacagaaaatgaattgagcaaggcttataatgtaagccgtgtgactgtccgcaaagctcttgctgaactatccgagtcaggatatttagagcgcaaatcaggaaaaggtacttttgttgctgaaaaaaaacttgagcgtggcataacaaacggtgttttaggtttttctgaaatgtgtaaaatgatgaatgcaattccgggtgccaaaattataaagatcgcccttgaagagccatcagaaaaggatatacagaaaatgtcacttaataaagatgaaaaagttttagtattagaacgtgtacgttatgcaaatggcaaaccagtattgttagaattaaataaatttcctgaatccttttcctttttatttgaagaaaatttaactgatgcatctctgtatgatattttagaacaacacaatataattttagatcattcccgaaaaacactagatattgtatttgcagatactaaagaagctaaaacattaggaatttctaggggatacccacttttaagaatcaatagtatcatacacaatgcagacaacactattactaacctctgtcagcaactttgtataggagataagtttacatttataatttaa

SEQ ID NO: 15780 - DNA, 690 bp, Clostridium acetobutylicum
atgggcaagaagtatatcgaaagtgcaaaattagtagataaaaacactctttatgctccagatgaagcagtagatttagttgtgaaaacatctaaggctaaatttgatgagacagtagaacttgctgtaaggcttggagtagatccaagacatgcagatcaacaagtaagaggtgttgttattttacctaatggaactggtaaaaaagtaagagttttagtttttgctaaaggcgataaagctaaagaagcagaagcagcaggtgctgattatgtaggagcagaagaattagcaacaaaaatacaaagtgaaaattggtttgactttgatgttgttgtagctactcctgatatgatgggtgtagtaggaagattaggaagagttcttggaccaaaaggtttaatgccaaatcctaaatcaggtactgttacatttgacgtagcaaaagcattaacagaaatcaaagctggtaaagttgaatatagagtagataaaactgctattgttcacgttccagtaggaaaaagttcatttggtgcagaaaagttaaaacaaaatttccatgcattaatggatgcaatagtaaaagctaaaccagcttcagctaaaggacaatatgtaaaatcagtagctttatcaagcacaatgggtcctggaataaagataaatcctgttaaagtgttagattag

SEQ ID NO: 15781 - DNA, 2112 bp, Clostridium acetobutylicum
atgttacattttttagaaacagatattgccggaagaaaacttaaagttgaatgtggcaaaactggtatgctttcaaactgtgctatgttcataagttacggcgatactgttgtaatggttaatgtcaatgcctcagaaaagccaagagaaggtattgatttctttcctttgagtattgaatacgaagaaagacaatattcagtaggaaaaatacctgggggatttgtaaaaagagaaggtagaccttctgaaaaatctatcttacatgcaagagctatagatagacctttaagaccattgtttcctaaagggtacagaaatgatgttcaggtggtatgtactgtaatgtctgtagagcaggataacttaccagaaatacttgctatgaacggtgcatcaatggctctatgtttatctgatattccatttacaacacctgttgctacagtatctgttgggtgtattgatggtaaatttgttttaaatcctacattagaggaaagagaaaaaagttctcttgatttaactgtttgtgccacaaatgaaagagtaatgatgttagaggctggtgccgatgaaattcctgaggatttaatgattgctgcaatagattttggatttaatgcttgtcaagatatagtcgcttttcaagaaaaagcaatgaaagaattcggaaaagaaaaggttaccccagaattatatcatcctaaagaagaaattgaaaaagacgttactgaatttgcttttgaatctattaaggaaattatgtacataacggatagggatgaacgaaatttaagattaagagagataaaagaaaaaatatcaaatgagtttgcagaaaagtatcctgatgatggtgctgatatagatgaagttgtatatacacttcaaaagaaggtcgttagaaatatgttattaaaagaacatagaagacctgacggaagaagatttgatgaaataagacctataagttgtgatgtagatcttttgcctagaacccatggaagtggtttatttacaagaggtttaacacaggttatgacggttacaactttaggaccaattggcgatgctcaagttatagatggtttaggagtagaggaatctaaacgatatatgcatcattataacttcccaccatattctacaggagaagttaaaccattaagaggaccaaatagaagagagataggtcatggagctcttgctgagaaagccctagtgccattaataccatctgaagaagaatttccgtatacaataagacttgtgtcagaagttttaagttcaaatggttcaacatcccaagcaagtgtatgtggaagtactttagcactcatggatgcaggtgtaccaataaagagaccagcagccggaatagctatgggacttataacaagtgaagatctttcaaaagaagctgttattacagacatacaaggcttagaagacttttttggcgatatggattttaaagttgcaggtactgagaaaggtataacagcaattcaagttgatacaaaaatacatggtttatctaagtactgtataaaaactgcaataaatgatgctagaaaagctagattatttatactcgaaaaaatggttgcatgcataaatgaacctagaaaagaattatcaacatatgcaccaagagcgtatactataaatatagatacagataaaataagaactcttataggaactggcggaaaaacaatcaataaaataattgaggaaactggtgttaaaatagacattagagaagatggaactgtatttgttctatctagtgatgcagattcagctaacagggcgttaaagatgattgatgatcttacaaaagatgttaaagtaggagaagtttatttaggaaaagtaaccaagataactaacttcggagcttttgttgaagtgctcccaggtaaggaaggtcttgtccatatatcaaaacttgatataaataaagtaaataaagtagaagatgtagtttcagttggcgatgagatactagttaaagttactgatatagataatcaaggaagagtaaatttatcaagaaaagatgtattaaaacaacaagaatcaaataattctaaagaaaaataa

SEQ ID NO: 15782 - DNA, 594 bp, Clostridium acetobutylicum
atgtcgtataatattgataataagtttgaattgcacaaaagatgggttgagacaagtggtcatgagggtgaaaagttatgtttagaggaagtagattttagaaaatttgatttatctgataaactgtttgaacaagcaaatctagcagagtgtgtatttgacaatcttaaccttgaaaatatagattttcatacatcacttctatgttcatcaacttataaaaatactaacttaagaggatgtgatttttacaaaacagatttaagttatacagatttttctgatgctgttataaaaaatgttaggtttagcaaaagtgattgttgggaatcaatatttagaaatgttaatttaataaattgtaatctgataaatgattacttttacttaactgattttagcaatgcaacattggataatgtagatataagtctatccacatttgaggagacattactaaatggagtaaaattaagaaatattaaaggtatagaagaagctcattttgaaagtattaatattggtacatttgagaaaccgatattgctgaaatcacaagaagcaaagaaatgggtgttagaaaactgcttgtag

SEQ ID NO: 15783 - DNA, 1110 bp, Clostridium acetobutylicum
atgaatttatggggtgatagagtgggttatagtaaatataaatatgaaggtctattgaatttatgcctagaggtttttcaaaggcttggctatacaaaagaggacagctatacaataggggaagtgctgcttctagcggatttgtttgggatagaatctcatggagtgcaaagacttacattgtattataagggaataagaaatggaagcataaaggttaaaaatcatatgaatatagtaaaagaatcacctgtgtctgtagttattgatggagatgggggaatgggacaaataatatcaaagaaagctatggagagggctattgataaggcaaaaaagacagggataggtatggctattgttaaaaattccaatcattttggtatagcgggatattacagtaggatggctgagagaaaagggcttatgggaatagctatgacaaatactagagccattgtgttgcctacatatggaagagagcaaatgcttgggactaaccctatttctattgcaatgcctgcaagaccaataccgtttttacttgacatggcaacaagcgttatcacaagaggaaaggttgaggtttacagtaaaaataatcagaaacttaattatggatgggctatggatgatgagggaagaaaaacagataatccagataaagttttgaaattagcaaatggaaatacaggtggacttttgccgcttggaggagatacagagatttttggtggacataaaggatacggaatctcttttgctgttgaaatgtttacgtctatcctgtcaggtggacttaccagcgacgaaatacgtggtaataataatactaatggtgtgtgccatgcttttgctgctatagattatggtttatttgatgataaaaatgctatagagaaaagaatgtcagcctatatgcaaaagattagaaattcaaaaaaggcatatggtgcttcaaggatatacacacacggagaaaaagaacttgaggcttatgaggatagaatggagaatggaatacctataaatgagaatactatagttgaaattaaagaaatatgtgattatgtggatattgatatcaataactacttgaaaaaatattaa

SEQ ID NO: 15784 - DNA, 1398 bp, Clostridium acetobutylicum
atggataagataaacgagaagatagacttattaaaggatgatatggtttcttcaattcaagaaatccttagaattaaaagtatcagcggggaagctgaaggaaatgcaccatttggaaaggatacagcaaaggcacttgactatgctttaaagttagctgaaagacttggtttcaaaactgttaatttagataactatgttggatatgctgaatatggtgaaggagaagattatgtagcagtacttggtcaccttgatgtagtgccagaaggagatggatggaattatcctccatatgctgcagaaatacatgatggaaagctatatgcaagaggatcaatggatgacaagggacctacagtagcatgtttatattcattaaaggctattgtggatgcaggacttactatgtctaaaaaagttagaattatattcggtttggatgaggaaactggttcaggaaaagatacagagcattatttaaagaatgaaaaaccaccagttcttggctttactccagatgctgaatatccaataatcaatggagaaaaaggaataacaatttttaacttagtaaaagattttaaaaatgattacgaaggagatacaaagattatttatgtaaaaggaggagaaagatcaaatgtagttcctccatacgctgaagctggaataagagcagatttaaagggcgaaatcattgataaatgtgaaagtttcgctgaaagaactggatatgatataaaagctgaagaaaaagacgatatggttatagtaaaatcaaaaggaattgctgcacatggaagtatgccggagcttggaaaaaatgctataatgcagcttttagcttttctagaagaattaaatcttggaaaatctgattttaatgattatatagctttcttaaatagatatgttggaatggaaactaacggagaatcttttggaattggtatggaagataaggtttcgggtaagctttccttcaatcttggaataatagactttaataaagaccaaggaaaagttgttcttaatgttagatatcctgtaacttgcaaatacgaggatatgatggatggaataaatgctaggatagctgatactggaataagagttgaaaacatgacacaccagaagtcattatactttccagaagatcatgaattagtaaaacttcttcaaaaagtatataaagagcaaactagtgaggagccaaaacttctttcaataggcggaggaacttatgcaaaggaaatgcctaacatagtagcctttggaccaatattcccaggagaaccagatgttgatcaccaagcaaatgaatttataaaaattgaacatttaatactaaatgcaaaaatatatgctcatgcaatatatgagcttgctcgttaa

SEQ ID NO: 15785 - DNA, 969 bp, Clostridium acetobutylicum
atggctgaaggtaataaaagcgatgttttaattgaagttaaaaacttaaaaaagtactttaatgtaggtcataatgcaatattaaaagcagtggatgatgtaagcttcacaattaaaaagggtgagactctaggacttgttggagaatcaggctgtggtaaaactacatgtggaagaactgttttaggattatatcaggcaacagagggagaagtaaactatgacggagtaaacatacatagtttaagaggtaaggcaaaaaaggaatttagcaaaaaggctcaaatgatatttcaagatccgtatgcatgcctaaatccaagaatgactgtaggagatataattgcagaaggaatcgatgttcacggtttatataagggtgaagaaagaactaaaaaaatatatgaaatgttagatcatgttggacttaatagagaacatgcatctagatttccacatgagttttcaggtggtcaaagacaaagaattggtatagccagggcgcttgctataaatccagagtttatcgtctgtgatgagccaatatcagcgctggatgtttcaatacaagctcaaatagtaaatcttcttattaagcttcagagagagatgggtttaacttatttatttattgcccatgacctttctatggtaaagcatatttctgatagagtaggagtaatgtatttaggaacaatggtggagtttgctgctagtcatgacctatatgagaatccactacatccatatactaaagccttaatgtcagcaataccaataccagatcctaaggttgaaaaaactagacagagaataaagcttgagggagaagtgccaagtccaattaatcctaaaccaggatgtagatttgcaggaagatgcaaacaggcaaaacccgattgttttgaaaagaaaccagagtttaaggaaattgaaaaaggacactttgtgagctgtcatttatattaa

SEQ ID NO: 15786 - DNA, 636 bp, Clostridium acetobutylicum
gtgaaaaatgttgactataaattatatcttgttacagatagaaaagttttgaaggaaagagatttatacaaatcaatagaagaggctataaaaggtggggttaccctagttcaattaagggagaaagagatgtctaccttggacttttatgagtctgcacttaagcttaaaaaaataacagagacatataaaatacctcttataataaatgatagaattgatatagcactggcaataaatgctgatggtgtacatattggacaaagcgacatgccgctgattaaggcacgtgaattattagggaaagataaaataataggtgtttcagctcatagcattgaggaagctttagaagcggaaagaaatggagcaacgtatcttggagtaggtgctatttataatacttcaaccaagggtgatgctcaagctgtaagcctcgaagaacttaagaatataaaaaatagcgttaaaataccagtggtaggaatagggggaataaatgaggagaatgctaacaaggtaattgaaactggtgttgatggaataagtgtcatatctggaatactttcagcacaaaaaattaaagataaggctagagttatgtttgatatagttaaaaaaaattcaactaaataa

SEQ ID NO: 15787 - DNA, 1449 bp, Clostridium acetobutylicum
gtgaatatatcaatatttaaggaaaaaagcttaaaatggcagcttttaagaaggatgtttttgctattaatatgtttccttataattctagaaatatttcaatactttttcttaagacattatatatgcaaagataaagaaatgcttttagaatcgcgaataaacaatgtagctcacttaatgacaactatagactcagaggcttctcttaaaaaaaattctgggtatcttataaaaaaatctctatactttgatactacttcctctgttatagacaagaatggaaacgtacttctatttcacattaaggataaacatcctacctctcctcctataatttcggcctccgaatacaaggctataatgaaaagagaaggcaatttagaaggttatacaattactaaaaataaatgtggagagccacaaataactatatggcgtaaaataggtaatttaaattcacctttaggacttattcagttaaccactccttaccattctgcagctcaatttctgtacaaacaaatttacatctacatagtagcttgcgtgcttattttgattttaagtattttaattggaggaactttaataaaacataccttaaaacctttatatagaatagcacatactttaaataatcttacagtaggtgatttgaacaaaaggctttcagaaaacaacaatcaagttgaaatagatcacttagcaactgcttttaataatatgttctcacgtatagaaatctccttcaatcgtgaaaaggagctaaagaaaaaaatgcagcaatttatttcagatgcctctcatgagctgagaacgcctttaacctccatacgtggatttgttgaggtcttattaataggctcttataaagacgaaaagaaattaaaactcgctttaaatactattcttattgaaagcgaaagattaactgaactagtcaataaccttttaactcttactagattagatcggagtactcatactgaaatgacaaaacaaaacatgagtgatataatcgaagaaatttatcctcagctaaaaatacttgctaaaaatagacaagtaaatttaaatttatatgataataatgcttatttcttgggaaataaaaatcaaataaagcaggtcatatttaatatagttcaaaattccataaattacactgataaagaaactggaattataacactatccttgtctatagaagacactctatttattttaaagatatcagacaatggaataggtatagcttctaaagatcttcctcacatattcgacagattctttagaagcgaaacacaccgttcaagagaatccggtggatatggacttggcttatccattgcaaaatcaataatacaaagtcatggtggtgaaatttctactaaaagtattataaatcaaggaacctcattttatataaaattaaaaagaatctaa

SEQ ID NO: 15788 - DNA, 1704 bp, Clostridium acetobutylicum
ttgaaaagaaaatttattactgtagttattccatcaataattatagcttcacttttatcttcctgcacaaatacttctaattcaactgcagcaaaagctacaaaagtatctagtctaaaagatcaatatattaaagctagtttgcctagcaaaaacccggaaaaagcaaaaaatcgcaaagataccttcattgctgcaataagcgaaccaggaggagtttttcttccatacttctacgataatggctgggatggaaatgccacagatcctatttttccttctctagttagcacggatgaaaaagggaatccaattgcagatttagcagaaaagtgggacatatcctctgataatctaacctatacctatcacttaagaaaaagattaaagttcagtgacggctctcccctaacatctgatgatgttgcatttaccttgacacttttagatgatccctcctatagtggcagctttgacatctcaacttgctatataaaaggaagtaccgattataaaaacggtaaagctacttcaatatcaggtattgccgttgtagaccctttaaccataaaaatcacaactgaaaagataaatcccttaaacctaactaggctaggtggtcaagtactatcaaaagcttattacggaaaagactacaaaaaaggaaatcttgattacttaaaatcgctatactcaagacctttaggcgcaggtccatataaacttgataaatacattcccggtcaagaaatacgatatactgcaaatgaaaattattacaaaggaaaacctaaaatagaaaactttatttttaaggttactagtaaggatacaaaccttcaattgtttcagacaggagaaattgattctgattcatttagcacagacaaagacaccgtagatcagcttgaaaacttagggtttgccaatatacgaattagcactgtaagtgactatggttttgtatatatgaataacaaaaaaccttacttaaaagataaaaatgttaggcaggctcttatttatggtcttgatcgtcaaaaaattgttgatgtagcatacaaaggctatggagaggtggctaacgtacctacttcacctcttgtattgtcctacactacagatggaattaattcatataaattcaatcctgaaaaagcaaaaaaattattagaagatgatggttggcggcttaattctaatggaatacgcgaaaaaaatggtcaaaagcttaagatatcatacttaacttcaaaaaatacggatcaaacaatacctatagctaaggaaaactataaagcactaggtatcgacttcgagcctgaaatcatggatttcaacactttagttgagaaattaaataaaggtgactacgacctagctgctgtacgcacaagcggacttgtagatccaaatgactctgttgaagaattttcatctaaaaaaacttctgaaaatgtcagtggatatttcaatccaaaggttgatgaattaatttcagagggtgtaaataccttaaacgttaagaaacgtaaagcaatatataaaaaactctataaagaattatcagacgacccaccagttatattaatagattataggaagggcttaaaggcttggaacagtagaattaagggtatggaaaatgataattttgcaggagtttcatctactaatttatcaaaattaaagatagaaaattaa

SEQ ID NO: 15789 - DNA, 1434 bp, Clostridium acetobutylicum
atgtcaaaaggttttagtaaagaatttttatggggaggcgctacggcggctaatcagtgtgaaggtgcttatttagaggataataaagggttatctacagttgatgtaattccaaagggaaaggaccgttttcccgtaggcttaggaaaaatgaaaatgcttgagtgtgacagtgaacattattatccaagtcatgaggctattgatttttatcacagatataaagaagatatagctctatttcatgaaatgggctttaaatgttttagattatctcttgcttggtcacgaatatttccaaatggggacgatgaaataccaaatgaggagggattgaaattttacgatgcggtatttgatgaatgtttaaaatacggaatagaaccattagttactataactcattttgatgttccggtgaatttagtgaaaacagtaggttcctggagaagcagtaaaatggtagagtattacgaaaaactgtgtaaggttatatttagtcgttataaaaataaggttaagtactggcttacctttaatgaaataaatatgctattgcatttaccttttataggtgcaggtttagtttttgaagagggtgaaaatgaggaagctataaaatatcaagcagcacatcatcagcttattgcaagtgcaaaggcaacaaaaatagctcgtgaaataaatccaaattttaaaatagggtgtatgctagctgctggaaataattatgcaaacacatgtgcaccagaagatgtgtggagatctatagaaaaggatagagaaaactatttctttattgatgtacaatctcgtggagagtatccaaactatgctaaaaagatgcttaaaaggaaaggtatagagcttcaagtagaggatgaagatgctggaattttaaagaataatactgttgattttatatcatttagttactattcttcacgcctaactagtgccaatcctaatataaatggaaatactgaaggaaatgtctttgctaccttgaaaaatccttatctaaaagccagtgaatggggatggcaaatagatccgcttggacttcgaattacattaaattctttatacgatcgttatcaaaaaccattatttatagttgaaaatggtttgggagccgttgatactccagatgaaaatggatatgtagaagatgactatcgaattgagtatttaagagagcacattaaggctatgagagatgcagttaatgttgatggtgtagaacttatgggatacacaccttggggatgtatagatttagtaagtgcttcaactggagaaatgaaaaagagatatggctttatatatgttgataaggataatgatgggaatggaacattaaagcgttctaagaaaaagagtttttattggtataagaaggtaatagaatcaaatggtatggatatagagtaa

SEQ ID NO: 15790 - DNA, 1314 bp, Clostridium acetobutylicum
atgaagctttggggtggaaggtttagagaaagtgaaagcgagcttatggaggaatttaatgcgtctttaagctttgataagaaactatatgaagaagatatagaaggaagtattgctcatgtaaaaatgctgaataaatgcaaaataataaataatgaagaatgtgaagaaatattaagtggacttaaatccttatataaagatataagaagtggaaaattgaaaattgaaggggactatgaagatatacacagttttgtggaagtaaacttaatagatagaattggggcagttggaaaaaaacttcacaccgcaagaagtagaaatgatcaagtggctgtggatatgaaaatgtatgttaaaaagagctcttatattataattgagtgcataaataagcttatggagacaataaaggataaagcagaaaataatcactttataatgccgggctatacccatatgcaaagagcacaggtagttacctttactcaccatatgatggcttattacagcatgtttaatagggataaaaaaagaatagacaatgctatttctaatttgaatgaaagtccacttggctgctgcgctcttgcaggtacaacttatgatacagatagagaaatgacctctaaagaacttggtttttctaaaccagtagataattttttagatggggtaagtgatagagactatataatagaagtgctgtcggcattttctatatgtatgatgcacttaagcagattaagtgaagaactcataatatggagcactaaagagtttagttttattcaaatggatgataaattttcaacaggaagcagtataatgcctcaaaagaaaaatccagatgcggctgaacttatacgtggaaaaacaggaagagtttatggtgatttaatagcaatgttaacaatcatgaagggaatacctttagcatataataaagatatgcaggaagataaagaacagttctttgactcctttgatacactaaagatgtgtattttagtcatggatggtatgattgcaacaatgactgtaaaaaaagaggctatgaaggaagctgtaaaaggtggatttttaaatgcaacagatgtggcagattatctggtaaacaagggagtagcttttagagatgcccataaaatatcaggagagcttgtaatatactgcgaaaataatgataaagctattgaagaattaaatattaatgaatttaaaaatttctgtaatctatttgatgaagatgtttatgaatttataaattataacaatgttattaaaaagggaaataaaaaaataatgtaa

SEQ ID NO: 15791 - DNA, 963 bp, Clostridium acetobutylicum
atgtttagaagacatagaagattaagaaagaatagctatataagggatatggtaagagagactacattaagccctaatgactttatttatccgctttttgtggtagaagggataaatataaaaaaggaaataccatcactgcctaataattatcattattctttagacaggctaccagaggttatttctgaaattaatgatgcaggtgttaaaggtataattttatttggaataccagattataaggatgaaattggttcttctgcttttgatgagaatggaataattcaaaaggcaataagaaaaataagagaaattgataaagatctatttataataacagatgtatgtatgtgtgaatatacaagccatggacattgcggaattattcatgatggatatgttgataatgatgaaactctaaaatatataggaaaaatcgcactctctcatgcaaaggcgggagctgacatgattgcaccgtcagacatgatggatggtagaattgaagaaattaggactactcttgatgaaaacggatataagaatgtatctataatggcatatagtgctaaatattgttctgcgttctatggtccgttcagagatgctgcggattctgcacctaaatttggagatagaaagagctatcaaatggaccctgcaaatgcaagagaggctatgcttgagattgaagatgatattgaagaaggcgctgatgtaataatggtcaagcctgcactagcgtaccttgatatattaagaactgctaaaaatagatttgatgttccagttgctgcatacagcgttagtggtgaatattcaatgataaaggctggagccaaaatgggctggatagatgaaaaggctatagcacttgaatctttattatcaattaaaagagctggtgctgatatgattataacttattacgcattggaagcttcaaagtggttaaagtag

SEQ ID NO: 15792 - DNA, 1371 bp, Clostridium acetobutylicum
atggaaatgatgctgggcaaaacctatagagaaatggtcttttggatggcatggattatcattccttttttgatggaaatagttcctgcacttggtggttttataatacttttaagaaagagactttcaataaaagataaagccttttcaggcaaattgccccaaattactattattgttcctgtgtataattcagaagatactcttaaaggttgcattgaatctatatataattcggactatccctctgaatttattgatgtaatgttagttgataaccagagttcagataacagttttaagatttttacaagatgtcaaaaggagtttgatggtttatctctaagatatatgaattcaaaacaaggtaaatctaaggcacttaatatggcactgtttaacagcagcgggaaatatataatccacattgacagtgatggtaagcttcataaggatgctataaaaaatatggtaacacgttttgaaggaaatccacatgttcactgcatgacgggtgtaattttaacagacaaggagttaattgaaaagactaagggaagtttttttaagcttttaagaaaatgtgagttctttgaatatgctcaggcttttttagctggaagaaattttgaatctgaggtgggaagcatatatactctctcaggagctttttcagcctttagaaagtcaacaatcctaaaaactcagctttataatagtgaaactgtaagtgaagatactcaaataacttttcaggtaaagaagcttttaaatcaaaaggtatatttgtgtgagaatgcattattttttgtagatccaattgaaggttttaataaactatatactcagcgtcaaagatggcaaagaggagaactagaagtttctcatatgtttttaagagacggacttaagtttggcaaaggttttgtcagtgatttcatggtaagaactcttatgtatgatcatacctttgcctttcccagaatgatatggtattttgcacttatattcttggtttttatgaactatccaatttatcttgtggtgggttcggttgctgtaatttatcttctatattcattatctgcatttttgttttatctcaatgtaatatcttatttaaagaaatataaagaggttagatcatactatgcgaaaaagttctacttaatatttttaatgcctatgtataactttggtgtgttttggataagattttgtggcattataaatagcatacaacttcagggaaactggaaaactcttaatttaactgatgagtggagaaactttttaggtgtatttaaaagagattttagtgttgtatttaaagtattaaataagctaaggcaggtggtaaataatgaatga

SEQ ID NO: 15793 - DNA, 1503 bp, Clostridium acetobutylicum
gtgaggtatttattaggtatagacgttggaacatcaggaaccaagacagctttgtttgatgaatgtggaaatacaataaaaacttcaacgcatgagtatgagttatttcaaccacaggttggatgggcagaacaaaatcctgaaaattggtggacagcttgtgttaaaggtataagagaagtaattgaaaaaagtaaaattgatcctttagatattaaaggaattggtataagtggacaaatgcatggacttgttttgattgacaaagagtacaaagtaattagaaactccataatttggtgtgatcagagaacagaaaaggaatgtactcagattacagataccataggaaaagaaaaattaattaggataacaggcaatcctgcattaacgggtttcaccctttcaaaactattatgggttaggaataatgaaccagacaattataagagaatatataaggttcttcttcctaaggattatataagatttaaacttactggagtttttgctgccgaagtttcagatgctagtggtactcagatgttagatataaatactagaaattggagtgaagaacttttagatgacttaagaatagataagaacatattacctgatgtatatgaatcagttgttgttagtggatgcgttatagaaaaagcttcaaaagagactaagttagcagttaacactcccgttgtaggtggggcaggagatcaagcagctggagctatagggaatggaatcgttagagaaggtttaatatcaacagtgataggaacttctggagtagtatttgcggctacagatacgcctagatttgatagtaagggaagagttcatactctttgtcatgcagtgcctaataagtggcatataatgggagttactcagggagcaggcttatcattaaattggtttaaaaggacattttgtgcaaaagaaattttagaaagtaaagaggctggaattaatatttatgatttattgaccgaaaaagcatcacaatcaaagcctggttctaatgggataatttatttgccataccttatgggtgaaagaacaccgcacatagatccaaatgtaaaaggagcttttttaggtatatcacttataaataaccacaatgattttgtgcgtagtatattagaaggagtaggctttagtttaaagaattgtctcgatattattgagaatatgaaggttaatattgaggaaatacgagtaagtggtggaggtgcagaaagcagcatatggagacaaatattgtcagatatatttaactatgagcttacaacagtaaaggcatcagaaggaccagcacttggcgtagcaatacttgcaggagttggtgcaggaatatataattccgtggaagaggcttgtgacaaaatagtaaaaggaaacgaaaaggttatgccaaatgcaaatttaatagaagtatattcaaaggtatatgaggtatataattcagcttatcctaaaataaaagatatataa

SEQ ID NO: 15794 - DNA, 387 bp, Clostridium acetobutylicum
atgatggaagaaaaaagttttttaccacttggaagtattgtaattcttaaaggtgcaatcaaaaaattgatgattgtcagcagagcaaatgtagtcaataacaattattttgattatggtgcaatactttatcctgaagggatgattgatgaaaatgtagcttactttaatggcaaagacatcttgaaggtggtttcagaagcatatacagatgatgatgatgccttgatggttgagcaactatgtcaagctaaagaagagtacttagcgtctagcgtagaaattaaagaaaatgtttcagcaccagaaacagccgcagcagaggaaggaaactttgacgatgatccttttgcagctgtgagagatatggaggatgacgatgagtga

SEQ ID NO: 15795 - DNA, 1347 bp, Clostridium acetobutylicum
atgggtagaatgtttggaactgatggagtaagaggaatagccaataaagaacttacagcagagcttgcatatagacttggaagagcaggagcgtatgttttaacaaatgaaactcataaacctaaaatattggttggtatggatactagaatttcaggcgatatgcttgaagctgcgcttgtttcaggtatactttctgttggagctgaagctgtatgtgttggtatagtgcctactcctgcggttgcttatttgactagaaaatacaaagcagatgctggtgtagtaatatctgcatcccataatccggtagaatacaatggaataaagttttttgatgcaaaaggttacaagctatcagataatcttgaggacgaaattcagaaaattatagaaagtgactttgagggagtaccgcttcctactggtgaaagtgttggaagaaaggttgtagaggaatctgcagaagaagattatattaagtttgccaaaagcactataggaacagatttaaagggaatgaaaatagctcttgactgtgcaaatggagctgcgtataaaactgcggtaaaaacctttagagaacttggtgcccaggtaactgttataaacaatgatccagatggaataaatataaactgtaactgtggttctacacatcctgaggaattgatggattatgttgttaagaaaaattgtgatttaggtcttgcttttgatggtgatgctgatagatgtcttgctgttgatgaaaagggaaacctgatagatggtgactttataatggctatctgtggtaagtacttaaaggataaaggtgaattacataaggatgtagttgttgttactgttatgagtaatatgggattatttttagcattagataaagcaaatattaaaacagtaaaaactaaggttggagacagatacgttcttgaagagatgttaaaagaaggatacaagcttggtggagaacaatctggtcatataatattcttagactataatacaacaggagacggacttgtaacggctcttaagatatgttcaatagtaaaagagagtagaaaaacactgtcaaagcttgcatctataatgcataagcttccacaggtacttgcaaatgcaaaggtgcctaataataaaaaggatatataccttgaagataaggagatatctgatgaaattaagaagattgaggaagaactgcatggtaaaggtagagtattaataaggccttctggtactgagcctttagttagagttatgcttgagggagaagatcaagatagacttaatactttagctcatggtttagcagagttaattgaaaagaaagcaaactag

SEQ ID NO: 15796 - DNA, 648 bp, Clostridium acetobutylicum
atgaaactttttatagatacagctaatgtagaggagataaaagaagtaaacgatatgggggttatatgtggagtaacaactaatccttcccttgtagcaaaagaaggaagagattttaatgaagtaatacgtgaaataacatcaatagtagatggacctataagtggagaagtaatagcattagacgctgaaggaatgataaaagaaggaagagaaatagccaaaattcataaaaacatggtagtaaagataccaatgacggaggaaggtttaaaagctgtaaaggtattatcaagtgaggggataaagacaaatgtaactcttattttttcagcaggtcaagctcttttagcagctagagcaggagctacctttgttagtcctttcttaggaaggcttgatgatataggtgccgattctataggattaatagaatcaattgtaaatatatttgatatacatgatataagaacagaaataatagcagctagtataagaagtccaaaacatgttattgattcagcagaggcaggagcgcatataggaacagttccatacaaggttttgaaacaattaataaaacatcctttaacagatatcggaatagaaagatttatgaaggattggaaagaggcttttaataaataa

SEQ ID NO: 15797 - DNA, 1236 bp, Clostridium acetobutylicum
atgtctaaatttaaatcacacaatagcaataatacaaaacaaactataaataaacacgctttaatattcggtcttatatctgtatttctttctggaataggttttactatcatatcacctgtaatcccatttttagttcagccttacataaataatccgggaaaccaagctataattgttacacttttaacttctgtctatgcaatttgcatgttcttttcagctcccgggcttggcgctttgagcgataaatatggccgccgtccagtacttttagtatgccttttaggttcatcaataggatacttaatttttggcataggaggagctctatgggttttatttgctgggcgcataatagatggtataactggaggaactataagcactatattcgcatattttgcagacatcattcctgaaaacgaaagaacaaaatactttggatgggtaagtgccgttgttggtgtaggcaccatcattggtccaactctaggaggattacttgccaagtttggttattctgtacccctgtattttggcgcaataataactttattaaatgttgtttacggattcttttttatgcctgagagcctcgacaaaaatatcaggctaaaagagataacctttgtaagactaaatccatttacacagcttgcaaatttactttccataaaaagcttgaaaagacttcttatctcagcattcttactttggattccaaacggatctttacaggctgttttttcacaatttacaatagatacctttagttggaagcctgctataatcggacttatgttttcaattatgggcttccaagatatcatttcacaaagtttaataatgccaaagcttttagtaaaacttagcgacaaatatatagcgattcttggaatgatttcagaggttataggttacagtctcattgcagcatcagctttattttatttctatcctctctttatagctggaatgtttatatttggttttggtgattccatcttcggaccttccttcaatgggatgctctccaagtctgttgattctagcgagcaaggaagaattcaaggaggaagccaatctattcaagctttagcaagaatgatcggacctatcattggtggtcaaatctacgtatcacttggtcatgccacccccgcttttatgggtatagtacttataacagtggcaatacctgtcttgtataagaatattcatataaatatataa

SEQ ID NO: 15798 - DNA, 720 bp, Clostridium acetobutylicum
atgaagtattttgatataatgagtttagaatgcaaaaaaattgggatagaatttaccgaggaaaaatatggtaagtttatgagatataaggaattattacaagaatggaataaggtaatgaacttaacatccattgtagatgacgaagagatagtgaaaaagcattttatagattcaataaagatatttgagtgtgaacatatagttaaggcaaagcgtattattgatgttggtacaggtgctgggtttccagggcttccaattgccataatgaatgatgatattgaagtcgtacttctagactcgcttcagaagagggttaattttttaaatgaggttataaaagaactaaacttaaaaaatattagtactgttcatggtagagcagaagattttggtgtagataaggattatagagaaaagtttgatgtggctgtatctagggcagttgcaaatatggcagtattgagtgaattttgtcttccttttgcaagagtagggggatatttggtcgctttgaagggacctggaataaatgatgagatatcaacggcgaaaaaggcgataaaagttcttggcggaacattagataaagtgattaatgttgaatttgaaaatgaggattttcagcataatttagttgttataaaaaaacaaaacggtactcctaaaaaatatccaagaaaagcaggtaaagtgtctaaaaatcctataatatag

SEQ ID NO: 15799 - DNA, 804 bp, Clostridium acetobutylicum
atgattaaggatataacgataggacagtatatacctggaaaatcattcattcataaactggatcctagaacaaaaattttactgtctcttgtttatatagttaatttgtttttaatagataaatttaaaggatatatttttataacagcttttacgctttttataatttttatatctggtattaaaatgaaatatatctataaaagcttaaagcctatattattgcttataatatttactggggcattaaatatctttatgacaccaggagctgcggcacccttatttcattggagctttatacatatatacaaggaagggctcgttttagcagcatttatgtctataagattaatatttctcataataggtacgtctatgcttacatacacgacctcaccaattgagctcacagatggaattgagaaattgttgaccccattttcaaaaataggacttccagcacatgaatttgcaatgatgatgacaatagctctcagatttatacctactttaatagatgaaacggataaaataatgaaggcacaaatggcaagaggtgcagacattgattctggaaacataataaagaaagccaaaagtcttatacctatacttgtacctttatttataagctcatttagaagagcagatgagcttgcaatggcaatggaatcaagatgctatagaggcggagaaggaagaacaagaatgaagcagttaaaatttacctcacgggattgtgtagcagtatttttcagtgtagttttagttggagtttcagttttaagcaattacttataa

SEQ ID NO: 15800 - DNA, 2190 bp, Clostridium acetobutylicum
ttgcccaaaaggatattagttgataaggctactattagaaatagaatttttattgtatttctaattttaacttgtgtaatctttttactatgctacaagctttttaatgtaatggttgcaagatcttctaggtataagaaaatggcacaagaacagtggacaagtgaagttaagatttcagctaaaagaggaagaatattagatagaaatggcgaagaactagccataagtggtaatgtttatagagttgatttggatttaaatactataaagaattctttggctgaaaagaagatgaaaatggacgaacttgcagataggctttctagtgcacttgatatggataaaaaagatgtctctaaacagcttaacaaaaagtttaaagatggaagaccaatgggatctgcaattttaacaagaagaatagataaggataaggctaataaagttttagctataaatgtaaaaggagtaatggtttctcctgatacaaaaagatattatccaaacagcgatttcttatcacaggttattggacatactaactcagatggagatgggcttacaggggttgaacttaaatataacaaataccttaaaggtaagccaggggttagaaaggctgagatagataaaaatagtgcaaatttaccttacacaatatctgaatattcaaaaccgttggatggcagagatgttgtccttactatagataaaaatatgcagtattttgctgaaaagtacgcccaagaggctttagttaataataaagcaaaggctgtgtcaatacttataatgaatcctaaaaatggtgaaatacttgctatggctaacaagcctgattatgatttgaatgacccttgggataaaagtaaaagttatgatgaacttcagaaaagttggagaaatagagtagtaagtgatgcttttgagcctggatctatatttaaggttataacttctagtgcagctatgagtttagggatagttcatgagaatgataaatttaactgcgggggaagtattactgtagctaaaaaaactatccactgctggaaaagaacagggcatggagaagaaacttttgtagatattcttaaaaattcttgtaatgttggttttgctgaactaggagaaaggcttggagctaaaaatcttaatgattatataaataaatttgggtttggaagaaaaacaggtatagatctcccaggagaagcacggggaataattagaccaactaataaaataggacctgtggatttagctacaatagcatttggacaatctaatactgtttcaatggttcaatacatgcaggcttttaattccgtagcaaatggaggttatttaataacaccacatgtaatgagggaaataagtcatgtagagaataatagacaggttgtagataaagagtatagcgattataataagaaaaggattttagatgaaagcatgacagccaccttaagaggatatcttgaaaaggtagtctcagaaggtggaggtaaaaaagcttttatagatggatatcatatcgggggaaaaacaggtacagctcaaaagccaaatcctaatggaggaggatatgagcacggaaagtatatagcttcatttgttggaatggcgcctgcaagtgatcctaaaattacagtaatggtctcgatagatgagccggatccatcaaattattatgcaggtcaaatatctgcgcctgtaggtcagaaggtttttaatgatatatttaactatctaggaataaagcctgatacatcaagttctgatgctgccaagagtatgctaaaagatgtagttattccgaatatacgtggtatgaaaaaggaagatgctataaaaacgcttaaaaatcttaatatagatgcggatgttgacggtaatggggaatatgtaagcaatacaactcctattccaggcataacagtaaaagaaggaacaaaagttgtactttacacaggagacagtcctaattataataataatgatgttatagttccaaatttaactggatatagtaaaaaagaagcagaagaaacattaaaaagtcttgggcttgattttaaaatttcaggagatggtgttgttgaatcgcaaagtattgatgctggtaaacaggtcaataagggtacggttttaacacttaaacttgaagagaatatgagcgagtga

SEQ ID NO: 15801 - DNA, 1929 bp, Clostridium acetobutylicum
atgcaaatgaagaaagattttggatatataagagttggtgttgcttcctgcgaacttaaggtagcaaatccaaattataatgttaaaagtataatttctattatgaaaaaagcttatagaaggcatcatattaaagtgttagtatttcctgaactttgtgttacaggatatacctgtggggatttattcaatcaaaatcttttaattaagagggctgaaaatgaattaaataacctattggtttcaacatcaaatataaatatgataactgctgttggcatgccggttaaagcggataatcagttatttaattgtgcagttataattaataatggaaatatacttggagtagtaccaaaaacatttatacctacatataatgaattttacgagaaaagaaattttgcaggcgctatttcaaggataagtgatgaaattattctgtgtggaaaaaaagttccttttggtgaaaatctgctcttcaaagacatctattcagaactttgcataggtatagatatctgtgaagatttatgggttaacatacctccgagttcttatcatacacttaatggcgctaatctaatattaaatctatctgcaagtgatgaaattgttgcaaaatcagattatagaagggatcttgtaaggcttcaatctgcaaaatgtattacatcctatgcatatgcttcttcagggcaaacagaaagtacttcagatttagtattctctggacattctattatagccgataatggatccatacttaaagacataaaatttgaggaggcttcatatgtcaaatatgcagatgtagatatagaaaaactaataagtgatagaattaaatttaatacttatatgggtagaatagaggataaagaatatagaacaattaactttcacttaggttataacgagaacatgcacttagaaagatatgttgaggcttcaccatttgtaccttcaaataaaagtaaaaggaacataagatgtagagagatactagatttgcaagcttcaggactatatcaaagattaaataaaacaggtataaataaggctgttgtaggtatatctggaggtttagatagtaccttagcattacttgtaatagttgaggcttttaaaaagcttaaagctcctatgaaaaatattataggcattacaatgccggggtttggtactactagacgtacttataataatgctgtagagcttatgaaaaaattaggtattacaataaaagaaatatctataaagaaagcttgtatacagcatttcaacgatattggacaagacttaaatacccatgatactatttatgaaaattctcaggcaagagaaagaacacaaatacttatggatatagcaaataaggaaggtgctattgtagtaggcacaggtgatttatccgaattggcactggggtggtgtacttataacggtgatcaaatgtcaatgtatggtgtaaatagcagcataccaaagactttggttaaatacttaattatgtggtatgcagaagcatcaaaggacaatgatattagaaacatactactcgatatttataacacgcctgtaagccctgaattgttgcctcccgataaagagggtaatattaagcagaagacagaggatttaattggttcatatgaattaaatgattttttcctatataatatgcttaggagtggctatgaacctttaaaaatattatatttagcaaatatagcctttaaagataaatattcagaagatgttatacattcagcattaaagaacttttataaaagattttttactcaacaatttaaaagaaattgtatgcctgatggtgtaaagattggctctgtttcattatcaccaagaggtgacttacgcatgccgagtgatgcttcatatggattgtggatggatgaattatag

SEQ ID NO: 15802 - DNA, 1137 bp, Clostridium acetobutylicum
atgaaaaataagactgaagttaaaaacgggggagaaaagaaaaactcaaaaaaagtgtcaaaagaagaaagcgcaaaagaaaaaaatgaaaaaatgaaaattgtcaaaaacttaatagataaagggaaaaagagtggaagtttaacgtataaagaaataatggatgaacttcaggaagttgacctaggaccagagcagatagaaaagatatatgaggttcttgaatctgttggcgttgatgtagtaggtgacatgcatgaaatagaggttgaagaagaagatttagatttgacaatacccgagggaatagctatagatgaccctgtaagaatgtaccttaaagaaattggtaaagttccgttgttatcaccagaggaagaaattgatttagcgcaaagaattaaaaacggtgatagatcagcaaggaagaagcttgcagaagctaacttaagacttgttgtaagtattgcaaaaagatatgttggaagagggatgcttttccttgatttaatccaggaaggaaatttaggactcattaaggcagtagaaaagttcgatttcaaaaaaggatttaaatttagtacttacgctacttggtggataaggcaggcaataactagagctatagcggatcaagcaagaactataagaattccggttcatatggttgaaaccataaataaacttataagagtctcaagacagttgcttcaggaattaggtagagaacctcagccagaagaaatcgctaaaataatggatatgccggttgataaggtaagagagataatgaagatagcacaagagccagtatcacttgaaacacctataggagaagaagaagatagtcatcttggtgattttattccagatgatgaagctcctgctccagcagatgctgctgcgtttagaatgcttaaagagcaactcctaaaaattctaaatacattaactcctagggaagagaaagttttaagacttagatttggtctcgatgatggaagagctagaacacttgaagaggttggaaaagagtttaatgttacaagagagagaataaggcagatagaagcaaaagctcttagaaaactaagacatccaagtagaagcaaaaaattaaaagattatcttgattaa

SEQ ID NO: 15803 - DNA, 2121 bp, Clostridium acetobutylicum
atgagtgagagaaaaaaatccactggaatgagtaaaggcccaggtggcggtccaccaatgggaagaccagcagaaaaggcaaaggattttaaagggactttcagaaagcttcttaaatatttagcaccttttaaaatgagatttttaatagttgtaatagcagcaatatttagtgtatgttttaatgttcgttcacctaagattatgggtaatgcaacaacaaagcttgcagacggaattaaaggaaagattatattaagtaaaataaatcctcaagagaaaaaagtaaatgatgccgctaaaaagttaagtacacaaaaatcaaatttagatgctcaaaaggcaaaattagatgctcaaataaaagctaatcctatgatggctcaagttcctaaggtagctgaagcagaagctcaaatgacaaagggagaagagcagttaactaaggcgcaagctcaaataaaggcggctcagaaaaagattagtaatgctaaaaaagatacaattaataagtatggtagtaaaattgattttgatgctataggcgtaataattttagagcttataggactatatgcagtagcttcgttgtttagtttcttgcagtcatttgtaatggcaggagttgcacagaaaacagtttataacatgagaaaagatgtagatgagaagcttaatagacttccacttaagttctttgattcaaaaactcatggagaaatactaagccgtgttacaaatgatcttgatactgttgcaacaacgcttcaacagagtttaacacaacttataacagcaatacttcaagttataggtgtagttattatgatgcttacaataagtggatggcttacacttatatgtgttctaacacttcctgttgctggatttgtaactatgtttatagcaaagaaatctcaaaagttctttgcaggacagcaaaaagagcttggaatgataaatggacacgtagaagagatgttcactggacatattgtagttaaagctttcaataaagaacaagaatcgatagagaaattcaacgaaataaatgacagattatataaatcaggatggaaagcacaatttatttcaggaattatattcccacttatgaactttatcaataacattggatatgttgcagtgtgcgttgcaggtggaatatttgcaacaaagggaatgatatctataggagatgttcaggcattcttccaatacaataggttatttacaatgcctataattcaaactgcaaatatagcaaatataatacaatcaacaatggccgcagcagaacgtgtatttgaacttcttgaggaagaggaagaaattcaagatgctgaggattctaaaattgttgagttccctaagggtgcagttagatttgaaaatgttaaatttggttataaagaaggatctactttaattaacgatatgaacttagatgtaaaaccaggtcagacagtagctatagtaggaccaactggtgcaggaaagacaactatagtaaatctacttatgagattctatgaaataaatgcaggtaaaattactgtagatggtgtaaatacaaaagaaatgaagagaaatgaccttcgtggaatgtttggaatggttcttcaggatacttggttgtttaatggaacaataagagataatatagcttattcaaaggatggagcaactgaggaagagataataagggcagcaaaagcagcacatgcagatcactttataagaacgcttcctgatggatatgacactgtaataaatgaagaggcttcaaatatatcacagggacaaaaacaacttttaactattgcacgtgttatacttgcaaaccctcaaatattaatacttgatgaggcaacaagtagtgttgatactagaacagagcttgcaatacaaaaggctatgaataatcttatgcaaggaagaacaagttttgtaatcgcccacagactctcaactatacgtgatgctgatttaatacttgttatgaatcaaggttcagttatagagcaaggaaatcatgaagaattattagagaagaaaggcttctatgctgatctttataacagtcaatttacaagtggaaacaatgaagaaataggctaa

SEQ ID NO: 15804 - DNA, 1422 bp, Clostridium acetobutylicum
atgcaaaaaactaaaatgatttttacagttggaccagcaagtgagacagaggagattgtaacagctttcataaaagctggaatgaatgcttcaagacataacttttcacacggtgatcatgcagagcacggtggaagaatagctttagtaaaaaaggttagagcaaagcttaataagcctgtagctatatgccttgatactaaaggaccagaaataagaactggagatttcaatccttcaaagcttgaacttcaaaaaggttcaaaatttactatcgtttgtggcgaagaaatagttggagatgctacaaaatgttcaatatcatataaagatttatacaaagatgtaaaaccaggaaacactatattaatagatgatggtttagttggacttacagtagaagctatagaaggaacaaatgtaatttgtactgtagcaaatacaggattagttggaagccataaaggagtaaatgttccaaacgtttcaatacaacttcctgcaatgacagaaaaagataagagcgatttaatattcggatgtaaagaagaaatagatatggtaagtgcatcattcataagaaaacctgaagatgtacttgcaataagaaaagtattaaatgagaatggcggagaaaacattcaaatattctctaaaattgaaaatcaagaaggcgtggacaacatagatgctattatagaagtttctgacggaataatggtagctagaggagatatgggagttgaaattcctatacaaagagttccattaatccaaaaaatgataatcaaaaaatgtaatgcagtaggaaaacctgttataacagcaactcaaatgcttgattcaatgatgagaaatccaagacctacaagagcagaagcttcagatatagcaaatgctatatttgatggaacagatgctataatgttaagtggagaaagcgctaatggatcatatccaatagaagctgtaactacaatggcaaaaatagcacaagaggcagaaaatgaaatcaattatgataaattcctagcagaaagaaaaggaaatgaaaagaaaaatacttctgatgtaataagtcttggaacttgcacagcagcagcagacttagaagcttcagcaataataactgcaactcaaacaggaagcacagcaagaacagtttcaaaatatagaccaaaagcacctgtaatagcagttactccatctgaaaaagtagcaagaaaacttgcaatgagctggggagtacaccctataatatctgataaatttggttcaactgatgaacttatctctacttcagtagataaagcccttgaagcaggatatgtacaaaaaggagatcttgtagttgtagctgcaggtgtaccaacaaatgtatcaggtactacaaacatgcttaaagttcaagttgttgagtaa

SEQ ID NO: 15805 - DNA, 789 bp, Clostridium acetobutylicum
atggaaaaagaattattaaatcaagttgccattgtaacaggaggtaactctggtataggaaaagctattagctgtgagttagctctaagaggggctacagttgcaatccttgctaggaataaaaacagaaatgaagaaactcagaaggaaatcatagccaaaggtggacaagctgaatgctacagcgttgatgtatctgatactaaggcagttaatgatgctgttaatcaaatttactctaaatacaaacaaattgatatattagtttctaatgcgggaaatgctacccctttggaatacgctaccaaaatgtctgtagaaaattttcagtcagtcctcaaaacacatttattgggagcctttaattgtgtaaaggcatgtggagaaaatatgagaaaaagaaaatatggtagaatcgtaataatatcatcagtagcaggttatcatggatttgcaggtcaaatgaattatgccgttgcaaagcatggtttagttggcatgggctattctttagcaaaagaatttgatggctcaggcgttactgtcaatgtaatacaacctggaattattcctacgccaatgtgtgaaggtgttatcgaggttgccaaagaagagctttcacctgaaagaataggaaagccagaagatatagcctacgccacggcatttttctgtagtccaagagcaggctttatgaatggaactccactagtaattgatggaggcttagttttagaaacaagtgttgatagagcagtaaaacagctgcttaaaaacaattctctataa

SEQ ID NO: 15806 - DNA, 1236 bp, Clostridium acetobutylicum
atggataaccctaatttattgtcagaagaggcaaacagatgcctactatgcaaaaaccctagatgtaaagcaaattgccctattaatacacccataccagaaattataagcctttataaagaaggaaaaattatggaagcaggagaaattttatttaataacaatcctctttcagtaatatgctcattggtctgtattcatgaggatcaatgtaagggaaattgtgtaagaggaataaaaagcgagccaataaaatttcacgagatagaagaagagatatcagagaagtacttaaaagaggccaagcttaagaatgttcagaaggacaaggatagaattgcaatagttggaggaggtccagcaggaatcacagttgcatttgtacttgctaataaaggctataatgttaccatttttgaggctcacgataaaataggaggagtacttagatatggtattccagagtatagattgactaagaaattagtggataagcttgaagaaagacttatagaggttggagtgaaaattagacctaatactgttattggaccagttatttctttggacaggttacttgaagattcatataaggcagtatttattggaactggagtatggaatccaaaaaccttagatgtaaagggagaaactttaggaaatgttcattttgctattgattatttaaaatctcctgaaagctatagattaggaaaaaaagtagctgtaataggagcaggtaatgttgccatggatgctgcaagaactgctaagagaaatggtgctgaggtaacaatactttatagaaaaagctttaatgagatgccagcatcaaaacaagaaataagagaaactaaagaagatggagtagagtttaaattatttagagcaccaattgaaataacagaagagggtattaaagtagcatttacagaaaatgttacagatgcagaaggaaaaataagaactaaaattattgaaggaaaagaagagttttttgagtgtgattcagtagttgttgccgtaagtcaagcacctaaggataatatagtatctaatacaacaggcttagatactaaatggggattaatagtaacagatgaaaaaggcaatacaactaaaaaaggaacctttgcatgtggagatgtagttacaggagcaaaaactgtagttgaagctgcagcacaagcaaaagtagttgcagaaactattgatgagtattgcaagaataattaa

SEQ ID NO: 15807 - DNA, 879 bp, Clostridium acetobutylicum
atgataagaagcatgacgggatttggtagggcttctaacgataatggcagacttggatttaatgttgaaattaagagtgtaaatcacagatattttgatttaaatataaagttacctagaaatcttatctcacttgaagaaaagataagaaaagaagtaggaaacaaaataaaaagaggtaaggtagatatatttataactcaaaatgtctatgatagcagtactactaatgtaaatttgaataaaggtcttgcttataattattgtgaatgtctaaaacaaataagagatgattttaatgtattagatgatatatctgtttcattgatatcaaaattccccgacgtaattactgtgacacaaaatgaggaggatttagatgaaatttctagcctacttttgaagcctattaacgaggcagttgatactatgttaagtatgagggaaaaagaaggggctaggcttaaggaagatatagaaggtaaattaactaatattgaagagttactagtgaatgtagaaaagagagctccttacacagtagagaattatagaaataagcttgaagaaagaataaaagatttacttgtcgataatcaagtagatgaagctaaacttgcaatggaggtgacaatttttgccgacaaatcatgtatagatgaagaaatagttaggcttaaaagtcatatatctcaatttaagagtactcttagcaagaatgaaccagtgggaagaaaattggattttatagttcacgagatgaatagggaagctaacacgataaattctaaatcaaatgatatcgatatagttcactgtgtccttgatataaaaaacgaaatagaaaaaataagagaacaaattcaaaatatagagtga

SEQ ID NO: 15808 - DNA, 2088 bp, Clostridium acetobutylicum
atgaaaatagttcaattgatgaagaaggataaatctataaaggtaatgacatttttgtttgcttttattataatatacgtcatattgcttacttctgtagatacgagaaagtattcgcttaaagaaggcgatattgctaaaaatgatattaaggcaaccagagatgtaaatgatgaagcggctacagaggaaagaaggaaacaggcagttaactctgttggaatacagtacgacaaaaatacagaaattataaacaatattatagataatattaacaatgattttactatcatgaataaagttaaagatgaaaattctgatgataagacaaaactaagccagcttaaaagttctctaaaaactgatttagatgattctaatttaagtgtgatattatctatgaacaaagaagatttaaaggatcttcagcaatttataattaaaacactgaaagatgcttataatggagaaataagggaagatgaatcatcagatataaaaaaagctcagagcagtattgcagctgaattttctaaagagaagttttcaaaggatgctacagaacttggtatagctatatcaaattcctatgtaaagcctaatatgtttattgactctaaaaagacagaggagataaaaaaggatatatcaaaaaaggtagaaaatgtggtaataaaaaaggatcaaataatagttaaagaaggggagcctgtaacggcaaatgaaatttctgttttagaagatttaggtcttttaagtaattcaaatggacaaagttggtacatatatgttgcattggccgtggcagttttaatagttttatttttacaaatatactatatatacagatattataaagagatatatagggataataaaaagattataatgctctgcgtacttaatataatatcaattatactagcaagatcagtaggaataatttcaccatttttgattcctcttgcgtgcgcccctatgcttatgatcttattaatggatagcagaatttctttgtttgaaagcatactcaattgtatttttatatctttgatatgtaaatttaatattgaagttactatattagcacttatgagttcagttatagctttcatgagctttagaaaaatgaagcaaaggaatgatactatatatgcagcactttttatagctataatgaatgctttgatgtctttttccattggatttcttgtaagcagtaatttggtagataatgtacagaaggcaagtttcgcatttatagctggtatattatctgcaatattaacaatagggtttcttcctatttttgaaagtatatttgatgtggtgacagatgtcaagcttttagaattatcggatccaaatcatccattaattaaaaagcttcttatggaggcacctggaacttatcaccacagtataattgtagctaatattgctgaggccgcagttgaagaggtaggtggaaatgctcttttagctagggtggcagcttattatcatgatataggaaaattaaaaaggccatatttctttaaggaaaatcaggtgggaggaaataatccgcataataaaataaatcctaatttaagcgcgctagtaataatttcacatgttaaggacggcgttgatattgctaaggagtataatatacctcaaattatacaggatacaatacaacagcatcatgggacaactcttgtaaaatatttttatgtgacgcttaaaaatgcaagtgataatccagaagatataaaagaggagaattttagatatccaggtccgattcctagcagtaaggagacagcaattataatgcttgcagatagtgtagaagctgctgttcgttctatacaggaacctacacaaggaaagatagaagaaatgataaacaatataatagaagctagattaagtgacggtcaattaaatcaatgtgaacttacacttcatgatatagagaaaattagaagagcgtttttaaagtctcttcttggaatatatcatcaaagaattgagtatcctacagataagagtgtaatgagacaaaaaaaaattgagtctagcaaagaaaaaaggaaataa

SEQ ID NO: 15809 - DNA, 2169 bp, Clostridium acetobutylicum
atgaaaagaaatagaatgaaaattttaaatttaccaatattttttgtagtactaatgtttttactatcaaatgttggtattattagggtcaaagcaaacaatttaacaccagttgaaataaatggtcaacttaaggtttcaggaagtaaattactaaattcaaacaatcaacctattcaactcaaaggtatgagtagttttggtatacaatactcgccacagtttgtaaattataatactatgaaatatttaagagacaactggggaatgaatgtatttagagttgctatgtatactgacggagatggaggatatatatttaataaggcagcttgtaaagcaaaggttgaagaggctgtaaatgctgctcaaaagttaggtatatatgtaattgttgattggcatatgtttaataatcctcaaactgataaaagtcagtcaaaggacttctttaatcaaatttcaagcgaatataaaaattcacctaatgtaatctatgaaatagcaaatgaaccatgtggcgatgtaacttggggaagagatataaaaccatatgcaaatgaggttataccagttattagagccaattcgcctaatgcaatagttatagttggtagtcctacatggagtcaatctgttctagatcctgccaatgatcctttaagcttcagtaatgtaatgtatgcgtgccatttttatgctggaacacatggtcaatggcttagagatagaataacacaagctcttaacaaaaacatagctttatttgctacagaatggggaactagtgattgcaatggtagtggaggaacttacatagaagaatctcaaagatgggtagattttatgacccaaaataaaataagttggactaattgggttttagatgatgcaaatgcaacagcatcaatattaaagcctggaagtaatcctaatggaggatggactgacaatgatttgacagagtcaggaaagtttgtaaaggcggctatgcttcaaaataatacaccaactacaggtggaaacacaacaccaactacaggcggaaacacaacaccaactacaggtggaaacacaacaccaactacaggtggaaacacaacaccaactacaggtggaaacacaacgccaactacaggtggaaatacaacgccaactacaggtggaaatacaacaccaactacaggtggaaatacaacgccaactacaggtggaaatacaacgccaactacaggagctgtaatagatactagtaaaacatataaaataatatcttcaagtacaggtaaggttttaaatgtaagaaactatagttctcaaagcggagcacaaatagaagaattagttgatgttggtgcgttatcagaacagtggaaaatagcggattcaggcaatggaagctataaaattacttctgcattgagtaatttaagcttagatggtggtgtaagtactgaaggaactgatgttaaacaatatcaatatgcaggtgcagaaaatcagcagtggaatattgaaaaaataaatgccaatacttataaaatcacaaataagaaaagtaatttagcattagaaactactggagtttatgatagtgcagatattcaactttggaattacacaggaaaaggaactcaacagtggataatttcagatgtgaatgcaggaacaaatacaacaccaactacaggcggaaatacaacaccaactacgggtggaaatacaacaccgactacaggaagtgctatagataatagtaaaacatataaaataatatctcaaaatacaggtaaagttttaaatgtaagaaattatagttctgaaagtggagcacaaatagaagagttagttgatgttggcgcactatccgaagaatggaaaataacaaattcaggtaatggaagctataaaattacgtctgctttaagtaattttagtttggatgcaggtacaagtactgagggttctgatgttaaacagtatcagtatactggcgcagaaagtcaacagtggaatattgaaaaaattgctgctaatacttataaaataacaaataagaaaagcggtttagctttaaatggaactggagcttgggatggttctaaccttcaattagctaaatatagcagtacagcagatcagcagtggatacttaaggctgttaactaa

SEQ ID NO: 15810 - DNA, 732 bp, Clostridium acetobutylicum
atgtcaatgatagagacctgtggattaacaaaagtatttggaaagcttacagtatttaaagatttgaacataaaggtaaaaagaggagaggtgcttgttataataggaccttcaggttctggcaaaagtacttttttaagatgtattaatcatttagaaattccagagaagggaagtgttgtaatagagggagaaaaaatagatagtaaaaataagaagacttataaaggaataatagaaaagatgggaatggtgtttcaaggatttaatctttttcctcatatgactgtgctagaaaatgttatggaggcaccaataacagtaaaaaaagaagctaaagctgtggtaaaaaagagagcggaagaattgatagataaagttggacttattgataagtgtaatgtatatccttcaaagctttcaggaggtcaaaaacaaagagtagcaatagcaagagctctttgcatgcagccagatataatgctctttgatgaaccaacttctgcacttgatccagagcttgttggagaagttttgaacgtaatgaaagatcttgcaagagagggaatgactatggttgtggttacacacgagatgggatttgcaagagaggtttccgatagggttatattcatggatggaggaaaaatcgtagaagaaggaaagccagaggatatatttaataatcctaaagaagagagaacaagggcttttttgaacaaaattctttaa

SEQ ID NO: 15811 - DNA, 1116 bp, Clostridium acetobutylicum
atgaaaatatctaacagtaaaactagtcttgagtttgaaagaaataaagatttttttcaagtacgcttagaaagtacgcaatttaaggaagccgtacttaaagaactttctgacaaagttattgtcaatgaagacaatgagacatgggtactttcttaccctgttcctgaagctgctaaaagtcttgcatctgctactcgacttgcaaagacgcgtcttgaaagattaaaattggcacaaaaacttgctacactttctggtctggaaaatcaattcaaaattccttttcttcatccagaaaatatactattgatgggagaaacactatttgttgttcattttggtttgcataagcttcttgccccatttgatatgactccagtggactttttaaaatcgtataaagcccttattttttacatatttaattctaaagtaccatttgagtcacttgtttctggctccctggcaatgaatgataagttcagtcaaaccattaatagttttgagagcacccaggaaatagctgaatttattgatgaggagttacaaaaagaaacagaaaaaatcaatcgaaatatcgcttttgtatccaagggacgctatcgtttctttaaatactttggaactttggcgattattcttgcacttgttttaggttggtttacttactattattacagtaacagtcaaaagcaaaatgcaattattactgcgcagactgatttcttgacaaataactatgacaaaacgcagaccgatttgcaaaactattctcctagtaaactgccaaaatcagcacgttatatactagctgtaagttctgtcaatttatcagatttaacaacgacgcagaaacaagctatattaaataatatttcaaccaaatcggatgataataccttaaattactgggtttatagtggtcgtggagattttaaacaagccttgaaccttgcacaaaatttaggtgatgttcagttgacattattagcatatactaatctttacgagacgaccaagcttaataccacaatggatggtgcgaagaaacaacaacttttggatgagtacaataagaaaattcaggagctaacaaaaaatcttggaaaatag

SEQ ID NO: 15812 - DNA, 861 bp, Clostridium acetobutylicum
atgccgattaaaatagaaaatttaacatatacttatatgcctgggacaccttttgaaaagaaagcacttgataatgtaaatattacaattgaggatggtgaatttgcagtatttataggtcatacaggctctggaaaatcaactttgattcaacagattaatggacttttaaaacccacttctggaagtatttttattgatgatgtggatataacggataaatcagttaaacttaatgatataagaaaaaaggttggacttgtatttcaatatcctgaatatcagctctttgaggagacaatagaaaaagatatagcgtttggtcctagaaatatgggattaagtgaagaagaggtttctacaagagtaaaaaaggcgatgaaaatggttggactcgagtataatgactttaaagataaatcaccctttgaattaagtggtggtcagaaaagaagagttgctattgctggagtagttgccatggagcctaaggttttaatactggatgaaccgacagctggtcttgatccaaaggggagagatgatattctctatgaaataaaaaagcttcagaaagaatataagatgaccataattcttgtatcccatagcatggaagatgttgcaaaagtagctgataagatttttgtcatgtatgattcaagatgtatattaagtggaaatttggatgaggttttcaatgaaatagatacacttgaaaaagtaggtcttgctgttcctaaggttacttaccttgtcaggaagcttagagaaaaaggcttcgatatatctaaggatatatttacgattgaagcagcaaaaaaggaaattcttagagtattggagagtgctaagagatga

SEQ ID NO: 15813 - DNA, 2064 bp, Clostridium acetobutylicum
gtggctagaaaatatcctttggaaaaatttcgtaacataggaataatggcacacattgatgccggaaagaccacaactacagagcgtatattattttatacaggaaagactcataaaattggtgaagttcatgaaggtgcagctacaatggactggatggttcaagaacaagaaagaggtataacaataacctctgcagcaacaacttgttattggaaggatcatgaaattaatataattgatacaccaggacacgtagatttcacagttgaggttgagagatctcttagagttcttgatggagcagttgctgtatttgatgcaaagggtggtgttgaaccacaatctgaaaccgtatggagacaggcggaaaaatataacgttccaagaatggcgtatataaataagatggatatcttaggtgctgacttctatagatcagttcaaatgatgagagatagacttagtgcaaatgcagtacctatacaaatacctataggtaaagaagataatttccttggtctaattgatttaataagaaatgaagcaatagtatatacagatgatttaggaactactatggaagaacaagaaattcctgcagatatgaaggaattagctgaaaaatatagatctgaaatgattgaagctattgttgaattagacgaagaattaatgaataagtacttagagggagaagaaatctccgtagaagaaattaacgcagcattaagaaaaggtgttattgcgaatgaaatagttccagtaacatgcggatcttcatataagaataaaggtgttcagcagatgcttgatgctgttgttgaatatttaccatcaccattagatatacctccagttaaaggagtagatgaagatggaaatgatgatgaaagaaaagctgatgatagtgagcctttagctgcattagcattcaaaattgcaacagatccatttgttggtaagcttgcgtttactagagtttactctggtgttatgaaagctggaagctacgttttaaattcaacaaaaggaaagaaagagagaattggaagacttgtaaaaatgcactctaaccacagacaagaagttgaagaacttgaagctggagaattaggtgctatagttggtttgaaattaacaactacaggtgatactcttagttccgaagacaatccaattattcttgaaaaaatggaattccctgatccagttatagaggttgctattgagccaaaaactaaagctagtcaggaaaaaatgggtatagcacttgctaaacttgcagaagaagatccaacatttaaaacttatactaatcaagaaactggtcagacaattatagcaggtatgggagaattgcatcttgaaataattgttgacagacttcaaagagaatttaaagttgaatgtaatgttggtaagcctcaggttgcttataaagaaactataagaaaaccggttaaggcagaaggtaagttcgtaagacagtcaggaggtcgtggacagtacggtcacgctgttattgaaatgactccaactgaaggcgaatacgaatttgaaaatgctatagttggtggagctgtaccaaaagaatatatacagcctattgataatggtatacaagaagcatctttaagtggtatcatagcaggatatcctacagttaattttaaagttaggttagttgatggttcttaccatgatgtcgattcctcagaaatggcatttaaaatagctggttctatggcatttaaaaatgctatgactaaagctgatccagttatattagagccaataatgaaagttgaagtaacagttccagaagagtacatgggagatataatgggagatgttaattcaagaagaggaagaattgaaggaatggagcagagagcaggagcagaagttataagagcatttgttccactttcagagatgtttggttatgcaacttcacttagatcaagaactcaaggtagaggagtatttactatgcagttcgatcataatgaagaagtacctaaaaatatccaagaaaaaataattggagaaaaaaaatag

SEQ ID NO: 15814 - DNA, 3108 bp, Clostridium acetobutylicum
atgtataagaaagttgattctagcaaatcgtttgttgacattgaaagagacgtactaaaattatggcatgaaaaggaaatagtgaaaaaaagctttaactcaaatcaggatggtgaatattttagtttttatgatggtccaccaactgcaaatggaagaccccatgtaggtcatattattacaagagtaatgaaggatttaattccaagatataaagtaatgaagggctacaaggttccaaggaaagctggatgggatactcacggacttcctgtagagcttgagatagagaagaaacttggaatttcaggaaaacctcaaatagaggaatacggaatagaaaagtttgttaaagaatgtaaggagagtgttttctcatatgttagcttgtggaaggatatgtccgaaaagctaggttattgggttgacatggaaaatccttatgtaacttatcacaatgattatatagaatccgtatggtgggctttaaaacaaatgtgggataaggatcttttatataaaggtcataaaatagttccgtattgccctaggtgtggaactgcgctttcttctcacgaagttgctcaaggatacaaagatgtaaaagaagcaacagcttttgttaaatttaaagtaaaaggtgaagaaaataaatatatattagcatggacaacaacaccatggacacttccaagtaacgtagcacttgctattaataaggcttacgattacgtagaggttataaacaatggagagcatttaatacttgcaaaagcacttttaactgtacttgaaggagaatatgaagtagtttctgagttcaaaggtgaaaaacttttgggaatggaatatgaacagctatttaaatttgcaaatcctgataaaaaagcattttatgttgtacacggtgattttgtaactttatcagatggtactggaatagttcatatagcgcctgcttatggtgaagatgataacatgcttggtaaaaaatacgatttgccacttataaatttagttaatggtgaaggtaaatttgtggatgaagttgaaccatggaagggattgtttgtaaagaaagcagatcctaagattcttgaatacatgaaggaaaatggaactttatataagtcagagaagtttactcactcatatcctcactgctggagatgtgatacaccacttttatattatccaagagatagctggtttgtaagaatgacttctttaagggataaactagttgaaaataataataaaattcactggtatccagataacataaggacaggaagatttggtaagttcgttgaaaatgttatagactggggtataagcagagacagatattggggtacaccactcccaatttggcaatgtgaatgcggtcatagagattgcgttggaagtattgaagagcttaaagagaagggaatcaatgttccagaaaacatagagcttcataaaccatacattgacgaagtaaaacttacatgtcctaagtgtggtaagcctatgacaagaaccgaagaggttatagactgctggtttgattcaggttcaatgccttttgcacagcttcattatccttttgaaaacaaggaagtgtttgaaaataccttcccagcacagtttatatcagaagctgttgaccaaacaagaggatggttctatacattgcttgcaatttctacatcaatatttgataagagctcttttgaaaattgtatagtattaggtcacgttctagataaacatggactaaaaatgtcaaagcataagggaaatgttgtagatccatttgatgttttagataatcagggagcagatgcttgtagatggcatttctacacatcaagtgcaccatggcttccaactagattttcacaggaagatgtagcagaaactcaaagaaaatttttaagtactttgtggaatgtatattcattctatgtactgtatgcggaaatagataaattcaatccaaatgactataaggattttgtttctggaaatgttatggataagtggattgtatctaggttaaatacacttacaaaggatgttggaaattaccttgattcatatggaataactcaagcagcgcttgaaatacaggattttgtagatgatctttcaaattggtatgtaagaagaaatagatcaagatattggactcaagagcttactgatgataaggtaggagcatatgtaactttatatagagttcttgtgactttgtcaaaggttgcagcaccattcataccattcatgacagagcagatatatcagagtttagttactagtataaatgaaggtgcagaggaaagcgtacatctttgtaaatggcctgaatacgatgaaagtctcatagatagcagtcttgaagaggaaatgaagcttgctatatcaatagttaagcttggaagaagtgctagaaatggagctaatattaaaaacagacagccactttatgaaatgcgtgtaagtacaaaagctcttccagattattatggagatataataagagatgaacttaatgttaaaaaggtagagtttggcgcagatctttctaaatatgttaactttgaaataaagcctaatttacctgtgcttggtaagtcttatggaaaacttattcctaagataagaaaagaaatttcttcaatggatcagatgaagcttgctgaaagagtaagaagtggagaggctgtaaagattgatgtagatggtactgaaatagaacttaacagcgaaaatcttcttgttacaatgcagggacttgagggctttgcatttgcaggtattggagaaataggaatagttcttgagacaacaataactgatgaacttagagaagagggctatttaagagaagtattaagtaaggttcaaaacatgagaaaagaaagtggttttgaagttgctgataaaatagagatttacgtttcaggaaatgagaaacttgagaatgtaattagaaaatttgaagatactattaaaaaggaaacattagcaaccgatataatatatagtgaaaataaggaagctgctatttacaatataaatggggaagaacttaacgtatttgttaaaaagaattgttaa

SEQ ID NO: 15815 - DNA, 825 bp, Clostridium acetobutylicum
gtgtatcttaaaggtgactttcacattcacacaaatgcatcagacggaaaatatactccagaaaaagtattagaactagcaaaaactgctggtataaatatacttgctataactgaccatgacactacgtcttccgttaaaaaagcaatagctgtaggaaatgaactgggtattaaagtgcttccaggtattgagctttcaactctcaaaaatggagaaagcatccatatccttggatacttcagagatatttcctacgaaaataaggattttcaaaatttcttgacagaaatgcagaattatagagtatggagagccaaaaaaatagttgaaaacttagatacttactttaatataaaattagattatgcgagcattctaaaagaagcaagcaatgttattgcaagaccacatatcgcacgtgcaattcttgcaaagggctataattatacttacgaatatatatttaacaatatactgaacaaagaaagtcctgcatacattcctaataaaaaagtaagtgtggaagaaggaattaaacttttaaaggctgcaaatgcagtggttgttttagctcatcccgttctaattaagaaaactccaatagaagattttttaaaacttgattttgatggtattgaagctatttatccaatgaattccgaatctgatactgaaagatttttgagtttagcaaaaatttataataagcttgttaccgcaggttctgactttcatacggatgattcaagcgacacgaagcatggaagaattggagaaatatatttagatgagaataacatagatatcctgctttcaaaataa

SEQ ID NO: 15816 - DNA, 498 bp, Clostridium acetobutylicum
ttgcgtttatatgttttatcagtactagttgataatattcctggggtacttactagggtttgtgggctctttaatagaagaggatataatcttgaaagtgtaacagcaggagttacagagaatgataagatatcaagattgactttaatagcaagtgttaaagatgaaaatgaaatagaccaaattgtaaagcagataaaaaagattgaggtggttcataaggtagtgcttctaaatagagaaaattcagtatgtcgtgaaataatgcttattaaagtgaatgctgagggagtgcaaagacaagaaatactaaatacggtatccatttttagagcatcagttgttgatgttacaactaaaactttcactatagagataactggaaatagcagtaaaatagaagcatttcaaaaaatgctagaaccttatggaattattgaagttgtaagcagcggaagcatagctatagagcgaggccaaaattctatactaagttaa

SEQ ID NO: 15817 - DNA, 708 bp, Clostridium acetobutylicum
atggaattagtttgctgtattgcggttacaactcttgtaatgttatttttaaattcaactattataaggaaaagagcaatttggtattttatttccttagcagcttcctttgccacagtattttttgaaattttcaaaattttgtataaagttcatattgggggagttttagctgtatttgaaaaagtgtgtataaaaggatttatagccatatcattatttctacttgttatgtttgcaggagcacttaataataagttggcagtaactaaaaaacttgttgcaataagggcacaaatggctattatggcatctatatttatttttccacatgtatgtatttatttatactatgtactaaaatatacttttccagaggtaatagataagggcagtatagaattattcacagcagcatatatcttagcgggaattatagcattcattataatgatgcctttgtttattacatcactaaagaaagtaagaagaaaaatgaatggtgttaagtggaaaaagcttcaaagatgggcatatcttttttatttattagtatatggacatatattatttgtaatgcttaactcccaaaaaattgacataacaagatttgcaacatataatatcttattcggcatatatttcatacttagagtaacaaagacaagactaagcagtgtaacaaagagtgtagagccaattgcttag

SEQ ID NO: 15818 - DNA, 1083 bp, Clostridium acetobutylicum
atgaataaattaagggttggattaattggtggaacaggcatggttggacaaagatttgcatgtcttttaaaagatcatccttggttcgaggttacactaattgctgcaagtaaaaaatcagctggtcttacctatgaggaagctgtaaaagatagatggaaaatgaatgagccaattcctgaaggagttaaaaatcttatagttaaagatgcgtttgatgtagatgaaatttcaagcatggttgatttcgttttttgcgccatttccttaaataaagaagaaactagacttcttgaagaggactatgcaaaacatgaaatgcctgttatatctaataactctgcaaacagatacgtacaagatgtgcctgtcttaattcctgaaataaataacaatcatacagaaataatagatattcaaaaaaagagattaggaactaaaagaggatttataagtgttaaacctaactgttctatacaaagctatgttcctcctataagtgctcttttaaaatatgaaccagaaacaattcttgcctgtacctaccaagctatttctggagcaggaaaaacctttaaagaatgtcctgaaatacttgataatgttataccttacattaaaggtgaagaagagaaaagtgaaaatgaacctctaaaaatatggggaaaaatagagaataataaaattgtaaatgcttcctctcctcttataactactcaatgtataagagttcctgtaacggatggtcatttggctgctgtatttgttaatttcaaaacgaaaccttcaaaacaggaaataatagatgcttgggaaaattttaaagcccctgaatgtgctttaaatttgccaagtgctccaaaaaaattcctacattattttgatgaacctgatagaccacaaacaaaactagacagagattttgaaaatggtatgggaataactatgggaagacttcgtgaggataaattatttcaatataagtttgtatgcttatctcataatactcttcgtggagcagctggtggcggtgttttaagtgctgagctcttaaaaactcaaggatatttaacctctaaataa

SEQ ID NO: 15819 - DNA, 2319 bp, Clostridium acetobutylicum
atgataaaaaaatatacgctgcacttatatattttattaggagtttatcttatactatattttatttcaacaatttttcaatcaaagttttttggagatattttatcaccaataggaactttaatttccttttttatattaatatacgtgtataaaaaatcagaacgttttaaaggtgtgtggcttactttatccttagggtcactaatatggtcgataactgatatactatgggcaatttgtgaattattaattagaattaatccggaaaatatcactatatttgatttcttttatttaggaactaatatatgtatagtaacagctggatatatatatatgaaaaagtttattaaaggagtaaatttagttcagttctttatagatgtttctgcaatatccataagttgttttattatatttgggcttttatttttgcatggaagttttaatttatttattaaaaatgcaaacaatattatcgaatttatatatattattacagatcttttgattattaattgtattttgtcaggtttgttttcagtgcgtaaaggtaaattaaccaaaggtgtatatattactattttaggtacagcaatatatgcagttgttgatttggtttatgtatatgagtatttttataatttatatgtacctaattctataattgattttatgtatgccacatctcttttaataattgcctttggtggtctaactgttttaaaatacagtaactttgaatgggcagatgagttttactctaaaactaaaaacatcggaagtgaaaaaaaaggactatacttattgttaacaattcctgtatatgtaatatttggagggtttgatttttcaaaaatattagtgctgctctatatttttgtagcttatgagatattaagtaattatgtgcaaaaggccataaataacgaaacacttcttacgtatgaaaaggacataaatttaatattagaagagaaaattaaggaacgtacaaaggagcttttattaaaaaatcaggagttagaatatatatctaatcacgatcctattacaaatgtctataatagaagatatttaaataaaagattacagtgtattataaatgaaaagaaattggataatcaggtaacaatactttatatagatgtagatggctttaaaaccataaatgatacatatggacatgatattggtgattatgtattgattgaaatttctgataggttaaagaagacagttaaagaaaataatattttagcaagattaggcggagatgaatttgtaattataattgaaggaaagttaagtaaagaggaaattaaaaacatatgtgaaaaattaataaatagttgtaaggaaaccatttattcagataattatttatttaatgtgaccattagtataggagttgcaatgtttccgcatgatgccatatctagaaatgttattatgaaaaacgcagatatagcaatgtatgatgcaaaatctaaaggaaagaacagatattcattctttgattcacatgtaagtaatgaaattttggaaaaaggcgagattgaattactacttaggaatgtagattatgataaagaatttgaactttactatcagcctcaaatagatataaacactaataagttaattggagtagaagcgttaataaggtggcattctcctataatgggtaatattccgccaaataaatttataaaaattgcagaggaaactgggtctatagaaaaaataggacagtgggttatgaatacagctgcaaaacaaattggtatatggaatgaaaaatttgattcaaatataagaatgtcaattaatatatcacctaatcagcttgttagtatagattttgcaagtgatttagagaaaatcatgaaaaagtatggtttaaaatcagattggattgatatagaaattacagaaaatattgcaatgaagggtgaagggatttttaagcaaatatttttaacactagataatatgggaatatcaatttcgatagacgattttggaactggatattcttcattaagttacattcagaagttttcttttaatcgtctaaaaatagcaaaggaattaattgataacattacaattgacttaaataaaaggcatattgtaaaagcaattgtaatgctatctgagggattgaatattttgacaatagcagaaggtgtggaaacagaagatcagcttaatatagtaaaagaaataggctgtaatcaagtgcaagggtatgtttatagcaagcctgttacagcagatagatttgaaaaggaatttttattacaaatttaa

SEQ ID NO: 15820 - DNA, 1194 bp, Clostridium acetobutylicum
atgtgtggaatagctggatttgttaatttcaaaaaaaacttgattgacaaaaaaagtattatagaagatatgactaatactcttataaagagggggccaaatgaaaaaggctactatatatcaaaaaatgctcttttgggccacagacgtcttatcgttgtagaccctaaaggtggtagtcaaccaatgataaaaatacacaatggaaaaaagtatattatagtttataatggcgagttatataatactgaggacatacgaaaggagcttttagaagcaggttatgaattttcatcatactctgatacagaagttcttttaacttcctacattcattggaaagaagattgcgtaaatcatataaatggaatttttgcttttgcgatatactctgaaactgataaaaaaatttttcttgcaagggatccattaggagtaaaacctttattttatacaataaaaaataacaacttaatatttggatctgaaataaaaactcttcttgcaaatcctcttgttgaaccaattttaacaaaagagggtttaacagaaatttttgcactaggtcctgctagaaatctcggcagtggagttttaaaagatattcatgaaattccacctgcaaactttatagagtttacggagcacaaattcaagcttcatgaatattggcgcttaagctgtaagcctcatactgaaaatgcaagtgaaacagcagagcatataaagtttcttcttacagatgcaataaaacgtcaactatatgcagacgtacccgtatgtacttttctttcaggaggacttgactccagcataatttcagctgtagctgcaagtgaattcaaaaaacatggaaaaactttaaatacttattctattgattataaagataataacctatactttaaaaacgataactttgtaataactcctgatagtgtctgggctgaaaaaatgcgtaaatttataggcagtaatcatcacaaaataataaataataatttagatttagcatctgcattatatgatgctgtaaaggcaaatgacattcccggtatggccgacatagactcttctctctttttattctgtaaaggtgttgctgaaaaaaatgtagtttcactatcaggtgaacgtgcaatacagatgataactaatctagttaaacaatttataaatataggggagttataa

SEQ ID NO: 15821 - DNA, 876 bp, Clostridium acetobutylicum
atgaagcttacaatagcaactagaaagagcaagcttgctcaggtgcagacagaactaataattaatgtattaaaagataaatatggcatttcctctgaaaagctactgatggaaacacttggagataaaatcctagataagtcactagcggacatagggggaaaaggactttttataaaggatatagaaagaattctcttagaggataaagcggatgcagcagttcatagtatgaaggatgttccttttgaggttccagatatgtttgaaatagcggcagtcaccttaagggttgatgtaagggatgtctttgtatctagagacgggactcattttaaggacttaaaaaatggagcggttattggaactagtagtaacagaagagcagctcagcttaaaatgttaagagatgatataaaggttgtacccataagaggaaatgttcaaaccagaataagaaaaatgggagaagaaaagcttgatggaataatacttgcagcggcaggacttaagagacttaatatggagaatataattacagattatttttctgtagaggaaatgattccagctgttggacagggagctcttggagtagagataaagaaggaaaacaagaatagagatttatttagaaagttagataataagaatagcagaatgtgtgttgaagcagaaagaagcttcatgagaactttaaatggggactgccattctacaattggagcttatgctgaaatagttaatgggcaaatgaatgtattgggattttacgaaattgatggaagaagggtaaaaaaagatgtgagtgggaatatagaggactatatgagtttagggaaaacacttgcagaaaaaattttggaggataagtaa

SEQ ID NO: 15822 - DNA, 1341 bp, Clostridium acetobutylicum
atggctgcccaattaaatgaactgtggcaaaaaaccataaacataataaaaggtgaattaacggaagtaagctttaacacttggataaaaagtatcactcctatatctattgataaagatagtatacgccttagtgttccaaatcaatttacaaaggaaattctcgaaaatcgatataaagatttaataataaattctatgaaaataataactactaaaaaatatgacatagcatttttaatttcctctgaagaagctttggaaaccgatgaagatcaagaaaccgatacaaacaatgtaaatacagatactagttcttctatgcttaatccaaaatacaaatttgattcatttgtaattggtaatagtaatagatttgctcatgctgcatgccttgctgttgctgaagctcctgcaaaagcctacaatccattatttatatatggaggagttggacttggaaagactcatcttatgcaagctataggtcattacatacttgataataatccaaaagctaaagttgtatatgtttcttctgaaaaatttacaaatgagcttataaattcaattaaggacgacaaaaacgttgaatttagaaacaaatacagaaatgtggatgtgcttttaattgatgatgttcagttcatagccggtaaagagcggactcaagaagaattttttcataccttcaatgctctacatgaaaataacaaacaaattatactctccagtgatagaccacctaaggaaatacctacattggaggataggttgcgttcaagatttgaatggggtttaatagcagatatacaagcacctgattttgaaacaagaattgcaattcttaagaaaaaagccgatgttgagcatttaaacatacctaatgacgttatggtatacatagcaactcaaataaaatcaaatataagagagcttgaaggtgcacttataagaatagttgcattttcatctcttacgaataaagagataagtgtagatttagcatctgaggcacttaaggatattatctctagtaaacaaaataagcagataactatagatttaatccaagatgtagtctctagctattttaatttaagaatagaggactttaaatcagctaggcgtacaaaaaatatagctttcccacgccaaattgcaatgtatctttctagaaaactaactgatatgtccttgcctaagataggagaagcgtttggaggaagagaccatacaactgtaattcatgcatatgaaaaaatctcttctgctttaaaagaagatgatgacttaaaatatacaataaatgagattacaaagagattctctccaaaataa

SEQ ID NO: 15823 - DNA, 606 bp, Clostridium acetobutylicum
gtgaaaaaaataataattgcaagtaacaaccaaaataaaatacgtgagataaaacaaatattaaaagaatttgattttaatatagtatcacttaaggaagaaaacatagatattgacgtagaggaagatggaaaaacttttatagaaaatgcatataaaaaagcatatgaaatatataaaatgagaaaagactgcatggtaatagcagatgattcaggtcttacagttgatgagcttgagggcgcacctggaatatattcggctagatttgcaggaatacatggagatgataaaaaaaataatgaaaagctcctctcacttttagaaggtgttccgtttgagaaaagaaatgctcagtttgtatgctctatagtactgattatagatgaggcaaattcaataaaagtagaaggtgaaataagtgggtttataacagataaagaaatcggaactaagggttttggttatgatcctttgttctatgttccggaatttaaaaagacatttgctgagcttacagaggatgagaaaaattctataagtcatagagcaattgctttggaaaaactatgcagtgaaatgaaaaagttgaattggggtgaataa

SEQ ID NO: 15824 - DNA, 1116 bp, Clostridium acetobutylicum
atgaaattattaagtttggtaccagaaatatatgagttcaatgatttttctaagttcgcagaagaatttaaattgggtaaaggtgattttgttttaactgatgagtccctgtataagtcatctatagaaaatcttaatcttaagagtaaatttgtatttcgtaaaagctatggcataggagaaccatcagatgatatgatagatgcaatagtaagtgatatggaaaaagaagatataaatagaatcataggaattggtggaggcactattttagatatatgtaagcttttggctttaaagcctactaaaaagtcaatagatttgtttgaaaaaaaggtgccaatagttaaagaaaaggaattgattttgattccaaccacatgtggtaccggaagtgaagttacaaatgtatcaatagctgaaataaaatcaaagcatacgaagatgggacttgcctgtgatgagctttatgctgattatgcagtatttattcctgaatttgttaaaacattaccatttaagttttttgtaacaagttcaattgatgcacttatacatgctgtagaatcctatgtttcacctaaagccaatcattttactaaaatgtttagtgttgaagctataaaattgataataaatggttataaggaagtaattaagaacggcgaagaatataaaaataatattattaatgattttataattggtagtaattatgcaggaatagcatttggaaatgctggagttggagcggtacatgcgctatcttatcctcttggtggagtatatcatattcctcatggagaagctaactatcaattttttatagaggtttttagtacatataatggattaaagcctgatggaagcataaaagctttaaataaaattttacaggatgcattggagtgtgattccacttcggtttatgatagtttgtctaatcttttagataagcttctttcaagaaaaccacttaaggattatgggatgaatgaagaggaaatcgacaaatttacagatagcgttatagaaggacaacaaagacttcttttaaacaactatgtccctttatcaagagatgaaattaagggcatatataaaagactattttaa

SEQ ID NO: 15825 - DNA, 690 bp, Clostridium acetobutylicum
ttgataaataacagtctaaagattacagatttacctaataatgaaagaccaagggaaagactcttaagatacgggagtgaagtgctttcaaatagcgaacttctagctattatacttagaacaggaacattacatgagaatataattaacttgagcagcagaattttaaaggaaagcggaggcttaaatggagtattaaatttaagcttcgaagaacttaaaaaggttaaagggataggaaatgctaaagcagttcaaatcttagctttaggagagctttttaagagatttaaagcatataagtcttttgaaagtgtaaaaataacatcgcctaaagaagctgctaatcttgttatggaacaattaagaagttttaataaggagcatttatatgtcataatgctcaatactaaaaatatagttataaagatatctgatgtttctgtaggaagtttgaattcttctatagttcatcctagagaagtatatgtagagccaatattaaagcatgcggcatcaattatattatgtcataatcatccgtcaggagatccaaagccgagtaatgaagacctaaatataaccaaaagactttatgagtgtagtaagttcatagggatagaactcttggatcatataataattggggacggtatatatataagtttaaaagaagaaggattattataa

SEQ ID NO: 15826 - DNA, 969 bp, Clostridium acetobutylicum
ttggaattaaagactattagtgaattggaagcaggaaatagaatagatggcttctttataattaaatcagcagaaaaaagaatttcttctaacaataagaagtatcttgattttacttttggtgataaaactggagacataaatggaaaactttgggatgcatcagatgaagatgaggatgcgtttgttgataacatgcttgtaaaggtacgtggaacagtaattgagtggcaaaataaccttcaattaaaaatagacaaaatacgaaagacagtagattcagataatgttaaagtagctgacttcgttccgtctgctccatatcttccagatgatatgtattcaactatactagagtatgtagagaagataaaaaatgcggatataaaaaatattttatatgatgttttggaaagcgcaggagaggaaataatgtattggcctgcagctaagaaaaatcatcattctgttcgttcaggactgttatatcacacctttactatgctgaaggtaggagaaaaaataagtgagatatacacatttttaaatacagatttaatatatgcaggggtaatacttcatgatatggcaaagctagaagaaatggtatcctcagaacttggaatagttactgattacagtgtggagggtcagcttttaggacatataatattgggtgttgagaaggtaagaaattcagctaaaaaggttggggcagataaagaaatatctatgatgcttgagcatatggtattatcacaccattatgaagctgaatatggcagccctaaaaaaccaatgtttccagaagcagaggtattgcatcatttagatgatatggatgcagccatgtttgatatgaaaaaggctcttgaaacaactgctccaggagagatgtctgatgcaatatggtctcttgatagaagaagaatatataaatcaaaatttgataaagatgttattgaataa

SEQ ID NO: 15827 - DNA, 1002 bp, Clostridium acetobutylicum
atggatttaatagaaagcatatgggagtgtgctaagcaagacaaaaaaaggataatattagctgaaggtgaagaaaaaagaaatctaattgccgcagataaaattatcaaagagggattagcagagcttgttcttgtaggtgatgaaaataaaattaaagaaaaagcaagtgagttgaatcttgacatttcgaaggctgaaataatggatccagagacatcactaaaaacagaaacatatgctagagatttttatgaacttagaaaacacaaaggaatgactattgaaaaatctgaaaaaatggtaagagatcctctttattttgcaacaatggctttaaaagatggctatgttgatggaatggtttcaggagctgttcacacaactggagatttattaagaccaggacttcaaattataaaaactgcaccaggagttaaaatagtatcaggattctttgttatgataatacctgactgcgattatggtgaagagggtcttttattatttgcagattgtgctgtaaatcctaacccaacatcagatgaactagctgatattgctataactacagctgaaacagctagaaaattatgtaacgtagagcctaaagttgcgatgctttcattctcaactatgggaagtgcaaaaggcgaaatggtagataaggttaaaaatgctgttgaaatcacaaagaaattcagaccggatcttgctattgatggtgagcttcagcttgatgctgcaatagatagtgaagtagcggctttaaaagcaccttctagtaatgttgcaggaaatgcaaatgttcttgtattcccagatcttcaaacaggaaacattgggtacaagcttgttcaaagatttgcaaaagcaaaagcaataggacctatatgtcaaggatttgcaaaacctattaatgatttatcaagaggctgtagctcagaggatatagtaaatgttgttgctataactgttgttcaggctcaaagaggtatataa

SEQ ID NO: 15828 - DNA, 186 bp, Clostridium acetobutylicum
atggcacgtaaagctttgatagaaaagtggaaaaaagaacctaagtattcaacaagagcttatacaagatgcaaaatatgcggaagaccacatagtgtgctaaaaaaatatggaatttgccgtatttgttttagagaacttgcatataaaggtgaaatacctggatgcagaaaagcaagctggtag

SEQ ID NO: 15829 - DNA, 1008 bp, Clostridium acetobutylicum
atgggattttttggaatatcaagagatatgggaatagatcttggaacagctaacactttagtttatgtgaaaggcaagggtatagtattaagagagccttcagttgttgctattaatactaacaataaagaggttcttgcagtaggaaatgaagcaaagcaaatgataggtagaacacctggaaatataatagcaataagacctttaaaagatggtgtaattgcagattttgatattacagaaagcatgcttaagaactttataagcaagataagttctaagagtgcatttgcaagtccaagaattcttgtttgccatccgtcaggagtaacagaggtagaaagaagagctataaaggaagctactaaaagagcgggagcaagagaagtaaaggttatggaagagcctatggcagcagctataggagcaggtctacctgttgaggaaccaagaggaagtatgattgtagatataggtggaggtaccacagaagtagccgtagtatccttgggcggaatcgtaacaagtaagtcacttagagttgcaggagatgagcttgatcaggctataatcagctacataaagaaggaatacaatctaatgataggtgagagaacttcagaaataataaagatgaaaatgggatcagccttcaaaacagaagagtctttagagaatatagttataaaaggaagaaatcttgtaacaggattgcctaaaaatatagaaattagtgaagaggaagtaagagaagcactaagagaacctgtagcatcaatagtagattccataaaattagcccttgaaaaaacaccaccagagcttgcggcagatataatggataaaggaataatgcttgctggtggaggagcacttcttaaaggacttgatatgcttattagcaaagaaaccaatatatctgtacatatagcggaatcccctcttgactgtgtagcacttggagcaggaaaagctctagaccattttgaaaaattggttagcgactag

SEQ ID NO: 15830 - DNA, 1107 bp, Clostridium acetobutylicum
atgaggatggcaaggaaaagattattacgactagtaggaaggaatcaaataaatattaataagggagagggaagtgaagtgaaaaaaataaagatcggtgtcttgttaagtaccattatctttactataggtattttatcaggatgtgaaacaaaaagtgaaaagctgtcacaagttaaaatagcttattttggtaatataacacattcacaggcactgcttcaacgagacgatggttcacttcaaaaggcacttggaagcaatactaaaataaaatgggaaaagttcagcgctgggtcagccgaagttgaatctttactggcaggggaagtagatataggatacattggaccaggaccagctataaatgcatatacaaagtcaaatggagatatacaagttatagcaggagcagcagatgcaggagcaatacttgtttcaaaaaaaggtgcagacataaagagtgtaaaagatttaaagaataaaagagttgctataccgcagtatggaaatactcaagatttaactctcagaattcttctttatgaaaatggacttaaggatagagctaagggaggaaacgttgaaattgttgaagcagagaattcagatataaaaacgcttttgggtaagggttcaatagatgcagctttagttccagagccatggggcactaggcttgtaaatgaagttaaggcaaaggttgtacttaactatgaggatatatggagaaaaggacaatatccaacagctattgttgttgcaagaaaagaatttgtaaaagctcatcctgatatagtagagaaatttgttaaaaatcttgtagaggaaactaataaagtaaatagcaatagagataattctgaaaaggctataaatagacaacttaaagaaataactggaaaaggcttgtctaaaaagatattggattcatcctttgaaagaataaaggttacaaataatcctgaaaaagatgcagttttagatatggctaattggtcttttaaggcaggttttataaagagtaaagcagatcttaaggatatgttcaatttgagctttttaaatagggcgcttaaagagagtggaaaagccgaaataaagtaa

SEQ ID NO: 15831 - DNA, 720 bp, Clostridium acetobutylicum
atgcaaaatgtatttaatgtaaatcaaaagattggggatatagtagttaagtttccaagagctattgaaatacttaaaagatataaaatagatttttgctgtggaggagatagagtacttgaagaggcaataaaggaacaagggcttaatggacaagaaataatagatgaaataaatgaggattataataaatatataatggaggaagtaaaggatagagattgggcaactgaaccatattcaaaattaatagaacacgttataaacacacatcacgcatatttaaatgaaacgctgccgcgcttaagcgagcttacaactaaaatacttagagtgcatggagcaaaacattctgaattggctaaggtgcataagcttctgcatagcttaaaaatggaattagaacagcatttgataaaagaggaggaaatagtatttccgctcatacaggaatacgaaagaacgggaaataatgagactttaagtaatgctgtagaaaagattatagaattagaagaggaacatgaaggtgcaggctcaatactaaaggagcttagggaggttactaagaattatgagcttcctgaagatgcctgcaacagctataaagcagcatataaacttttagaggatgtagaggatgatacctttagacacatacatcttgaaaataatattatgtttccaaggcttgttagtgaatcaaagaagcataagtaa

SEQ ID NO: 15832 - DNA, 1452 bp, Clostridium acetobutylicum
ttgattaataatgacttaaatgacttggaaagtatgactgttaatgatcttaaggaacttgcaaaggagcttggacttaggaatgtatctaagtataggaaaaaagatttaattgatgagataaataaaaaatctccaaacagcatagaaaaaaacggaattatgcttaaggaaaatataaaacctaaaaatgatctatcggagaaaagtaatacgtcagagagcagtaatggtaatgtcagtagacctgctgaaaaaacatataccaataataatagatatgtgcagaaagaaaaggaaaacaaaaatgaaagatttaaagaaatggtagatgaatcagattcagcaaagggagttcttgaattagttgaaaataataatttcggatttttaagaggaaaaaattacttaactagcccggaagatatatatgtttcaccttcgcagataagaagatttaatctaaagacaggtgatgaggtccaaggaaaggttagaatacctaaagagggagagaagtttaaggctcttttatatgttgagaaggttaatggcgaaaatcctgaaaaatctgttagaagagagccttttgaaaaattaactcctatatatcctaatcaaaggctaagtttagagaaaaatagtgatgaacttgcaacaagacttatggacttaataagccctattggaaaaggtcagagaggacttatagtagcaccacctaaggctggaaaaacaacacttcttaaaagtgtggctcaaagtttagctaaaaaccatcctgaaactaaactcatagttgttttgattgatgaaaggcctgaggaagttactgatatgcaaagaagtataaagggagaagtaatatattctacctttgatgaggaaccagagcatcatacgaaggttgcatacatggtacttgaaagagctaaaagaatggtagagcaaggtcaagatgttgttatacttttagacagtttaaccaggcttgcacgagcatacaaccttacaataactccaactggtagaaccctctcgggaggacttgatccaggagcattaattatgcctaaaaaattctttggagctgctagaaatatagaagaaggcggaagtcttacgatacttgcaacagctttaattgataccggcagtagaatggatgatatgatatttgaagaatttaaaggtactggaaatatggaagttcatcttgataggagacttcaggaaagaagaattttcccagcaatagatatatataaatcaggaacaagaaaagaaagtgaacttttaagtcatgatgagcttgaagctgcattcaagataagaagagtgctctatagcaataatagtactcaagatgttacggagaagcttattaatatgcttaatgagactgagaacaataatgaaattgtaaatgtaatcaataagggaaaatggtga

SEQ ID NO: 15833 - DNA, 1437 bp, Clostridium acetobutylicum
atgagttatgaaaccgtaattggtcttgaagtacatgctgagttaagcacaaaaactaaaatattttgtaactgttcaactaaattcggtgctaaaccaaatgaaaacacatgtccaatatgtatgggacttccaggaactcttcctgttttaaatgaagaagttgttcaccttgcagtaaaggctggagaggcacttcattgcaaaataaataagttaaataaaatggatagaaaaaactatttttatcctgatcttcctaaagcttatcagatatctcagtttgatattccaatctgcagcggcggatatgttgaaataccaactaaagatggagttaaaaaagttaggcttaatagaattcatatagaagaagatgctggtaagcttgttcatttggaatatgagcctcattctcttatagattataaccgtgttggagtgccacttgtagagatagtttcagaacctgatatgcgttctccagaggaagcggttgagtttatgaaaactttaagagctatgcttcaatatgcaaatatatcggactgccgcatggatcaaggttctatgagatgtgatgctaatatatctttaagagaagttggaagtacagagtacaatacaaaggttgaaataaaaaatataaactcttttagagagcttcaaaaagcgcttgaaaaagaagaaaaacgtcaaaaggagctttatgactttaatgaaggttttagaataaagcaggaaactagaagatgggattcaggtaagggtaaaactgttactatgagaacaaaggaagatgctaatgactacagatattttcctgaaccagatataattccgatagtagtaaaggatgagcttttagaaaaggtaaaggaagaaatgccggagcttcctgtagagagaaaggctagatttgaagatcagtataagcttggaagtaaggaaatagaaatacttattgaagataaagcattagcagattactttgaaaagctagtagaggcaggttgtgaaagtaaaacggcttcaaattggatacttggagatatgcttagacttatgagagaaacggaaacagactcaaaggcaatacctgtaccagttgagcatatgaatcagcttatagaaatgataaaaacaaaagaaataagtaatactgctgcgaaagaagtctttgaagagatgtttaaaacttcaaaggagcctaaagttgtagttaaagaaaaaggactttcccaaattagtgatgagagtgctcttcaaaagatggttgaagatgttataaataacaatgaaaagtcagttttagattacaaggcaggtaaaaaacaggctattggatatctagtaggtcaagtaatgaaacaaagcaaaggaaaagcaaatccacctatggtaaaggaacttcttgaaaaagtattaagtgaataa

SEQ ID NO: 15834 - DNA, 753 bp, Clostridium acetobutylicum
ttgacaaagtacagaatgaagtttttaaatacaaatgtagataatgttaatatgaaagaggcaatagaaataatagatggatttataaaagatggaaaatatcactatgtggttactcctaatgtagatcatattgtaagacttgaaaaggatgaagaattcaaaaaggtttacgaaaatgcagatttaattttgacagatggcatgcctttagtttggatatctaagtggcttaaaacccctgtaaaggagaaggtatctggctctgatttgtttccaagagtatgtaagcttgcagcagaaaaggagtatacagtatttatacttggagcagcagagggagttgctcataaggcaggagaaaatcttaaagctaaatataaaggtcttaaagttgcaggaacttattctccaagctttggttttgaaaaaaagccagaagaaataaagtatattatagaaatgataaatgatataaagccagatatattagctgtaggagtaagtgctccaaaacaggaaaagtttgtagcacagtatagagatgaacttaaggtaccggtagcactagctataggagcatctatagatatagaagctggaactttaaaaagagcacctttatggatgcaaaaatctggtcttgaatggttctatagaatgtttagacagcctaaaaaaatatttaagagagtgttttttgatgacttgaaaataataggcatatactctaaatatagaagcttaggttaa

SEQ ID NO: 15835 - DNA, 648 bp, Clostridium acetobutylicum
atgaaaataattttattaggtcctccaggtgcaggaaaaggaactcaggcaaagttaataagcagtgaattctctattcctcacatatcaacaggtgatatatttagagctaatataagtggaaaaacagaacttggaatgaaggctaaaggatatatggataaaggtcttctagttccagatgaattaactatagatatagttaaggatagaatatctaaagatgattgcaaaagtggatttttactagatggctttccaagaacagtaaatcaagcagaagcccttgataaatttcttgtaggcagaaaagaaaaaattgattgtgcattgttaatagacgttccaagagaaaaaatatttaacagaatgacaggaagaagagtttgtagtaaatgtggagctagttatcacattgaatataatcctactaaagtggaaggtatatgtgatctctgtggtagtcctgtggttcaaagaaaagatgattcagaggatacagttaaagagagattagatgtttatgatagacagactgagccacttgtagtatattatagaaatgaagcagttcttaaatcagttgatggtactcaggatatagataaagtttttgaggatataagaaatgtcttaggagagatatag

SEQ ID NO: 15836 - DNA, 1101 bp, Clostridium acetobutylicum
atgaaatttatatgtgaaaaaaatatattacaagaagcaattattacagctcaaaaagctgttacaggaaaatcaacaatgccagtattacaaggtatactcatgagtgttcaaaataacgaattaactttaattggttctgatatagatttaagtattgaaactaaaataaatgtagaagttttagaagaaggtaaagttgttttagatgctaggcttttaagtgaaataattagaaagctgcctaattccaaggttgagatacaaactattgagaataattgtgttgaaataacttgtaataaatcaaagctaacacttgtgtatctaaatccaaatgattttccaagcttaccagagatagacgaaaactcaatcttcaaaataaatcaaaaaacattaaaaactatgataaaaggtactatatttgctattgctcaggatgaaacaaggcctatattaacaggcgttttatttgaaataaaagatagcaaattaaatttagttgctattgatgggtataggctagctttaagaagccaatacatagataacgaaaccagtataaatgcagtaattccaggaaaaacactaaatgaagttattaaaattttagaggatgatggtgatgtaaatattacatttacttctaaccatatattattcaatcttggaaatactaagataatatcaagactacttgaaggtgaatttataaaatataattcaataatacctgaagaatacaacttaaatattgtggctagaaaagaagaattgttagactgcatagagagagcttcacttatggctaaggatggaaataacaatttgataaaattagacatcgaggatgatgtaatgattataacgtccaattctcaattgggaaacgtaagagaagaaataaatataattttgcaaggtcagcctttgaaaattgcatttaactcaaaatatttaatagatgtgcttaaaatcatgaatcaggaagaaattgtaatgaacttttcaagtagcataagtccttgcattattaaaaataaggaaaatgatgattccacttatttaattttgccagtaagattagctacaatctaa

SEQ ID NO: 15837 - DNA, 420 bp, Clostridium acetobutylicum
atggaaaatgaggtagtgttagtagaaatttttggagttaaagaaaaagcttcgtgtagtggttgttcaagcaaaacagaaaatagttcatgttcaagttgtagtggatgcagtagtcaaggaagctgcgagggcggatgttcttctggtggctgtggtaatagtgaatcaatgtacaatcaatatgaagcttttaaggaatatatagcaaaaacagatgtagcagctaatgtagaggtacagtttatagatgtgtcagaaattgatataaataaatataaatacgttgaaggcgcaataggaaaaaaatatatgctaccagtagttgctataaatgagtttataagattctatgggggaatgaaggataggctgatatataatgcaattaaaaaagaattgaataatatatatatgtaa

SEQ ID NO: 15838 - DNA, 1974 bp, Clostridium acetobutylicum
atgataggaactgtgctaagtaacaggtataaaatagaggaagaaataggtgtagggggaactgcagttgtatacaaagctatggatactcttttaaatcgtcatgtggctgtaaaagttcttaaacatgaatttacagaagatgaagagtttgtgtttaaatttaaaagagaagcatctgctgctgctagaattgccaatgcaaatattgtaaatatatatgatgttggagctgatggtaacgttaattatattgttatggaatatgtagcgggaaaaacacttaaaaagctcataaaggaaaatggaaaaatagagtttaataaaataattgactatgcaactcaaatagcaaaagcgttaaactttgctcataaaaatggaattgttcatagagatataaagcctcataatataatggttacggatgatgatataattaaggttacagactttggaatagcaaaagcatcaaatgaatccacaataactactacgaataaagttgttggttctgcacattacttatcgccagaacaagcacagggaattccagtagattgtagaacagacatatattcttttggaatagttctctatgagatggcaacaggcaaagtaccatatgatgcagatacccctgtttctatagctttaaaacatatacaggatgccgctgtacctcctaatgaattaaataaagatataccaattgccctcaataaaatgattttaaggtgcattgaaaagaaacctgaaaatagatatcaaaatgccaatgaaatattggatgaactgagtaatgtaaaaaataattatgtaaatgatgatgaagagtttacacgtgtaatggatccagctcagatacaaaatgagagcaatccaaataacaagttggataacgatgatacttactataatggagaaccatataataaagagcagcctcaagaggagcctcaagaagaaaatgaagagcctaaaaataaaataaaaggcaataatatgttaagtggtaaggctaaaaaggcattagttgcatccattattgtagttttaattttagcaggttctgcacttgctttttcaatgggatcaggaatatttaaaccaaattctaattctgtatcaaaggtaaaggttcctaaaataataggtttaagtgaaagtgatgcaaagggaaaagttgaagatgcaaaattaaagtttcaagttgttgatagagtaaagagcagtaaaccaaagggcacagttgtaacatgttatcctaatgaggatacagaagtagacagtggtacagttgtaagagttgatataagctcaggtgacactgatcaaacccttccttctcttgtaggacttcctgaaagtgcagcaagagctcaaattaagcagtacggatgcaatgttggaagtgttactcaagaatacagcgatgatgttgctcaaggtaatgtaattagtcaatcacctagtgaaggctctcaaataaaaaaaggaatgactatagaccttgtaataagtagaggtcctgaagttaaaaaggctacagttcctagcgtttatggtaaaacatctgatagtgcatcatctatattacaaaatgcaggttttggtgtaaatgttcagaataaggatgttacaaatgcggatcaaaacggtatagttatagaagagtacccaaatggttatgttaataagggaacaacagtaactatagttataggaagatttaacagtacagcagttcagccgccaaataacaataatggaaatggtaatcaaaaccaaaaccaaaacaaaacacctgatacaaatcatgatgacagtaaggcaccgactggcgggaataatgataatcagaaccagaataatacaactaatccaaatggaactcaacctgcaggtggaaatgtaactggaactggaaatggaaatgttacaaatacacctaatggaactggtcaaaaataa

SEQ ID NO: 15839 - DNA, 321 bp, Clostridium acetobutylicum
atggcaaataaaattcatgtgagaaaacaggattcggttgttgttatatctggtaaagatagaggaaaaattggagaagtattagcagttaatcctaaaaagggaactgttttaattaaagatgttaacgtagtagttaaacatcaaaaagctaacaaagagaatatgcagggcggcttaattaaaaaagaagctccaataaatagtgcaaaagtaatgttatactgcacaaagtgcaagactgctacaagaataagtaaaaaagtacttgatgacggaacaaaagttagagtatgcaaaaagtgtggagaaacattttaa

SEQ ID NO: 15840 - DNA, 1287 bp, Clostridium acetobutylicum
ttggaaaaagacattaatttaaaaatcttcaaaggaaatttaatattcacaaaaacatcagataaatttactataatgaaagactcttatatagttgtaatagacggaaaaatagcttccgtttctagcaatcttccagataaatacaaaggcaatccaataatagatttcagaaataatattattatacctggaatgaatgatcttcatgcccatgcttctcaatataaaaatctaggtattggtatggataaggaacttcttccatggctaaataattatacctttccagaagaagcaaaatttctaaatgtagattatgctaaaaaaacttatggaagattaataaaagacttaataaaaaacggcactactagagttgcactttttgctacattgcacaaagattctacaattgagctttttaacatgcttataaaatctggaattggtgcctatgttggtaaagtaaatatggattacaattgtcctgattacttgacagaaaactatattacttctctaaatgatacagaggagataattttaaaatacaaagataaatcaaatatagtaaaaccaataataaccccaagatttgtaccaagctgctcaaatgaactcatggatggtttaggcaaactttcttataaatatagacttcccgttcaatctcatctttcagagaatttagacgaaatagctgtagtcaaatctttacataagaaaagcaatttttatggtgaagtatatgataagttcggcttatttggaaatacacctacactaatggctcattgtattcattcatccaaagaagaaattaatttaattaaaagaaataatgttaccattgtgcattgtccaacgtctaatttcaatcttggtagtggaatgatgcctgtaagaaaatatttaaatttaggtattaatgttgttctaggttcagatataagcgctggacatacttgttctctatttaaggttattgcttatgcaatacaaaattccaaaataaagtggcaagaatctggcaaaaaggatatgttcttatccacctctgaggctttttacatggctaccaaaaaaggtggtagtttttttggaaaagtaggaagttttgaagaaggatacgactttgatgccctagtaataaatgattcaaatttatatcctgaagactatgatcttaccgaaagactagaaagatttatataccttggagatgacagaaatataatgaagagatatgtatgcggtaatgaaatttttggacccaagttctaa

SEQ ID NO: 15841 - DNA, 1749 bp, Clostridium acetobutylicum
atgaaaacaataatcttaaatggcaatgaagtgcatacagataaagatattactatccttgagctagcaagagaaaataatgtagatatcccaacactctgctttttaaaggattgtggcaattttggaaaatgcggagtctgtatggtagaggtagaaggcaagggctttagagctgcttgtgttgccaaagttgaagatggaatggtaataaacacagaatccgatgaagtaaaagaacgaatcaaaaaaagagtttcaatgcttcttgataagcatgaatttaaatgtggacaatgttctagaagagaaaattgtgaattccttaaacttgtaataaagacaaaagcaaaagcttcaaaaccatttttaccagaagataaggatgctctagttgataatagaagtaaggctattgtaattgacagatcaaaatgtgtactatgcggtagatgcgtagctgcatgtaaacagcacacaagcacttgctcaattcaatttattaaaaaagatggacaaagggctgttggaactgttgatgatgtttgtcttgatgactcaacatgcttattatgcggtcagtgtgtaatcgcttgtcctgttgctgctttaaaagaaaaatcccatatagaaaaagttcaagaagctcttaatgaccctaaaaaacatgtcattgttgcaatggctccatcagtaagaactgctatgggcgaattattcaaaatgggatatggaaaagatgtaacaggaaaactatatactgcacttagaatgttaggctttgataaagtatttgatataaactttggtgcagatatgactataatggaagaagctactgaacttttaggcagagttaaaaataatggcccattccctatgtttacatcttgctgtcctgcatgggtaagattagctcaaaattatcatcctgaattattagataatctttcatcagcaaaatcaccacaacaaatatttggtactgcatcaaaaacttactatccttcaatttcaggaatagctccagaagatgtttatacagttactatcatgccttgtaatgataaaaaatatgaagcagatattcctttcatggaaactaacagcttaagagatattgatgcatccttaactacaagagagcttgcaaaaatgattaaagatgcaaaaattaaatttgcagatcttgaagatggtgaagttgatcctgctatgggtacttacagtggtgctggagctatctttggtgcaaccggtggcgttatggaagctgcaataagatcagctaaagactttgctgaaaataaagaacttgaaaatgttgattacactgaagtaagaggctttaaaggcataaaagaagcggaagttgaaattgctggaaataaactaaacgttgctgttataaatggtgcttctaacttcttcgagtttatgaaatctggaaaaatgaacgaaaaacaatatcactttatagaagtaatggcttgccctggtggatgtataaatggtggaggtcaacctcacgtaaatgctcttgatagagaaaatgttgattacagaaaactaagagcatcagtattatacaaccaagataaaaatgttctttcaaagagaaagtcacatgataatccagctattattaaaatgtatgatagctactttggaaaaccaggtgaaggacttgctcacaaattactacacgtaaaatacacaaaagataaaaatgtttcaaaacatgaataa

SEQ ID NO: 15842 - DNA, 1392 bp, Clostridium acetobutylicum
atggaaaacgtacttgtaaaacaactttatagattatccagtgaatttggtggaaaaaaagtaagactatcaggctgggtaagaactataagagcatctaaatcttttggatttattgaaatcaatgatggaagtttctttaagaacatccaggttgtttttgatgataaacttgataattttaaagaaatttctaagtttataataagctcaacaattactgttgaaggagaatttgtgcttactcctaatgctaagcagccatttgaaatacacgctgaaaatattacgcttgaaggtaattcagacaatgactatccacttcaaaagaaaagacatactcttgaatatctaagaagtattgctcacttaagacctagaagtaatactttttctgcagtattcagagttcgttctttagcagcatatgcagtacacaagttttttcaggaaagagactttgtatatgtaaatacaccgctaataactgcaagtgatgctgaaggagcaggagaaatgtttcaagtaacaactcttgatctaaaaaatccacctaaaaatgaagagggaaatatagatttttcaaaagatttctttggaaaaaaagcaaaccttacagttagtggtcagctttcagcagagacttttgcgttagctttcagaaatgtatatactttcggaccaacatttagagcagaagaatcaaacactacaagacatgcagctgaattttggatgatagagcctgaaatggcatttgcagaacttagcgactatctagatacagctgaggaaatggttaagtatataataaacttcgttatggaaaatgctccagaggaaatggaattctttaatactagaatagataaagggttatttgatagactacacaatgttgtaaacagcgaatttggaagaataacttatactgaagctgttgatatccttgaaaaatcaggagaaaaatttgagtatccagttaagtggggaatagaccttcaaactgagcatgaaagatatttaactgataaggtatttaaaaagccattgtttgtaacggattatcctaaggatataaaagctttctatatgagaattaatgatgacaacaagacagtagcagcagcagatttacttgttccaggagtaggagagattataggaggaagtcaaagagaagaaagacttgctgttctcgaaaaaagaatggaagaattaaatttaaataaagaagactactggtggtatcttgaacttagaaaatatggagaaactaagcattcaggatatggacttggatttgaaagaatgattatgtatttaactggcatttcaaatataagagatgtaataccattcccaagaacaacaggaagtgcagaattctaa

SEQ ID NO: 15843 - DNA, 1791 bp, Clostridium acetobutylicum
atggtgaatacagtgatacgtgaatatataaaaaataatgttttagttacggatggggcaatgggaacatattattctaaaaccactggagattataataatttttgtgaatttgctaatttaactaatccagaagtaatacttaatatccataaagagtatataaagtcgggagctaaacttattagaacaaatacattttcagcaaatactttaactatggatatatcgaagacagaattagaaaatataataactaaagggtatatgatagctagaaaggcagcagaaggtaaggagatttttatagctgcagatataggacctattaacaaatttgaaatagagaaaccagtggagtacataatagaagaatataaatttgtagtagatatttttatgaatttgggagcagatatttttgtatttgaaacattaagtagtatagattgtttgaaagaggtttttcaatatataaagagaaagaacaagaatgcatttatcttggctcagtttgcaattatgcaagatggttttacaagagagggtattagtgtaaatagtattgtaaataagataaaagctattgggagtatagatgcatatggatttaattgtggatctgggccagcacatttatataatataataaagggattagatatatatggagatataatatcgacacttcctaatgcaggatatcctgaaataattaatgaacgcatggtatatgtagacaatcctgattattttgcagataaaatgtcaatgattaaaaacagaggagttaaaatagtagggggatgctgtggaactacaccaaaacatatagaaaaaatggtaagtaatttaaaagaaaatctaattaacatagaagaaatagaaataaaaaaaaataagggtataaataattataaaaagaagaatagttttactgaaaaattagataaaggtgaatttcctatagttgttgaattagaccctccatttgatacaaatatagataagattatgtatgcagctaaggtatgcaagcaaaataacatagatcttgtaaccattgcagattcaccaatgtcaaaagttagagtggattcagtaatgattgcatctaaaattaaaagagaactaggaatagaagttatgccgcatatatgttgtagagataagaatgtaaatgcaataaggtcaagtttacttgcagcacacatagaaggaataaggaatatacttgctataactggagatccagttacgggaattgataaggttaatactaaaagtgtttttaatttaaattcatataagcttatgaatcttataagtgaaatgaataaagaaacatttaaggaagataagataagtataggtggagcacttaatttgaatgtattgaataaggaagttgaagtaacaaggatgctaaagaaagtagaaaatggaggtacattttttctaactcaacctatatttaaagaagagactattgagttcttagctaagcttaagaaagatagaaatataaaaattataggaggagttctccctatagtaagttatagaaatattcagtttataaataacgagctcttcggagttgatatacctaaagaatatattgagagatttagtgtggatatgacaagacaagaggcagaagaagtgggagtaaatttagctagggaacttatagctaaaattaggaactatgtagatggtatatatattgttacaccatttaatagaatcggtatggtaatgaaaatactcgaaaatgttaggaagtga

SEQ ID NO: 15844 - DNA, 756 bp, Clostridium acetobutylicum
atggtttattttattggagcaggaccaggcgatgtggatttaatcacagtaaagggaagaaaaatagtagaaaaagcagatattgttatatacgcaggctctcttgtaagtaaggagcacatggatttttgcaaaaaagaggttaagatttataattcagctcacatgacactagaggaagttatttcagttattgtaaaagcagaagtggaaaataaaataacagttagacttcatacaggagatccttctatatacggagctataaaagaacagatggatgaactaggtaaaagaaacatagcttatgaggttgtaccaggagttagttcctttacagcagcagcttcagccataaaaagagagtttacccttccgggagttagtcaaacagttattttaactagaattgaaggaagaaccccagtaccagagaacgaagatatagaaaaattagcgtctattggagcatcaatggcaatatttttatccgtgggaatgatagaaaaggtagtagaaaagttaaaaaagggttacaaaagaaacgttccaattgcaataattgaaagagcttcttgggaggatgaaagaagtataataggaacactagaggatataacagataaagttaaaaaagcgggaataacaaagtgtgctcaaatacttgttggagattttatagattctaactattctaaaagccttctttatgacaaaaattttactcacatgtatagggaaggtaagaagaaatga

SEQ ID NO: 15845 - DNA, 954 bp, Clostridium acetobutylicum
ttgaaaaagggatatatgtatatagctttaacaaccattatctttagtacaatggaaatagccttaaagcttgtttctaaatcgttcaatcctattcaacttaactttactagattctttataggcggcttatttttagtaccttttgctttgaatacactgcataaaagacatttatctatatcaactaaggatttacgtttctttgccttattaggcttattaggtaccgttataagtatgagtttatatcaactggcagtgcaaaatactaaggcttcagtggttgctgttttattcagctgtaatccagtatttgttacgattttagcattctttctcttaagagaggctattcacaaaaataatattgctgcactaattcttgaggttattggcaccatagtaataatagatcctttaaatacaaaactaagcatactaggacttgcacttacaatagcatcaactttaatcttcgcagcatacggtgttttcggaaaaaagaaatgtgctaaatacggcgggatagttgttacctgctttggctttttattcggaagtattgaaatgcttgttctaattggtataactcacattactccaattgcaaatttattttcttctaacggcattgcaattttctctaatattcctttgtttacagggtactctttaaaaaatttgcctttaatgtgttttatttgtttaattaatactggtgctgggtttgcctgctactttaaggcaatggaagaaacctctgctcaaaccacttctttagttttcttctttaaaccaatattagcaccgattcttgcactaattttgttacatgaaataattcccgttaatatgataattggtattttattcatacttgcaggttccatttcatctattttaccggaattgttagctcaaagacaaactaaattagaaaaaacggcttaa

SEQ ID NO: 15846 - DNA, 408 bp, Clostridium acetobutylicum
ttgattatggagcatgaatataggcttgaggtaagagggtacgaattagattcatttggtcatgttaataatgcagtgtatttaaattacttagaagctgcaaggtgggatttatgcagtaagcttaatttaactgattataatgaaagtaatgaattatttatagttgtaattgaaactaacattaaatatatcagagaattaaaattgtttgataaagtacttataaaaactgaacttacttatgaagatgactatttaatatttaaacataatatttacaatgaggtcacaaaaagaaaggcttcagtagctaaatctaaaatggttttagtatcaaaacaaagaattatatatgaaattcctcaatttattaaagataagctggatatatgtgcttatgggtaa

SEQ ID NO: 15847 - DNA, 1200 bp, Clostridium acetobutylicum
atgtatataaaggttttgtcggtttcagaactaaataattatataaaaagagttgtagatagtgattatatattgagtaatgctcaagtaaaaggcgaaatatcaaattttaaatttcacagcagtgggcatgtttatttttcccttaaggatgaaggagggaagataaactgcataatgtttagaagtaatgctgaaaagttaaaatttattcctgaaaatggaatgaaggtaaatgtaaagggaagagtatcagtatatgttaaagatggagcttatcagctttactgtactgaaatcactcctgagggaagaggagaactttatgaagcctttgagaaactaaaggaaaagcttttaaacgagggtatgtttagtgaggaacataagcgaaatatacctaaatatcctaaaatgataggtgttataacctctccaacaggtgcagccataagagatataataaatgtggctacgagaagaaataagagtgtagacatgatcatatgtccaactttagttcaaggggtaaatgccccaggtgaattaataaaagctttggattatttaaataatagagaagacattgatactataatattggcacgtggtggaggatccattgaggaactttgggcatttaacgatgaaaagcttgcatatgctgtatataattctaaaaagcctgttgtaacaggtgtaggtcatgaaacagacttcacaatagttgattttgtaagtgatagaagagcacctactccttcggcagcggcagaaattgcagtcccaaatataaatgaagaaatgaatagttttgtttctctaaaaagagctcttgatactagtattaaaacatatattcaaaataaatgtaatcagcttgaaatagctaaaaggatgttagaaaaaaacagtccagaaatattgatagttaatggatattcttcaattgacaactttaagtatgtacttgatatgagaatagcaaataagataaaaatagaaaaagaaaagatactaagatataattctattttaaaatcaaatagcccaattaatattttaaataaaggatattccattataagtgatgaaattggaaataatataagtaatgtagataaattaaaagaaccagataaagtccatataacatttaaggatggcaaggtgaatgctaaaatagatattttaaggtga

SEQ ID NO: 15848 - DNA, 930 bp, Clostridium acetobutylicum
atgggtaaaatctataagaacttaattgaaactattggaagaactccattagtagaactttcaaattacaaagaaaaaaataaaattgagggaaatattctaggaaaggtagagtactttaatccatcaggaagcataaaagatagaattgcatattcaatgataaaaaatgcagaagaacaggggttaataaataaggatacagttataatagaaccaacaagcggaaatactggagttggtcttgcatttatagcagcagcaaagggatataagcttatattaacaatgcctgaaactatgagtgttgaaagaagaaagcttttgacagcatatggagctgaaatagttcttacttcaggagttgaaggaatgacgggagctattaaaaaggcaaatgagcttgcaagtgaaaatcctaattcttttataccacagcagttcaaaaatccatcaaatccagctatacatgaagttacaactggaatagaaatatgggaggatactgatggaaaagttgatgcagtagttgcaggagtaggaacaggtggtactataacaggtattgctaaaactcttagagaaaaaaataaagatataaaaattatagcagtagaaccagcaacttcaccagtactttctggaggaaaagcaggtcctcacaagattcagggaataggagccggatttgttcctgatgtatatgaagcagaattaatagatgagataattcaagttaaaaatgaagatgcatttgcttctgccaaagagcttgctagagaagagggaatacttgcaggaatatcatcaggtgcagcactatttgcggctaaagaggttgcatcaagaccagaattcaagggtaagaatgttgttgtgattcttcctgatagcggtcaaagatatttatcaatgtctgtatttgattaa

SEQ ID NO: 15849 - DNA, 807 bp, Clostridium acetobutylicum
atgaaaatagcgaataaagattttatacttggagaaagaacttacataatgggaattttaaatgttacacctgattctttttctgatggaggaaaatttaataatttagacaatgctttaaaacatgcagctaagctcatagaagatggcgctgatataattgatatcggtggtgaatccacaagaccaaaccactcttctgttgacaaaaatgaggaactagaacgggttattccaataatagaagccgtatcgcacgaatttgatattccaatttctatagatacctataagggcgaagttgcagaggccgcattagaatctggtgcgcaccttataaatgatgtatggggtttcaaaaaagatacatatatggctaaggtagctgcgaaatatgatgttccttgttgtctaatgcataatagagaaaataacgattatagtaactttcttcaagatgttatagatgatttaaaagaaagtatagatatagcaataaatgctggtgttaaaccagaaaatataatgatagatcctggaataggttttgcaaaagacttcaatcaaaatttgcttttaatgaataatttagaaaaattaaatgttttaaatttccctattcttttgggcacttctagaaaatcaatgataggcaatattttaaatttgcctcccaacaaaagagttgagggtacagttgctacttcagtcataggtgtagtcaaaggctgtgattttattagagttcatgacgttcttgaaaataaacgagcttgtatggtagctgatgcaataataaggagatga

SEQ ID NO: 15850 - DNA, 441 bp, Clostridium acetobutylicum
atgaatagacagattttatcaggagataacattttattagagttgaaatcagaatctaaggatgctgcaatagaaagagctggaaaacttttagtttctagaggttatgttaaggaaaactatataaatggaatgaaagccagagaagaagaagttacaacatatatggggaatggtgtcgctatacctcatggtatgaatgaatataaaaaagatattatggattcgggtatagttatagctcaatatcctgaaggcgttgactttggtgaaggaaatatagcttatatagttataggaattgcaggtagaggagaagaacatatgcaaatactatctcaaatagcccttacggttcaatatgaagaaaatgttgaaagacttagaaatgctaaaaataaagaggaaattattaagataatagaggaaggtgatgactag

SEQ ID NO: 15851 - DNA, 333 bp, Clostridium acetobutylicum
atgaataaaatacttttgataggaagaatgactaagaatccaagtattaagcaaatagaaactactggaaacaatagatgtaattttactattgcagttaatagaagagtaagaaatacaaatggagaaaatgaagctgattttattccagttacagtttggggtaaaactgctgaaaatgttgcaagatacatgaaaaaaggttatcttgttggtgtatctggaagacttcaagttagaacttatcaagatgttgatggcaatagaaagtatatcactgaagttgttggtgaagaggttcaatttttagaaactaaaaaagaagcggtttaa

SEQ ID NO: 15852 - DNA, 1917 bp, Clostridium acetobutylicum
atgagtagtacaagtggtacaggcagtacatccgcttataattcaccaatgagaatgactggattggcatcaggattggatgttgacagtatagtaagtaagcttatgcagccttatgagatgaagagagacaccatgaagcaggatgaaacttatctagagtggaaaagagatgcgtatagagcagttacaacaagttctgctacactctcaagcacatactttgatcagttaaatcaagacaactatatgttaacacccaatgcttatgctgattatacaggaataagtgatgacaatacaaatacaacaagtgatgcaagcaaggatactggagtaattgcaaaaggacatgaaggaactgctgaaggaaattattcagttacggtaaatagagttggcactactgctagaaatgctaatacgcttacaggacaaactgtaactgacgcaggtggaaaaacttatactcttagtgattcaggttccgcggttgctgctaatggaggaaatgatacattaactgttgtttttaatggtaaaactcaagattttaaattgggaaatatgtcagtagatgatacgcttaaaagtgtagcaagttattttaatcttactgtaactagcagtacgcttgacggtcaatatcatataagtgcaaatagcagtattggtggaaatatctttcaatcaggtacaacaggaaaggtaacatcaggagctactgtagatagtagcgctccagcagatactgttgttggtgtaggaggtataagcggaggaaaaggtgctcttggtgcagtagattataatgctagtggaaataatttttttaaaaatatatttggattaagtggaacaaatactagtacagcagctagtgttacagctatagatgggaatagtaaaactaaaacattaagtaatgtaacaggtattaatatgatagatggtgttaatgctaatgttactataacagagcctaatggatcaaagggtactgtagaatcaatgaataatgatttttcagtagatggtgttgagtatgatataagtaaaataaatttagctgagtcaggttctgtatatacaccgcacaaagctaatatacaaatgactcttaatgtggacaagatatacaataaaataacgggctttattgacaagtataatgcttatgtacagcagatcaatgataaaataaatgaaactaaaacgtacagctataagccgcttacagatgctcagaaaaaagcaatgaccgatgatgaggtgactaaatgggagacacaggctaaacaaggtatacttgcaaatgattcatatttgcagagcatggttacagagtttagaaaggctttttatactggtgttgatggggcaggttttaccttaactgatttaggaataagttcttatagtggtgttggagatgctgtaaacaaggctggacaaatgaaatatgatccggctacgttaaaaactgctataaagaagtatgggagcagtatatataatatatttgcaaagcaatctaaagatgagtctttatatatcaaaaataatgatattaatcaaagctctgctgatatagcaaaaactatggctagaagacaaacaagatattctcaagaaggaatttttcagagaataaacgatattatgcaggactatactagagtaaatacttttccgccaggaactttagttcagcttgcaggatcatctacaagtacagatactacaagtactttaactaagcaaataaaagataagcttcaagctataaatgattatgattctacattatcagataaacaagaacagttttatctgcagtattcaaagcttgaaagttatttagcacaagcacaaagtcagcagcaatctcttcaatctcaattatcaaaactgtag

SEQ ID NO: 15853 - DNA, 555 bp, Clostridium acetobutylicum
atgtcaaagatagttattttcaaaggtagtccaaggaaaaatggatatactgcaaaattattagagcaagtagcaaaaggagcaaaatctaaaggtgctgaagttatagagtttgatttaaataatcctggaattcgtggatgtcaaggatgcttttattgtcgtacgcatgatggttgtgctgttaatgattatcttcaaccaatgtatgaggacatcaaggaagcagatgctattgtatttggttctccaatctattattataaaattacgggtcaatcaaagatttggtttgatcgcacatttccaatgactgggaatgattataaaccaaaatatccaggtaaaaaattaataacagtatttgctcaaggaaatccagatcctaaaataggtgcagaaggcgttaaattcgctaatgatatgttagaagagttagggtggaaattagaggacagtattaattactgtggaactagccatgatcctgatttagcaatgtttgatgaattatctttaagagcatttaaagatggagaaaacttagttggataa

SEQ ID NO: 15854 - DNA, 561 bp, Clostridium acetobutylicum
atgagggtaggtgttttatcgtttcaaggtggagtagttgaacacctggagcatatagaaaaacttaatggtaaacctgttaaggttagaagtttagaagatttacaaaaaatagataggcttataataccaggaggagaaagtacaactataggaaagtttttaaaacaatctaatatgctccaacctttgagagaaaagatatatggaggcatgccagtatggggaacctgcgcgggaatgatactcttagcaagaaaaatagaaaacagtgaggtcaactatataaatgccatagacataactgtaagaagaaatgcttatggaagccaagttgatagctttaatactaaggctttaattgaagaaatatctttaaatgaaatgccgcttgtttttataagagctccgtatataacacgcataggagaaacagtaaaagcattatgtactatagataaaaatatagtggcggccaaaagtaacaatgttttagtaacatcttttcaccccgaactagcagataatttagaatttcatgaatattttatgaagttatga

SEQ ID NO: 15855 - DNA, 237 bp, Clostridium acetobutylicum
atgacaaaaggtataggtcttaatgaagttgaaataaaatcaaaggttaaagttattggaattgtaccagagagtaaagttagaagaaaaataatggacatggggatagttagaggtactgaaatatatattgagggaaaagcacctatgggtgatccaatagcacttagacttagaggatatagtttgagtttaagaaaaagtgaagctaaggatattttagttgaagttttataa

SEQ ID NO: 15856 - DNA, 450 bp, Clostridium acetobutylicum
atgtcccttaaagaaaaacttcaagaggactggaaatgtgctcttaagagcaaagataaatttaaagctaatgtaatcagtatggctaaagctgctattttgcaggtagaaaaaactgatggcgtaaaacttaatgatgaagatattattggagttttagcaaaagaagttaaacaaagacgcgaagctttagttgagtttgaaaaaggtaataggcaggatttagttgaaagtgctaatgccgaaattaatattttaatgagttaccttcctcagcagttgactgaagatgaaattagaattatagttaaggatgcagcagatagcgttggtgctagtaacatgaaggacatgggaaaagtcatgtcggctttaatgtcaaaagttaaagggcgcgcagatggttccttggtaagtaaacttgtaaaagagtttttaaataataaataa

SEQ ID NO: 15857 - DNA, 1869 bp, Clostridium acetobutylicum
ttgagaataaatattttgagtgaagatacttctaataaaattgccgcaggagaagtggtagagagaccattttctgtagttaaggaattagttgagaatagtattgatgcaggcgctaaaactatcaatattgaaatagaaaatggcggaagaactcttattaaggtgttggatgatggctatggtatagataaggatgatatagaaaaagcttttatgcctcatgcaacaagtaagatatcaaagcttcaggatatatattctataaataccttgggatttaggggggaggctctaccaagtattgcttccgtgtcaaagactacattaaagtcaagaactaaagagaacgaatttggaagagaaatatcaataagtggtggaagtgttgattacattaaggactgtggaactaacataggaacacatatagaagtacgtgatttgttttacaatgttccagcaagagaaaaatttttaaaatctacagctaaagaagcatcttctatttctgatattgtaaatcgattagctttagctcatagtgaaatatcctttagattaattaataacggtaaaagggttatcacaacatatgctactgataatttaatagacaccataagagctatatatggtaaaaagatatgtgataatgtcataagctttgaacgtcatacagatttagtatctgttcatggatatgtgggaaatgcagaaataagtcgtggaagcagaaataatcaaagtatatttataaataaacgatatataaagaataaactcataactgcagcagttgaaaacgctgttaaatcgtttatgatgataaataagtttcctttttttataatatttttagatatatttcccgaatttgtagatgtaaatgtacatcctacaaaatcagaagttaaatttcaaaatgaaagggatatatttaaaattatttttgataccgtacatgaaggcattagaaacagcttaaaggaatctttcaaggttgaagctctaaaagaagaagaagataaattgtttgatattaaggaagacgttattacaaaaaatgagattaaacatgatgataaaatagatggttatataaaaaaagactcatttccggtacctgtacaaattccaatagatttaaaacgtcctattgaaaattatgataacagtacaaaagaaaataaggatagaagttttgacgattttagagagaaggatataataaaagaaacttcccaagaaaaagaaacctatgatataattactaataagaaagcaaaatttcctgagcttagggtcataggtcaattcaataatacttatattttagcggaaagctttgaggaattatatataatagaccaacatgcagctcatgagaagatattatttgagaaatatagggaagatataaaaaataaaggtgtgtcctctcaaattttaattacaccttctgtagtggaattactccctgaagattttatttattatgacgaaaataaagaagtatttaaaaatgctggatttgttattgagtattttggtgataatactgttgctattaaagaggttcctttgtttttaggtaagccacttgttaaggatttatttttagaaataatagataatctaaagaacatgggaagtggagaaacgtcagaggtaaaatacagaagcattgcaacagcagcttgtaaatcagctgtgaaagcatatcatgagcttacacatgatgaaatgaaaactctaatacaggatttaagatttgctgaagacccgtttaactgccctcatgggcggccaacaattgtaagattaactgtaactgattttgaaaagaagtttaagagaattcaataa

SEQ ID NO: 15858 - DNA, 2157 bp, Clostridium acetobutylicum
atgaaagatataagtactagattagccgaaaagctaaaaataaatgtaaatcaagttaagaatgtaatagaaatgttggatgaaggagcaacagtgcctttcatagcaagatatagaaaggaaagaacaggtggattaagtgatgttacactaagggaattaaatgaaagccttatatatcttagaaaccttgatgatagaaaagaaacagtaataaagtcaatagaagagcagggaaagcttacagatgaactaaaagaaaaagtattaaaagcagaaacaatgacagaggtagaggatttatatagaccttataagcctaaaaagagaacaagagcgactatagcacttgagaagggattaaaatctcttgcagatgaaattttaggaggcaaatttaaaggtgatataaatgaatttgcatcttcttttataaatgaagagaaaggtgttaatacaatagaagaagcacttaaaggtgcagaagatataataagtgaagttatatctgataatgctgaatttagaaagtggataagaaaatatacttataaaaatggtgttttggaaactcagggaagcagcgaggagccaactccatatgaaatgtattatgattttaaagaagcagtaagtaaaatacctccacatagagttcttgccataaatagaggagaaaaggaaaagattttatccgtaaagatagctacagatgatgaaaaaataataaattatcttgttttaaactgccttactggaaatgagataactgataagtacatagaagaaagtgttaaggattctttaaagagacttatatatccttctatagagagggaaataagagcagagcttactgaaaaaggcgaaaattcagctattgaaatatttaaggctaatttaaaagctcttttaatgcagccacctataaaaggaaaagcggtacttggatatgatccagggtttagaacaggatgtaaaattgctgttttagatgatacaggaaaacttttagatacggctacagtttatgcaacagcacctcaaaacgatgtagaagggtcaataaagactttaaaagaacttatttataaacacaatgttggagttgtatctcttggtaatggaactgcaagtagagaatcagaggaagttattgctagacttttaaaggaaataaaagaggaaaaaggaatagacgtttattatgtaatagtttcagaagcaggagcatcagtttattcagcctcagagcttgcagctaaagagtacccagatataaatgtttccttaagaggagcaatttctataggtagaagactccaagatcctttaagtgaacttgtaaagattgatcctaaatctataggtgttggacaatatcagcatgatgtggctcctaagaagatggacgaatcacttaaaggagtagttgaagactgcgttaacaatgtaggagtagatcttaatatagcaacaccgtctttactttcatatgtatcaggtataaatgcaaatattgcaaagaatatagttgattacagggaagaaaacggagcgtttaaaaacagaaaagagcttttaaaggtaaaaagattaggaccaaaagcttttgagcagtgtgcaggatttttgagaataatggatggagatgaagttttggataacacttcagttcaccctgaatcatataagaaagcaaaggaacttttaaagaagttggggtatgaggaagaagatatagcaaataacaaacttaaagatattgacagcaaggtaagtttacttggaatagaaagcttagctgaaagtctcgatatcggaattccaacacttacagacataataagttctataaaaaaaccaggaagagatcctagagaagaaatgccaaagccaatattaaagacaggtattatggatataaaacagcttaagtcaggtatgacacttatgggaacagtaaggaatgtagctgattttggagcttttgtagatattggagtgcatcaagatggacttgttcatataagtcagctctcagatagctttgtaaagcatcctctagatgttgtaaaagtaggagatatagtggaagttagaattttagaagtcgatgagaaaagaaataggatatctctgacaatgaaaaaatag

SEQ ID NO: 15859 - DNA, 1332 bp, Clostridium acetobutylicum
gtgaattatacacagggttcactatttgaaaacattgaaaacatccctttagcaggtcgtatgcgtcctagaaatttaagtgactatataggccaagaacatattttagaaaaaggcaaggcacttagaaatatgcttgaaaaagacagcattacctccatgattttgtgggggcctcctggtgttggtaaaactactcttgccatgataattgcttcaacgacaaaatgtaactttgttgagtttagtgctgcaacctctggtataaaagaaattaaggatattatgataaaagcagagaaagatagattatttggtattcgtaccttgttatttatagatgaaattcatagattcaataaatctcaacaggatacctttctccctcatgttgaaaaaggagatattattctaattggggcaaccaccgagaacccctccttcgaagttaattctgccttactttcaagatgcagagtttttgtgttaaagccactttctaataatgacattgtaaaacttctaaaaaatgctttaaccgatactagaggctttaaaaataaaaatattcaaatctcagaagaccttttaaccttaatagctgtatattctaatggagatgcaagaaccgcccttaacgttcttgaaatggccgttttaagcagtaaattagaacatggtgtggtaactataaataaaggtatactagaggactgtatgcaaaacaaagctctcatatacgataaaaatggagaagaacactataatttaatttctgctctacataaatccatgagaaacagcgatgtagatgctgctatttactggcttgctagaatgcttgagggaggagaagatcctctttatatagccagaagacttatacgtttttcttctgaagatattggagttgctgatacgaatgcattaaatgttactgttaatgtgtataactcttgtcattatatcggaatgcctgaatgcagcgttaatcttacagaggctgtagtatatctttcactagcaccaaaatccaactctatttacatggcctatgaaaaggcaaaaaaagatgcgaaggaaaccttggcctctggtgtaccccttcaccttaggaatgctcctacaaaactaatgtcagacttaggctattcaaaaggctataaatatgcacatgattttgataataaagtagttgacatgcagtgcttacctgataatttaaaagatgagaaatattattttccaactactgaaggcagggaaaaacttttcaaggaaagattacactatataaaaaagaaaaagcatactgttaataaatctatataa

SEQ ID NO: 15860 - DNA, 711 bp, Clostridium acetobutylicum
atggaagaaagattgcaaaaatatatggctgaatgtggagtagcatctagaagaaaatgtgaaaaaatgattcaggatggaagagtaaaagtaaatggtactattgtgacagaattaggttttaaggttgattataaaaaagatacaattgaattagataataaggaaattaaattagaggataaaaaggtttatgcaattttgaataagcctaaaggatatttaacagcggctagtgattacagaggaaggaaaactgttatagatcttttgaatttcaaggaaagagtgtttccggtaggtagacttgattttaatacaacaggtcttttaattgtaaccaatgatggagaaatatttaataggataatgcatcctagacaaaatgtaaataagtgttatcttgcaacagttaagggtaaacctcaatttaaacatttagatgccttaagaaagggaatagatataggtggatatataaccaaggaagctgaagtttccgtggtatcctttgacggaaaaaattctatattaaagatagttatacatgaaggcaaaaaaaggcaggtaagaagaatgtgtgctgcagtaggttttcctgttgaggaacttaaaagaatttctattggaaatataaaattaggtgacttaaaagagggaaatgtaagaatgttaaataaagaagagatagaatatttaagaagtttataa

SEQ ID NO: 15861 - DNA, 828 bp, Clostridium acetobutylicum
ttggacaaaataactatagaagatcttgaaatatttgcgaaccacggtgttctaggagaagaaaaagtattaggacaaaaattcttattatctctataccttactttagatttaagaaaacctggattgtcaaaaactttgagcgatacagtaaattacgctgaactctctgatagagtagaagaagaatttcagagggaaaatttcgatttaattgaaactgctgctgaaaaagtagccgagtttattttactaaattacgatttaattcaatctgtaaaagtaattttaaaaaaaccttgggctcctgtaaaaaaacatttaaagtatgtttctgtagaaatagaacgaagttggcatacagtttatataggccttggatcaaatattgcagataaatcacaaaatttaaaagatgctcttaaaattatcgatgacaactatttatgcaaaatcacaaaaacttctaacttctatactacaagacctgttggatatctaaaccaagataattttttaaactgcgctgctgaagtaaaaactttaatgacaccaaatgagcttatggactttttccttgaaacagagaagtcgcttaaacgcgaacgaaaaatacattggggtcctcgaaccatagatattgatattttactttacgatgatttagttacctatgatcctcactgcacaatcccccatcctagaatggcagaaagactttttgtcataactccattatgtgatataaacccatacttggttcatcctatatccaataagagattaattaatataaagaatgtcttatcaaaaacacaatctctataa

SEQ ID NO: 15862 - DNA, 465 bp, Clostridium acetobutylicum
ttggatagaacaattactataattaatgaaactttagttgaactttttaatgatattttaactatagaacaaactgctttaaagcagggagggtttaatgacctttctgttactgaagtacacacgatagaagctataggtatgtatgttcccaggaccatgtctgaggttgcagctacacttggaattactgttggcacactaacaacggctgtaggaaatttagttaaaaagggttatgttaaaagagaacgctcagaagaagatagaagagttgttaaaatagcccttacaaagagaggaaagcttgcatatagaattcatgcaaaatttcattctgatatggtaaaggaaacagtaaagggattgagtaaagaggaagagagagtcctaacttctgcacttgaaaaattaaatagattctttagagacaaatatcatattaaaaactgtaaaaaggactga

SEQ ID NO: 15863 - DNA, 1587 bp, Clostridium acetobutylicum
atggaaaacaaaaaatttagtgatttaaaattgaacagtagtgttctaaaagcaatagatgacatggggtttgaggagccatcgaaaatacaagcagaagctattccagttgttatagatggatatgatatgataggtcaggctcaaacaggaacgggaaagactgttgcattcggagcaccaataataagtaaaataaaagacattgatgaaaaagagggcgtacaggcaattatattaactcctacaagagaacttgccattcaaataactgatgaattaacaagattgtctaaatatgcaagagtaagggtactaccaatatacggtggacagtcaatagaaagacaaatgagagccattaaaagaggagtagatgttatagttgcaactcctggaagaataatggatcatataaaaagaaaaacagtaaaattagataaagttaagtttttggttttagatgaagcggacgaaatgcttgatatgggatttatagatgatatagaaggcataataaagaatataagcggtgataggcaaacaatgcttttctcagctacaatgccagcacctataaagaagttagcatctaattatatgaaaaaagaagttaaacatatagcgataataaaaaattctttaacagtagaaagaatacaacaattttattttgaagtaaagaataaagataaatttgaagctctatgtaggataatagatgtagaagaacctgaaacaaccattatattctgtagaactaagagaggtgtagatgaactagttgaatctatgcaatttagaggatacaatgttgagggtatgcatggagatatgagccaaaatcaaagaataaatacacttaaaaagtttaaagaaaataatattgactttttagttgcgacagatgtagcagctagaggaatagatgttcataatgtatctcatgtaataaactatgatatacctcaagatatggaatcatacgttcatagaataggaagaactggaagagcaaatgcagaaggtatagcttattcattagtaactccaagagagtatgtaatgattaaacaaattgaaaaatttacaaagagcaaaataagaagaaaagaaatacctacaatagatgatatttttgaaactaaatacaatactttgacagataaaataacaaaaaatatcgaaaaagatgattttaaaaagtatatcccatttgtacaaaagcttgatgatgaatttaatttagtagatgtatcagcagctttagtaaaaatgatttttgataaggaaatgggctttgattattctgatgacgataagcttaagagtgatgaaagtgttagattattctttagtgcaggaagaaaagataaactaacagttaaaaaacttcttgagtttatagataatgcatcaggtgttgaaggaaatgagataggagatattgatatccttgataaatttacatttgttgatgttccagagagactaagagatgttataataagaacctgtgatggtaagaaattaaatggaagaaaagtaaatatagaagtagcaaagtctaaaaagaaatctaaataa

SEQ ID NO: 15864 - DNA, 3576 bp, Clostridium acetobutylicum
atgtttcttaaatccattgaaatacgaggctttaaatcttttgccgataagacagatttgattttcaaaaatggtataactgctgttgttggtcctaatggaagtggaaaaagtaacatttcagatgctgtgctgtgggttcttggagaacaaagtgttaagaacttaagaggcggtaaaatggaggatgtaatatttgcaggaacccaatacagaaaatcagttggactagctcaagtatctttgattcttgacaattcagacaaacaacttaatcttgattattctgaagttactgtaagcagaagattatatcgatctggagacagtgaatattatataaataatactaaatgcagacttaaagatatacaagaattatttatggatactggtatcggtaaggaaggatactccataattggtcaaggtaaaattgaagctgttttaagcggaaaaccagaggagagaagagcccttttagaagaagcagcaggtatagtcaagttcaagactagaaaagtagatgctgagaaaaaacttgaaaacactaatcaaaatttagtgaggataaatgatattttaagaacttatgaagaaagattagaaccacttagaatagaaagtgaaaaagctaaaaggtttgtggaattatcagatgaacttaaaacaaaggaaataaacaccattatatattcaattgacaatatagattacagaattaatgatttgaaacaaaaaatggctgatttgaagctatctattgatgaaaatgttaaagataaagaaaaaatttctttagaattaaaggtggctactgaaagcttggatgagtttgatgctaaatattctagtaataaaacaaaatactatgagagtaaatctgagcatcaaaaaatactttcagagatagaattattaaaagaaaaaacaagtaactcagatgtggctaaaaataaactctataaagaaattgaagatttggataacagcatcgtaaatctaaaaagtagatacgagattcaattaaaaacattaacagaagacaaaaattacaataaagagttattaagtaagataaacaaaagtgaagaaaagaagaaaaatattgatggacttattgaagagtgggaaaagtcaataaaacagtataaaaatgatgctatagacataatcagtactatttctcaaaataataatgaggttgtaatattaaaaaaagaaattgaaagtaatgaatcaaagctggaaagcataaaaagggctggagaaggatattctaagtccttaaaaataaatgaggttacaaaaaacacactgagtgaagagctagtaaaaatcaatgataaaataagtggatatgaaaatcaaataagagaaaatagaagcaaaatatcaaaattgaatagaatcatatctgatgaggaaaaattaaacagagagttaaattctaagtctaataagttagaagctaataaaaatatgcttatcaatctcgagaagcagtatgagggatataataggtctgttaaaaatcttatgcagcatgttacaaagggctttgttgatgtaaaacctgagagttcatttgtacttggagaagttataaaagtaaaaaaggaatttgaaactgctgttgagatatcactcggggctgctatatctgacattataactctagatgataacattgcaaaaaaacttataaactatttaaaatctaaaaatctaggaagagccacttttttgcctcttaatattataaagggtaggaaattaaatatttctgatgctactaggcatgaaaaaggttttataggcatagcaagtgaacttatagattatgacagtacgtttttgcctgcagttaattatgtacttggaagaactgtaattgtagataatatggatagtgcacttaagattgcaaaattaaattcatattcatttaaaatagtaaccttaacaggagaggttgtaaatccaggaggttcacttacaggaggaagtacatattcaaaggcagcaagcataataggtagaaaaagagaaattgaagagttaaatctagagcttaataatgtatctcaagcattggagcagtcttcaaataaaataattgaaaataagaaagttgtaaaagaactagataacctttgccttgatttaacagacacaatccatggagaaaaaatagaacttacaaaaatcaaggaaagattaaagtccatagacattgaaagtgaaaaattaaataaaagctataatacctctgttggtgaaataggcttcattaaggaaaaaataaataagcatttagaaaaactcaaagtaaaagaggaagaaaataaagctttaaagttaagagaagccaataacaataatttaatagatgaattagagagaaagctaaaggatgaaaattctaaagttttaaatttaaatgaagaaataatgtctatgaaggtagataaagcaaaaagtgatgagatgcttatgtcttcaactagagaaattgaaagatacaaggttgaaatgcataacatggaaaataagaaaataagcctaaaaaatgagattgacgattttgaaaatcaagtcaagattctaaaaaataaaattgagtataataacggtaaggtagttcaaataaaacaggtaattgaagaacttgaaaattcctttaaggatagcgaagtagaaagatctaaattaaagggaaacatagaaaacaagagaaattctcttcaaggtataaacttagttttacaaaaattagagacagaaaagcataggtatgagataaatttagccaaaattgaaacagaaagtgaaaatctctatgaaagattaaacagcgattttaaattaacttattctgaggcagctgagtttaaagaagaaattgaagagatgataagttataagaaaaaaatagatgagttaaaaagagaaataaataaaatgggagtagtaaatgtggctagtattgaggaatacaaagaagttaaagaaaaatacacatttatgaattctcaaaaggaagatttagataacgctaaggatgaacttatacgtgttatagaagagatgacttcaaaaatgagaactgtgtttaatgaaaactttaagaagctaaatgagaattttaaaattacatttagagatctttttaaaggtggaaatgcagatcttatattaagtggagatgatgaattaaacagcagtatagaaataaatgttgagcctccaggtaaaaaacttcaaaatataaatttgatgtccggaggagaaaagggtctttcagctatagcgcttttatttgctatattaaaaatgaaacctactcctttttgtatacttgatgaaattgaggcagcacttgatgatgcaaatgtggcacgatatgcagaatttttgagaagattttctgagaacactcaatttattgtaatcactcacagaaaaggtaccatggaagcaagtgacgtactttatggtgttacaatggaggaaaaaggtgtttcaaaggttatatcattggacttagatagtgatagagaaaacgtaagttaa

SEQ ID NO: 15865 - DNA, 2820 bp, Clostridium acetobutylicum
atgaaagataagatagtaataaaaggcgcaaaggttcataacctaaagaatgtagatttaacggtgccaagaaatgagtttgtagtttttacaggactttcaggttctggtaagtcttctcttgcctttgatacattgtatgcagaaggacaaagaagatatatggaatccttatcttcctatgcaaggcagtttttaggtcaaatggataagcctaatgtagaatacatagaaggtttgtcaccagcaatttctatagatcaaaagactactgggagaaatccaagatctacagttggaactgtaacagagatatacgactatttaagacttttatatgctaaaataggagttccacattgtcctaattgtggaaaagaaatttctcagcagactgtagatcaaatagtggatagtgttatgaaacttgaagaaagaacaaaaattcaagtgcttgctcccgttgttagaggaagaaaaggagagcatacaaaattaattgcacatataaagaaaagtggatttgttagagttagaattgatggagaagtatatgaaatagatgaagatgaaataaagcttgataaaaataaaaagcatcacattgaagctctagtagacagaatagtaataaagcaaggtgttgaaggaagacttacagattcagtagaaacagcacttaagctagcagaaggacttgttgtaataaatgtaatgggaaaagaagatatgctttttagcgaaaattttgcatgtccggattgcggaataagtataggagaaatttcgcctagtatgttctcgtttaatgcaccatttggaaaatgcgatgtttgtgatggaataggaactttacttgaaattgatgaggatttagttatccctgataaatcaaaaagcataatggaaggtgcaatagcgccttggggagaaggaaggttaaaggaagagtcatggacttttggtgttcttaaggcgctttcaaagaagtataaacttgatataaataaaccaattgaggattatgatgagaaaactttgaatatacttttatatggcgcaccagatgtgcttaaggttaactatgttaaggattctcaggaaatggtatttaatcaccattatgaaggcataattaatcaaatgaagagaagatatatggagagtaattctgattacataaaatctgaaatagaaaattatatgagtaacaatccatgtccaaagtgcaaaggagcaagactaaaaaaagaagtgcttgcaattacagttggaaacaaaaacatatttgaattttgttctatgccaataagagaagaagtatcttttattgatactttagaactttcaaataagcataaaattataagtgctcagatagttaaggagattaaaagcagacttgaatttttaataaatgttggtttggattacttaaatcttgctagagaagctagaacactatctggtggtgagtctcaaaggataagacttgcaactcaaataggttcaagtttagttggagttctttatatattggatgaacctagtataggacttcatcaaagagataatgatagacttatagcaacaatgaaaaatcttaaagatatagggaacacacttattgtagttgaacatgatgaggatacaataaaggctgctgattttattgttgatataggtcctggagctggagaacatggaggagaaataattgcggcaggaagcttagaggatataaaaaactgtaaggagtctataactggtcaatatttaacgggagttaaaaagatagaagttcctaaggagagaagagaagcaggcaaaaactttatagaaattgttggagcaaaggaaaacaatcttaagaatgtaaatgttaaatttccagtaggattatttacttgtgttacaggtgtgtctggttcgggaaagagtacacttgtaaatgaaatactatataaagccttaaataaaaaaataaaccgttcaaagcttaatccaggaaaatataagagcattaacggtatagaaaacattgataagattatagatataaaccaaagtcctattggaagaacaccgagatctaatccagcaacttacacaggagtgtttgacataataagagagctttatgcatctactaaggaggcaaagttaagaggttacaaggctggtagatttagttttaacgtaaaaggtggaagatgtgaggcttgtaagggtgatggaatagtaagaattgaaatgcagttcttatctgatgtttatgtaccttgtgatgtttgtaaaggcaagagatataatagggaaacattagaaataaagtataaagataaaaatatagatgacttattaaatatgactgtagaggacgcattgaagtttttcgagaaccttcctagaataaagaataaacttcaaactttagcagatgtagggcttggatatgtgagacttggtcaaccttctactcagctctcaggtggagaagctcaaagaataaagttggcttatgaattatcaaagagaagtacaggaaaaacactatatatacttgatgagcctacaacaggacttcatacagacgatgttaagaagcttataagtatacttcaaagacttactgatatgggaaatacagttgtggttatagagcataatttagatgttataaaatgtgcagattatatagttgacttaggacctgaaggaggggaaaaaggaggtactatactttgcagtggaacacctgaacaggtagctcaaaatagttcctcatatacgggacaatatctaaaaaagatgttataa

SEQ ID NO: 15866 - DNA, 618 bp, Clostridium acetobutylicum
atggatgttagattaacgccaatggatataaataataaagagtttaggagaacattaagaggctttgatactgaagaagttgatcaatttttagatcaggtttcagagaattatgagcagctttataaggaaaattcagagcttaaggaaagaaactctatattaaaagagaagttagcacattatgagaaaattgaagacacaattcaaaacactttgattttagctcaaaatgctgctgaacaagcaaagcagtctgctaagacggagagtgacttgatacttaagaatgctaatgatacggctcaaagaataattgataaagcaaatcaagatgtaataaaaataaatgatgattacgataatgttaagcagcagtttatgagatttagagctaaatacagaaatttcatgaattctcagcttgatatgtttaattctcttgaaaatgattttgaaagcaattataatgtgtcaactactgaaagtataaatgaaaaagagattgaacctgaaagtgtaaaaccatcatcagtagaagtagaaagtacatttgatgattctgataaaagctttgctgatgatttagaagaggttaaaaagttctttgttaaataa

SEQ ID NO: 15867 - DNA, 1194 bp, Clostridium acetobutylicum
atggcaaaggaaaaatttgaaagaacgaaaccacatgtaaacataggaacaataggacacgtagatcacggtaaaacaacattaacagcagcaataacaacaatattagcaaaagaaggaaaagcaaaagcattcaattacgaagagattgataaagcaccagaggaaaaagaaagaggaataacaatcaacacagcacacgttgagtatgaaacagagaatagacactatgctcacgttgactgcccaggacatgctgactatgtaaagaacatgattacaggagcagcgcaaatggatggagcaatcctagtagtaagtgcagcagatggtccaatgccacaaacaagagagcacatactattggcatcaagagttggtgttgaatatatagtagtattcttaaataaagcagaccaagtagatgatccagaattaatcgacttagtagaaatggaagtaagagagttattaaacgaatatggattcccaggcgatgatacaccaatcgtagtaggaagtgcgttaaaagcattacagaatccagatgatgcagaagcaataaaaccaataaaagacttaatggcagaagtagatgcatacatcccaacaccagaaagaccaacagataaagcattcttaatgccaatcgaagatgtcttcacaataacaggaagaggaacagttgcaacaggaagagttgaaactggaacattaaaagttggagacgaagtagaaatcgttggaatgaaagatgaaataacaaaagtagtagtaacaggcgtagaaatgttcagaaaaatacttgatagtgcattagcaggagataacatcggagcattattaagaggagtacagagagaagacatcgaaagaggtcaggtattagcaaaaccaggttcaataactccacataataaattcgtaggtcaagtatacgtattaaagaaagaagaaggcggaagacatacaccattcttcaatggatatagaccacaattctatttcagaacaacagacgtaacaggatcaatccagttaccagatggagtagaaatggtaatgccaggagaccacatagatatgacagttgaattaataacaaaagtagcaatgggagacaacttaagattcgctatcagagaaggcggaagaacagttggatcaggagttgttactagtataatagagtaa

SEQ ID NO: 15868 - DNA, 1227 bp, Clostridium acetobutylicum
atggaggaagtaatagaaagatttttaaagtacgtaaaatttgatactcaatctgatgaaaattcaaacactgttcctagtacggataaacaattaaagctgggaaaaaatcttgtagaagaattgaaagaaataggactttcaggagtatctattgatgataatggatatgttatggcatatttgccagctaatatagagaaaaatgtaccagctttgggattcatatcacatatggatactagtccggatatgagtggagaaaatgttaatcctcaatttgttaaaaattatgatggcaatgatattgttctaaataaggataagaatatagttctttctccaaaggattttccagaaatattgaaatataaaggcaaaactttaataacaacagatggaaacactcttttgggagcagacgataaagctggtattgcagaaataattacagctataagctatatttcaaagcatccagaaataaagcacggaaaaatttgcataggatttactccagatgaggaagtaggaagaggcgctgattactttgatgttaaaaagtttggagcagatgttgcctatactgtagatggcggagattttggtgagcttgaatatgaaaactttaatgctgctagcgctaaaataacagtacatggtagaaatgttcatccaggttctgctaaggataagatgataaattctatttctgttgcagaggagtttatgaggcttatgccaaaagaacaggctccggagtatactgaaggttatgaaggtttctatcacatagttgactttcaaggtagtgtagaggaaactaaacttcaatatataataagagatttctctaagaataaatttgaagataagaagaagctaatgcttgatgctgctaaatttataaatgagaaatatggaagaaatttagttgaaatagaagttaaagatcagtactataatatgaaagaaaaaattgacgaagtaaaatatgttgttgatatagcatataaggcaatggaagaagttgaggttaagccattagtaagacctataagaggaggaacggatggagcaagattatcttttatgggacttccaacacctaatttatttactggtggagtaaactttcatggtaaatttgaatatattcctacttttgctatggaaaaagcagtagaggtaatagttaagatagttgagctatatgctgaaaaataa

SEQ ID NO: 15869 - DNA, 975 bp, Clostridium acetobutylicum
atgaaaggaatcgatatttattcaggacaaggaagcgtagattttaatgcagttaaagaaagtggggtagaagttgtttatataaaagcaacagagggattaacatatacggattcaacttacaaggatttttatgatggagcaaaaaatgcaggacttaaaattggtttttatcattatttaagagcaaatgacccaacaagtgaggcagaacatttttttaatacaatttcaggactttcattagattgtaaatgtgctatagatgttgaagtaacattaggtcaaagtatcgaccaaataagttcaaatgttagaaaatttgcggattatttgataaataaaggattggatgtttgtgtatatacctatactaacttctataaagataatttaaatagtacggttaaagatttgcctttatggatagctgaatatggcgtaagtaagcctaatatagatgcttcatatgttggatttcaatattcagatagcggttctgtgaatggtataagtggttctgctgatttagatgaattttcagaggggatacttgttggaggtacagttgttatagatccaggacagggtggagatgataatataaaggctattcaacaggatcttaatatcttactaaaaagagggctagaagttgatggaatagaaggaccagagactgaggctgctataaaagattttcaatccattatgggacttacagtagatggaatttggggaacaaatacttcaggggctgcacagcaaattttttcaagacctctagatggagttgcatatcctcattatgaatatgcaacaagatatattcaatatagagttggagcaagtgtagatggtacctttggtagcggaacaaaagcaaaagttgcagcttggcagtcaaatcagggacttatggctgatggtgttgttggatcggctacttggtcaaagctattagatgaaaattaa

SEQ ID NO: 15870 - DNA, 1023 bp, Clostridium acetobutylicum
atgtgtaaagacattaagatacttgcaatagaaagtagttgtgatgaaactgccgcggctgttgttgtcaatggcagaaaggtattatctaatataatatcatcgcaaatagatatacataaaaagttcggaggagtcgttccagagatagcatcaagaaagcatatcgaaaatatatcattggtggttcaggatgctataaaagaagctggtgtagagcttaaagatattgatgctgttggagttacatatggaccgggacttgtaggagcgcttcttgtaggacttcaatatgccaaaggacttgcgtactcaataaacaaacctcttataggagttaatcatatagaaggacatataagtgcaaattttatacaatacccagatttaaagcctccatttgcatgtcttgtagtatctggaggacatacttttatagtatatatgaaagattacggtgagtttgaagttttaggtcagacgagagatgatgctgcaggagaagcttttgataagattgcaagagctataggtcttggttatccaggtggacctaagattcaggaaatggctaaaagaggagatgaaagtgcacttcaatttccaagagctaagtttcatgataattctttggatttctcttttagcggagttaaatctgcagtactcaactatttaaatactatgaagatgcaagaaaaagaaataaatagagcagatgttgcagcatcatttcaaaaaaatgttgttgatttcctggttgataatactattaaggcttgtaaaataaagaagatagatagaatagcagttgcaggtggtgtggcctcaaacagcttcttaagggagacaatggtaagtcgaggaagagagaatgggatagatgtattgtttccagcaccaatactatgcactgataatgcagcaatgattggaagtgcagcgtattttgagtttaaaaaaggaaatattgcacctcttgatttaaatgctatacctaatttgaaactaggggaaagataa

SEQ ID NO: 15871 - DNA, 807 bp, Clostridium acetobutylicum
atgtataaactaatcgcacttgatatggatggaactcttttaaacgatgataaaataatatctaaaagaaataaagaagctattaaaaaagctaaaaacttaggttataaggtcgtgttatctactggtagacctttaaaaggtgtagagcgttatcttaaggaattggacttagtcaatgatgatgattacgctatagccttcaatggtggcttagttcagaatacaaaaacaggtgaagttttaggtaaggaattaatgaagtttgaagatttagatagattatataagttaagccaaaaatttaatgtaaacatacatatgttaagcataaatgagtgtataactccaaagaaaaacccttacactgaagttgaagtcaacataaatcagattccattaatcgaaaaaaactttaacgaattgccccatgatactgtcattgtaaaaataatgatgatagactctaaagaaaaactagataaagtagaaaaacttcttcctaaagaaatttatgatgactactcggttgcaagaagctctgatatatttcttgaattttcacccaaaggagtgcataaaggagttggcctcaaaattttatctgagcaccttaacctaaagaaagaggaactcatagcagttggcgatgcaggaaatgatatagctatgatagaatatgcaggtcttggtgttgcaatgggcaatgccttcccttatgtaaaagaatcagctgactatgtaactgataacaatgaaactcacggtgtagcaaaagttatagagaaatttatgcttaatcaataa

SEQ ID NO: 15872 - DNA, 174 bp, Clostridium acetobutylicum
atggctaaaatttcaataacattaaaaaagagtttaattggaagaaaaaaagatcatatagctacagttaatgctcttggacttaagaaaataggtcgtacagtagagcatgaagatactcctcaaattagaggtatgataaaaaaagttgattatcttttagaggtaaaataa

SEQ ID NO: 15873 - DNA, 1308 bp, Clostridium acetobutylicum
atgataataggaatatccagtagactttttaaaggtggaacaaattttcccggcagagtagccttaaagatagataagaatattctttctacggtaaccaaaaattacaatatagtatttataacgggaaccaacggaaaaactactaccactaatttaatctacagcatactaaaatcaagtggcaaagaggtaataacaaacaatacaggcgcaaatctaaagccaggaataacttcgtgtttcataaaaaactttaaatttagtgattcaaaagaaaaatatgcagtaatagaaattgatgaggctaatttgaaatttttaacagaatatacaaaaccaaaggctataattataactaacctttttagagatcaacttgatagatatggagaagtttacactactctattaaaaataatggaaggagttaataaggctcccgaagcaacattaatattaaacggtgacgaatcccttctcggaaacttagatgtacctaataaaattatgtactacggctttgactgtcctattaacgaagaaaacaaaataagtataaatgcagatgctaagttctgtaacaaatgcaaacatccttatgaatatgaatttataacttataatcatttaggaaagttcttctgcagtaactgtggatacaaaagacctaatttagattattatattgatagtgtaaaagctcttgatccttctggttcctcaatatctataaatggtacagacttttatttaaatcaacctggtgtatataatatatataatgcactatgcgcttactctgtagcaaaatttttaggtatagaggacgatactatatttgattctctaaagaattcaaaaagtagttttggaagacaagaaaccatagatatagccggaaaaaatgttaaaataattttagtaaaaaatcctgccggatacgatgaagctatcaaaactatatctcttgataaaagagaattaagcttagccgttttattaaatgacaattatgctgacggaagagatgtatcttggatatgggatgtagattttgaaaaactaagcaatttaaatataaataaggttatggtttcgggtattagactctacgatatggctatacgcctaaaagttgccggtcttaataatgataactttgaacttgaaaataactttgaagaattacttaatagtatgaagaattgtgatggtgaaataatttatgtacttgctacatatactgcaatgatagaccttaggaaattcctttattctaaaggctttataaaaaaactttggtaa

SEQ ID NO: 15874 - DNA, 1068 bp, Clostridium acetobutylicum
gtgataaaaataataaaaaaaacaacagtaattgcaatgacgatagctatggttactacagtattttcaggatgttctaattctaatagagcaatagagaagaaagaatcaactaagatgacagtaacagatatgtcaggagaaaaaacgcaagtaccaaaaaatagtaaaagaataggtgatggttggcctgcacataatgaagtgttatgcatgcttggatatggaaataatgttgtttcaactatacttactcgcaaacaggagccatggttatataaagtaaacccgcagatgaatgagtctgaaactgtttttacaaaaacagatgtgaatatggagtcacttattaaaacaaaaccagatattgtctttttacctactagttataattttgataataaaataaaaaaagttggtatcagtgtagtaaaattgaatttcactaattttgatgaattaaaaagttgtttcaaacttactggaaaaattcttggaagtaagtcagagaaaaaagcagataaatacaataaatatttagataataagataaataccgtatcaaaggttactttacaaataccggagaatcagaaattgaaagttttacatatacaaaacatcgcaccgttaacagtagatggatctaatactattattgattcttggattaaggttgctggtggaattaatgtagcatcagaagtaaaaggaaatatgaaagaggtttctatggagcaaatattaaaatggaatcctgatgttataatactgggcgctgatgttaaagatgaaggtgcgttttttaattctagtgcatggaagaatataaatgctgttaaaaataataaaataattcataatcctaatggagcttttatgtgggatagatatggtgctgaggaagcactgcaaatacaatgggctgcaaaaacactatatcctaataaattttctgatttagacattactaacgaaactattaaattttacaaagaatttttaaattataatcttactaaagaggaagcagaacgaataattaagggaaaggcaccagttgattag

SEQ ID NO: 15875 - DNA, 468 bp, Clostridium acetobutylicum
atgagggtgggaattggttatgacgtccataaattagttgaaaatagaaaattaattcttggcggcgtagaaattcaatattcaaaggggttattaggtcactctgatgccgatgtacttgttcatgctataattgatagtatactaggtgctgctggtcttggtgacataggcaagctattccctgatagcgataataaatacaaaggaatatccagtctaaaattattaaaggaagttaatgcactaataaaggataaaggctataaaattggaaatatcgactccactataatagctcaaaaacctaagatttcaccttatatagaagatattaaaaagagtttatgcaatgtattagatattgatttaggaagtataaatataaaagctacaacagaagaaggtcttggatttacaggtaggggcgaaggaatatcaagtcaaagtatttgcttactcatctaa

SEQ ID NO: 15876 - DNA, 213 bp, Clostridium acetobutylicum
atgcaaaaggatatacaacctgaataccatcaagatgcagttgttaaatgtgcgtgcggaaatactttcacaacaggctcaactaaaaaagaattaaaagttgatatttgctcaaaatgtcatccattctttacaggacagcaaaaaattgttgatgttggtggaagagttgagaagttcagaaaaaaatacaacttgtcagcagacaaataa

SEQ ID NO: 15877 - DNA, 1344 bp, Clostridium acetobutylicum
atgaaagatattgaaagagatgatttgaaatatatatggcatccttgtacacaaatgaaggattatgagaagatgccaccaatagtaatcgataaaggtgaaggctgttatctatatgatgttaatggaaattcatatttagattgcataagttcttggtggacaaatattttcgggcatagtaataagagaattaataaggcaattgaaaagcagttaaatgaaattgaacatgttatttttgcacatttttcaaataagcctgctgtagaattttctaaaagtcttattcagattgccccagagggattagacaagatatttttttcggataatggatcttcagctgtagagatagctctaaaaatgagttttcaatattatcagcaaacaggaaaagttaaaaagactaaatttgcagctttaactaatgcttatcatggagaaactataggggccttatccgttggggatttagacttatatagcaaaatttataaaccacttcttatagataccttaagaatccaagggccagattgctatagatgtaaatacaataaggaaagacatagctgtgaagctgaatgttttgaggaaatggagaaaagtcttaagaaacataatagtgaattatgtgctattattattgagcctatgattcaaggggcggcaggaatgaaaatgtattctcctaagtacttaaagaagcttagatatgcatgtgattattatgatataagcgttatatttgatgaaatagctgtggggtttggaagaacaggaaaaatgtttgcctgcgaaaatgctgacataagccctgatataatgtgcctctcaaagggaattagtgcaggctatatgcctatgtcagttgttttaactactagtaaaatatacaacgcattttatgatgattatgtaaatttaaaggctttcatacacagccatacgtatgctggaaatgctttagcttgtgcggcagcaattgaaagtcttaaaatatttaaagaagagagtataatagaaaagaatatagggaaatccaagcttattgagaagcttacaaaaaatagagcaaggaataataagtttattggtgatattcgcagtctcggtatggtgacagcaatagaactggttaaagataaagatacaaaggagagctttgactggaaaagtagagtaggatatgaaatatataaaatagcattaaaaaaaggccttcttttaagacctataggtgatgtgctttattttatgcctccttatagtattggagaaaaagatatagaattcatggtggagaaatgttttgaaagtatagagcagtatcttgaataa

SEQ ID NO: 15878 - DNA, 2220 bp, Clostridium acetobutylicum
atggtagaacttcgttgtgttattgaagctgttgtgttcaaaaatgaagaaaatgggtatgttgttgcaaacgcaaatgcagaaggaaaagataaaattacaattgttggatgcataccgtatattatggaaggccaatctttaaagatttcaggagaatggattgttcatccacagtttggaaagcaatttaaaattgaacgctgcgaagaaatactacctaattctttattaggtatagaaaaatatttggcatcaggaattatatcgggaataggtcctgtaacagcaaaaaagatagttaataaatttggagaaaaaactcttgagatattagataatgatatatatagattaagtgaaatagagggaataggtaaaaagaaaatagataaaatatatgaggcgtattcagaacaaagagaagtaagaaatattatgatttttcttcagaattatggcgttacgcctaaacaatgtgtgaaaatatataatcactataaatctaaggctatagaggttgtgaaacaaaacccatatattcttgtagaagagatatcaggaataggttttaagacggcagataaaatagctcgtagtcttggaatacaaggaaactctccatttagaattgaaagtggagtatgttatgtaataaatgaattttgtgctttaggtaatacatatatgcctatagataaacttgtaaagaactgtattaatgtattaaatgtaaaaaaagaagaggttgaaaaagcaatatatgaatgtactctttctcaaaagataaaggttgaaataataaatggggaaaattgtgtttttacaatggaatattactattgtgagataggaataacaagaaagataataactcttgcctatgatagttataaaagcttagagatagatgtagaccaaaagataatacagtttgaaaatgaaaataaaataaaatttgcaccatcacaagtagaagctattgaaggagcgttttcaaatggtatagaagtaataacaggagggcctggtacaggtaagacaacaataataagatgcataacatatatatttgaagaattaaatatgaaggtatttatggcagcacctacaggaagagctgcaaaaagaatgtccgaatcaacaggtagggaggccaagaccatacatagaatgctggagcttggatatgaagatgaggtgttttttgataataataactatagtacacttcaatgtgatgttgtaataatagacgaggcatcaatgatagatgttgttttaatgaacagtctattgaagtcaataggtatgggtactagggttattatagttggtgatgtagaccagcttccttctgtgggacctggaaatgtgctgagagatataattgaaagtaaatgtgtaaaggtcattagattgaataatatttttaggcaagcaaaggaaagtatgattacagtgaatgcgcataaaatcaatagtggtgaaatgccccttctaaataaaaaggataaggatttttattttatacgagaagataatgcagaagctataaccaatactataattagtttggtttacaagagactgccactttttaataagtcttggaaggctgctagggatatacaagtgttagcacctatgaaaaaggggatagcaggtgttgcaaacttaaatgtaagtcttcaaagcattattaatcctcctcataaaagtaaagatgaaataaaatttagagataatatatttagagttggcgacaaggttatgcaaataaaaaacaattatatgttaaaatggaatagaataaatggagatggcgaaaagacaggagaaggagtttttaatggagatatagggtttataagtaatatagatgaggataataatgtgatagttatttttgatgatgaaaaagaggttacatatgaaagaattaacttagatgaacttgaacttgcatatgcaataactatccataaaagccagggaagtgaattcccagtagtggttcttcctatgactatggggccacctcttctgatgaataggaaccttctttatacaggaattacaagagcaaagcagctagttgtaatagttgggtttccaaaagcaataaaatttatgatagataacgataaaagttttgaaagatattcaggtctcaaatggagaatcgaagatataataaaagaagagagtgaggagtga

SEQ ID NO: 15879 - DNA, 669 bp, Clostridium acetobutylicum
ttgggtcagaaagttaatccgcacggtttaagagtcggcgttattaaagagtggaacgcaaaatggtatgcaaatagtaaaaacttttcgtcatatctagtacaggataacaagataagaaaatttgttaaaaataaactttcaagtgctggagtttctagaattgaaatagaaagagcagcaaaaagagttaagcttaatatacacactgctaaacctggaatggttataggtaaaggtggtcaaggaatagaagctttaaagaaagatttagttaattttgttgacaaagaaaatgttcttatcaacatagtagaagttaaaaatagtgatgcaaatgcacagcttatggctgaaaatatagcacaacaacttgaaagaagaatatctttcagaagagctatgaaacaaacaatacagcgagctatgagaacaggagctaaaggagtcaaaactgcttgtgctggaagacttgctggagctgaaatagcaagaactgaacagtatcatgaaggtacaattccacttcaaacattaagagctgatattgattatggatttgcagaagccgatactacttatggaaaaataggagtaaaagtatgggtttataatggtgaaattcttcccactaaaaaaattgaaaaaaaggaagaagctaacgcataa

SEQ ID NO: 15880 - DNA, 1221 bp, Clostridium acetobutylicum
gtggataaaccagagattttagctccggcaggaaatctagaaaaattaaaaacggccataaattttggtgcagatgctgtatatttaggtggtaataaacttaatttaagggcttatgcagataattttacaattgaacaattaaaagagggaattaagtttgctcatgatagaggaaaaaaggtatatataacagtaaatatatttcctcatgataaagatttagttggattagaagaatatcttaaggaactagatgagattgatgcagatgcaatattagcagcagatccaggaattatagcggtggcaaaagaagtggtgcctaatttagaaattcacttaagtacacaagcaaattgtacaaattataaatctgctttattttggcataagcttggagtgaagagagtagtaatggctagagaattaagccttaacgattttaagaagctaagagaagaacttcctaaaagctgtgaaatagaggcatttgtacatggatcaatgtgtatggcatattcaggcagatgtgctttgtcaaattatatgacaggtagagatgctaatagaggagaatgttcacagccatgtagatataaataccatttatttgaacaagaaaaaggagaacaaaaagatattactgaaaatggtaaaggaacttacataatgaactcaaaggacttatgcatgatagagcatattccagagcttattagttcaggaattaattctcttaaaatagaaggcagaatgaaaagtgccttttatgttgcatctgtagtgaaagcctataggcaagctgtggattcttatgtagaaaatccagataaatatgtttttaatcccaaatggatggagaacttaaaaaaaccaagtcatagaccgtatacaacaggtttttattttggtgaagaagtaaaacaacaccataagacttatgcttatattcgcgattatgatatcgtaggagttgttaaaaaatatgataaggaatcgaaaattgcaacaatagaacaaaaaaacaaggtttataatggaaataaggttgaaatattatctcctaagggggataatatagttatgtcaattaaggatatgcgaaacaaacaagggaaagttatagatagtgcaccttctgcacaaatgatcttcactataaaatgtgatgaggaattaaaaaaagatgacatacttatgaaagccagggaggaataa

SEQ ID NO: 15881 - DNA, 468 bp, Clostridium acetobutylicum
atgaatgcgaaaaatgaatgtgcatattacaagtctccaatcggaaatttagagataaaggcattggatgaaaaggtgtcagagataaattttgttgaagctatgggagaggaaaattttcaaagtgatgtactaaaagctgctttgattcagatagatgaatattttagaggaaaaaggaaacaatttcatttaaggctatttatagatggtactgaatttcaaaaaaaggtttggaatgagcttacaaggatttcttatggggaggttgtaagctatggtgaagtcgcaaaagccataggaaataagaatgcatcaagagcagttgggggtgcaaataacaagaataagatccccataataataccatgtcatagagtaataggaagtgatggaagacttattgggtatgacggcggaatttggagaaaaaagtggctattagagcacgaaagaaaatttaaatag

SEQ ID NO: 15882 - DNA, 474 bp, Clostridium acetobutylicum
atgattaatatttcatctaatgattcaataagaagttttgtttttcaaaatggggataaaaaggattttccgctgcttactataggaagaaatagttatataaatgatatggatattcaagtgtctccaggtagtgagattgtaaacattcatataggcaattattgttctattgggtacaaggttatgcttttggtagatagaaatcatgattataagtctatttctacggctccaatattagagatagaaagaaaattgcatagaaaaggacagataatcataggacatgatgtatggataggaaataacgttatcatactttcgggagtaagaataggtaatggagcagtaataggggctggaactgtagttacaaaaaatgtaccaccctatgcaattgcagttggaaatcccatgaaaataataaaatatagatttgatgctatcgagataaaaaacttcaaagcataa

SEQ ID NO: 15883 - DNA, 246 bp, Clostridium acetobutylicum
atgaatattgattctcatacttttttactaggaatgcaatatctaggtgcaggtctagcagcaattggatgtattggtggaggtgtaggtataggtactgttacaggtaaagcagttgaagcaattggaagacaaccagaatcagcttcaaaagttatgcctacaatgataatgggtttagcatttgctgaagttacatcattatacgctttattcgttgctataatgttattatttgttaaataa

SEQ ID NO: 15884 - DNA, 900 bp, Clostridium acetobutylicum
atgtattcagaatgtccatattttagagaaacaaacaactgtcctgtgccacctacaaattttccgcctcagcatcaaaatcgtcagccgggaatagagagcgtaatgcgtcctagacctatatataataatccatgctattatgcctcaggaaaactgagaaacaaggttgcattaatcactggaggagatagtggtataggaagagcagcagcggttgcctttgctaaagaaaaagcagatgtagctatagtatatttgtatgagcgtaatgatgccatggaaacaaaaagggttatagaatccttagggcagagatgtcttaccattgaaggagatgtgagaagagatggattttgcagggaagctgttgagaggactataagaacctttggaaatcttaatattttagttaacaatgcagcagttcagtttcctcaagatagtatattaaatataacaaatgaacagctagagaacacttttagaactaatatattttctatgttttatataactaaggcagctcttccttatcttaaatatggcagctcaattattaatactgcatcaattacagcatatgaaggtgaaaaaacattaatagactattcatctacaaaaggtgcaatagtatcctttactaggtcgctttcaaaatctttagtagataagggaattagagtaaatgccgtagcaccaggacctatctggacaccacttataccagctagtttttcagctgcaagagttgcaacctttggaaaagatactcctatgaagagagctggtcaaccgtatgaacttgctcctgcatatgtgtatttggcatctgatgattccagctatgttactggtgaggtaattcacataaatggtggaagaatggtaaccacttaa

SEQ ID NO: 15885 - DNA, 729 bp, Clostridium acetobutylicum
atggaaagattagataaaatcatatcaaacatgggatatgggtctagaaaagatgtgaaaaaaataataaaagatggaagagttaaggtagatggcgaagttgtaaaagataataacaagcaattagatccacaaaaatcaaagataattgtaaatggcgaagagatatcctataaaaaatacatatatttaatgatgaataagccagatggagtaatttcggctacttctgatgattatgacaagacggtaatagatcttttagaggtggaggatcaagtatttgagccatttcctataggaagacttgataaagatactgttggacttctgtttttaactaatgatggtgatttcaatcataggttaatatctcctaaatggcatgttgataaagtgtattatgccaaaatagacaaagatgtaacctctgaggatgtagtggcatttaaagaaggcatagtacttgacgatgggtataaatgtatgagtgctaaactagaggttttaaataattctaaagagggttcggaggttaaggttactgtaagagagggaaaataccatcaggtaaaaaggatgtttgaagctcaaggtaaaaaagtagtatatcttaaaagaataagttttgcaggaattaagctagatgaaaaccttgaggaaggggagtatagagagcttacagaagatgaaatgaaggctataaaacaaaaaataaaaatgcaatag

SEQ ID NO: 15886 - DNA, 1905 bp, Clostridium acetobutylicum
atgagattttctgcaatatacaaaaataccttgtcagagaagacaaggaaaatattaaattatggtgatattatagtattttttataatcttagtttttaaattgattacttatggaaaagagatttcaccggaatattttgatagttcggttataacaccaataattgcttcagtattaataatatttagtttctcttttttattcaagggtaaaaaaagaacagcgtatttacttataattgatttgataataagcctcattctcatatcggatatagcttattttaggtataataaagatataataacggtttcagctgttcaaacagcaaaacttttggttggtgtaaaatcgagtgtggctgatgttctaagcattaaggattttatgtttttattagatattattatacttgttccaacttttatttatgttaaaagcataaataaaaatactattaagttaaagtttagattagttttatttttagctgtctttatattcggagcagctttagatgcacaacaatttcataaagttaatgtggaacaaccaacactgcttactgcaatgagtaatagaatttacctaacaaagatgataggaaatttaaattttcatgtggtagatgcctataattttacaagcacaaaggtgaaaaattcaaagaagttgcctgaagcaaggaagaatgcaattaataactatcttaagaataataactctattcctggtgttaaattcaaatcagaaggttcaggaaaaaatctcataatgattcaagttgaggctcttcaaggatttgttgtgaacaaaagtataaatggaaaagaaataacacctaatttgaataaatggataaataaaagcttatattttgataattatttctatcaagtagctcaaggaaatacatctgatgctgagtttatgtcattgaattcattgtatcctgcccaatctggagctgcatattatacatatgcaggaaatacttttaattctattcctaaagatttaggcgacaaaggatactatactgcagcgcttcatggatataatgaggggttctggaatagaaatgtaatgtataaatcagaaaaatttgatgatttttatggtcagactagttataaaaatgatgaggtagttggtatgggattaagtgatgagtcatttttaaatcagtcattggctaaaatgaaaacttttaaacaaccatatttttctttccttataactttaagtagtcactatccttttaacgacacggctggatatgaaaagtatactatgaataagttagatgttggtgagtataaagatactcttttaggaaattactttgaaggaatacattatacagatgaacaattaggtaagttcctggacaaacttgataaagaaggattaactaagaattcaataattgtattatatggagatcattttgctataccaaaagaaaatataaatcaactttatagttttgaggggataaaagatcctactgatcttacgtggtatgaatatcaaaaagtacctatgtttattcattttccagatgacgaacataagggagtgaatcatacttattcagggcagatggatatttatcctacaatagctaacttatataacataagtaataattatatgtttggtgaagatatattaaatgtaaaagatggtgatagtaccaatgttacatttagaaatggatcgtttacagatggtaagatattttatgtgtcatggactaacacttattatgatatagctacaggtaaaaagataaaggagacacctgaacttaataagaagaaagaagctgcgacaactgaattagagtattctgacgatctactaaatcataatttaattaaaacttttttgaaataa

SEQ ID NO: 15887 - DNA, 1035 bp, Clostridium acetobutylicum
atggagaaaaaatacataatgtttattatagcaatggctatttcatttttgactacgccaattgtgaggaaattcgcaaaacatataaaagccatagatatacctaaagataaaagaagagttcataaaaagcctatacctaaaataggcggtcttgcgatatatttagcctttgtactagttttggtattaaaaaaaggacatttagagaaggcagaaatggggataatatttggagggggaataatagttcttggaggatttattgatgacttaaaatgtttgagacctttatataaagtgttatttcaactattgggtgcatttgttttaataggatttggacttagaatatcgatggtaacaaatccattaagtaattctttttcatacatacatataaacaattttataggcatagcaataactattatatggataataggtgtaacaaatgcgtttaatttaatagatggtttagatggattgtctgctggggttgggtttatttcaagtgttactatagcaatagttgcatttttaaatggacctactagaagtgaagcagaaatattatctgtaatattggctggatctatattaggattcttaccatataattttaatccagcatcaatttttatgggtgatacaggtgctcaatttcttggctttgcacttgcagctatatctattcagggagctattaaatcagcatctgcagttgtcttagcggttccaattcttgtgcttggattgccaatttatgatactatttttgcaataatacgaaggaaaataaatggcaagccaataacgcaggcagatagggggcatttacatcataggttattagatatgggcttaagtcaaaagcaagcagttttaataatgtatttcataagtgctattatgggacttgtagcagtaatagcaatgcagcttactaatactaaagcatacgttatttttgctggagcggttatatgcatagttggtttagcatggaagtttggattatttaaacataaataa

SEQ ID NO: 15888 - DNA, 1002 bp, Clostridium acetobutylicum
atggccaaggtaagcgttgtaatgccagtttataatagtgaaaaatatctgaaagagtccatagaaagtattttaaatcaatcatacagtgatttggaatttataataataaatgatggctctacagataactcttttaaaataattaaggaatatgccaaattagataaaagaataaatgtgatttcaagagaaaataaaggaattgtgtactcgttaaatgaagctatacgattggcaaaaggagaatatatagcaaggatggatgctgatgatatttccgcacccaaaagaatagaaaaacaaatttcttttctaaaaagccacagagatatagatatactgggaacacaggtaaaagtggtgggcaatatttctaatgatataaaagaaaaaaatgaaaataagctaaatatagaatttgatatttatgatgataatagagaaaaaatattaaattattggtattgtttagcacatccttcagtaatgtttaggaaagatatattgagagagctaaaaggatacaatgattttaaatcagaggatttagatttatggctaagagctatagaaagcggatttaaaatatataagctaaaggaagaacttatatattttaggatgcacgaggagtcaaagactagagtagataatcaaaattatgaaggtttaaaagatggaataaaaataaaattaatagatgtttttaagagagagttcaagaaagactttaaatacatagtatggggtgcaagtaatggaggcaaaattacaaaagaggttttagacgaattttttgagaaatctcaatgtattgcatttgtagataaatttaaaacaggtgaatttgaaaaaattagaattcttcatccaaaagatataaatcatattaaatttgattatgtttttattgcaactgaaccgggaaaagaggaagcgatgagcagtttgaaaagcatgggtttgaaatgtataaaggactttttgagtactgtataa

SEQ ID NO: 15889 - DNA, 1449 bp, Clostridium acetobutylicum
atgtttgaaaatatatcatcaaatggagtttataaaaatctatttgatggaaaatgggttgaaagtaagacaaataaaaccatagaaacgcattctccttatgatggaagtttaattggaaaagttcaggccttatcaaaagaggaagttgatgagatttttaaaagttcaagaacagctcagaaaaaatggggtgaaactccaataaatgagcgtgctagaatcatgcgtaaagcagctgatatactagatgataacgcagaatatatagcaaaaattctttcaaatgagatagcaaaagatttaaaatcttctctttcagaagtaaaaagaacagctgattttataagatttacagctaatgaaggtactcatatggaaggagaagctattaactcagataattttcctggttctaaaaaagataaactttctctagttgaaagagttcctttaggaatagttttagctatatctccttttaattatcctgtaaatctttctgggtctaaggttgctccagcacttatagctggaaatagtgttgttttaaaaccttctacaactggtgctataagcgcacttcatcttgcagaaatttttaatgcagctggtcttccagcaggtgttttaaacactgtaacaggaaaagggtctgaaataggcgattatttaattacccatgaagaagtaaactttattaactttacgggaagctctgctgtaggtaagcatatttcaaaaatagctggaatgatacctatggttcttgagcttggtggtaaagatgctgctatagttctcgaagatgccaatcttgaaacaacagctaaaagcatagtatctggagcatatggatactccggccaaaggtgtactgctgtaaaaagagttcttgtaatggataaagtagctgatgaattagttgaacttgttacaaaaaaagttaaagaattaaaggtaggtaatccttttgatgatgttacaataaccccacttatagacaacaaggcagcagattatgttcaaactctcattgacgacgctatcgaaaagggtgcaactcttatcgttggaaataagcgtaaagaaaatttaatgtatcctactttatttgataatgtaactgctgatatgcgtattgcttgggaagaaccatttggaccagttttacctattattcgtgtaaaaagcatggatgaagcaatagaattagcaaatagatctgaatatggtcttcaatctgcagtatttactgaaaatatgcatgatgccttttatattgccaataaattagatgttggaactgttcaagtaaataataagcctgaaagaggcccagatcacttcccattccttggaacaaagtcatcaggtatgggcactcaaggaattcgatacagtatagaggcaatgacaaggcataaatcaatagttttaaacctataa

SEQ ID NO: 15890 - DNA, 732 bp, Clostridium acetobutylicum
ttgaagatagtatcaaaatcaagtcctcttcctcttcattatcagctcaagatgattttacaggaaatgatcgaaaatgaagaattgcttcctggagatactattcctactgaaagagaactttgtgaaatccagaaaataagtagaatgactgtaaataaagcaattctatcattagtgtctgaaggtattctctatagggagcaaggtaagggaacctttgtagccaaaaaaaaggagaaacaacaactgacaaagctaaagagttttactgaagaaatgagggaaaagggcctaaacataagtacaaaaatactatcctttgaaataaaaactgccacaaaacatataagcaccttattggaacttccacataagaaaatgaaagttatagaaataatacgtcttagattaacagataatgatccctctgcaatagaaactgttgtacttcccttgtatttatttagtgatatgacaaaagaagttattgatgggaaatctctatacaatacctttagagagaaatatggctatgagcctacaaaggcaaaacaaactattgaacctatcatgctaacagactatgaggcaaaattcttaaatcaagtaggtaattccttagcccttctttttcgaagactcacctatagaaaggatggagttcctattgaatacacaaaatcaatatatagaagtgaaaaatataaatatgaagtaatattaacttag

SEQ ID NO: 15891 - DNA, 3504 bp, Clostridium acetobutylicum
atgattacattggaggctgaatttaaagattttgttcatcttcatgtccataccgaatacagtctccttgatggttctggtaaggtcaagaaattagttgaacgagctaaagagcttggcatgaagagtattgcaataacagatcacggtgcaatgtatggatgtgtagagttttataaggcagcaaaggaagttggtataaaacctataatcggatgtgaaatctatgtagcaggaaaatctatgcatataaaacatcctgatgctgaaaatgaaacatatcatctagttttactagtgaaaaatgagattggatataagaacttaatggaaatagtttcaacagcttcaatagagggcttttactataagcctagagttgatcatgaatatctaatgagtcatagtgaaggacttatagcttcaagcgcatgttttggaggagaggttcaatcttatatattaaaagataatcttgagaaggcaaagaaagctgcacttttttataaagaaacctttaaggatggcttttatttagagttgcaatatcatgcacttaaggatgatatgaaggttaatgataccttggtaaatatgtctaaagaacttgatataccgcttatagcgactaacgatgttcattacataaataaagaggactctattgcacatgatatacttctttgtatacagacaggtaagactatcgatgaagaaaatagaatgaggtatgctcctgagcaattttatcttaaaagtcaagaagaaatgtatgaacagttttcttatgttaaggaagctttattaaatacatctaaaatagccgatgaatgtaattttgaatataagtttcatgagtcaaagctccctaattttcctcttccagagggtgaggaccactacgaatacttaaaaaagttatgctatgaaggtttaaatgaaagatataacccaattacagataccattaaggaaagacttgagtatgaacttggaataataaaagaaatggggtatgtagactattttttgatagtttgggattttattaagtttgcaagagaaaatggtgtgccaacaggaccaggcagggggtcagcggcaggatcaattgtagcatatacacttggaataaccaaaattgacccaattaagtacagtctgatttttgaaagatttctaaacccagatagagtttccatgcctgatatagatagtgatttttgttatgaaaatcgtcaaaaggtaatagattatgttgtggagaagtatggaaaggattgtgtgtcccaaattgtaacctttggaactatggcagcaagattgtgtataagagacgttggaagagctatgaattattcctacggtgaggttgataaaatagctaagatgattccaaatgttcttaacataaatatagataaggcacttgaaatgaatccagaactcaaggctatttatgatgacgatgatagaataaaggatttaatagatatatcaagaaagcttgaaggacttccgagacatacgtctactcatgcagctggagttgttatatcctctcagcctcttgtaaattatgtaccgcttttaaaaaatgaagaatccatagtagctcaatttactatgggaattcttgaagagcttggacttcttaagatggactttttaggactaagaaccttaacggttataaatgacactataaaaatggtaaaacaaaatagaaatattgatatagatattgatgatatagactttgatgattatggtgtttacaagatgataggtgaagggaaaacagtaggagtatttcagctagaatctgctggtatgactagttttatgaaggagttaaaaccagatagtttagaggatataatagcaggaataagtctctacagaccaggtcctatgaatgaaataccaagatatataagaaataaaaataatccagaagaaataaaatacgttactccagaacttaaacatattttagatgtcacctatggctgtataatatatcaagagcaggtaatgcaaatagtaagagatttagcaggatattcaatgggaagaagtgaccttgtaagacgtgctatgtctaagaaaaagcatcatgttatggaagaagaaagacataattttatacatggagttgttgatgaaaatggcaatgttgaagtgccaggatgtataaaaaatggaatttctgaaaaaatagctaatgagatatttgattcaatgatggattttgcaagttatgcttttaataaatcacatgcggcagcctatgctgttgtggcatatgaaactgcatacttaattcattattatccagcagaatatcttgcagctatgcttaatagtgttatgggtaatagtgaaaaggtagctttttatataaggtgtgcagaagagcttaaaattcaagttttacctcctgatataaatggaagctattcaaggtttaccgtaaaggaagacactataagattcggtcttgctgctattaaaaatgtaggttttaatgtaatagagagtatagtaagggctagaaacgaaaagggaaattttatttctttcacggatttttgtaataaaattgatacctctgaggtaaacaaaagagcagttgagagtataataaaatcaggaggatttgatactcttggagtttataggtcaaagcttcttgcagtttttgaaaagataatggacggaatttcagggcagagaaagaaaaatataaaaggtcaaatgaatttatttactgactttgtacaagacgattacgaagaagttgaaattcaatatccagatataaaggaatttgataaaaaatacttacttgccatggaaaaagaaatgacagggctatatctatcaggtcatccacttgaagattatgaagaaactttaaaaaatatgactagtataaaaatatcagatatagtagcacctcagtctctagaagataatgatggtgtaaagcttgatgaaaatacagatgttcaagatggtactagagttattataggcggaattgtgacttctgtaactaaaaaggttacaagaagcaatacaatgatggcttttataaagttagaagacatgtatgcagctatagaagttgttatattccctaaaatcctagaaaaaaatgcctcttacataaatgaagatgagatggtgataataaagggtaggataaataaaagggaagacgaacagcctaaggtaatatgtgaagagatatcacctattataaaaaatacagagaagatatatgtgcttgttgaagatgatactgctgttaaaacttcattaaaagaaataagaaaaatgctgcttttatataatggagacactccaatatatatgtgcacgaagaaggatagaaagaaatttcttattgataaagctttatgggttcaaaaggaagttgaggtaattaaatttttaacggataaatttggcgaaaataatgtaaaagtgatataa

SEQ ID NO: 15892 - DNA, 315 bp, Clostridium acetobutylicum
atgaataaggaagaattagaattaactacaatggagatagtggcttatgcaggagatgcaagatcaaaatatttggaagctttaaatgcagctaatggcggagattatgataaggcacagcaattagttttagagggaaatgatcttataactgaagcacataacgttcaaactaaaatgattcaaatggaagctcaaggtaagaagatagaggtaggattcttagttgtccatgcgcaggatcatttaatgacagtaatgcttttaagagaccttgtaaagaatttaataaatttatacaagaaggtaaattag

SEQ ID NO: 15893 - DNA, 1431 bp, Clostridium acetobutylicum
atggaatacgaaattgttataggtcttgaagtgcatgcagagttggctacaaagacaaaaatgtattgtggatgtactgcagaattcggaggacagcctaatacgcatgtttgtcccgtatgtatgggccttccaggcgcacttcctcatataaataaaagagcagttgattacggtattaaggctggtttggcattaaactgctcaataactcatattggaagaatggatagaaagcatatattttatccagataactccagaaactatcagataacgcaagacgaacttccattgtgtacaaatggatatatagagatagagcttgaggatggatcaaagaagaaaattggagtagagagaatacacatagaagaagatgcaggtaaattacttcatacgaatgcaggaactttagttgattttaatagatgcggagttcctcttgcagagatagtatcaaagcctgatatgagaagtcctagagaagctgtaacctatcttgaagaattaaagagtatactttcatgtgtaggagtatctgattgcaaaatggaagaaggatcacttagatgtgatgccaatatttcagtaatgaaaaaaggtgctaaggaatttggtgttagaacggaaataaagaatatgaattcctttaaagctgttgaaaaagctcttaattatgaatatgagagacatataaaagcgatagaaagtggagaaaagttaactcaagaaacaagaagatgggatgacgctaaaaatgagacagcaccaatgagaagcaaggaagaggcaaatgattacagatacttccctgaaggtgaccttgttactttaaacatagatgatgagtggattgaaagtataaggaaaactataccggaattaccatatcagaaaagggaaagattcataaaagaatttggaatacctaaatatgatgcatcagttcttacacttactatgtctatggctgatttcttcgagaaaactgcaaaaataagtggagatgctaagtcagcttcaaactggcttatgggtgacatctcaaagataatgaaagaaaattatgtatggattgaagatttgaaattcacaccagaacagctttcagagcttataaagcttataaatgaaggaacggtttctaatgctataggcaaaaaggttattataaaaatgtttgaaacaggtaagtctcctaaaaatataattgaagaagaaggacttatacaaaatagtaatgaagatgaaattttgaacattgttaaagaagttttgagtgaaaatgaaaaatctattgaagattataagaatggcaagaatagggttgttggatttttaataggccttgttatgaaaaagacaaaggggaaggcaaaccctaaaatagttaacaaattaatgattgatgaattaaataagcaataa

SEQ ID NO: 15894 - DNA, 1023 bp, Clostridium acetobutylicum
atgggatactttacaggaaaaaatgtattaatagttggaggaacaggaaccatagggcatggacttatcaatgaacttttgaaagaaaatccaaaagtaataagaatatttagcagagacgagtataaacaattcttaatgcagaatgaatttagagggattgcagaaaaatttagatttttgataggtgatgttagagattatgatagagtagagagggcaatgaacggcattgatgtggtatttaaccttgctgctatgaaacatgtaccagcttgcgagtataatccagaagaagctataagaactaatataacaggtatggagaatgttataaaagcagcaacatatcataatgtggagtgtgttgttttcacaagttcagataaagcaataaatcctactaattcttatggagcaactaagcttttagctgaaaaattagtgcaggcagctaattatagtaagggaaatgtcagaacaaagtttgttgcagttagatttggtaatgtaatgggatcgagaggatcagtaatacccctatttaaaaagcaaattgaagagaatgcggttataacagtaacagatcctactatgagtagatttatgatgacattaagtcaagctgtaaagcttataatgacagcagcaaaagaggcaactggaggagaggttttcatacttaaaatgcctgtcataaagcttattgatttggctaaggttgtagtagaagaaacctcaagaaaattggatataaatcctgaaagaataaaaataaaagaaataggcttgagagcaggagaaagatgctacgaggaacttatgacaagagaagaatctgtaaatgcgtatgatttagggcattcttacgttgtaattccatcaagcttttatataacagattataagtctaaatatagtaaatataagaaagcagaaattggaagctataattcctctagtattgaacctattacattagatgaagtaagacaacttttgaaaaactgtggacttctttaa

SEQ ID NO: 15895 - DNA, 954 bp, Clostridium acetobutylicum
atgggagttatcatttattcagtactaatttcgtttctattttcaatacttcaaggaccattatttattccaatattacacaaattaaagtttggtcagccaatacgtgaagatggtcccaaaaatcatatgaaaaaagctggaactccaactatggggggaattatatttataactacagctattatagcaatgattataatgagaaaaaaccttaatagtaacgctgtatttgcatttgtatgctttttttcatttgctatgataggacttatagatgattctcttaaaattcttcataaaaagaatgaaggacttacttcgaagcaaaagtttcttcttcaaattatagtttctgcagctatttcatattatgcttatatacgttttggaagtgatacttttattccttttctaaaaataacatggacgcttccacctatagtttatatggcagctgttgtgttttattttgtggcagttaccaatgctgtaaatcttacagatggactcgatggacttgcatcatcagtgacaatattagttgtaacttttttcacagtagtaagtttttcgtggcatcaatatgagctatcagtcttttgtggaattattgtaggtatacttttaggtttcctaaaatacaattcatatcctgcacaaattttcatgggcgatactggatctattggtcttgggggagcagttgcagcaattgctttggtattgaaattaccattattggttataattgtaggtggaatatatgttattgaagtattgtctgatataattcaagtaagttattttaaacttacaggaaaaagagtatttaaaatggcaccaatacaccatcattttgaaaaacttggatggcatgaaacaaaagttgtttctgtattttcaattgtgacagttatactttgcttaatagcttttctatctttaatttag

SEQ ID NO: 15896 - DNA, 852 bp, Clostridium acetobutylicum
atgatgatagaatcaataaactggtttccaggacatatggcaaagaccacaagagaaataagagagaacttaaagctggttgatgcggtaattgaaataagagatgcaagaatagtatattccagcagtaatcctgatataaatagtatttgcaaggataaaccaaggattattcttttgaataaatttgatttagctgagaaatccataaccgataattgggtaaaggcattatctagtgaaagtataagagctattccagttaatgcacttgagggacgtggattaaatagtataaaacctgcattaaatgaacttcttaagccaaaacttgataatatggcagctaaaggtattcaaaactatattataagagtaatggttgtaggtatacctaatgtaggtaagtcttcattcataaataaaatggctaaaaataaagttgcaaaagtaggaaataagccaggtgtcactaaaagtaagcagtggataaagacaaatataggaatagagcttatggatactccaggtgttttgtggcctaaatttcaagaccaaaaggttggacttaatcttgctttcactggagcaattaaggatgaaataatggatatagaagaacttgctttaaagttagttcaatttttacagaagaattatcctgaaaagttaatggaaagatataagttagaagatataaatgaagatccacttatcaatatgaataacatagcagcaaaacgtggtgcccttttaaaaggcggagaaatagactataatagagtatcaattattattgttgatgaattcagatcaggaaaaatagggaaaatatctcttgaaaggccgtga

SEQ ID NO: 15897 - DNA, 219 bp, Clostridium acetobutylicum
atgtcaaaagaagatgtaattgagatgcagggtacggttttagaatcgttacctaatgcaatgtttgaagttgaacttgaaagtggtcaaaagatcttggctcatatttcaggtaaacttagaatgaactttataagaatattgcccggagataaagtaacagttgagctttcaccatatgatttaactcgtggaagaatcacctggagggcaaagtaa

SEQ ID NO: 15898 - DNA, 750 bp, Clostridium acetobutylicum
atgggcataatacaaactaaggacttaaatttatattatggaaatgttcaggcattaaaaaagataaaccttgatttcagtgctaatacggtaactgcacttataggaccgtctggctgcggaaagtcgacttttttaagaacaataaatagaatgaatgatttaataagcactgttaaaatagacggtgaggtaatgtttgagggaaaagatgtatataaggattatgatgagatagagcttagaaaaagagtaggtatggtatttcaaaagccaaatccatttcctatgtctatatatgataatgtagcctatggtcctagaatacatggaataaaaaataagggtaaattagacgaaattgtggaaagaagcttaaaaggctctgcactttgggaagaagttaaggatagattgaaaaagagtgcacttggtctttcaggaggacagcagcaaagattatgtattgctagaacacttgcagttgaaccagaagttcttcttatggatgaacctacatcggcactggatccaatatcaacacttaaaatagaagaactaatggatgaattaaaacataagtatacagtaattatagtaacccataatatgcagcaggcaggaagaatatctgataatacggctttctttttaaatggtgaagttgtagaaaatggaaaaacagaggatattttttataaaccaaaggataaaagaactgaggactatataacaggaagattcggatag

SEQ ID NO: 15899 - DNA, 879 bp, Clostridium acetobutylicum
atgataaataaaaacacaaaaataggctttatcggaacaggcgtaatgggaaaaggtatgataaaaaacctattaaagggtggatacactgtgcacgtttataatagaactaaagaaaaagcactgcctttagttgaaattggagctgtactagaaacatctataaaagagctttctcaaagatgcgacgttataataacaatggtaggctatcctagcgatgtagaagaagtatactttaatgacaatggaatactaaataaccttaaacctcaaagctatgttgtagatatgacaacttcaaaaccatctttagcaaaaaaaatatacgctgccgcaaaggaaaggaacattttcgcacttgatgctcctgtttctggtggtgatattggtgctgctgaagggactctgtctataatggttggtggagacaaagaagcatttgatgctttaatgcctatatttgagcttatgggaaaaaatatagtacttcagggttcagctggttcgggtcaacatacaaaaatgtgtaaccaaatagctatagcttctaacattatgggagtatgtgaagctttatcctacgcaaaaaaatctggccttaacgctgaaactgttttaaaatccataggtgcaggtggagctgcaagctggcaattaagtgcttatgctccaagaatactgaagggtgattttaatcctggcttctacattaaacatttcgttaaagatatgaaaattgctttagaagaagctgatgaaatgggccttaaaacaccagctttagaactttcaaaaaagctttacgataagcttataaaggaaggaaaagaagacttaggcactcaagctctttaccatctgtacaacgaagattaa

SEQ ID NO: 15900 - DNA, 786 bp, Clostridium acetobutylicum
atgtggaacgatgtagagtctttagaaatggttaatgataatttaaagttgacagtgccttatcaaaagctttcaactatgcatccggctgatttagccgatataattgaagatatggattttaattatagaaaaaaggtttttgaaagtcttgatgaaaatttagctgctgacatactagaggagatagacccagatattcaagcggatatacttgaaagcctaagtgatgataagaaaagtgaagtactagatagtatgcctattgatgaaattgcagatatcttggatgaagttgatgaagaaactgctgaaaagatattgcttaatatggaaaaggaagatgcagaagaagttagagcactcatggggtatggagaagaaaccgtgggtagtataatgaacaaggactttatttcatttaatgtgaatataacgttgaatgaaactttagatataatgcgtgaaatgaatcctgaggatgaggtaatatactgtatttatataacagataatgaaggaaagctagaaggctatgtatctcttaaggatttactctttatgccaccagaaaagaagcttaaagatgttatgaataaaaagattgcttttgtaaaagattcagataaattagaggaagcaatagaaacatcatcaaagtacaatcttatttctcttccagtagttgataatgacaacaagttatgtgggattatattagttaatgatttaattgatgaagtactcctaccagcgtggaaaaagaaatttaaaaaagttggctaa

SEQ ID NO: 15901 - DNA, 1134 bp, Clostridium acetobutylicum
atgaaagccataacttttgaaggcatgaacaatgttaaggttaaaaatgtaaatgacccgaatatcataaaaaatgatgatgcaattattaaaataacttctactacaatatgtggttccgaccttcatcttcttcgtggaaccatgccaaaagttcctcatggatttattataggccatgaagcaatgggaattgttgaagaaacaggaaaggaagtcacaaacttaaaaaaaggtgatagagtaattgtgccttttcctgtttcctgcggtcactgctggtactgtactcacggtctttctagccaatgcgataactcaaacgagcatggtgaagttggtgctatatatggatacggtgatttaatgggaggctacgatggcggtcaggctgaatacttaagagttccatatgcaaactttgggcctaaattagtacctgaaaatcttacagatgaacaggttctttttctaactgatatacttccaacttcttattggggcacaatagtaaatggaggagttaagcaaggtgacaccgtagtcgttcttggctgtggtccagttggacttttagctcaaaaatgggcagcttatgcaggtgcttctagaataatcgcagtagataacatagactatagattagagcatgcaaaaaaatacaactcagcagaaatattaaacttcaatgactacgacaatacaggagaatacatcaaagaaataactcatggaggagcagacgttgtaattgactgtgttggaatggacggagaaaggtctcctattgaaaatgtagaaactctattaaaaatacagggtggttcaaagtccgcaatagaaatatcaactcaagcagtaagaagaggtggaacagtatctgttgtcggcgtttacggtgcaagatacaataactttccttttggagacttcttctctagaaatataaccataaaaactggtcaatgcccagcacattcttatgtagatgttattttagatctcataaagcaaaataaatttgatgctactgatataataactcatactatgtctctttctgatggtgaaaaagcatataatttattcaataataaacttgataattgtataaaagtcatattaaaaccataa

SEQ ID NO: 15902 - DNA, 918 bp, Clostridium acetobutylicum
atgaaggataatatacaaattgataaatatctaaaaaaggcagaggaagcttttctagacaacaaactagttaagtccttagattactacaataaggtttacgagcttacaaatggtgaagatgtggatactataataaatctcgctttaatatacgattctttaggtaaagtagaaaaagctgaagagtattataaagaagccttaagcatagatgattatgaagagagggcttactatggtctagccacaatatatgatgaaaaagaagattatgaggaagctataaaactatacaataaagccatttatataaatcccaattatcataaggcgtattttttcctagcaaatgcttatgatttatcaggtcaaaaaaatctagcaatagaaacctatgaaaaattacttagtctagatgatatggatttttggtctaatttaaatttaggctgtatatatgaagaacaaaacaaaaatgatcttgcatatagattgttttcaaaagctttaaaaatcaatccgaataatcatctagcactttttaatatgggtgtaatttgttgtaagtttaatatgatagaaaaagctataaacttctatgaaaaatcaatcgaaaagaacaaaagttatgaatacagctatttaaatttggcagttatatataaacatagggatacagaaaaaggtatacaaatactatcttctggaattgaaaattgtgaaaaaacacattttttatattataacagaagctgcttttatgctttaattaacgaaaacaataagtcctgtgaagacataataacagccctaaaattatatccagaattcttgaagtatgttttagaagatgaagaattagaatctgtacgtgaattgaattcttttaaaagctttgcagctaagctcaactaa

SEQ ID NO: 15903 - DNA, 1632 bp, Clostridium acetobutylicum
atggcaaagcaaatattatacggagaagaagcaagaagatctatgcaaaagggcgtagacaaacttgctgatactgttaaggttactcttggaccaaaaggaagaaatgttgttttagataaaaaatttggagcaccacttataacaaatgatggtgtaagtatagcaaaagaaatagaacttgaagatccatatgaaaatatgggtgcacaacttgttaaggaagttgcaactaagactaatgatgtagcaggagacggaactactacagcaacacttcttgcacaagcaataataagagaaggacttaaaaatgttacagctggagctaatccaatgcttataagaaatggaataagattagctgtagataagactgttgaaggacttaagaaagtatcaaagaatgttaacggaaaagaagatatagcaagagttgcatcaatttcagcagcagatcctgaaataggaaaattaatagctgatgctatggagaaagtaggcaacgaaggagttataactgttgaagaatcaaaatcaatgggaacagaacttgatgttgttgaaggtatgcaatttgatagaggatatttaagcccatacatggtaacagatcaagagaaaatggaagctgtacttgatgatccatatatattaataacagacaagaaaattgcaaatatacaagaaattcttccacttcttgagcagatagttcaacagggtaaaaaattacttataattgctgatgatgttgaaggcgaagctttagctacattggttgttaacaaattaagaggaacatttaactgtgttgctgttaaagctcctggatttggcgatagaagaaaagatatgttaagagacatagcaatccttacaggtggagaagttatatcagaagagcttggaaaagatcttaaagatgtaaaggttgaggatcttggaagtgctgaaagcgttaaaatatcaaaagaaaatactacaatagtaaatggaagaggcgacaagagcgcaatccatgacagagttgcgcaaataagaggtcaaatagaagaaactacatctgactttgatagagaaaaattacaagaaagattagcaaaacttgctggtggagttgcagttgttaaagttggagctgcttcagaaactgaattaaaagagagaaaaatgagaattgaagatgctcttgcagctacaaaagcagcagttgaagaaggtataattgctggtggtggtactgcttacatcaatgtattaccagaagtaagagaattgacttcagacgaaccagatgttcaagttggtataaatataatagttaaggctcttgaagaaccagtaagacaaatagctgcaaatgcaggtcttgagggatcagtaataatagaaaaaattataaacagtgaaaaaggaattggatttgatgcattacatgagaaatatgttgatatgctaagtgttggaattgttgatccaactaaggttacaagatcagcacttcaaaatgcggcatcagttgcttcaacattccttacaactgagtgcgctgtagcagatattcctgaaaaagataaacctgaaatgccaggtggagcaccaggaatgggaatgggcggaatgtactaa

SEQ ID NO: 15904 - DNA, 3435 bp, Clostridium acetobutylicum
gtggttaaaaagtttaaaagagtattagtggcaaatagaggagaaatagcaataagaatttttagagcttgtcacgaactaggtataagaactgtggctatatactcagaagaagacaaacttgctctgtttagaactaaggcagatgaatcttatcttataggacaaaacaaaggtccagtagatgcatacttaaatattgatgaaataattaatttagcgttaaaaaaaggggtagacgctatacatcctggatatggatttttatcagaaaactcagagttctctagaagatgtactgaggctggaatagaatttataggtccaactggggatatgatggataagcttggtgataaaattaactcaaagctagcagctaaagcagcaggtgtaaagacgatacctggagttgaaaaaccaatagagacagaacagcaggctattgaattcgcaagaacatgcggatatcctgttatggttaaagcagcagcaggcggcggcggaagaggtatgagaatagttgaaaaagaagaagatttaattgctgcttgtagaagtgcaaaaagtgaagccaaaaaggcttttggaatagaagacatatttatagaaaagtatcttgaaggaccaaaacatattgaagttcaggtgcttggagataagtatggtaatattgttcatttatatgaaagagattgctctgttcaaaggagacatcagaaggtaatagaactaactccagcggtttcaatgtctgaagaaaagagacttgaaatttgtgaagatgcacttaaaatcgcacgatcaataggttatagaagtgcgggaacattagagttcttactagataaacatggaaatcattactttatagaaatgaatcctagagtacaggtagaacacacaataactgaaatggttactggaatagatatagtacaaagtcaaattttaatagcagaaggttataaacttaactcacctgaagtcggaataaatagtcaagaagatatacacgtaaatggctatgctatacagtgtagaataacaacagaagatccgtctaatagttttgctccagacactggaaaaatagatgtctatagaactggttccggttttggtataagacttgatggtggaaatggatttactggtgcggtaataagcccttattatgatagtttacttgttaaatctacttcttggtctaggacttttgaggatgcaataagaaaagctatacgtgctataaaagaaacctacatatcaggggttaaaacaaacatagattttcttataaatgtattgaatcatgaaacatttagaaaaggtttatgtgatacaaactttatagctaataatccagaactttttgaaattacgcctagaatagatactgaattaagagttcttaagtttataggagaaaaagttgtaaatgaaactcatggacataaaattgaagttgatgttccatctgttcctaaatacgagataaaggaaccattaagaggaacaaagcagatacttgatgaaaaaggtcccaaaggtcttgttgaatggataaaggatcaagataaacttctacttactgatacaactatgagagatgcccatcaatcattaatggcaactaggcttagaaccgttgatatggtaaaaatagcaaaggcagaatctgtccttgcaaaggatttattttcaatggaaatgtggggaggagcaacatttgataccgcttatagatttttaaaggaatctccatgggaaagattagagagacttagaaaaagagttcctaacgtattgttccagatgcttttaagaggagctaatgcagtaggatataaaaactatcctgataatgttataagagagtttataaaacaatctagcaaatcaggaatagatgtatttagaatatttgattcattgaattgggtaaagggaatggaagttgccatagatgaagtattaaatcaaggtaaagtagcagaagcttgtatgtgttatacaggtgatatacttgatacaaatagagataaatacactttaaattattatgttaatttagctaaggaaatagagaaatcaggagcacacatcttaggaataaaggatatgtcagcgcttcttaagccatatgctgcccttaaacttataagagcacttaaaaacgaaatatctattcctatacatcttcatacgcatgatacaacaggaaatggtgttgctacggtgttaatggcggctcatgcaggtgttgatatagcagatactgctttcaatagtatgtcaggacttacaagtcaaccagctcttaattcagtagtagcagctcttaaaaacactgacagagacactaagatggatataggagatttacagaagatatctgactattggagtacagtaagacctgtatatagtaaatttgagtctggattaaaagcggtttcggctgaaatatataagtacgagataccaggaggacaatattcaaatttaaaacctcaagttgaaagctttggtttaggccatagatttgagcaagtaaaagagatgtatagagaagtaaatataatgttaggcgatatagtaaaggttactccatcttcaaaaatggtgggagatttagctatatttatggttcaaaatgagttgacgtcagagaatattcttgaaaaagctaaagatatgcctttcccagactctgtagtatcatattttaagggtatgatggggcagcctaagggtggatttccaaaagaacttcaaaaaattgttcttaaggatgaagaagctattacctgcagacctggagagcttttaccagatgaagattttgataagataagagttcgtcttaaaaaagaaaataaaattgaaccgacagataaagatgtaataagttatgcattgtaccctgatgtttttgaagaatacttaaaatataaaaatgagtatggtgatttaagtagaatgggtagtgatgtatttttccatggattagctgaaggtgaaatatctgaacttgagatagcagagggaaaaactttagtagtgcagcttttgcacataggtaaattagataaacaaggaaatagaactcttgtatttgaggttaatggtaatagacgagagattaaaatcaaagataaggttagcagtactaagtctgaaatagttgaagagatagttatagcagatagctccaataaaaaggagataggagcaagtataccaggaaatgtagttaaggtatttgttaaacctggagataaagtaaaaaaaggtgacagccttatggtaatagaggcaatgaaaatggagacaaatgtatcagtaagtgaagatggaactgtaggaggtatatttgttaaagagggggaccaagtacaatcaggacaattattagttaaattagattag

SEQ ID NO: 15905 - DNA, 930 bp, Clostridium acetobutylicum
atggtaataactgtaacattaaatcctgcaatggataaaactcttaatattgataactttaatgtaggagttgtaaatagagtaagtaatataaggtatgatattggtggtaaaggaataaatgtatcaaaagtattgaaaaatttcaatatagagtccaaatgtactggttttattggtggtatgtgggagaaagatttcagagaagagttagataaaagaggaataaaaaatgaatttataactgtaagtggaaatactagaacaaatactaaaattgtagacgatttaaataaagtatatacagatataaatgaagcaggaccaagcataagtagtaaagaacttgaaatgtttatgaataaattcaaagatatgtgcaataaggatgacatcgttgtattatcaggaggagtagctccaggtattccaaagaatatatacggaactttaacaaaaatagctaaagaagagggttcttttgtaatcttagatgcagaaggagagcttctaagtgaaggaataaaagaaaatccgtatatcataaaacctaatgatatggagtttgaacttcttttaaataagaagtttaagaataatactgacattatagatggagcaaaagaagtaattggattaggagtttcaaatgttttaatatcactaggatctaaaggagctctgtttgtaaataaggataaatcatattatgctaagggtttggtagttccagttaagagcacagttggtgcaggagattctatggtagcagcatttgtatatggaattataaatagtcttaatgagaaagaaatattaaggttttctatagcttgtggagcggcatcagtttcaactgaagggaccgaagcttgcagcttggaggatgttaaagaattattaaaaagtgtagttattgaggaggtataa

SEQ ID NO: 15906 - DNA, 1254 bp, Clostridium acetobutylicum
atgcgtaaaattaatatttttaaaggaaagcataatccacaacgtacagcaatagatttttttaagtatgttggtcctgggcttttagtaactgttggttttatagatcctggaaattgggcatcgaatgtatctgctggatcagactatggatattcgcttttatggatagttactttgtcaactataatgcttataatacttcaacataacgctgctcatcttggaatagttactggtgattgtctttcagaggctgttagcaagaaatttaaaccttggcttacaaatataatactttacagtgctataggagcagcaatatctacagctatggcagaacttcttggaggagcaattgcccttaatatgctctttaggcttcctataaaaattggaactttaattatgttatcgctagttatttggatgcttttttctagctcttataaaaagcttgagaggtggattataggatttgtttcaataataggtttatcatttatatttgagcttttattggtaaaggtaaattggcaagtggcagcagtgagttttgtgtctccaagttttcctaaaaactctatgcctataataatgagtgttttgggagctgttgttatgcctcacaacttatttcttcattcggaaataatacaaagtagacaatggaatgttgaaaaggaagatgttataaaaagacagctcagatacgaatttttggatacaattatatcaatgattgtaggatttgctataaacagtgctatggttttattggcagcatcaactttttttaaaatgcatgttagtgtaagtgaattatctcaagcacaagctttattgaaaccgcttttaggaggttctgcttctgtagtatttgcactggcgcttttattttcaggtatagcttcaacggttacggctggaatggctggaggaagtatttttgctggaatatataaggaaccttatgatatagaagatagtcatactcaaataggtgttattataactatggttttagctgctgtaattatattttttataaaagatccatttaaaggattaatatattcccaaatgattttaagtatacagcttccaataactatatttactcaaatttatcttacatcttctaaaaaagttatgggaaagttctctaattcattattagacagagttttacttggaataatagcagtaatagttacagctttaaatatagctttgttagttagttatttttaa

SEQ ID NO: 15907 - DNA, 1287 bp, Clostridium acetobutylicum
atgtcagcatttattgttttaggcgcccagtggggagatgaaggaaaaggtaagatgacagattatcttgcacaaggagctgacgtggttgttagatttcaaggtggtaataacgcaggacataccgttgaagtagaagataagaagtataaacttcacttaataccatctggaatattatataaaaataaagttaatgtaattggaaatggtgttgttctagatccaaaagctatgtttgaagaagtagagtatcttaagggaatgggagtagaagtaactcctgaaaatctaattgtgagtgatagagcacatttaataatgccttatcatagagcactagatggagcaagcgaaaaacatagaggaaaaaatgatataggaacaactggtaaaggtataggaccttgttatacagacaaagctgaaagatcaggaataagagtatgtgatttacttcatcctgaagtatttaaggaaaagttaaaatcaaatttagaaataaagaatgctataattactaaagtatatggtatggatgcatttgactataatgaaatatgtgaagaataccttgcatttggtgagaaattaaaaccatttgttaaggatacctctgttatagtttataatgaaataaagaatggtaagaaggttttatttgaaggtgctcaaggaaatcttcttgatatagattacggaacttatccatatgttacatcatcaaataccataggaggaggagtttgcccaggagcagcaataggacctactatgataactagtgcagtgggaatagctaaagcgtacacaactagagttggtaaaggacctttccctacagaacttcttgatgaaatgggagataggataagagaagcaggatttgagtatggagtaaccactggaagagcaagaagatgtggatggcttgatactgttatattaaagcaagcagctagggtttccggacttacaagttttgcaatgacaaaaattgatacacttgcaggaatagataaggtaaaagtgtgtataggatatgattttaatggtaagactatagattatattccagctagccttgaagacttagctttatgcaaacctatatacgaggagtttgatggttgggatgaaagtgtagctgatgctagaagttatgatgagcttcctcttaatgcaaagaaatatctaaagaggatagaagagcttacagaaactaaaatatcaatagtttctgttggaccagaaagaaatcatactattgaagtttcagacatataa

SEQ ID NO: 15908 - DNA, 849 bp, Clostridium acetobutylicum
atgaaaaaggtatgtgttataggtgcaggtactatgggttcaggaattgctcaggcatttgcagctaaaggatttgaagtagtattaagagatattaaagatgaatttgttgatagaggattagattttatcaataaaaatctttctaaattagttaaaaaaggaaagatagaagaagctactaaagttgaaatcttaactagaatttccggaacagttgaccttaatatggcagctgattgcgatttagttatagaagcagctgttgaaagaatggatattaaaaagcagatttttgctgacttagacaatatatgcaagccagaaacaattcttgcatcaaatacatcatcactttcaataacagaagtggcatcagcaactaaaagacctgataaggttataggtatgcatttctttaatccagctcctgttatgaagcttgtagaggtaataagaggaatagctacatcacaagaaacttttgatgcagttaaagagacatctatagcaataggaaaagatcctgtagaagtagcagaagcaccaggatttgttgtaaatagaatattaataccaatgattaatgaagcagttggtatattagcagaaggaatagcttcagtagaagacatagataaagctatgaaacttggagctaatcacccaatgggaccattagaattaggtgattttataggtcttgatatatgtcttgctataatggatgttttatactcagaaactggagattctaagtatagaccacatacattacttaagaagtatgtaagagcaggatggcttggaagaaaatcaggaaaaggtttctacgattattcaaaataa

SEQ ID NO: 15909 - DNA, 468 bp, Clostridium acetobutylicum
atggaagtggtgattaaaattagtacaactgaagctaaaaagtatttacttattgatacatctgtacttcctgatgtatttgaagaggtcatacaggtaaaggaacttttaagatcagcaaaagtaaaggatattacagaggcggtcaagaaagttggcataagtagaagtacatattataaatataaggactatgtatttaatgtttctgatggacttaaaagtcaaaaggtaactatatcaattttaattgaacatagaagaggaaccttatcagaagtattagataagcttgctcaaagatgctgtaatatacttacaataaatcaggatatacctataaataatacagctaatgtcaatattacttttgatataagtggtatatcaggagacgtaaaaaatattgtagaggaactaaagaaaattaaaaatgtgttgaaagttgaaatagtggcaatggaataa

SEQ ID NO: 15910 - DNA, 717 bp, Clostridium acetobutylicum
atgattgaagaagtgatccctaatcatatatatcaaatgtctacaataaacgctcttgtttctggcttgtatgatgggtgtgcatctttaaagaagcttttaacaaaaggtgattttggtataggtacatttaaggacttggatggagagctaacacttttagatggaatattttatagaactaaaccggacggaagtatctatgtatgctctgaaaatgattcagttccttttgctgtgattactaaacttgaaaattataatacagaaaatattgaagcttgtaattcatatgaggctttaaaggaaacattagatggatttattgatagcaagaatatattttatgctttttacataaaaggcagctttaattatgttaaaactagaactgttgtgaagcaaagcatgccttataagccaatggctgaggttgtaaagaatcaacctgtgtttaattatgaaaatgttaagggacatatagttgggtttaggtgtccggattatgtggaaggtcttaatgttccaggatatcacttccattttttgagtgatgataagaaatttggtggacacgtaagtgatatttctgtaaaaaatgcagaggtttttattcaaaattgtttgtgctttagaatggaattgccacaaagtgaaagtttttatagtatgaaggttgaaaatagaaatgatgaaataagtaaagttgagaaataa

SEQ ID NO: 15911 - DNA, 726 bp, Clostridium acetobutylicum
atgcgatggatttttttatacatatattttgttttttatatgattagaactacgtttttcaagataaaacttagttatataagaagaaatgccccagaacaagagtatgaagcagcagttcataaagtgatttttaattgggcaaaaacaatgcttagggttattggtgttaaagtgaatgtaaagggcatggaaaatataccaaaggatacatgtgtatttatttctaatcatcagagtaatgtagattttttggctataatgggcacaatcgataaacaaataggatttatagctaaaaaagaaattttgaaaataaaaattgtaagtagctggatgaaaatgatgcattgcgtgtttattgatagaaatgatatacgtaaatcgcttatggctataaatgaaggagtagataatttaaagaagggatattctatggcaatatttcctgaaggaacaagaagtaaaagtagtaatatgggagaatttaaaaaaggtagtttaaagcttgcaacaaaagctaatgcagtagttgttcctatcgcaatcgatggtggatatagactttttgaagatgttaagggaaagttaagaccaggagtggttaatatgtctatattagaaccgttaaatattgcagatttggataaagagcagaagatgaacttatctgatattcttcacaaaaaaataagtgaagagttgaagttaataaagcaggattaa

SEQ ID NO: 15912 - DNA, 261 bp, Clostridium acetobutylicum
ttggggagtgaaattaacgataatacaattgagtttgatgttttgaaaaataaagaggatttaacaaaagagatattgaatgaagtttacaattcattaaaggaaaaaggttataatcctattaatcaattggttgggtatttgatatctggagatcccacttacataaccaattacaatggcgcacgtgctttagtaagaaagcttgagagagatgaaatacttgaagaagtattaaaatcatatcttggtataaaataa

SEQ ID NO: 15913 - DNA, 402 bp, Clostridium acetobutylicum
atgaataaaacaatacttatcggaagattaactaaggacccagagctgaaatatataccaaatacaggtacggcaacatgtaactttactttggcagtagatagaagatttaaaaaagaagggcaacaggaagctgattttattcctatagttgtatggggtaaacaagcagaatctacggctaattatatgagtaaaggaaaacttatgggagttagcggaaggatacaaactagatcttatgatgctaaagatggtactagaagatacgtaactgaggtggtagctgaggaagttaaattccttgagtggggcaaagattctaacatagaaaatgtagactttggagtgccagtgcaagaggatataacaccagtggataattctgatattcccttttaa

SEQ ID NO: 15914 - DNA, 1014 bp, Clostridium acetobutylicum
atggaagaattaaaagtttattatgatgaggatgcagatttaaattatttaaaggataagaaaatagcaattataggttttggaagtcaaggacatgcccatgctttaaacttaaaggaaagtggtctcaatgtaatagttggactatatgatggaagtaaatcatggaaagttgcagaggattatgggtttgaagtttatgaagttgcagatgccgtaaagcaggctcaggttgtaatgatacttttaccagatgagaaacaaaaacaaatatatgaagcaagcataaaagataatctagatgaaggtgatgcactattttttgctcatggtttcaacatacattacaatcaaatagtaccacctaaaaatgtagatgtacttatgatagcaccaaagggaccaggacatatagttagaaggcaatatacagagggtggaggagttccttgtctttatgcagtacaccaagattatactggaaaaggtaaagaaatagcattagcttatggtaaaggaattggtggaactaaaggaggagttatgaacactaccttcaaaatagaaactgaaactgatttatttggtgaacaagcagtactttgcggaggaatatgtgcattaataaatgcaggatatgatacattaagagaagctggatattcagctgaaaatgcatattttgagtgttttcacgaaatgaagatgatagttgatttaatgtatgaaggcggaatggctaaaatgagatattcaattagtgatactgcagaatacggagattatgttgtagggaatagacttataaacgataacgtaagagcagaaatgaagaaggtacttactgaaattcaagatggaacatttgcaaaaaattggttgcttgaaaatcagacaggaagaccagcatttaatgctagaagaagaatagaggcagatagagaaatagagaaggttggtaagagacttagaggtatgatgagttggattaatgaaaatccttcaaacgaatag

SEQ ID NO: 15915 - DNA, 303 bp, Clostridium acetobutylicum
atgctttcaattaatcttagtttgtgtgcgcacaaaaaaggaatgggtagttccaaaaacggaagagacagtgagtctaagagacttggagttaaagcttctgatggtgaatttgttttagctggaaacataattgttagacagaggggaacaaaaattcatccaggtgttaatgtaggtagaggtaaagatgatacactctttgctaaagctgatggattagttaaattcgagaaacgcggaaaagataagaaattcgcaagcgtttatccagttgaaattgaacaaagcgtagctgaatag

SEQ ID NO: 15916 - DNA, 2058 bp, Clostridium acetobutylicum
atgaaaagtaaaaagtcaaaatttattacaaaggatatattaaaggaagccataattgagtcttttaaaaaattaaaccctaaatatatgatgaaaaatccggttatgtttgtggttgaggttggattcttcgttacaattttattaaccatttttccaagtatatttggagataagggacacaatttaagagtatataacttaattgtaacaatcattttatttataacggtgctatttgctaattttgcagagtctgtagctgaaggacgcggaaaagctcaagcagatgcacttaaaaagacccgtaaggatacaatagcaaagctcataggaaaagatggtagtataaaaactataaatgcaaatgagcttaaaaagggtgatgtagttcttgtagaaaatggagatgtaataccaaacgacggtgaagtggttgacggagttgcatctgtagatgaatcagcaataacaggagaatcagcacctgttatgaaggagccaggaggagattttgcatcagttacaggaggaacaaaggttgtaagcgattggttaaaggttgaaataacagcaacaccaggagaatccttccttgataaaatgattaatcttgtagaaggtgcttcaaggcaaaaaactcctaatgaaattgcacttaatacaatacttgttagtcttactttgatatttttaattgtcttggttgcactttaccctatggcaacatacacaggtgtaaagattcctatgtcaaccttgatagcacttttagtttgtcttattccaacaaccataggaggacttttatcagcaataggtatagcaggaatggatagagttacaagatttaatgtaatagcaatgtcaggaaaagcagtagaggcttgtggtgatgttgatacaatgattcttgataaaacaggaactataacctatggaaatagactagcagctgattttataacggttggaggtgcagataaacaaaaattaatagattactccgttatgtgttctttaaaagatgatacccctgagggtaagtcaatagttgaacttggaaaacagttaggtataacaatagatactaaaaaatatgagagtatagaatttgaagagtttacagctcaaacaagaatgagcggaataaagctagaaaatggaactgcagttaaaaaaggagcatatgatgccataaagaaaagagtacaggagttaaaaggagttattcctaaagatttagatgaagctgtaaacaaggtagcaaagcttggaggaacgccacttgtagtatgtgttgataataaaatttatggagttatatatcttaaggatacagtaaagccaggcttagttgagagatttgaaaggcttagggaaataggtataaagacaataatgtgtacaggggataatcctttaacagccgcaactatagcaaaggaagctggtgtggatggatttatagctgagtgtaaacctgaagataagatagaagctataaaaaaggaacaggacgaaggaaaacttgttgcaatgacaggtgatggaactaacgatgcaccagcacttgctcaggcagatgttggtcttgcaatgaatagtggaacaaccgcagctaaagaggctgctaacatggtagatttggattcggatcctacaaaagtgcttgaggttgtagaaatcggaaagcaacttttaataacaagaggggcgcttactacctttagtatagcaaatgatgttgctaaatattttgctataataccagctatatttacaatagcaataccaaaaatgcagctaatgaatataatgcacctgtctactccttatagtgcaatactatcggcacttatatttaatgcgataataataccggcattaatacctattgcaatgaagggtgtaaagtacagacctatgaaatcagaagctcttcttttaagaaatatgattgtatttggttttggtggaattatagttccgtttgttggaattaagataattgatatgataataaccccaatggttagaatccttaatttaggatag

SEQ ID NO: 15917 - DNA, 528 bp, Clostridium acetobutylicum
gtgaaaatcataagtaagaataaaaattttattgtaaatgaggaaataagacaaaaagaagttagagtaataggtgatgatggttctcagctaggagtaattcctacaagtgaagctttaaaattggctgaagagaaggaacttgatttggttgctatgtcacctaatgctgttccaccggtttgtaagataatggattttggtaagtttgtatatgagcaaactaagaaggaaaaagaaaataagaaaaaccaaaagattgtaaatgttaaggaagtaagattaagtgcatctattgaagagcatgatgttcaaataaaatcaaataatgcacgtaaattcttaatagccggtgataaagttaaggttgcagtaagatttagaggaagacaaactgactacgcatttaaaggtaggaagatacttgacaatttttttgaaaagataaatgatgttggcgttattgaaaaaccagcaaaattagaaggtaaaaatatgataatgatattagcacctaaaaaagcttaa

SEQ ID NO: 15918 - DNA, 1335 bp, Clostridium acetobutylicum
atgaaaataaataagattttaatggtaagcattatttttatttttatctttaatttaaatatttgtgtaatcgttaaagctgatgctaacaattcgaatgaaaccattgtaagttctgatggaacaggtgattatacaaatatacaggatgcaattagtgctggtaagaaaaatattataataaaagatggaacgtatttattgtcatcggctttgataataaagaataataatactgttataactggtgcatctaaaactggtgtaaagataatacaaactaatacagcagcagacggtgttgttatctacgcggataacgttaaggtatcgaatttgactgtagattgtcagaaatatgcaggtaggggtacagctatagtagaaggacattctaataatgtaatggttagcaattgtatagtatatggttcaaatagtaatttttctatttactttgcaggtaaggattattctagcgatgaagatactataaaggcagttgaaaatggagatctggataaaaacaatgttgtaaaggattgtacagtatattctacaaatgaaggagatggagtgattttagcacttcagcgctatggaaagttattaaataatactataataggaacaagaattgctttctatatgtgtaattcatcgcaagtatgtggaaatacaattaatgattccaagtcccatggtatctttgtatctataccagcttttaataatattatcgaaaacaatataataaataattgcgcattgtcaggtataaaggtagcagcggaaacagagcataccaatccggaaataaacaatcatacctatatgggaacgggttttactatagataacaataagataattaatcctgcatactttggtattgaaatagatgaactagcagattctacaatagttagtaataaactgagtaagtgtgattatgtaggaatatatatgttgaggtcaaacaatttgcatgtagtacaaaattgtgtaatagatagtggttatggagtaaatgaaccaaaggattctaattattctaaaaatctttcgaaaaatataaaatgggatttgaatagcaatgcggctatatttgttgactataatacaaaatatattgctattatcagtaatagtatagataatatgacatctggctgcgctcatgctatatttgaaagtaattttgataataatgaagcaaaagataacttttatgttgataatgtaattagaggaagttatggaagtaaaacaactaatgttaatattgactatagtgttttacctttgttttatattggaagattcataagataa

SEQ ID NO: 15919 - DNA, 849 bp, Clostridium acetobutylicum
atgaataatggaaaattatttttggttggaacacctataggaaatttaaaggatataacattaagggctttagagacacttcagaattgcgatgttattgcagcagaggatacaagacaaagtttaaagcttttgaaccatttcgatataaaaaaacctttaataagttatcataaatttaatgagaataacagaagttctgagttaatggatatggttagagaaggcaaaaaagtagctttagttactgatgcaggtatgcctggaatttctgatcctggaagtgttatagtagagaagttcatagaaaataatcttgaatttgaggttataccgggtcctactgctctaattacagctttagtatactctggtttagatacctccaaatttgtatttagaggctttctacctaaggagacaaaagatagaaaaatagtgatggaggaagtaaagaatgttaaggatactttaattttttatgaagcacctcataaactattaaatacattagggtttttgttcgataatcttggtgatagggaaatagctatatgtagggaattaacaaagcttcatgaagagataaaacatacaaccttaaagagtgcaattgaattttatgagagtactaaacctaagggtgaatacgtactaattatagaggggaaaagcgaagaggaaattgctattgaaaaaatgtccgaatggcaagatattaatgttgaagaacatataataaagtgtatggaagaaggactgtccaaaaaagaagctataaagaaggttgctaaggctagaaatctttctaaatctgaggtgtataaatattctataggtataaattga

SEQ ID NO: 15920 - DNA, 1563 bp, Clostridium acetobutylicum
atggctaaagataagaggatatccctgttaaaggttacttcaatggttattataataaacttattatctaagataacagggtttattagagattttattacagcgtctaagtttggtacgagtgtatctgctgatgctttttcaatgtcttctgttgttccgaatataatatttgctatacttggagcagctatcgtaaatacttttgtacctatatttaatgatgttattgtaaataagggagaaaaaagggcttttaagttttctaataatgttataactgtattgactttattgtcaataattttaactttgctgggagagatattttgtccgcaatttgttaaattgatagcaccggattttcatggctataagtacttattgacaataaagttaacaagaatatttttattgataatcatagtaaatacttgggtatttttatctactgctatattgcaggcaaaggaacattttttaataccctctttaataggaattccatataatttattagtaattgtgtatttgctattttttagttctaaatatggtgttttgggattaactgaagttattgtatttgctatgtttgttcaatttttaattcatgtgccttctttagcacgtatgaaatatagatacaaacctgagtttaatatttccgatggatatttaaaaagtatggttgtcttactaattccaatattactagggacaagcgttcagcagattacatctctttttaatgggagattttcatcatcacttgaaaccgggagcgttgcagctttaagttatgcatctagacttaattcgttagttatggacatatttgttatatcaatagttacagttatatatccaaaaatgacaaagctatcctcagaaaacaaaataggagaattaattgaaagctttaatatttctataagatcaataactataattttgtttcctataataacaataatattaattgaaagtgtgcccatagtaaaaatattgtttcagagagatgcatttggaaataaatcaacgttgatgacttcaacagccttattttattatattataggtatcattgcagctggacttagagaagttttatgtaggatgttttatgcactaaaggatactagaacgccaatgataaactccgcaattactgtgcttgtaaatgtagttttggcatactatttaaaagatgttttaagacttggaggtattgctttagcatcatcaatagctgcttatgtatctagtattttactttttataaagctaaactcaaagcttaaaaatattaattatagaaaaacaataggtgtcaccataaaggttatttttgcgtcaataggcatgggaatattcttaaaggtactctatcagatagtaggacaagctttgcttaagaaagcaataataattgagattattggatttggtggaattactctaatagcgctattaatatacatgctgattttatacttaatgaaggtagaggaaataaatatggtatcagcatttttatataaaaaaattaaaagaggttaa

SEQ ID NO: 15921 - DNA, 630 bp, Clostridium acetobutylicum
atgaaaaaaggtatactaggaaaaaaacttggtatgacacaaatatttaatgaagaaggaaaagttgttcctgtaacagttatagaagcaggtccatgtgtagtaattcagaagaaaacttcagaaaaagaaggatatgatgctatacaggttggattcggaactataagggaaaaacttgttaataagcctttaaaaggacactttgcaaaaggaaatgttgaactaaaaagatttgtaaaagaattcagattagaagatacaagcagctatgaagttggtgctgaaataaaggctgatatatttgcggcaggagaaaaagttgatgtatcaggagtttcaaaaggtaagggattccaaggtacaataagaagatggggagcacatagaggacctatgtctcacggatcaaaattccatagagcagttggttcaatgggaggatcatcagatccatcaagaacttttaaaagcaaaaaaatgccaggacatatgggccatgtaaacacaacagtattaaatgttgaagttgcaaaggttattcctgaaaagaaccttatattaataaagggcggagttcctggaccaaacaaatcatttgtagttataaaaaattcagttaaagcttag

SEQ ID NO: 15922 - DNA, 1449 bp, Clostridium acetobutylicum
atgaaattgaaaaaaataattggtgatgtgaaatatgaacttatatgtggagatttgaacgtagaaattgataatttaaattacgattcgagaaaagttaatgaaaagggattatttttttgtattgaaggatatacaagtgatggacatgattttatagataaggcggtagaaaaaggcgctgatgttatagtatgtactaaggttcctaaaaagcttcctaattgtactgtagttaaggttgaggatggaagaaaggcaatggctgttatgggggccaatttttatgataatccatctcataagttaaagcttataggcattactggaaccaatggtaaaacaacttctacatatatgatgaaatctatgcttgaaagctcgggatataaggttgggcttataggtactatagcaaactacataggagataaaaaaatagaaagtcatagaacaactccagaatcattagagcttcaaaaattatttagtgatatggtacatgataaaatagattattgtgttatggaggtgtcatcacattcattatatcttgacagagtatacggaatcgtctttgaagaaggtatatttacaaatttaacacaagatcatttggattttcataaaacctttgaaaattattataaagcaaagatgatattatttaaaaacagtaaaaggtctataataaatattgatgataaatatggtgaaagagttttcaaagatgcaggtaatgataaaataacttacggtcttacagaaaaggctgatttaaaggcggaaaatttaaaaatgacatcaagaggaacagaatttgatttgtgttataggggattaagagagcatgtgaaaataaacattccgggaaagtataatgtatataatgcacttggaagtgtagctgcatgcttaaatgaaggaataagtatagagaaggtgaaagatggattaaataaactttcatcagttcctggaagatgcgaaatagttacccacaatacaaatttggattttgatgtggtattagattacgcgcacacacctgatgggcttgaaaaggtacttaaagcttcaagagaattcacaaagggaagacttatttctgtttttggatgtggaggagacagagataaaactaaaagacctataatgggtgaaataggctcgaagcttagtgatattgcagtaataacttctgataatcctagaagtgaaaatccagaagaaataataaaggatatagttcaaggtattaaaactgataactatgtaatagtagagaatagaaaagaagcaataaaaaaagctatgcttatggctaaaaaggacgatgttatagttttggctggtaagggccatgaaaattatcaaatactaggtgataaaactattcattttgatgaaaaagaaatagtttcagaatttataaaggagctgttttaa

SEQ ID NO: 15923 - DNA, 1320 bp, Clostridium acetobutylicum
atgaaaaacaaatttaaagtttctttagtggtatttttaatcgtaatacttggatgttttacaagtgtttttgcggataataccaatgatggtaatgaaattggaaaatctaattttaacaatacggttgacaatagtgccaaagtcggagatcagttattgcatcctgaaataggatggaaaagagtagacgataataataaaaatttcacttacagtagcagcatgggagccattactgattcaagggactataattctaccgcgcacactactatttctaaaaatcaatcttatgcagaaattaaatttagattttatgggagtaaacttagaattattgcatgcacatggcaggatcatagtaaaaaaatttatgtagatattgatggaaatattgaagtatataaccctagtgtaaaaaatcaatttgtaacacttgcttatgaaaaatcagatttacagttaaaatgtcatgatgtaaagatttataccgatgtaaaaggagatcctaatgttgttaatggtgtatggtttaatttggatgcaatagatatagattcaactggttatttagtacattcagaatcaactttagcaacaggtataacattaaataaaaacacaagttcgttagaggtaggacaaacagatacattaacagcagcagtaactccaaatgatacaaccaataaggctgtaacatggacatcgagtgatccaaatgtggtaacagtagattcaaatggaaaagttacagcagtaaaagaaggaaaagctactataacagcagttacacaggatggaagtaatttgagtgtacagtgtacgataaatgttataaattcaactactataagtttaaataaaacaacagattcaataaatgttggacaaactgataatttattggcagatgttagtccttcgacagaaggagtaacatggacatcaagtgatagctctgttgtaacagtggatggttcagggaaaattactggagtgaaagaaggacaagcaacaataacagcagcaactgctgatggtaaaacatcaaaatgcacagtaacagtaagccaagaagtaaatacagataaggctgtacttagtataactatgacgaatggtcaaactaaacagttcaatgtaactatggatgtagttaacaaatttatagattggtataagttaagagctgcaggaagtggagatccgttttttcaatttgacataactgatccttcaaagcctaatgttgtaaaaacagattatatcatatttgataaaatatcatctttcgaagtagataattataagtaa

SEQ ID NO: 15924 - DNA, 450 bp, Clostridium acetobutylicum
atgatgaattatagaaaagcagatatgaaagacatatctttacttgtgagtattagaaagaggcaactcattgatgaaggtatagagcctaatattgatattgataaggaattgacgagatattttaataacaaactggctaataatttattggttgaatggattgcagaagagaataaccaaattatagctacagctgctattgcatttattgattttccaccaacatatactaataaaactggaagaaaaggttatataactaatatgtatacagaaccgacttctcgtggtaatggtatagctacaggaatgttagatagattagtaaatgaagcaaaggaacgaaacattcataagatttgtttagtagcatcaaaacttggaagacctgtctataaaaaatatggatttcaagatacagatgaatggttggaattgaatttataa

SEQ ID NO: 15925 - DNA, 2730 bp, Clostridium acetobutylicum
gtggagacaaaaacgaatatagatacagtggaattggcattaaataaaaaatatttaattaaaccattgatgacaatagaggagataaaaaactcaaatttagtagagataatggatgaaaaaagtaaggttaatctagaagaaaatttgcagtatcctctgctgttaaaacatagtataaatggtgaggctgtaaacgttagattaaaaattgttaatgaaagattacttggtatctatattgaagtagattacgaaggaagtttggatggctactactctagtgatggagcagcgagtgaacaggctaacgacaaacagattccaaaaataaaaggcgtaaatgcagtggaatataaaaaggtacaagaattatgtaagatttatggaaggtttccaagcgaggaggattttactggaacaattaagaaattgcaaagtaaaattgcaaaaataactgatgaattaattagacttaatcaagaaagatcaagtttagaggaagctaataaagcgtttcaggctcttgatagcatatataaagaatatgaattgtccggatttgatgaagatgtactaaataaaaatttggacaacataggtaagtatgaaaaaatcaaagagaaagttttaaacacaacagatattaaagaagaagctgagctagaagaaagaattaaaactattgaaaacgaaataaaaaaacttgatcaaattaaaaatgatattagtttagatagcaatcaaatttcagattcttatagtgcatatcaaaagtataaggatattggtacaagaaaattagaaaagataaaaaaggaattcatttgtaaccttaaggctaaggacgaattgaagagtattatcgcatgtgataaagataaaattacgcgttatttttacaaggaaaaaacaaaagtaataaatgagaatataaaaagattaaataaggaaattaatgcaattagcattattgaagaaggcgtagacgataatatagaatatttaatacaaaagcttaaggatgaagaaagatatcttaaaccaaatcatccattaaatgatatgaataaagaaaatgaaataaagaaaatcgctaaaagtgctatggaagatgtcaattcaaatatggatagtgatttaaatgctataagtgaattgtataacatagaaagcagaatggatcagattcaaagaaatttaaaactaaaaaaggatttagttgaattgaaaaaggaagctcagcttttagaaaatgctaaggagaagcttgatatacttgaaaaatataaacctataatggttactagaaataaacataaagataatgaacttttcaaaaattcttatgagaaaaaatatgaaaaagaaataaaagagtacaaccaagctgaggatgaattaaaatcaatgaatataagtaatttggatgactacgataaagctaaaattatattcgatgataaagaacaagagcttatagaagctgaaaatatatcagatatagcaagcttagatgctgaaaaagagaatagcaagataattaagtacaaagctaaaagagacgatatcattaagcagaacagtgatatattgaatgttaatatggaaacttattttgccgatgaagttaaagaggactcatcaaagaaaatacaaaatactataaatgaaaaagaattattaaagaaggacgaaaacggcataaataaggaaaatgaattaaaagaaaataaggatatcgtaaaagaagaaagtttaccaaaagaaaatgtaaataacaagcaagaggataacaaaacagtaaaaccagcagataataaaaataagggaaagcaagttaaggaaaacaaaaacaataaaaacaagtcagtaaaaaatggacaatctaaaaataatacacaaaagaataagcctcaaaagaagactttagaacaattgaaaaaggaacttctgtgcagccttaaagctaaagatgaacttaaatctattagtaagaacactataagcgaagatatgaaagctttttgtgaagaaaaagtgaaaaaaatagatgaagatataaagatattagataaagagattggttcacttggagttctaggtaagagtgaaattgatgataagataaactatatgaaagagaagtttgtttttgtatcaaagatgtataacccaatagatcaagaaagatattcaaggaaatacaattcattaaaggaaaatcaaataagagaaattactgaaaaagctatggcaaatatggacaaagctatagttgaggaatttaaagacataagtaagttacatactattgaaaatagaatagtagaagttcaaaaagtactagatttaaagcagcaaatgattgacttggaggaagaaggaagaaagctagaggaagctaaggaaaaattaaatatagtaaacagatacggatatatgatgggctttgttagtgataccttctatgtaaattcttatgccaatacgttaaaatcacaaagggaagcatataatcaagcaaaagaggagttaagcgaattaaatataagcaataaaaaggactttaaagaagttaagaaggcttacgatgctaaaagaaagagaatattagcagataaaaacatatcacaaataacaaatttagatagagaggaagaacttgaaagaatagagaactacagaaaaaaacaaaatgaaattattgaaaaatataaagcagtataa

SEQ ID NO: 15926 - DNA, 2223 bp, Clostridium acetobutylicum
atggctgaattatcagatttattagaaaagatagatgaaaattgtaataatgtagataaagatattgtcattaaagcttacaattttgcatatgaggctcataaacatcaaatgagggagtccggagaaccttacataagtcatcctctcgatgtagcgtgtattttagcagagatgggtatggatatgagtactatagttgcaggaatactccatgatgttatagaggacacaagttatagctatgatgatattacagaaatgtttagcaaagaagttgctgatttagtatcaggggtaacaaagctagataaaataacttataagacgaaggaagagcagcaagctgataatgtaagaaagatgcttcttgcaatggctaaggatataagagttattttaataaaacttgcagatagacttcataatatgcgtactcttaaatttaaacgtgagcaaaaacaaaaagagaaggcaaaggagactctggatatatatgctccacttgcacatagacttggtatgtctaagataaaatgggaacttgaagatttgtccttcagatatttgaaaccaaaggaatactatgagcttgtggatctaatagctgaaaaaagagttgaaagagaagaatacataagcaagatagtagaagaacttaaacttaatttggaagcatcagggataactccagatattgatggaaggccaaaacatttttatagtatatatagaaagatgttaaataagagtaaaagcttagatcagatttttgatttaacagctgttagaatactagtaaataacataaaagagtgttatgctgcccttggaatagtgcatacaatgtataaacctataccaggcagatttaaagattatatagctatgccaaaacctaatatgtatcaatcacttcattctacggtaataggacctgagggaaagccttttgagattcagattagaacttatgacatgcataagacagctgaatatggaatagctgctcattggaaatataaggaaggaacaatagaaagtactcaaaatgttcctcaaaataagaatgcaaataaagatgatactaagcttacatggataagagagatgcttgaatggcaaagagaaacgccaagtgctcaagagttcatggaaaactttaagatagatttattttcagatgaaatttttgtttttacacctaaaggtaaggtaataaatttgccgtataatgcaacaccagtagactttgcttataaaatacatacagatataggaaataggtgtgtgggtgcaaaggttaatggtaaaatagttccacttgattataagcttaaaacaggagaaatagttgatatactaacaacatctttagttaaaggtccgaatattaattggcttaattctgttactagcaatcaggctaaaagcaaaataaggtcttggtttaaaaaggctaaaagagatgaaaacataagcaagggcaaagaactcttagaaaaagaatcgaaaaagcaggaatttaattttggagagatagctaagggtgaaaatttagagttagtattaaaacgatataatatgaactcaatagacgatttatatgcttctgttggaataggtgcagtaggggcatcagtgatattaagtagatttaaagatatttatgaaaagaataaggataatggttctcttacaaatgaagaagtacttgaaaatgtaaataagaacattcataaagaacactcctctaaaaagatttctaagagtgagcagcctggagtaacggttaagggcgtttctgatgtcctagtaagatttgcgaaatgctgtacaccagttcctggtgatcctataataggttatattacaaaaggcagaggagtttcagttcataggactgattgcacaaatgtaaataatttaatcaaagaggatagttcaagaatcatagaagtaaaatggggaaaaagtaaaaacgaaagttatatggctgaagttgaaattaaagcggaagataggcaagctcttcttgcggatgtggtagaagttataagttacatggaaatagcaatagaatcggttaatgcaaaaacttcaaagggatcagcatatctcaatttgaagttaaagatacaggatgttgagcatttagcgctgcttatgaaaaagcttagaaggcttccaggcattattgatatatatagaactaatagctag

SEQ ID NO: 15927 - DNA, 507 bp, Clostridium acetobutylicum
gtggtaaataagaatagacaattaaaagaacaaaaagtagcagagataaaagaaaagatgggaaaaaccgaagctatgataatggttaagtaccaaggtttaaatgttgaggaagacacagagcttagaaaagctttaagagaagctggtgttgaatatagagtatacaaaaattcattagcagtacgtgcaataaatgaattaggatacgaaggaattgctcaatatttagaaggaccaatagctatagctatgagttatgatgacccaacagctccagcaagaataataaacgattttgctaaaactcataaggcattagaattagttgcaggatatgttcaaggagaagtatttgacgttaataaagttaaagaacttgcttctgttccagcaaaagaagtgcttattgcaaaattacttggaagtttcaaagctcctttatcaaatttcgcttatcttttaagtgcaattaaagataaaaaggaagcagaagaacaagcttaa

SEQ ID NO: 15928 - DNA, 2091 bp, Clostridium acetobutylicum
atggaaagaatagacaagatgtttggtgaaaatgtatttaatgatgctgttatgaaagaacgtcttactaagccaacttataaagctttaaaaaagactatagataaaggtgagtcacttgatgttactgttgctgatgagatagcaaaagtaatgaaggagtgggcaatagaaaaaggagctacacactttactcattggtttcaaccgttaactggtttaactgcagaaaaacacgatgcatttatagatccagaaggttcaggaaaagtaatccttaagttttctggtaaagagttaatcaaaggagagcctgatgcatcttcattcccttcaggaggacttagagctacttgtgcagctagaggatatactatatgggactgtacttcaccagccttcataaaggatggaactctttgtattccaacagtattttgttcatatacaggagaaatactagatacaaaaggacctcttcttcgttctgttgatgctttatcaagacaagcaatacgtgttttaagatgtcttggtaatactacttcccaaaaagttttccctaatgtaggacctgaacaagaatattttatagttgataaaaaatcttatgacgaaagagaagaccttatatttactggaagaacattatttggagcaccatctccaaagggtcaagaactagatgatcattattttggtgttcttaaagaaagagtttcagcgtttatgaaagatgttgataaagaattatgggctcttggaataacggctaaaacaaagcataatgaggttgcaccagcacaacacgagattgccactatatatacaagtggaaatttagcaacagataataatcagcttgtaatggaaatcttgaagaaaattgctttaaaacatggacttgtatgtttacttcatgaaaagccatttgcaggaataaatggttcaggaaagcataacaactggtcaatgggtacagatgacggacttaatcttcttgagccaactgatatgcctcatgataataaacaattcttattgttctttacagcaactataaaggctgttgataaatatgctgatttacttagattttctgcttctaatgcaggaaacgatcatcgtttaggtgcaaacgaagcaccaccagctataatatcagtatttgttggagatcagcttgaggatatccttgaacagttagagaaaggaaaagctacaagtactaaaggaaattcaaaattagatttagctatttctacagtacctgctgtagagaaggatgcaactgatagaaacagaacatcaccatttgcatttacaggaaataaatttgaatttagaatgcctccttcttcaaaatctgtagcagaacctaatactgtattaaacgtaatagtagcagaggttttatctgaaatagcagatagactggaaaaagctagtaatgtagatgcagagattgaagcaattttaacagaaacagttaaagatcataaaaaggttgtattcaatggaaatggatattcagatgagtgggttaaagaggctgaaaaaagaggacttccaaatataaaaacaactgtagaagcaacaaaagcattaatagcagacaaaaacgttgctatatttgagaaatttggagttttaactaagaaggaattagaatcacgttatgaagttgctcttgaaaattattcaaaagcaataaatatagaagctttaacaatgatagatatggcttcaaaaaagattattccagcagttataaaatatacagctgaattagcaaattctctaaatgctataaaagcagcggttccaactgcagatgtttctactgaaagtgatcttattaataaaatttcatcgcttacaggaaagcttaattttgatcttaaagaactaaaagcatcaacagaaaaagcttcagctattactgatgcttatgatcaagcatatgcttataaatttgatgtttttgaaaaaatgtcagctttaagagaagccgcagatgctcttgaagtattagttgataagaaggcatggcctttcccaacttactcagatttattatttaatgtatag

SEQ ID NO: 15929 - DNA, 750 bp, Clostridium acetobutylicum
atgaaagaggaaaatgagtacatagtgaaaagaagaaaaaaaagaagaagaaaaagaataacaatatttttatttttattaatatgtattcttgtaacattatgcttaaaattaccatattttaatataaaatatataaatgtagaaggaaataagataataaaatctgataatataatagaaaattctaagcttaaaaaaggtaataatattttttatttaaatttaaataaatataaagataatattatgcaggatccatatatcaagaatgtttctattaggcaaaaattgccgaatactattgatattattgtaaaagaaagacaggcggttttttatataaacagtggagaaaactattttattattgataaaaatggtgtattattggaaataagaaagaacatatcaggaatgaatttaataaaattggatggggttaccttgaaaaatggaaaaataggaactgaaattccttgtgattcaagaaggcttgaattaattaatcaaataactagtgtatcgataaaagataataatttaaaaattacggatgtggacatgtctcatattttgagcttaaaggtttattttaaaaatatgtgtgtagttattggaacgcctgacgatatttataataagctgaatgaagcagtaaatgtaataatttctcaaaagctaattgataaaaaaggatatgtggatgtaagtttcaagggaaatcctgtatattcattgcagcagtag

SEQ ID NO: 15930 - DNA, 1629 bp, Clostridium acetobutylicum
ttggcatatactgcattgtacagggaatggagacctaagacatttggtgaggttgttggtcaggaacatgtcacaacgacccttaagaatcaagtaaaaaacaatagaatagcacatgcatatctcatgtgtggtacaagaggaacgggaaagactaccacagctaagattctgtcaaaggcagtaaattgtctcaatcctcaagatggtgaaccatgtaatgagtgtgagatgtgcaaaaaaataaatgctggaattgcaatagatgttacagaactcgatgcggcttcaaataacagtgtagatgatataaggaatattattgatgacgtgcaatatcctccacatgagtcgaaatttaaagtctacataatagatgaggtacacatgctttctcaaggagctgttaatgcttttcttaaaacccttgaagagccccctcaaaatgtggtttttatactggcaaccacagatccgcaaaagcttccagtaactatactttctagatgtcaaagatttgattttaaaagaataaaaagagaaagtatgataggaaggttacgggaaattgtaaatgaaaaaggtgtttttgcagatgatagaagtctaggtgtcatagcaagaatgtcagatggtgctttaagagatgctgttagtatattagaccaagctatagcagaaggaaatggtaaagtagattatgaaaaggttcttcaaatgcttggcattgtaactaatgagtatatatttgacctaatggaccatgttattaataaggatatagaaggttctataaaaatagtagataaaattattcttcagggaaaagaaattacagtattcatgaaagatttcatagcacatgttagaaatcttatggtagtgaaggtaagtaaaaagccagaagaagttatagatatgtctgaagaaaacttaaaaacccttaaagagcagtcttctaagatcagaatagaagaaactatgagggatataaatatacttcaggaggccgaagaaaaagctaggaaaagcatgaattcaagaatttacatggaaatggctataattaaaatgtgcaaaatagaatacgatacttcaagtgaaatattactggcaaggataaataagctagaaacaattattagagaaggaaagatatcggttcaaaaggtagaagcgaaacaaaagccttcaagtagtcagaaggttccaaggcttactgtaaataaagcagaggaacatgacgaggcgaaacctgaagaggaattttcaagtgatttaaatataagtcttgatgatgttagaaagatatggcgagatgtaatagaaatgtttaaatcaagaagaaatatggtcatgggagttcatttaagtaatggagttccgttctcctgtaaagacggagttattgaggtaagattcacaaaagagtataatttcagtaagcagcaccttgaaaaaccacaaaataataaaaaagtcgaagaggttctacaagatatgcttcatggaagagttagagttatatattctcttgaaaagggtgatggtacaactaatcaaggtagcacagaggatatactaaagaaaacttttggtgaagaagagcttcatattattgatgaatga

SEQ ID NO: 15931 - DNA, 1260 bp, Clostridium acetobutylicum
atggtagttattgaatttaaaaacgtttcaaaacattttaatttatataaaaacaaaagctattccttgaaggaaaaatttttaaacaaggtgcttaatagaaataagcttgaagttgaacagcttcatgttcttaaaaatgcctcttttaaaattggtcaaggtgagactataggaataattggagaaaatggaacaggtaaaagtactagtttaaaattagttgctaacattataagacctaatgagggtcaggttacggttaaaggaaaaatatcttctcttcttgaggttggagttggttttcaaccagatatgacaggtagagaaaatgtatatttatatggttctataatgggacttagtaaaaaagaaatagatgagagatatgatgaaattgtagaatttgcagagcttgaaaatttcatggatacaccagttaaaaattattcctctggaatgtatatgagacttggtttttcagttgctgtaactgtaaatccagatatacttcttgttgatgaggttttagcggttggagacgcaaattttcagaaaaagtgtcttaataaaatacaagcatttaaggaacagggtaaaactattttatttgtttctcatgatatgagcacggtaagacgtatatgtgatagatgcatattcataagaaaaggtggagaagtaatagagggatctactgatagaatggttggactatacatgaagctattatatgctaaaagtgaagaacataaaaaagaagagcaaaaaagcgaggaaagtctagctgattttgattttaagcttcatgaggcagatgaatttaaagatggaaatagagaaggtaacaaaaaactagaaataactaaattatatttctctgataaagagggtagacctaggaacttttttggaactgaagaaaatataaaggtaaatgttgaatttaggaaaaatactgatattaaagcagctgttatggcatttgaaataattacagaagaaggatataagcttatataccatgattgtaaacaagatggaatgttgattacagaaatgaaggatactaacatggtgagtttttctttacaaaatgaacttttgttaaaatctaaatattatttttcaattgcactgatggatgagaatttacaagagatatacgattttagacataagcattattggtttacaattcacgaaggaaacataaaagaggatggaaaagttaaaattagttgtgattggatgctttaa

SEQ ID NO: 15932 - DNA, 378 bp, Clostridium acetobutylicum
atgccaacaataagtcaattagtaagaaaaggcagaaagacattagcagcaaagtcaactgcaccagcattaaaagagtgtcctcaaaagagaggagtatgtacagtcgtaaagacaacaactcctaaaaagcctaactcagcattaagaaaaatagccagagttagattaacaaatggatatgaagtaactgcttatatcccaggagtaggtcataaccttcaagaacatagtgttgtcctcataagaggaggaagagttaaggatttaccaggtgttagataccatattgtaagaggaactttggatgcagcaggtgttgctgatagaaaacaagctaggtctaaatacggtgctaaaaagccaaagcaaaaatag

SEQ ID NO: 15933 - DNA, 1332 bp, Clostridium acetobutylicum
atggaaattttaaagcatgtaatggatgatgttattaaaagaaatccaaatgaacctgaatttcatcaagcagtaaaagaagttctcctatctctagagatagttgcagaaaaacatcctgaatgggtaaaagacaaaatttttgataaaattgtagaacctgaaagacagattattttcagggtaccatgggtagatgacaatggcgaagagcatattaacagaggcttcagaattcaatttaatagtgctataggcccatataaaggtggcttaagatttcatccatcagtaaatcttggaatagtaaagtttttgggctttgaacaaatctttaagaattccttaactggtcttccaataggaggcggaaaaggcggcagcgattttaatccaaagagcaaatcaaattcagaaataaagagattttgtcaaagctttatgcttgaacttaataaatatataggagcaaatacagatgtacctgccggcgatattggagttggaagccgtgaaataggctatttatatggcatgttcaaaaagatacgtaatgaatctactggcgtattgactggaaaaggattaaccttaggtggaagtttagtgaggactgaagccactggttatggattatgttatttcatgaatgaggcactaaaggctaaaggtaaatcttttgacggtgctactgttattatttcaggatcaggtaatgtggctatttatgcaaatcaaaaagcaactcaacttggtgctaaagttgttgctatgagtgattcaaatggatatatttacgatgctaatggaataaatttaaatactattagaaaaataaaagaagttgaaagaaaaagaatacatgagtacacaaaatatcatcctaatgcatcttatactgaaggctgcgatggtatttggaaacttaaatgtgatatagctcttccctgtgcaacacaaaatgaaattgatgaaaattctgctaaaactttaattgccaatggatgctatgctgttggagaaggtgctaatatgccatctacaatagaagctgttgatttatttataaaaaacaaagtgattttcgggccagcaaaagctgctaatgccggtggtgttgccacatcagctcttgaaatgtctcaaaacagtatgcgctattcatggacttttgaggaagttgatactaagcttcaaaatataatgaagaatatatatataaagtgcagtaatgctgcaaatgaatatggcttcgaagataatttggttgcaggcgctaacatagctggattcactaaagttgctgaagccatgtattctcttggattttaa

SEQ ID NO: 15934 - DNA, 1158 bp, Clostridium acetobutylicum
atgaaacagataaaagtaataagtatatttggcaccagaccggaagctataaaaatggcgccattagtgaggaggctgaatgaaaataaaaatgttgaatcaaaagtatgcgttacggctcaacataggcaaatgttagatcaagttcttaatttgtttgatataaatcctgatttcgatttaaatataatgaaaaccaaacaaacgcttacaggtataacagcaagagttttggaaggtttagataaaatatttgctgatgaaaatccagatattgttcttgtacatggagatacgactacaacatttgctgcggctcttgcagcattttataagaaaatagctgtaggtcatgttgaggcagggcttagaacatacaacaaatactttcctttcccggaagaaatgaataggaagcttacaggtgcggttgctgatttgcattttgcaccaacacttggttctaagaaaaatcttttaagagaagcagttaatgaaaagaatatttttattacaggaaataccgttgtagatgcaatgaatcatacggttgaaaaagattatgtatttgaaaatgatgaattgaataaattagactataaaaataagaaagttataatggtaactgctcatagacgtgagaattggggaaagggaatagaaaacatatgtacagcattaagaagaattgctgaagaaaatgaagatgttgagatagtttatctagtacacttgaatcctgtggtgaaagatgttgtatataataatttgaatggtatgaaaggggtacacttgcttcctccacttgatacaaaggaaactcataatttaatgaataaatgctttatggtaatgactgactcaggtggtcttcaagaagaggcacctcatcttggaaagcctgtacttgttttaagagatgttactgaaagaccagaagcagttgaggcaggaacggtaaaattagtaggaactgatattaaaaagatagtagacgaagcctataaaataatgaaagatgaagaagaatatgaaaaaatgagtaaggcaataaatccatatggtgatggaaaggcttcagatagaatagttgatgctatattgtatcattttggagtattaaaggatagaccagatgaattttcacctaaaaagtaa

SEQ ID NO: 15935 - DNA, 429 bp, Clostridium acetobutylicum
gtgtttataggtgaatataatcatgccttagatacaaaaaatagaataattataccctctaaatttagggaagagcttggagataattttattttaactaagggtttagatggatgtctttatgtataccctttaggagaatggaaggtacttgaggaaaagttgaaaaagttacctcttacaaatcacaatgcaagagcttttgttaggtttttcttttctggagcaaatgaagtaagcttggataaacagggaagagttcttgtaccacaaaatttaatagaatatgcttcaattaataaggaaatcataagtattggagtatccacaagaatagaaatatggagtaaggaaaaatgggtagaatacaatgaatcaagtgtggatatgaatgcgatagcagaaaaaatgagtgaacttgggatataa

SEQ ID NO: 15936 - DNA, 1491 bp, Clostridium acetobutylicum
atgaatcacatatattataaaagtaccagaaataatgatgttagtattttagcgtctagagctattttaaagggtatatctgatgatggtggcttgtatgtaccagagagagtaccagagcttgattttgatattaaagatattgttaatatggattataaagaaatagcttataaagttatgaagactttttttaccgattttactgaagaggagctcaagtactgcattgaaaatgcctatgacagcaaatttgatacagaagaaatagctcctataaaaaaggcaggagatacatattttttagaattatatcatggtcctaccttagcatttaaggatatggcactttcaattttaccatatcttttaaaaactgcttcaaagaaaaatggaattcaggataaaatagttattttaacagcaacatctggcgataccggaaaagcagcattagaaggttttaaggatgttgaaggtaccgagataatagtgtttttcccgaatgatggagtgagtgaagttcaaagacttcaaatggtaacacagaaaggaaaaaatacacatgttgtggctataagaggaaactttgatgatgctcaaagcggagttaaaaaaatatttacggacaaagaatttatacaggagcttaaagagaataattgtgtattttcatctgcaaactcaattaacataggaagattagttcctcagatagtatattatttttatgcttattctaagatgtgctcaaaaggtgaaattaattttggagaaaagataaattttgttgttcctacaggcaattttggaaatatactagcagcatattttgctaagagtatgggagtgcctattaataagctaatatgtgcttcaaatgacaataaagttctttatgatttctttgaaaatggaacttatgatagaaatagagagtttgtaactacaatatcaccttccatggatattttaatttcaagtaaccttgaaagacttatttatcttgtatgcgatagagattcaagcaaggtggctgattttatgagagagcttagtgaaggcggaaaatataatataacagagaatatgaagaaaaaacttaaggatttttatgctggatatgctacagaggaagaaactaaaaaggctatagaaaaaatgtataaagaaaataaatatcttatagacactcatacggctgtagcttatagtgtgtatgaaaaatatttaaagaatacgaaggataaagcaaaaactgttatagcgtcaactgcaagtccatacaaatttacaaatgcagttatgacctctcttgataataaatatgcttcttacgacgattttgaactcatgaagaagatgagtgaggttataaataaggatataccaagtggtgttaaaggacttaatgaaagaaaagttattcataaagatatttgtagtaaagatgaaatgaaaaaaatagttagaagttttttaggtaagtag

SEQ ID NO: 15937 - DNA, 522 bp, Clostridium acetobutylicum
gtgaattatatttcaagtgcattaataccaattataatattttctatagttttatatggaatgataaagaaagtaaaggtttatgaatgttttgtagaaggagctaaggatggaattagaatatgtgttaatatatttccgtatattcttgcaatgcttctttctgttgctatctttagagaatctggtgcaatgcagtatttaataaatattttaaagcctgtatttaagattataggtttcccatcagagcttgttccgcttataatagtcaagccgctttcagggagtggtgctcttggagtttttgcagaaatacttaaaaaatatggagctgatacatatataggaataatagcatcaataataatgggttctacagaaactatattttacacaataacagtttattatggagctataaaaataaaaaatataagacatactttatgggcagcaattatggcagatatgacgtcaattattgtggcaatactagttgttaggtttatggggatttaa

SEQ ID NO: 15938 - DNA, 1389 bp, Clostridium acetobutylicum
atgaaaagagattttaatgaatttgtgaaatttataaaaaataaaaaaactgcagttgttggaatgggaataagtaatagaccacttatacattttctaagtaaattaggagctgagataactgcgtttgatagaaaaacaaaagaagaattaggtgatgaagtaattaatgaattttcaagtgagaacgtaaagtttgagcttggagagaattatttatctgcattaaaaggctttgatgtagtatttaaaacaccgtccatgagaatagacagcgaagcattagtgaaagcaaaacaagagggtgcatatataacatcagaaatggaagagtttataaaatattgcccagctaaaatttttggtgtaacaggtagcgatggaaagactacaactactacacttatatataatatgcttaaagaagaaggttataaaacgtgggttggaggtaatataggaacacctttgttttcaaaaataaaagaggtttctacaaaggataaagtagtattagaattatctagttttcaacttatgacaatagatgtttcacctgaagtagcagttgttacaaatcttagtcctaatcatcttgatatacacaagaacatggaggaatatataaatgcaaagaaaaatatatttacccatcaaagcaaaggtaatgttctgataataaacagagacaacgaaataacaaataatatggagagcgaagctttaggagatttgttgaaatttagcagaaacgaaaaggtcaaaaatggagcatattataataaacaagatggaaatatatatttatttgaaaataaaatatgcaacaaggatgatataaaaataaagggaatggataatgtaaaaaactttatggcagcgttttgtgcagtgagcaaggatgtgtcaaaagaaagtatgataaaagtagcaatgaattttgctggagtagagcataggcgtgaatttgtaagagaattagatggagtaaagtattataatgattcaatagcatcaagtcctacaagaactatttcaggacttaatgcttatgaaagaccagttatacttatagcaggaggatatgataaacacattccttttgagccacttgcagaaaaagggtatgacaaaataaaggtactaattttaatgggagctacaaagaataaaataaaagaaacttttgacaaggttatttgtgagaaaaatataaaattacctataatactatcagataatttagaagaggctgtatgtgaagctaaaaaggtagctactaatggggatattgtaacattatcaccagcatgtgcaagctttgattcttttcctaattttgaagtgagaggtaataagtttaaagaaatagtaaacaacttaaagtag

SEQ ID NO: 15939 - DNA, 1296 bp, Clostridium acetobutylicum
gtgaaggaaagaaagggtttaaagaaatatagtacaataataaataattttttatcactttttgtattacaaggattaaactatatattgccattaattacagtgccgtatctagtaagaactttaggaccagaaaagtatggtgttacagtattcgcaactgcatttattacatattttcaaattataactgactatggctttaacttatctgcaacaagaaaaatttcaatgaacaaaaaatacaagaaaaaaattgaagaaatatttaattctgttatgttaattaagttagctttgactattttgtgttttatagttatgttagttatagtcttttgttttaaaaggtttcaagcagactataaggtatatatttatacttatggaatgatcattggtaattttttatttccagtatggttttttcaggggattgaaaaaatgaagtatataacaatagttaatgtaattggtaaggtaatgtttacaatttttatatttatttttgttagaacttctaaggattacttaaatgtagctttattaaattcattcagttatatattaataggaatcattagtctattaattgtaaagattagatttaaaataaagtttaggattcccaaaactagtataattaaaaaggatataaaagaaggatggtacatatttactacatcttttttaactaatatattaacatctacaggaacttttattttggggttatttgtaaatgaaaaggttgtaggatattatggtgctattgataaaatagttaaggcacttgtgagtatgttttcacctgtaactcaagctatattcccacatataagtgaattgtttaaatatagtcataaagaagcaaagaatgaaattattaagtttagcaaatatgtaatgttttttacaacaatcatgtgtatagtaattgttttgtttaacaaaacaataatttatatattgtatggcaatagatatataatgtattcacatatattagcttatatgtctgtatggatatttttaagtattttaaataattttattggaattcagtatcttataggaagtggaaatggtaagtattatagtagagcatttactattgcttcaattataacacttatattatatataggaactgttgagtttatttcatataattctataatattaggatcagtagtgggtgaattagcattaactatttcaatgatttacttcataaaaagtaagctttcaaatgacaatagctgcaagggagatgtagtgaatgagcaaaattaa

SEQ ID NO: 15940 - DNA, 1035 bp, Clostridium acetobutylicum
ttggcaataacaagaagaccgctttttaatgagaatggtgatacggaaactagtaaaaagaagatagtaaatggaaatacaacaaatctaaatgattttaataatatgaaatatacttgggtatcagattggtatagacagggaatgaataacttttggataccagaggaaataaatctttcacaggatttaaaggactacggaaagcttactgacaatgaaaggacagcctatgataaaatactttcctttttaatatttttggattctgtacaaactgcaaatttaggaaatataaatgattatataactgcaagtgaggttaatttatgccttacaattcaagcttttcaagaggctgtgcattctcaaagttatagttacatgcttgatacaatatgctctcctgaaaaaagaaatgagatattatttcagtggaaggacgatgaagtacttctttcaagaaataaattcataggagatatatacaataattttgttgaagagcctagtgatgaaaattttctaaaggctataatgggaaactacgttcttgaaggaatatacttttattctggttttatgtttttctacaacttagagagaaatggaaaaatgccgggttctgctcaagaaataagatacattaatagggatgaaaatacgcatttatggctttttagaaatataataaaggagcttcaaaaggaagaacctgatatgtttacagaagagataaaaaaagaacttaaagatatggttaaaacaggtgttgaaaatgaaattacctggggacattatgtaataggagataatatccaaggaataaataagaaactaattgaagactacataaagtatttaggaaatagaaggcttgaagccattggatttgaaccaatatatgaaggatatgatgaaaatccagccctttgggttgatatatatgctgatgctaattctgtaaaaacagacttttttgaggctaaatcaacagcctatgcaaaggcaagtactttagtggatgatttatag

SEQ ID NO: 15941 - DNA, 1701 bp, Clostridium acetobutylicum
gtgaaaaagaaacttgtattgtacaatttgggtattttaataataactcttataatgataactgtattatttataaaaatcgaggattatgaatataggcaaaatacagagcaggatcttaaaagaacaaataatgtagtttccaatgtaattgatatgaacaaaggaaaagatatttcaagtgctcttaaagtcgtaataaaaaattcagatataagagtaacatatataaataaaaatggagtagttttatatgacaatgatataaatgcagaaaagcttgataatcacaacaagagagtggaagttgcagaggcaagaaaaaatggatatggttacagtgtaaggtatagtaaatctttaaaaaacaatataatttattatgcaaaggtcagaggagacggcactgtagtaagaactgctgtagagctttcctctgttgaaaggtttgaagcaagatacttaaagttctatatttatgtaatagctctaagtatcatagcggcagtatatttatcttttaagctttcttatgttattttaaatccaataagggaacttcaaaatacaagctctaggattgcaatgggagaactggaaacaagggttaatgttgaatcaagggatgaaataggtcagcttggaaaaacctttaataacatggcaggaagacttcaatctacaataagagaatctgttgaaaaacaaaaaaagcttgaggctatacttgttagtatggacagtggagttatagcagttgatagaaagcataaaataataatgataaatccatatgcagaaaaaatatttggcatagataaaaatataataggacaaagcctaatggactgtataagaaattatgaatttgaggacatatttaataaaagagcggaaggatatgcagaaataaaaacctcatggccaaaagagagaaatcttagaatcaaaactgccgatataataaatggatatgaatgcattggaactgttgctgtggttcaggatataacagatattagaaaacttgaaaacatgagaacgcagtttgtagcaaatgtatcccatgagcttaaaacaccactgacatcaataaaaggctttgctgaaaccttaagatatgttgaggatgacaatcaaaaaggagaatttcttgatattattgatgatgaagtagatagactaactagactcataagtgatatattaacactttcagatatagaaatcagaccgtttatgaaaaaagaagagtttgatgtcaatgaaataataaaagctgtctgtggacttttagaaaaatcagcctctcgtaagaatataagcttaaaagtatttggagaggatgtacctaatttaattggggataacgataagtttaaacaaatgattataaatttggttgacaatgctataaagtatacagaagctggtggagaggtatcggtatataagaagtatacaaaagatgatgttattatatccgtcaaggataacggtgtaggcataccgaaggagcatcttcaaagaatatttgaaagattttatagagttgataaggctcgttcaagagcaaatggaggaactggtcttgggcttgccatagtaaagcatatagtactgaattttaacggcagcataaatattgaaagtaagttaggtgttggaactgaatttattatcacaataccttataaatag

SEQ ID NO: 15942 - DNA, 921 bp, Clostridium acetobutylicum
atgaaattcacagctatagattttgaaactgcaaatgaaaaaagaaatagtccatgttcaattggtattgttgttgttaaggatggacatgttgtagaaaaatcacatcatttaataagacccaaggaaatgaggtttatgccaatcaatattggtattcatggaataagaccagctatggttgagaaggaaccagaatttgataaggtatgggaaaagattaagcactattttgatgacactttagtgatagcacacaatgcttccttcgatatatcagttctaagaaaaagtgctgagctttataatatagagcttccagagtttaattatatttgtacaatgaagcttgctaggaacttttataaaggcattgaaaatgcaaaattgaatacagtaaataattttttgggctatgagtttagacaccatgatgcattatatgatgctcttgcctgtagtaatataatgcttagtatatcaaaagaattaaaatgtaaggatataactgaaatatctaaactgttaggcgtaactgttggaaaggtagatagtaaaggatataaaccatcacaaactaaaggaattgcagtaagaacatcagatagaatttatttttctaaaaaaaagagtgcctttgaaagattaaaagctgatgaatttaaaaatgaggttgtggtgtttactggaagactagattctatgtcaagagacgaggcaatgggattagtcaggagacttggaggtacagcaggaagttctgttacaaaaaaaactacaatactagtaaccaatatgaaaaacataaaaaatttacgaagggaagaaatgagtaacaaactaaaaagggcatcggacttaaatgccagaggacagaatataaaatttttaaatgaagaggaatttttaaagataaaatag

SEQ ID NO: 15943 - DNA, 1221 bp, Clostridium acetobutylicum
atgaataaacccgaacttttagcaccagcaggtaatattgaaaaattaaagacagctattgaattcggtgcggatgctgtctatttaggtggtagtaaacttaatttaagagcttttgctgataatttctcgctagatgaattaaaagaaggaatagaatttgcacacagccgaaataaaaaagtgtatattacactaaatgtttttcctcataatgaggatttaaacgggcttgaagagtatttaaaagatctttatgaaattaaggcggatgcagttatagtatctgatccaggcataattatgacagctagagaagttgtacctaacctggaaattcaccttagcacacaagccaatagtgttaactataaaacagctatattttggcataagcagggagttaagagaatagttgtagcaagagaactttcattaaaagaaataaaatcaatgaaagaaaaaatacctgaaacttgtgagatagaggcatttgtacatggttctatgtgcatatcttactcaggaagatgtcttctttctaattatatgacaggaagagattccaataggggtgcttgtgcacaaccatgcagatataagtattcattggtagaagaaaagagaccaaacgaatacttcccagtttatgaggatgaaaagggaacttatataatgaattctaaggatttgtgcatgatagagcatataccagacttaataagtgctggaattgattccttaaagattgaaggaagaatgaagagttcatactatgttgcatctgtagtaaaagcatatagagaagctattgacacatattttgaaaatccagaggaatataagtttaatgaaaagtggatggaatatcttactaagccaagtcatagaagatatactacaggattttattacggcgatagtaataaacagcactatgaatcttcatcttatataagagattttgatattgttggtatagttagaagctatgataaagaaactggaatagcagttatagagcagagaaataagtgttatgctggagataaagtggaggttttaaggcctcgtggagaaaaccttgaaatagaacttaaagatttgaaaaacaaagatggagaggcaattgagagcacacctgtagcgcaaatgatatatactattaaaactgataaagtgcttgaaagcggaaatatgctgattaaaggtaaaaattag

SEQ ID NO: 15944 - DNA, 171 bp, Clostridium acetobutylicum
atggcatataaaataacagacgcttgtgttagttgtggttcatgtgcttcagaatgtccagttagcgctataagccaaggagatactcaattcgtaattgatgctgatacatgcattgaatgtggaaactgtgctaatgtttgcccagtaggagctccagttcaagagtaa

SEQ ID NO: 15945 - DNA, 912 bp, Clostridium acetobutylicum
atgttaggtaacttttttgataaacttaaaaatggtctttcaaaaacaaagaacaatcttacaagtaagataagtgatgtcttaacatctacagtaactatagatgatgatttatatgatgagctagaagaaattcttataacttcagatataggagtagaaacatctttgtacataatagataagcttaaagaaaaaataaaagaaaacaaggtaaaagacccatcacttgtaaatgactgtttaaaagaagttataaaagatatccttggtgataaaaagggaagcttgatgccaaaacaaattcccgaaacaatattagttgtaggagtaaatggtgtaggaaaaaccacttctattggtaaaatttcttcaagacttaagtctcaaaatttaaaggtaataatggcagctgccgatacatttagagcagcggctatagatcaacttgaggtttggagtaaaagagccaatgtagatataataaagcatcaggaggggtctgacccagcagctgtggtttttgatgctattgaggcagctaaagctagaaaagctgatgtattaatatgtgatactgctggaagacttcataataaaaagaatcttatgaatgagcttgaaaagataaatagaattattgatagagagtttagtcaaagtacaagaagaacattacttgtacttgatgctacaacagggcaaaatgcagttattcaagcaaaacaattcatggaggtttgtaaggtagatggtatagttctaacaaaattagatggtacggctaaaggcggtattgttatttttataaaacatcaacttgatatacctgttgaatttgttggggtaggagaaggaattgatgaccttcaggaattcaatccatcggattttgtagaagctttattttag

SEQ ID NO: 15946 - DNA, 858 bp, Clostridium acetobutylicum
gtgggattatttaagaagagaaagtatattactgtaagtagtaaaaacttggatgaaaataatgatgttgaaaatcaacctaccatacctgatggaatgtggataaagtgttcaaagtgcggtaaaattctttataaaagtgatgttgatgataactttaaagtatgtcctaagtgtaatgcacatcttagaatgaatgcaagagagagaatagaatttataattgacgaaggaacttttatagaatttgataaaaatatgatggcagctaatccattagagtttccaaactatgaagctaagataaaaagcatgcaagaaaagactggattaaaagatggagtggttacaggactcggaaacataaatggatacaagactgttatagcagtaatggatagtaattttatgatgggaagtatgggttcagtggttggtgaaaaaatcacaagagcaatagaagaggcgactgaaagaaaacttccagtaataatctttacaacttctggtggagcgagaatgcaggagggaatgttttctttgatgcagatggcaaagactagcgcagcgcttgcaaaacataatgaagcgggacttttatatgtttcggttttaactgacccaacaacaggtggagtcacagcaagctttgctatgttaggagatataatactagctgagcctaaaactcttattgggtttgcgggaagaagagttatagagcagaccataaatcaaaaacttccttctgattttcaaacttcagagttcttatttaagcatggatttatcgatatgatagtggaaagaaaagaattaaaagttactttaggaaatatcctaagaatgcacagttag

SEQ ID NO: 15947 - DNA, 840 bp, Clostridium acetobutylicum
atgaatcaaataagcattaataatgtagattatatttatagcgatggctttgaagctctacatgatattaatatgagtatcaaaaaaggagaaagagtagctatacttggcccaaatggagcaggtaaatcaactttgttcaatatgcttaatggaatcatttctccaacgtctggagaggttaaaataaatggactagatactaaagttaagaagaatctaaatgtaataagaagagatgttggaatggtatttcaagattcagatgatcagctttttaactcaagtgtaatgcaggaaatagcttatggtttagtgaatatgaaagtatcagaggaagaacttcaaagtagagttaagtgggcgcttaatgttgtaaatatggatggatttgaaaaaaagagtccacataacttaagtggtggtcagaaaaaaagaatagctcttgccagtgttttggctatgaagcccgaagtcttagtattagacgaaccaacagtatctttagatccaaggggcactataaagcttgtaaaacttctaaaaaaaataaatgaagagatgaaaattacaatagtattttcaactcatgatatggatatagtcccactttttgcagataaggtatacgtattaaatgaaggtaaacttattttacaaggaggagtaaaggaagtattcaacaataaaaaagttcttagaaatataaatttaaggcttccaagagtggctcatttagctgagatattgaaaagtgatggatgtattgaatttgatgagctaccgcttacaattggtgagataagaaaatgtatcaaaaatttaaagggggggatttaa

SEQ ID NO: 15948 - DNA, 888 bp, Clostridium acetobutylicum
atgaatgataaaagtacttattttgatagaaaaagtaaaaaagaagattgttttgtagatatattttttaaagacgacatattaaatggtgaaaatttcaaaaggcattggcatgaacatttacagatttattattttactgctggcacagcctaccttgaatgcgcacaaaataagtttgatgtaacaaccgggagtattgctattataaatagtaatgaactacactatttagaaagccattcaaacaatttaaaattttatacaattcgtattgaacctactttcctttttagtaataaagaagatttactgcaaaccaaatatcttgctcctttagcattaaatcgtattacctttaaaaatctaattgaaaatgatttgcagattctagaatgtattaaaaccatattaaaagaatattccagcaaaaatattggatatgagcttgctgtaaaagccaatatttatcaactaattgtctatttattgagaggatacgtagataagatactaaatgaaaatgaatttgaggaaagaaaacgtattttaaataaatttcagtgtgtatttcgtttaattgaagaaaaatatactgaaaagcttactctaaatgaacttgcagattgcgtcaatttctctacacatcatttttgcagaacctttaagcaaatgactggtaaaactactacggattacataaatggaattagattatataaatcaactaattacctaaagcaaacggatttaaacattacagaaattgcaataaaatgcggatttgacaataataattatttcagccgtctatttaaaaaacattatgatatgacacctacaaaatacagaaaattgtatgccggacatttttcgaagattatttaa

SEQ ID NO: 15949 - DNA, 927 bp, Clostridium acetobutylicum
gtgggaaagattgcatttgttttttcaggacagggttcgcagtatgttggaatgggaaaggatctatacgataattaccaaagcgcaaaggaaacttttgataaagctgatgaagtgcttggctttaaaatcagtgaattatgcttcgaaggaaaagatgaagaattaaatttaactgagaacactcagccagcagttttaattactagtatagctgctttaagagcacttgaagaagaaaaaggaataaaacctgatgttgttgcaggtctaagcttaggagagtattctgcacatgtttgcagtgggagtttttcatttgaggatgcagtaagattagtgaaaaaaagaggaagatatatgcaagaagcagtaccaaaaggaataggtactatggctgctataatcggacttgaaggtgatgtagttagaggtatatgcgctgagcaatcaaaagaaggaatagtagaggtagcaaattataattgtccaggacaaattgttatagcaggagaagttaaagctgttgaaagcgcctgtactaagttaaaggaaagcggagcaagaagaacagtaatgctttcagtaagtggaccatttcacacatctatgctaaagagtgctgctgaaaaattagaagaagaattaaagaatataaatatagaagatatgaaggtaccagttattacaaatgtaacaggagactatgtagaagataaggatcagataaaaggtttattgaaaaagcaagtcatgagctctgttagatgggaagatacaataagaagaatgatggatgatggagtagatacatttatagagcttggaccaggtaagaccttaagttcatttataaagaaaataaatagaaaaatgactatatttaatattgaaaaagctgaagatttaaataaaattcagttatag

SEQ ID NO: 15950 - DNA, 408 bp, Clostridium acetobutylicum
atgaatagaaagaaaagtagagaagtagctatgaaattattgtttgaaatatctattaacaaaaatagcatttcagatacaatagaacattataaagaaaataacgaaatagagaacttagattttgagtacatagagagaatactacgaggaatagatgaaaacatggagtacatagattctaaaattgaagaaagctccaagaagtggaagataagcagaatatccaagataaatatcaccatacttaggatggcagcatatgaaatattcttcgaaaaggatataccttgtaaggtttctgcaaatgaggctgttgaacttgcaaaaagttatgctgaagagaactctttctcatttgttaatggagttattggaaatttaataaatagttctgaggaaaaatga

SEQ ID NO: 15951 - DNA, 1224 bp, Clostridium acetobutylicum
atgaatttttttaaagtgtcatctgtggacgaaacgaaagatattatagatgaatattttcatcttgaggtagaaggcgaacaagttgatatttttaattgtgtaaacagaatagcttttgattatattagagcggattgtaatatacctgaatttaaaaggtctactgtggatggatttgcagtaaattcacgagatgtatttggagctactgaagctattccagctatacttacgcttaaaggtgaaattcttatgggaaaagtaactgattttaatatagtggatggtgaatgtgcttatgttccaactggaggtatgttgccggagtatgctgatagcgtaattatgcttgaatatactcagaaattggatgaagataccatactagtttattctcctgtagcatcgggagataacgtaatacaaaagggtgaggatatacaaaatgacaatatagttataagaaaaggtgaaaaaattagaccatatgaagtaggtgtacttgcaagtattggaatcaaacatgtaaatgtttgcaaaaaaatcaaggtggggattatttctactggaaatgaattaatagcatgtgaagatgaactgacacttggtaaaataagagacataaatacatatatgctttgggccgctataattgatgatggagctgaacctataaattatgggattgttaaagatgattataagcttttaaagcatactatttgcagagcaactgaagaatgcgatattttagtgatttcaggtgggagctctgttggaaaaaaagatcaaactataaaggccattgaagattttgaagatggaaaaatcttagttcatggcgtgtcggttaagccaggaaaaccgacaatagtagctaaaaaaggagataaaataatatttggtcttccgggtcatcctttagcatgctcaatagtatacataatatttataagggaatatataaataaagccatgtgctataaaaaggaagtttatgctgtaaagtctataatgagtattaattatcataaagctaaaggacgtgaagaatatttgcctgttgcattagaaaatgatggagataggattattgctaaacccatatttggaaaatccggtttaatatctacattttcaagagcgtggggatatataaaaatagaaaaagatttagagggcttaagggaaggacaagtagttgaaatatataagttgtaa

SEQ ID NO: 15952 - DNA, 1257 bp, Clostridium acetobutylicum
atgaataaatttattataaagggtggggaaacattaaatggtgaagtagatataagttgtgctaaaaattcagttttacctataattgctgcaactatattatgtggagaaaagtgtacgataaaaaattgtcctatgcttttagatgtatttgtgataagtgatttgttaaaatctataggagcacaagttgatatagacttaaacagtggcgatatgaaaatagatacttccaatgtaaaaagtattgaaccagatgctgaacttgttaggaagatgagagggtcctttttaattatgggtcctatgatttcaagatatggaagatttaaaatatcactgcctggtggttgcaatataggaactaggccaatagatttacatcttaaaggattgaaggcattaggtgtaaatatagaaattggtcatggatacgttgaagcaaatgctgctaagcttttaggagatagaatatatcttgattttccatctgtgggtgctactgaaaatataataatggcatcagtttttgctgaaggagaaacaataatagaaaatgcagcacaagaaccagaaatagatgatttaattaattttctaaataaaatgggatctgatataaaaaagatagaaacgggagcaataataataagaggagttaaagaattaaaaggaataaaatacacacctatttatgacaggatagaagcaggaacatttataatagcagcagctataacaaagagtaagataaagataaatggtgtagaagagaaaagtataaaaccaatgatagccaagttttgtgaaatgggaataaatatggagatagacggcaaaagtcttataatagacggtagaaatgaacttaaacctgtagatataaaaactatgccatacccgggatttccaactgatatgcaagctcaaataatgtcccttttatgctgcactgaaggtactagtgtgataacagaaacaatctttgaaaatagatttatgcatgttcctgaactaaagagatttggtgcaaatataaaaatagatggaaggagtgctgtaatagtaggagtaaaagaacttaccgggtgcagtgctcgagcaacggatttaagggcaggtgctgcacttatattagcaggactcgttgcagagggagaaacgcaaattagtgatatatatcatgtggatagaggttatgttagtatagaaaaaaagcttacaaaattaggagcaaaaattgaaagagtagaataa

SEQ ID NO: 15953 - DNA, 1827 bp, Clostridium acetobutylicum
atgtgcggaatagttggatatagtggtaagaaagaggcatcttcaattttagttgagggattaagtaaacttgagtatagaggttacgactcagcaggagttgccatattaaacgatggaaaaattaatgtttcaaaatgtaaaggaagacttgtaaatcttgaaaataaattagaagagaatcctatcgcgggaaatattggaattggacatacaagatgggcaacacatggagaaccatcagatttaaatgcacatcctcatagtaataaagataatacaataagcgttgttcacaatggaataatagaaaattacatgcaattaagaacatggcttaaatcaaagggatatgaattcaaatctgaaactgatacagaggttatacctaatcttgtggactatttttatgaaggtaacttattagatgcagttataaaggcaatatctaaggtagaaggaagctatgcacttggaatagtttcatcaaaagaacctgataaggtagtagcagtaagaaaagatagcccgcttatagttggtattagtgaagatggaaacttcatagcatcagatgttccagctatattaaatcatactagagatatatattatataaaagataaagagttcgtagttttaacttctgaaggagtagaattctactctaatgagggagaaaaaatagaaaaagaacttaatcatatagaatgggatgctaatgctgctgaaaaaggcggatatgagcacttcatgttaaaagaaatatatgaacaacctaaagcaataagagatactatgacttctagaattatagcaggtcaaccaataaaattggacgatatcagcataacaaaggagcaaatagagaatattgataaaatatatatagtagcttgtggaacggcttatcatgcaggagtagttggtaaatacgttatagaaaaatttgcaagaatacctgttgaggttgatatagcatctgaatttagatacagagatccaataattacgaaaaacactttgatgatagtattaagtcaatctggagaaactgctgatactttagcggctttaagagaagctaagtcaataggagcaagagttattgccgtgacaaatgtagttggaagctcagttgctagagcagccgatgatatattatatacttgggcaggaccagaaattgcagttgcatctacaaaggcatatactacacagcttataacaatgtatattttaggattgttctttgcacaaaacaaaaacactttaactaatgaagagatagagaaaattaaggcagatatgcttacacttccagaaaaggcagaagaggtattagcaagcaaggagaaagttcaaaaatttgcagcaaacacttatatgcataaagatatgttctacttaggtagaggaattgattatgcagtagctatggaaggtgcattaaagcttaaagaaatttcttatatacacgctgaggcttatgcaggaggagaattaaagcatggtactatagctctaatcgaggaaggtactgttgtagtagctcttggaactcaaagtgatatatatgataaaatggtaagtaatattaaggaagtaacaacaagaggtgctaaagttcttggaattgctgcagaaggcagaaaaggaatggaagaagttgttgattcagtaatatatgtacctgaagtgaatgatatgcttttacctgtactttcagtaatgcaattacaattattagcatactatgtttcagtggaaaaaggctgtgacgttgataagccaagaaatttagcaaaatcagttactgttgaataa

SEQ ID NO: 15954 - DNA, 2145 bp, Clostridium acetobutylicum
atggacaagaacatatttaatatattaaagaagtacttcggatattcatcttttagaagaggacaagaaaacataatacaaagtatattagatgggaatgacacctttgctattatgccaactggtggaggtaagtccatctgttatcaggtacctgcactttatatgaaaggactaacaattgttataactcctctaatttcccttatgaaggaccaggttgacaccttaagagaaaatggagttaatgcaagctatataaatagtaccttatcatctaaagaaacaaatgacatcttaatgtcagcactttcaggacatttaaaaattttgtatgtggcccctgaaagattagagcaggactattttagaaatgcaattaaagatttaactatatcaatggttgctatagacgaggctcattgtgtatctcaatggggtcatgattttagagttagttataaaagaattgtaccatttataaatatatttgataaaaggcctattgttgcagctttcactgctactgcaacagatgaggtaaagaaagatataataaatttacttgagcttaaagagccaaattgttttattactggttttgatagagataacttattcttctcaatagtaaaaaatgagaataaatttgattttataacaaaatatctttcaaaacacaaggaactttcaggaataatatatgctgcgactagaaaagaggttgattcccttcatcaaaagcttataagtcaaggatattctgtagggaaatatcatgctggcatgggtgataaggaaagaagcgaaagccaagacctttttctttatgatgaaacaaaattaatgatagccacaaatgcatttggaatgggtatagataaatcaaatgttcgttttgtaatacattataatatgccaaaaaacttagaatcttattatcaagaagccggtcgtgcaggtagagacggtgaaaaaagtgaatgtataatcctatttagtggtcaagatatacaaatacaaaaattcttaataaaacaaagtataccttcctttgatagacaaagaatagaattaaaaaagctaaatgatatgattaactactgcatgactacctcctgtcttagaaaatatattttaaactattttggagaaaactacgaagtagaaaactgtgataattgtataaattgtactggcaatgtagaaatagtagatataacattggaagctcaaaagattatttcctgcatttacagaatgggacaaaactttggcgtaactatgatcgccgaggttctaaaaggctctaaaaatagtaaggttttgagatttaactttgataaattatctacttatggaataatgaaagattgtacgctaaaacaaattactaatttaataaatacactcatagctgatggctatttgtacctttcagatagtgaatatgctacagtgaaaatgtctcaaaaaagcatagaagtgcttaagggatacaaaaaagtagtgcaaaaaatccatattgtagaagaactttcattaagtactgacaatactttatttgaaattttaaaggctttaagattagaaatagcgcgaagagaaaatgttcctccttacataattttttctgattctgtattaagcgaaatgtgtaaatattaccctaaggataagaattctatgcttcaaatcaaaggtgttggagaaataaaatacaacaaatacggcgaaatatttgaagagaagataagagaatacattaaagaaacaaatttaactccagaggataataataaaggaactcttaaagtgcccgaactcctttctaaaaagatacctacacatattgaaacttttaacttatacaaaaagggaattacaatagccgatatggctaaaataaggaatttatcaattccaacaatacaagaacatattttaaagtgcgcaaatgaaggtcttaatgtaaatttagatgcctacataccagctgaatacaaagatttaatatatgaaaaaataagaattcttggtacctctaaattaagacctataaaggatgcactgccagatgatgttgattacatggcaataaaagctgctatttgtaaatatacttctaaaaataaagcaatatag

SEQ ID NO: 15955 - DNA, 711 bp, Clostridium acetobutylicum
atgcaatcaataaaatataaaagagtaatgttaaaaatttcaggtgaagcgctagcaggaaccaatggatacggtattgatttcgaagtggcaaataggattgctaaagaaattaaagaaattgttgacttaggaatagaagttggtgctgtagtaggtggcggaaatatatggcgtggaagaaatggtaaaggaatggatagaactactgcagattatatggggatgcttgcaacatgtataaatgccttagcacttcaagattcacttgaaaacatggatgtggatactagagtccaaacagctatagaaatgaaacaggtagcagagccttttattagaagaagagctatgagacatcttgaaaaaggaagagttgttatttttgctggtggaactggtaatccatatttctctactgataccacagctgcattaagagctgctgagatagaagcagatgtaattcttcttgctaagaaggtggatggagtttatgataaagatccacataagtatgacgatgctattaaatttgataatctaacttatatggaagtacttgaaaaaaatcttcaggttatggattcaactgctacatcactatgtatggataataatataccaataatagtatttggtcttgatgtttcgggaaacataaggaaggccgttttaggtgaaaaaataggtactatcgtatcaaaataa

SEQ ID NO: 15956 - DNA, 1389 bp, Clostridium acetobutylicum
atgaaagatgaaaagactatggacaaaatagtttctttggcgaaaaatagaggatttgtttttgctggatctgaaatatacggtggtcttgcaaattcatgggattatggtcctctaggtgtggaactgaaaaacaatgtaaaaaaattatggtggaaaaagtttgtgcaggataatacatataatgtaggacttgattgtgctatattaatgaacagcgaagtttgggtagcgtctggtcatcttggaggcttttcagatcctctaatggactgtaaagaatgtaaatcaaggtttagagcagataaaattgttgaggactatttaacagagcagggagccgaagtggcgagtgctgatggatggtcaaatgaaaaactagaaaacttcataaaggataaacatattaaatgtcctaaatgtggtaaagagaactttactagtatcagaaagtttaatcttatgtttaaaactttccaaggagtaacagaagatgcttcatcagaaatatacttaagaccagaaacagcacaaggtatatttgttaactttaaaaatgttcagagatcatcaagaaaaaaagttccttttggaataggacagataggtaaagcttttagaaatgaaataacacctggaaactttacattcagaactagagaatttgagcaaatggaattagagtttttctgtaaacctggaacagatttagagtggtttaaatattggaaagattattgctggagtttcttgttggatttaggcattaataaagaaaatttaagatttagggatcattcagcagaagaattagtattctatagtaaagcaacttcagatatagagtataaattcccatttggttggggcgagctttggggcgtagctgatagaacagattatgaccttaagaaacatatggaccattcaggagaggatatgaattatttagatccatcaactaatgagaaatatgttccatatgtaatagagccttctttaggagcagatagagttgcacttgcatttttaattgatgcctacgatgaagaagaacttgaaggtggagatcaaagaatagtattacattttcatccacaaattgcacctattaaagctgcagttcttcctttaagtaagaagttatctgaaaaagctttagatgtatatagtaagattagttctaaatttaacattgaatatgatgaaacaggaagtattggtaagagatatagaagacaggatgaaataggaacaccttattgtataactgttgattttgacactttagaagatgaagcggttactataagagatagagacagcatgagtcaggtaagagttaaaattgaagagttagaaaaatacttagaagaaaaaataaaatag

SEQ ID NO: 15957 - DNA, 390 bp, Clostridium acetobutylicum
atgtttgtatggaaggacgaatttgagttagggattgataaaattgacaatgagcacagaaaactttttgaaatagctaataaaggatatgagcttttaaaaaatgagttttatgtggacaagtacgacaaaataatggatataatagtagaattaaaggagtatgctgaattccatttttcagaggaagaagattaccttgcaagtatagggtataagaagttgtttacccataagcttgaacacgattcatttataaaaaaggttgaaagttttaatattaaagaaattgactatgatcaagataaatatatacaagaaatgctggattttgttgttacttggatcaaagaacatatattagaaaaggatagagaatatatagattaa

SEQ ID NO: 15958 - DNA, 1344 bp, Clostridium acetobutylicum
atgataagtaaaattttaattgctaataggggagagatagcagttagaataataagagcctgtagagaaatgggaatagagacagtggctatttattctgaggcagataaagaatcaatgcatgtatatcttgcagatgaagcagtatgtgttggaccagcgaaaactcaagatagctatcttaacataggaaatataataagtgctacagttcttacaaaagcacaagcgatacatccaggctttggttttctatctgagaatggtaagttcgcaaaaatgtgcagtgaatgtaatatagcatttataggaccagatgctgaaaccattgaaaacatgggaaataaagcaaaagcaagagaaataatgataaaggcaggagtaccggtagttccaggatgtgaaggaactattgatagtgaagatcaggctttaaaagaggcaactagaataggatatcctgttatgcttaaagcttcagcaggtggaggcggaagaggtataagaattgtaagagaagaaaaagacctcataagttcctttagaaatgctaaaagcgaagctaaagcagcctttggtgatgattcaatgtatatggaaaagtttatagaagaacctagacatgttgagtttcaaatattaggagattcttttggaaatgtagtttatcttggagaaagagactgctcaattcaaagaagaaaccaaaaagttttagaggaagcaccatcaccagttatgacagaagaacttaggcgtgagatgggagaagcggctgtaagagcagctaaagccgtaaattataaaaatgctggaaccatagaatttctattagataagcatggaaattattacttcatggaaatgaatacaagaattcaggttgaacatggtataactgaaatggttacaggcgttgacctagttaaagagcagataaaaatagcatcaggaaataaattatctttcaatcaaagtgatataaaaattaagggtcatgcaatagagtgtagaataaatgctgaaaatcctgaaaagaactttatgccatcacctggagaaattaagtacttccatgttcctggtggacctggagtaagattagatagcgcagcatatactggatacaatatacctccaaattatgattccatgattggaaagcttatagcatatggcaaggatagagctgaagctataaatataatggagagagctcttggagagttcataattgatggtattgatacaaatgtagacttccagtatgaagtaataaacaatgagaagtttattaagggaaaatataatacaagttttatagaaaaagaattaaaacattga

SEQ ID NO: 15959 - DNA, 1068 bp, Clostridium acetobutylicum
atgaataaaaaggtagttataggtatgagcggtggagttgatagttctgttgctgcttaccttttaaaggaacagggatatgatgttataggtgtaactatgaagcttacaccagatgatgccttctacacagaacaagagggaggttgttgttctctttcagcagtagaggatgctagaagagttgcatatagaataggaatacctttttatgttgtcaactttacagatatatttaaggaaaaagttatagactattttacagaggaatatttaaatggaaaaactccaaatccatgtattgcttgtaataaatatataaaatttgatgctcttttaaaaaaagcagaaagtttaggcgctgattacattgctacaggtcattactgcagaatagtagaggagaatggaaggtatgtaataagaaaatcagaggatgaaaaaaaagatcagacatatgttatgtacaatatgactcaagatcagcttaaacataccttaatgccttgtggagattataagaaagaccgtattcgtgaaattgcaagggaaattggtctgaatgtttttgacaagaaggatagcgaagaaatatgttttatacctgataatgatcatggcggctttataaaaagagaatgtccaaaggcagttaagacaggaaattttgtagataaagaaggaaaagttttaggaaaacataaaggaataatttactatactattggacagagaaaaggacttggtattgcaacgggaaaaagagtatttgtaactaatatagatgctatgaagaatcaggttgttattggagaggaagaggaaatatttgaaaatgagttaatttcatttaaaaataactttataccttttgataagcttacagagcctatggaagttgatgctaaaataagatacaatgctaaagcttcaaaggctactatatatccagttgatgatgaaaatgtaaaagtgaaatttgagaaaccgcagcgagcaataacaaaagggcagtctgttgtgttttatgatggtgatcttttagttggcggtggcattattaaatag

SEQ ID NO: 15960 - DNA, 924 bp, Clostridium acetobutylicum
atgagagacatgaacaaaaaaaatagaaatggattaactgaaaaagaatttttagatagatatgtacccggggattatgaaagaccatccaatactgtcgacatgttactttttactgttgatgatgtacctattgaaggtaaagatcctaataaagcattaaagatacttttaattaaaagaggagatcatccttatatgggatgttgggctgttcctggaggatttgtaaatattaacgaaggattaagctcagcttgttatagagaacttaaagaagaaacaaatgtagaaaatgtgtattttgaacaactaaagacatttggtgatgatgtaaatagagatccgcgtatgagagttatttctgtagcctatatggctttagcagataaattaagcataacacctaaggcaggggatgatgcggatgacgcaaaatggtttacagtaaaaaagagatttatatcatcaaaaggatttggtatagataaaattgatacctataatattttattaacttcagatgatggtgaaactaaaattggatatctggtaactgaaaaatttgaaaaaaatggtgttgttacaataaaggtgccttcatatagacttttggagtggagtaaagaagagcttgcatttgaccatatagaagaaatagattgtgctttagaaagattaaagaataaaattgaatacactccaattgctttttcacgacttcctaaatattttacattgagagaagctcaaaaggtctttgaagctattcttaatttagaaaagcctttaacaagagctaactttagaaggaaaattaaaaagatggtagttgaaactgaaaaagaaaagataacatctggaagacctgctacttgttatacatttaatgaagattggcagcatacttttctagatgaataa

SEQ ID NO: 15961 - DNA, 525 bp, Clostridium acetobutylicum
attattgtcaaggagaaaagaaagatgaatattattaaaggacagacagaagacctatcaggcgtaattgatataatctctaactgtataagatatatgaaaagtcaaggcatataccaatgggatgaattttatccttcttcagatattattgaaaatgatattaaacgtaaggactgctacgttttaaaggataatgaaagatgtgtagcctacgttgcaataaatgaacagcaaccgcctgaatacagtcaaatagactggcttactcatgaaaaaaagatattagttattcataggttatgtgttcagcccgaatttcaaggaagaggtattgcaaaaaaaatattaaagttcattgaagatttagctactaaaaataactattccagcattagattagacgcttatagtggaaataataaagcacttaagctatattctaatcttgattataagaaagttggccaattttatcttccagtgagagaccttcctttctattgctatgagaagaatatctaa

SEQ ID NO: 15962 - DNA, 231 bp, Clostridium acetobutylicum
atggtaaaagtatattcaacaacatcatgcccatggtgcaaaaaagcaaagtcctacttggcttctcaaaatatagattttatagatgcaaatgttcaagatgacatgaatgcaagagatgaaatgttaaatctatcacatcaaagcggtgttccagtaataaatatagacggaaacatagtagtaggctttgataaagacaagattgatgaacttttaaatttaaaataa

SEQ ID NO: 15963 - DNA, 1026 bp, Clostridium acetobutylicum
atggaaaagaaaaatatagattgggctaatctaggctttggatacgttaaaacagataaaagattcgtatctaactataaagatggaaaatgggatgatggtgcattagtttcagatgctaccattgctattagtgaatgtgcaggtgtacttcaatactctcaagcatgctttgaaggtatgaaagcttacacaactgaggatggacatattgttaccttccgtcctgacttaaatgcacagcgtatggaagattcatgtaaaagattagaaatgcctgcatttccaaaggaaagctttgtagatgctgttgtaaaaactatagaggcaaattctgaatgggtacctccatatggaagtggtgctacactttatattcgtccatttatgtttgcttctggaccagttattggagttaaaccagcagatgaatatcaattcagagtatttgctacaccagttggtccatactttaaaggaggagttaagcctttaactttacgtgttagtgattttgatcgtgctgctccaaatggtactggacacatcaaagctgggcttaattatgctatgagtcttcatgcaattgttactgcacatgaagaaggctttgatgaaaatatgtatttagacgcagctactagaacaaaggttgaagaaactggtggagctaacttcctatttgtaactaaagataataaggttgttacaccgaaatcaaatactattcttccttcaatcacacgtcgttctttaatgacagttgcaaaagattaccttggactagaaattgaggagagaactgtttaccttgatgaagtaaaagattttgcagaatgcggtctttgtggaacagctgctgttatctcaccagtaggaaagatagtagatcatggcaaagaaatttgttttccaagcggaatgtcagatatgggacctatcactaaaaaattacgtgatacattgacaggtattcaaatgggtcatattgaagcacctaagggatggcttaaaataatcaaataa

SEQ ID NO: 15964 - DNA, 1347 bp, Clostridium acetobutylicum
atgaataaaaaggatatattagaattaaaaagacgttttaaaaaagacgagtgtacctttactagaatgtgcggttgttatgtagatgcacaaaaaaatatcgtattaaaaattaatgaaacctttttaaatctaagggacgaagaattctttaaatatttagagattgctaaaaaagctttatctggaacagttggaaataaccttctagaacttaactttccccttgatggcgaaaatatggatagtcggcagctttctttgttaagccttaaaaaaagtgcattaaaagacgctgctcttctcgacagcttttataacttaattatagatagttatgattatgcaggtaatttcttaatacttatttttcatgacgcttatgatgttatgactaaaactacagataattctaaattagatgaatctgaagaaatatacgaatacttattatgcgcaatatgtccagtatcactttcaaaagcagctcttggatatcttgaagatgaaaatagaattggagcacgcaatagggactggatagtcgggccgccagatcttggatttgtattcccagcctttacagaccgcagtactgacattcactctattatgtactatacgaaaaatgcaaaggatactcatcctgaattaatggaacaagccttagggtgtagctctaaacaaactgctactgaacaaaaagaagcatttaataccattattcgtaaagctattggcagtgatgatgctaaatctgatcatttatttatggaaattcaagagactcttaataacatagttgatgaaaatagtaccgttaatggtactgatgctgagcctgtaattttaactaatgataacattcaggatattctagttgaaagcggaattcctgaagaaatcactgagaaaattgaaaaatcctataaagaagagttcgctgatactcctcctgtagtagaaaatttaatagataaaaaagcactggcagcaaatgaacaaagaaaaaaggaaaagagactcgaacaaaaagtacaagtattagaagaaagacttgaacaaacaaagaaagaaattgtagaagattcagacaaagaatcggtattagaagaaaaaattaatataccagaagaagcagccactgatactactttagaggaggattccaattctgaaatagcacctgataatcagtctgatccaagctatgatattgttcttaaggtaaagcctgaaaaagtacccgaaataaaatcacaaataattgacggcaagaaatgcattgtaattcctctagaagaaaatgaacaagctaatgtaaatggcgtcgatgccttactttaa

SEQ ID NO: 15965 - DNA, 822 bp, Clostridium acetobutylicum
atgcttaaggaaagacttgaaaatgtgagagggacaaatcctttgatacataatataacaaattatgttactgttaatgattgtgcaaatattcttcttgcctgcggggcttcaccgattatggcagatgatattggggaggtagaggagattacatccatttgcagagggcttaatattaatataggtactcttaatgaaaatactattgagtcaatgcttaaagctggaaaaatggcgaataagttaaagcatccagttattttagatcctgtgggagtgggtgcttcaaaacttagacgtcaaactgctttaaaattgcttgaggaggttaaattcactgttattcgtggaaatatctctgagataaaggtacttgccttgggtcaaggtataactaaaggtgtagatgctgatgtcaatgataaagtaaaagatgatacattagataatgtaattaattttgctaaaggattttctaaaaaaacgggtgctgtgattgcaattacaggagccattgatattatagctaatgaaagcaaggcgtatgttgtaaggaatggtaatcctaatatgagtaaaattactggtacaggttgcatgttaagcgcaatgacagcagcatatataagtgcgaatgttgatagtccattagaagcaaccttagcttcggtttgtgctatggggatttgtggagagcttgcatataacagactgtctaaaagggatggcaattcttcttacagaaattatattatcgatgaagtttttaatttagatggtgataaattagatgatgctgcaaggtatgaaagctattaa

SEQ ID NO: 15966 - DNA, 915 bp, Clostridium acetobutylicum
atgcaggtaagtattgaagatataatagaaaatctcgatttagaggtcttggttaaggggaaagatggaataaaactggggttaagtgatataaacagaccaggactacagtttgccggattctatgattattttggcaatgaaagagtgcaggttataggaaaggctgagtggagttttctaaatgcaatgcctccagaaataagagaaaaaagaattagaaaatattttcaatttgaaacaccatgtattgttcttgcaagaggattgaaaccacaaaaggaacttcttgattgttccaaagagtacaataggtggcttttaaggtcaaaggctcaaactactagatttataaataaaataatgaactatcttgatgacaagctggctcctgaaacaagaattcatggagtgttagttgatatctatggattaggtatactaatcactggagaaagtggaatcggaaaaagtgaaactgcacttgagctcataaaaagagggcatagattggttgcagatgatgctgtagatataaaagaaattgaatcagttcttgttggaaaatcaccatacataacttctggtatgcttgaggttagaggaatgggaataatagatgttccagcactttatggtcttagttctgttttgtcagaaaagaatataaatcttgtaatataccttgaacaatggaaagagggaagagactacgatagacttggtacagatgatgaacacataaaaattttaaatattcctgtgagaaaaatgacgctgcctatacgtccagggaggaatgttgctgttataatagaggcagcagctgctaattatagatataatttaagcagtaaaatatctcctgtagatactattaataagagaattgaagagtctacaaattatgattaa

SEQ ID NO: 15967 - DNA, 375 bp, Clostridium acetobutylicum
atgattgatgtagtttttaagaaaaaaaataatgtggttgtttcttatgttataacaggtcatgctgatcgtatggcaaaggattccgagaggcatcttgaaaattatgatgaggaaacagatatgctatatgacaatgcagtttgtagtgcagtatctcttttaggtcaagtatgtatactaggaattgaagaagttttacatattaaagtgaattattctgcaaaggaaggatacatagctttaaatcttgaaaatttagatttaaatgatcttgaaagagcacaggttcttatgaaaactacattgttaggatttgaaaatttagcggaaagctatgatgagtatataaaagttagcgttgaggaggtgtaa

SEQ ID NO: 15968 - DNA, 231 bp, Clostridium acetobutylicum
ataaaaatggctgctaatgtaaaaaatagaaatgtggaaaaatcaccattaaaaggttttgttggattttttaaggatcttggggctgaaactcataggattacttggccttcaaaattggatcttaaaaaaaccacaatagcggtactcactttttgtgctgcgtatattatagtggtagcaataatggattatggttttaataacctctttagggtgatctttaagtaa

SEQ ID NO: 15969 - DNA, 636 bp, Clostridium acetobutylicum
atgaaagtagttgcttttaatggaagtccgaaaaagaatggaaatactaatgaggcgataaaagctgtagcggcagagttagagaaagaaaatatagaggtagaaattattcatgtgggaaataaggtaatacgtggatgcctggactgcggaggatgcagcagaaacatgaacgaacgatgtgttatgaagaatgatgaggttaatgattggattcaaaagatgaaggaagctgatggaattattctaggttctcctgtacattattcagccattgcaggaacaatgaaatcatttttagatcgtgcgtttttggttacatctgtaaataacggaatgcttagacataaggtaggagcaagtgttgttgctgtaagaagatcaggcggtattccggtattcaatcaactaaataactatatcaattattctgagatgatgatgccaacatcaaattattggaatgtaattcatggtacaaaacctggagaagcaacacaagatgaagagggaatgcagatcatgagagttctaggaaaaaatatggcatggctattgaagacgattgattctagcaaaaataatgtaaaggaaaatgaaatagaagaaaaaatatttaccaactttataagataa

SEQ ID NO: 15970 - DNA, 846 bp, Clostridium acetobutylicum
atgtataataaaatggtggaatgtaaaaatgtagtatatcagtacaaaaatgaagacgaatctaagaataccactgcagttaatgatgttaccttagaggtaaatgaaggagaatttttagttatattaggaagaaatggttctggtaagtcaacacttgctaaacatttaaatgcccttttggtgcctactgatggaaaggtaatagttgaagggcttgatacttcaaatgaagaagatgtatggaccataagaagtaagacaggtatggtatttcaaaatccggacaaccaaatagtagctacaattgttgaagaggatgttgcatttggacctgaaaatttaggtgttaaaccatcagagataagggaaagagtagataatgctcttaagagtgttggaatgtatgagtacagaaagcatgaacctcatttattatctggtggtcaaaagcaaagggtagctattgctggtgttttagctatgcatcctaaatgtattgtatttgatgagtccactgctatgcttgacccaaaaggaagagaagaagttgtaaatactataatggatttaaataaaaattctcatataactataattttaataacacattatatggaagaagcgattaatgcagatagaatagtagtaatggataaaggaaaagttataaaaagtggagttccaagagaagttttcaaagatgtaaagacaatgaaggaaataggacttgatgtacctcaaatgacagaacttgcatatgaactaaaaaaagaaggtattaatgttaaagatgatatacttacaatagatgagatggtgaatgaattatgccgattaaaatag

SEQ ID NO: 15971 - DNA, 660 bp, Clostridium acetobutylicum
atgaggttgatgaaaagaatatataactacataccagaatatgctattaaacctttaattttatgcgtaatttttaatttttcagtgtattcaggtgcacgtctattttacaaggatgctgtttttcacaatttaacatcttatttggataataaaattccagttgtacctatttttactgttatttatttgggaagttatatattttggattattaattacatattgattagcaaagtaaataagaatgtttgttaccgccttataatggctgacttactcggtaaactaatatgtggtattatatatatagtatatcccacaactaatataagaccgcatattgtttcctctggtatttttgtggacatgcttaagtttttgtatagtgtagatgcagcaaataatctctttccatctatccactgcttggttagttggtattgttttgctggaattagaaattgtaaaactattcctgtctggtatcgctacttgtcattatttatagcaattatgatatgtgtttcaactttaacaacaaagcagcatgttataatagacgttttcggaggcgtaatattggcagaattaacatggcaattatcttattatttacagctttataaagcatttaaatttatcaatcaggaggtataa

SEQ ID NO: 15972 - DNA, 1365 bp, Clostridium acetobutylicum
atgaaacgtaaatataagatggccaaaatgtccgatagctttatgtttggattggatggtaagatactatgcaatactctatattatgtaataaatgttggccacaactttaatattgaagcgtataaaaaaagtttaaaatatgtagttagagatttgcccattttatcatgtaaattttccttaggattttggagagataggtgggaatatattagtgactttgatgttgaacaaatatttcaagaaatatatttggaagaagatttttcccatgataaaaatagcttttatgaaactgcattttctaaatttattgaattaaaaaataattgtatagatataactaaagaagctccatttaagataaaagtattttgcactaagcagttagaaagtaaagtagtagtttgggaacttcatcatactgtaactgatggaagaggtatgctgcaaataatagaattagcaggtaaatattataatagtattttaaatgggaagaatgcagataaaggtgagagtagtaaaaaaagttttaaggatgaattttttacaaccactgctaatgttttaaaagttatcttttatactgctaaaaatctgcttaagaggaataccatacctaaattggaaccagtacttgaattagaagaaattcaagctggggatgataaatatggaagcatgagtttagaaaaatttaaaatagatcttgatgaaattaataaattgaagtctttatatggtgtatataaatttactataaatgatattattcttcataatattttaaaatttaacatgaattatggcttgaatttaaaaaaatgcaacacttatattaaaacagacgtgagaattgatataagaaagtatttgaaaacaaaggggcttagcattggaaattattctgttcctaagacaatatacataaaaagtgatgatttgtttaatataccacaaatacataactgctttaaagattttaagaatagctgtgtaggattaaaagtattttattcatattacatattaggtatatttccagttaggttcattagacatctattgtcaaagatgacagaaaagtttctaatagactcctatgcagggatgtcatcgactaatgtaggaaaaatagatgaatatgtaaagccatatggagaaattatagatgacatattttttataccttgcggtggttcgtattcatttcctttgatgtgcatatctgggtacaagaataaacttacaataagttttattaggtataatgacaaaaataaattaacccaaaaagtaaaaaatgattttgagaaaattttatatgaagatttaaaaaaagtgaaaaaatcattataa

SEQ ID NO: 15973 - DNA, 1473 bp, Clostridium acetobutylicum
atgaaaagatctggtaaggtttatataataggagcaggacctggagaggaagagcttataaccttaaaggcaataagaaaaatgaaagaatgcacagctgtgctttatgatagacttgtaggacagggaatacttaaatatttgaatgaaaagtgtgagatttattattgtggaaaagagcctgggtgtcattataaaacccaagatgagataaatgaaatgataataaagctagctaaagaaggacatattgttggtagaataaaaggaggagacccatatatttttggaagaggaggggaagagggactaagtcttttaaaagagaatatagaatttgaagtgatttcaggggttacttctcccgtagctgttttaaattatgctggaattcctgtaacgcacaggggcatagcaagaagctttcatgtatttacggcaaaaacagccaatgacgattctataaattttagtgcagcggctaaaattgatgggacactgatatttttaatgggatataggcagcttaacgatataactagaaagctaatagaaaatggaatggattcaaaaatgccctgcgctgttgtaatgaggggaactactagtcttcagaaaaaggttataggaaatcttagtgatataaaagaaaaatgtgataatgctaatatgacttcaccttgtataatagtagtaggaaaagttgttggtttcaatcagcagctaaattggtatgagaaaaagcctctttttggcagaaatatatgtataacaagatctaaaaatcaaagcaaaactatgagagaagagcttcttgaccttggagcagaagtaacagaagtacattctatagaaatagaaaatacagcctcaaatttagaagaatacattaataaaatttcagagtatgattatataatcttgaccagtgtaaatgctgtggaggtcttatttgattatcttgcttcaaaggattatgatgtaagaaaagtaagggccaagtttgcagttataggaaatgctacaaaagaagcgctaaagaaaagaggaattgttccagagatagtatctagaaaacacaatggagaaggtctttttgatgagattagaggctatttaaagaaggatgataagatatttatccccaggagtgaaaattctagaaagtatataaaggaacaacttgtaagcttagggttaagtgttgacgagtgttttatatacagaacagttcctggaaagctttatgataaggctgcttttgaaaatgctgatacaattgtttttacaagtccatcaacggtaaaaaatatgatagctctttttggagaaaagaacataaagaaaaagagtataatcgccataggacctataacaggaagagagcttggaaaaataaatgcagaatattctacatgcagtgaatgcagtgtagatgcaataattagggagtgtttgaacagtgacaaataa

SEQ ID NO: 15974 - DNA, 1683 bp, Clostridium acetobutylicum
atgagaaaactaatcgcactaattgaaaaaatgaaacctttctttgaaaaagtatctaataacccatatcttagggcaatcagagatggatttctaagttgtatgcctgttattttattttcaagtatcttcttacttatagcatgtgttccaaatgcttggggtttttattggccaaacaatgttaatgatatacttatgaaggcttacaactactctatgggaatattagcattattaatggtagcaactattgccaagagcttaacagatagtattaatggtaaattgcctaaactaagacaaataaataatgtgtcagtaatgattgtatctatcatatgctttattttaataggagtacaacctataaaaggcggattctcaagcgattttatgggcactaaaggattattatcagcgtttgtagttgcgtttatagttccaaatatatataagttatttgtaaaaaataatgtaacaattaagttacctgaggaagtacctcacaatgtagcacaaacttttgaagatttgatacctttagcggcgtctgtattattcttctggttatttgatttagtatttagacaagttacaggagaggttttcagttcttggatattagatgtcttaaagccgttatttacagcagcagatgggtatgtaggcttggcggtaatatatggagcgatggcaatgttctggtttgtcggaattcatggaccttctatagtagaaccagcagtaacagctatatatattgcaaatgttgaagctaacttaaaattacatcaagctggacatcatgcaacatatgtactaactcacggaacttcttattttatagcaacaattggaggtaccggagctactttaatgttaacagttatgtttgcgttcatagctaaatcaaagcagttaaaggcagttggaagaacctcaataattccagtgtgcttcgctgtaaatgaaccaattttgtttggagcaccaattgtgctgaatccaatattcttcgtaccatttatattgacaccaatattaaatgtatggatatttaaattttttatagataacttaggaatgaacggctttatttatataattccttggacaactcctgcaccaataggattgatattaggaacaggatttgcaaaattagcctttatattagcacctctattattagtagtggattttgtaatgtactatccattcttcaaggtttatgatagagaattagttttggaagaagcagaaagggctaagcatgaatttgatggagaattagaagaaaaagcaactttaaaagtagaacaaaaaccaacaccaaaggttaaaatagaaagtaaaacggataaaaaacagcttgtattagtactttgtgctagtggagctacaagtagtatgcttgcaaatgcaataactaagggagcaaaacaagaaggcgttaacgtagaatcaatagctatggcttatggacagcataaggatgtaatagcggattatgatcttattatattggcacctcagatggcatctatgtatgaggaattaaaggcagattgcgcatctaaaggaactaaatcagcaacaacaacaggtaaggaatatgtaaaattaactagagaccctgttggagctttaaaatttgcgttggatataataaatgaataa

SEQ ID NO: 15975 - DNA, 369 bp, Clostridium acetobutylicum
atgtctcaaaatcaaaataatagtgatctgtgtgaagcaaatgtaatacatgtagatacagtagaaaaagttagaaaacaaatgcctgaggatgaagaattgtacgagctttctgatttatttaaggtgtttggagatagtacaagaataaaaataatttgtgctctttttaaggaagaaatgtgtgtatgtgatatagcttatttacttcagatgaagcagtctgcaatatctcatcagctaaaaatattaagacagtcaaaattggttaagtacaggagagagggaaaggttgtttattattctcttgatgatgagcatataaaggaaatatttaatatgggacttatgcacataaatgaaaagtga

SEQ ID NO: 15976 - DNA, 1275 bp, Clostridium acetobutylicum
atgataattataaaaaatgggtacgtaattgatcctttaacaaaacgtgaaggcaaatttgatattttaatagatggagaaaatgtagttagaatatcacaggatataggaattgatgatgatatagaagttattgatgccgaggattgtatagtttcaccaggctttattgacattcatagccactttagagatcctggttttactgaaaaagaagatataattacaggggcaagggcagcagctagaggtggatatacaacggtaatttgtatggctaatactaatccggttgttgataatgtggaaactttaagatacatagtggataaagcaaagactgcaaaaatagaagtacttcaggtaggaactataacaaagggaatgcagggagttgagctagtagatatggaagctctaaaggaagccggagctgttggattttctgatgatggaaaacctataatggattcaagacttgtacttgaggcaatgcaaaaagccagggaattagatgttccattaagttttcatgaagaagaccctaaattagtatatgaaagtggaataaatggtggaaaagtagcagaaaaacttaatatgatgggagcattagaagaagctgagacagttctaactgctagggatgctgcgcttgctgtatcaagtggtgctaaaactaatatacaacatataagttcaaaaatatcattaggtattataaagttggcaaaagaaatgggagctaacataatagccgaagctactcctcagcattttagcattacagaagaagagatactaaattgtggtactaatgcaaaagttaatccaccacttagacgagaagatgatagaaaggcaatagtagcagctcttaaagacgatactatacaggttatagcaacggatcatgctcctcatactaaagatgaaaaagcaagggaatttaaggaggctccaagtggaatgataggactggaaacggctctttcacttgcggtaactaatcttgttaaaacaggggacttaacttatagggatatgatatcaaagttaacaataaatcccgctaggttttataacttagatagaggatatataaaagaaggtcacagagcggatattgtaatatttgatcccgatgaaaagtacactgtaaaggaagaggaatttcaatctaaagcatcaaattctccttttataggtaaagagctttttggtaaggttaagaccactatatataatggaaaaatagtatatgaagataaatag

SEQ ID NO: 15977 - DNA, 1377 bp, Clostridium acetobutylicum
gtgaatgatattataaagctaataaagagcataattattgaaatggatatggaagcttacatagttggtggatatataagagataaacttatgaatcctaaaaactctgcttcagatttagatattgcttttcagggagattttgaaaaaattttagatgagctcagaaagagaaaaattaaggttagttctataaaaaaagactcaagtgtgtatagaattaccgttaatggttattgtgcagatatatcaaagataaaaggaaaaaatataaatgaggatttatctaaaagagattttacggtaaatgctatagcgttagatataaagaacaataaaatagtagatccatttgatggaagagtacatattaaaagaagaatactgcaggttatagatgaaaagagctttgaagatgatgctgttaggatacttagagggataagattttatataaaatatggtatgcacttcaatggctatactgaagagtatattagaaagcattcaaagaatataatgaaatttcctagagatagagttctagatgaaattattcacattatacatgaggatgaaaatggagtattttttgaagtcatggatcagtatatgattttgaagaatatactgccttatatggaagagctaaaaacagtaggaaagtgtaaacatcatcttgttgatgcatttacccatatgaatactgcctatcacgtatttaaggacatgaagaaaaaatatttaaaagttaagaatattaacattgaagagtttaataaagatataggagtatataatgaattggattatctagcctttgctatttttactcatgatataggcaaatatgtgagctataaaaaggaaggacaaaaaataagctttaaaggacatgacgaaaaaggtcttgaaattattgaaaaagtatgtgatgaattgaagtttcctaatgatggaaagaaaatagtatgttctgttgttaaaaaccacatgtatccacttatgctttttaaattaaaggaagatgagcgaaaacaagaagagtatgagttctttaataagtttgatcaatatgttcctcatattatagttgcttccttttgtgatgtgtatgctacaacaatttacattgatgagaataatgaaaaggataggtttacaagttttatttcagagttagtagttaaatacagagaattcataaatctaaagaaaattaagtatatagatggaaatgatttaatagacatggggtttagaggcaatgacataggaaatatactcaatgaacttaataagatgctttatattgagggaagtaagactaagaaagagcagcaggattttgttttaaggatgaaagataagctttag

SEQ ID NO: 15978 - DNA, 1275 bp, Clostridium acetobutylicum
atgtttgtagataaggctaggatttttgttaaatcaggagatggcggcgatggagctgtgtcatttagacgtgaaaaatatattccgcttggaggtcctgacggaggagacggaggagaaggtggagatgtaatacttgttgtagatcctaacatgacaactctacttgactttaagtataaaagaaagtatgtgtcggagagaggacaaaatggtcaaggagctaaatgttatggaagagatggaaaagatctttacataaaagttccaatgggtactataattagagatgtagaaacagataaaataatggcagatttagcacataaagatgataaatttgtaattgtaaaaggtggaagaggaggaaagggaaatgtaaagttctgcactccaacaagacaggcgcctaactttgcacaaccgggcatgccaggagaagaaagatggataagtttagagttgaaattgcttgcagatgtaggattaattggtttccctaatgttggtaaatccacacttctttcagtggcatctaaggcaagacctaagatcgctaactatcactttacgactataactccaaatcttggcgttgttgatgttagtggaattagcagctttgtaatggcagatataccaggaataatagaaggtgcatcagaaggtgttgggcttggatttgaattcttaagacacattgaaagaacacgacttttagtgcatgtagtagatatatctggatcagaaggcagagatcccttagaagattttcttaaaataaatgaagagcttaaaaaatataatataaagttgtgggatagacctcagattgtagcagctaataaagctgatatggtatatgatgatgatcaatttaataagtttagagaagagcttaataagctaggatacaagaacgtatttaaaatatctgctgcaactagaatgggagttgaggatcttttaaaggaatgtgctagagttttaagtactatcccagttacagatatggaaataccagaagaggagaggtttgtaccagaagataaacactttacttacacaattagaaaagaaggcgatacttatattgttgagggaacttttgttgatagacttcttgcaagtgtaaatgtaaatgaaccagattcttttagatattttcacaaggttttaagaaataaaggtgtaatggcagagcttgaagaaatgggaataaaagatggagatatggtaagacttaatgattttgaatttgaattcttaaagtag

SEQ ID NO: 15979 - DNA, 3759 bp, Clostridium acetobutylicum
atgaacgtggggaagactaattggacagaagagcaaaaggaagctatagatactagaaactgtaatcttcttgtagcagctgcagctgggtcaggaaaaactgctgttcttgttgagaggatagtaaaaataataacaaatgaggaaaatccagttgatatagataggcttttagtagttacatttactaatgcagcagcatctgagatgagggagagaataggggatgcaatagtaaataagctttgtgaaaacccaaactctagggttattcaaaaacagctcgccttaattggaaaatctaaaattactacaatacattcattttgcttagatgttataaaaaataactttcacatgcttgatttagatccggattttagagttggagatgaaacggaaattattcttcttaagaacgagactttagaggagctttttgaggataagtaccttcaggcggaatatacatctaagggaataaataaaaataataacagtatagaatttttaaaacttgtagaaagttattgtggcaataaaaatgatcaagttctttttaatatggtaatgaatctttataatttttcaatgagtaatcctgagccgtataaatggctaaaaaaagcagcagaaagatttaatgtagatgatgactttgagtttggagattccctttgggcagaggttttaatgaaaaacatacaaatacagttacttggaatgaaagggcagcttatagagtcaataaacataataaattcatgtgcatccattgaaagttatagagaaaacttagaagtagagctttcaatgcttgaaaaattgattgtagcttctaataattacgaaaagttatatgaggaacttaaaaatgttcaatttaagactttaaaaagatgccctaaggatgctgataaggaaaagcagaagcttgtacgtgacctaagagatggtgttaaaaaaagtttatctaaaataagtgaagatatactttcacaaaatagtgaggagataaaagaggaatttaaagttctttatcctcttatgaaaactttaagtgaacttgtaatagaatttgatattagatataaagataaaaagaaaaaaagaggtataattgattttaatgattttgaacatatgtgtctttcaatactcacaaaaagtgatgaaagtggtaatattgtaccttctgaaactgcattgaaaataagagaaaaatatgaggaaatattaatagacgaatatcaggacagcaatatggttcaggaggttatattaagtactatttctagaaaggatacggaaaatcccaatttatttatggttggagacgtaaagcaaagtatatataggtttaggcaggctaatccaggtattttcctagaaaagtacaatagctataaggaaaataaagatgagaagaatagaaaagtacttttatataagaattttagaagtagaaaagaagttttggactcagtaaactttgtttttaagcaaataatgtctgttaatattggagaacttgattatgacgataacgagaaattgaatttaggtgcaaattatgaagaaatagaggaaaatttaatttctcactctgcagagctaaacataatagaaaaaagtgaagataacactgaaataaaagagaacaatgaggatgaggaaagcgtagataacattatgcttgaggcaagacttattggcagaagaattatagagcttaaggagaatttcaaggtacttgataaaaatacaaacgtttatagaaaagcagagtttaaggacattgtaatattattaagatccacaaagggatgggcaaatgttttttctgatgagcttaaaaacatggggataccggtttttgcagatgccaattcaggatattttgatgctccagaggttaaaactatgttatcactgcttcaagtaattgacaatccaagacaggatatacctatggcagcagttttaaaatcacctgtagggggattttcagtagaggatttaatagatataaaagttattgaaggagacaccttttatgataagcttaaagtggcagcagatattggagatgatgagttttcagtaaggataaggacatttcttaatagactttataggtggagaaaagaatctttatatacgcctatagatgaatttatatggtatctttatacggatacaggatattatggctatgttggggctgttagcggcggaattcagcgtcaagcaaatttgaaaatgttatttcaaagggctaagatttatagtgaaactagctacaagggattgtttaattttataaattttataaataagcttaagcttactagtggtgatatgggaagtgcaaaaattttaggcgagaatgaaaatgtagttagaataatgagtatacacaaaagtaagggacttgaatttcctatagtttttgtaggaggattagggaaaaactttaatctcatggatatgaataatccagttctttttcacaattatctcgggtttggaccagaatatgtagattataaaaaaagaatttcgcacaaaacacttgcaaaggaggcaataaaaaacagaataagaattgaaacactttcggaagaaatgagaatattgtatgttgcttttacaagggcaaaagagaaacttataatggtaggctctgttagcgacataaagaggtcggtttttaaatgggctgtgaatcttagaagtaatcaaaataaaatttcggaggattatgtacttaaaagtaaaagctttttagattggatagctagtgctgttataagacataaggatgcagaaaatctaagagatattatggacacttctaaagaaaatatagacaatttagtttgtgatccttctagttggcgagtaaatgttttaagtagaaatgatgttttaagttttaatcagttattattagaagaagaaaaaaacattaatgaaaaactaacgcaattttataaaagactaaaagaaataagaagttcaaactatgaaagtgtttatatagaagaaataaaaagtaggcttgaatttaagtatcgttatgaaaaagctgcagaactgccatcactgctttcagtaacagaacttaaaagaaatataaatgaagataatgatgagtatgctactaagatttttacgccttctcttgtaaaaaagcctctttttcttgaggaagttaaaaagatgtctccatcagaaaggggaactgcagtacattcagtaatgcagcacttagattttagtagtataagttgtgacatgagtataaaaaatataagacatcaaatagacgatatggtttttagaaggattttaacagagaagcaagctgaaagtgtaaatataaatagaatcttgaaattttttcaaagtccaataggcagtagagttattaaggctgaaaaagtttatagagaatttccttttcaaatacgtgttaagagtacagaaatatataatgatttacctaaaatatatgatgatgaaaatataattgtgcagggaattgtagatttgttttttaaggaaaatgatgaaatagtgcttttagattataaaaatgactatataaatgatgaaaatttaaatgaaacagttaaaaaatatacttatcaaattaattattataaaagagctcttgaaattgtaacaggattaaaggtaaaagaaaaatatctttatttgttttatacaggagatactattaaaatagagtaa

SEQ ID NO: 15980 - DNA, 555 bp, Clostridium acetobutylicum
atgggaaaagaaaatgaggaaagtaaaagcttggggcaaaatgtaaaagagtatgctatattattagtggtggcattaggtattgcagtgatttttaggacgtttgtatttgcaagagcaaatgtagatgggccgtctatgatgccaacttttaaggataaggatgttatatttgtagaaaaattaagcctatatacacattctataaaaaaaggcgaagtagttacattttattctggagatgctgaaaataatatttatataaaaagagttatcggattagcaggagatgtaattgaattaaagaatggtaaagtgtatgtgaatggaaaagcactaaaggaagactatcttgcccctgatgtttatactggaggcggaagctttttagctgaaaatactaaatacaaggtgcctgatggtaatatttttgttttaggcgataatagacctgtgagcaaggatagtagatatataggaccaatatcgcttaaatctttatatggtcatgtaatatttagagcatatccttttaatagtatgaaaagattttaa

SEQ ID NO: 15981 - DNA, 633 bp, Clostridium acetobutylicum
atgtattacaattataatgattttgacgattacgactatgatcatggatatcatggctactatgatcatgattatcacgaccatgactatgatgactacgactatgatcatgatcacgaccatgattatgaccacgaccatgattatgaccacgaccatcaccgcgaagaagagtttgatcctatgagatatgaagatgatgttctagatgcagaagcagaatgtccttttgtatcagattgtccagctacacgaagccaaatgacacctcctggtcctggacaaatgggtcctggctacggtcaaatgggtcccggttacggtcaaatgggccctggttacggtcaaatgggccctggtcatggtcaaatgatgcctcctggtccacctcctacttatgtaccccaaattcaatcagcttctaatggtcctgtaataaaggctgtagattctggtgccatacgcatgtgtagatataaatacacttatatttggttaaataatagaagatccttctgggcttatcttacctttgttggacctcgttctatagctggctatagatggaacggaaggcgctggatttacttcggattagatttaagacaaataagaagttttgtatgtagataa

SEQ ID NO: 15982 - DNA, 1266 bp, Clostridium acetobutylicum
atgagaaaaaagattagtgttttgtttttactttgcatttcagtaatgattttttttataaaattaagaagtgcacctatatttgactgttaccatgtaatgctaagtaatgaagctataagagttaggtactacaaaattaatatgattcttgaaataatatacacttttatgggaatactaattcctttgcttattattttctcaagaatacatgtaagccttgaagagtttgcttataaagttaaaaaagtgtggctcccagggatttgtatatattcttttttatttgttatagtgtaccatatcttttatcttccacttgatatttactcaggatttataaatgagcatattttttcagtttcaaatcaaagttttggaaaatgggtgtggaattggtctcttaatgtgctaacatcagctgtttttttggcagttattttgtggattccatataaaatagctaagagatcagctaaaagatggtggatatatacttggattatttttattcctgttattatattttcatacataatttctcctatagtaatagatccaatgtataataaatttgaaccattaaaggataaaaggcttgaaagtaaaatacaaaatcttgcacacagggcaggagtatataattgtcaactatatcaggttaataaaagcgcagatacaaaacaaataaatgcctatatgacgggggttggaaatacaaaaagaattgttatatgggatacggctataaaaaatttatctgaggatgaacttgaatttgttgttgcacatgaaattggacactatgttttaaatcatacaataataaattgttttggaacaataggtggattatttataatgctttatattatacataaggcggttccgcatactgtaaaaaaatacggcaagatgcttaaaatagagagcattataaatataaggtcttttcctcttgttatactagttataactatttgcacttgtgtttctgagccgctttataatgctgtgagtagaactatggagtacaatgctgatacctttgcagttgagctcactcacaacaatgaagctggagtaaatatgtttaaaaaattatcagttaaaaatttatctgtaatgaaaccggatagatggtatgaaatatggaaatacacacatccatctttgcaggaaagaatagattttgttaagtcgtataaaccctgggaacaaaataagcctttaaagtatggtagatacattaaaaataattaa

SEQ ID NO: 15983 - DNA, 1194 bp, Clostridium acetobutylicum
atgaaattcaataaaaagactattgaagatgtagatgttaaaggtaaaagagtattagttagatgcgattttaatgtacctttaaaggacggagtaataactgacgaaaacagacttaatggagcacttccaactataaaatacctttcagagcacggtggaaaagttattctttgttcacatcttggaaaagcaaagggaccagatccttcaaaaactttagctccagttgctaaaagattaagtgaattacttggacgcgaagttaaatttgctgctgatgatacagttgttggcgagaatgctaagaaggctgtagctgaacttaaagaaggagaaatagttcttcttgagaacacaagattcagaccagaagaaggaaaaaatgatgatgcattctcaaaagatttagcttcacttgcagatgtatatgtaaatgatgcatttggaactgctcacagagcacactgctcaacagttggagtaactaaattcgtagatactgctgtatgtggatatttaattcaaaaagaattaaaattcttaggatcagctgttgaaaatccagttagaccttttgttgcaattcttggaggagcaaaagtttctgataaaatcaatgttataaacaatttacttgaaaaagttgatacattaatcatcggaggcggaatggcatacacattcttaaaagctcaaggatatacaataggaacttcacttcttgaagcagacaaagttgattatgcaaaagaaatgatagaaaaagcagaagctaaaggagtaaaattacttcttcctatagataatatagttggagcagaatttaaagcagatacaaaagcagttacaactgaagatgcaaatataccagaaggatacatgggattagatattggaccaaagactcaaaagctttatgctgatgctgttaaagaagctaaaacagttgtttggaatggacctatgggagtatttgaatttgaaaacttcgctaaaggaacaaaagatgttgcaaaagctatggctgaatcagatgcaacaacagttataggtggaggagacagtgctgctgctgttaatcagttaggatttggagacaaaatgactcatatctcaactggaggcggagcttcacttgaattcttagaaggaaaagaacttccaggaatagtagctcttaatgataaataa

SEQ ID NO: 15984 - DNA, 1053 bp, Clostridium acetobutylicum
atgaagctgcatgctggcttaatcatccggatgcaccaaaggttaatccaattaatgaaaggagagaagacaatgccacaagataaagtattacttgaagtaaagaatttaaagaaatggtttcctgtgaagaaaggtttctttggtaaaaacgtcagtaatgtaaaggcagtagatggtgtgtcttttcagataaaaaagggagaaaccttggggcttgttggagaatcaggttgtgggaaaactacaacaggaagaacaatattaaagctttatgagccaacttctggacaaataatatataacggaaaagatattgcaaagttgagttataaagaaatgcttccatatagaagaaaaatgcaaatgatttttcaagatccttatgcatcattaaattcaagaatgacagtaggggatataattggagaatcaattgatattcataagttgtggaccggtaaggagagaaaagaaagaatagaataccttcttaaaaaagttggtctaaatggagatcatataaacagatatccgcacgagttttctggtggtcaaagacaaagaataggtatagctagagctttggctgtagagcctgagtttatagtatgtgatgagcctatatctgcccttgatgtttcaatacaggcacaagttgtaaatatgcttgaagagcttcaggaggaacttggacttacatacctctttatagcacatgatttatcaatggttaagcatatttccactaagataggagtaatgtatttaggaaacctcatagaagtaggggaaagttcagagctttacaataatccgcttcacccatatacaaaagcactgttgtctgcggtaccagtaccagatccggacgaagcggcagcaagacaaagaataatacttgaaggagagattccatcacctatagatcctccaaggggatgtaagtttagaggtagatgcagatatgctaagcctgagtgtaaggatgctgcaccagaatttaaggatataggggagaatcattcagtagcttgttatctatataaataa

SEQ ID NO: 15985 - DNA, 1002 bp, Clostridium acetobutylicum
ttgataagtgttataatgcctgtttacaattgtgaaaaatatttagaagaatctatagaaagcatactaaaacaaacgtatagagattttgaatttattattgtaaatgatggttcaaatgataaatcaatagatataataaataaatatgcaaatgacgataatagaatagttgtagtatcaagggacaacaacatgggaatggtgtattctctaaatgagggaatcgatagagcaaaaggaagttatgtagcaagaatggatgcggacgatatagctcttcctgaaaggtttgaaagacaaatagaatatcttaataaaaataaagatgtagatatactagcgtgcaaggtagaagcttttggagatgttagtagagaacaaaaacttgaaagagagcactggtacaatgttgacttaaataattctgaaagcattgaaagcttatttttggagaattgttatattgcacatccttcagttatgatgaaaatgagtgttcttaaggctctaggtgggtataacttaaactataaaagaaccgaagattataatttatggctaagggctatagctaagggatataaaatagctatgttagaagaaaaacttatgaaaattcgtttgcataatgattctaagatacatagggatgctgaaggttttagtagtataagagatataattcaatccaggcttgagtatgtaaaggaaaaacttaagcttaaagattttagttatgttatttggggagccagcaatgggggcaaaatagcatatgagaagataaaagaagtttttccaaatgctaagctaaatggatatattgataagtttaaaacaggaaaatttgagggtgtagatatattttatccagaagatttgagtaaaatgaaagttgattatgtattcatagctactttaccaggatgtaaagaagctaaaggaatcttgacaaagaataattttgttccaataaaagattttttagtattatgctaa

SEQ ID NO: 15986 - DNA, 372 bp, Clostridium acetobutylicum
atgacaagagaagaaattatagaagctataaaaggtatgtcagttttagaattaaatgaattagtaaaagcatgtgaggaagagttcggtgttagcgctgcagctccagtagcagtagcaggcgcagcaggtgcagcaggtgcagcagctggtgaagaaaaaactgaatttgacgttgtacttgcagaagcaggtgctaagaaattacaagttataaaagttgttagagaattaactggtcttggattaaaagacgctaaagctttagttgatggagctcctaagactattaaagaaggcgtagctaaagaagaagctgaaagcatgaaagctaaaatagaagaagcaggcggaaaagtagaattaaaataa

SEQ ID NO: 15987 - DNA, 891 bp, Clostridium acetobutylicum
atgattagagttaaaatacctgctacaagtgcaaatatgggggctggatttgacacactaggaatggctctaaagctttataacgaaataactatagaagaaacagaaggtgaaactgagattaagcttttaggtggtgagcttgatagaaattataggaataatttaacatacataagtattataaaggtatatgagttttttaataaagaatttaagggctttaagatagatatgtctaaaactaatatacctctttctagggggttaggaagtagtgcagcatgtattgtaggaggcatagtgggagctaatgcacttttgaatgaaaaaatgaccattaaggatatgcttaaaatagctgtggatattgaaggacatccagataatgttgcaccagctcttttaggaggagttataataagcataaaggatatggaaaatataatatattcaagaattaatgtgaaatcacagcttaaatatgctgttatggttccggattttaaggttagtactgagctttcaagaaaagttttgcctaatgaatattcaagggaagatgcactttttaatatatctagatgttccatgcttgtatctgcattaaataatggtgaaaatgaaaagcttagatatttatttgaagataagatccaccagccttatagaaaaaaacttataaataatatagatagtatttttttaaaagcaaaagaatatggatcacttggtgaatttataagtggttcgggatctaccttgattgctgttttagaagaagctgatgagaacttcattttaaagatgaaaacttatcttgattcgctgaaggatgggtggaggatatttgaggtagaaaacgataataatggcgcagttataatatag

SEQ ID NO: 15988 - DNA, 1137 bp, Clostridium acetobutylicum
atgagcaaaattaaagttatttcaatatttgggacaaggccagaagctataaagatggctcctttggttaaaaaactgaaagaaaataaaaattttcaagcaaaagtatgtgttacagcacagcacagggagatgctagatcaagttcttagtttgttcaatatagagccagactttgatttgaatataatgaaaaataagcaatctcttacaacgataacttcaagtgttttacatgggttaagcgaaatattttctgctgaaagaccagatattattttagtacatggagatacaactacaacgtttgcagcatcacttgcagccttttatgaaaagatagctattgggcatgttgaggctggacttagaacttatgataaatattttccttttcctgaagaagtaaatagaaaacttactggagcaattgcagatatgcattttgcaccgacagtaaaatctaaaaataatcttttaagagaaggtgtaaaagaaaaaaatatatttataactggaaatactgtgattgatgctatgaaatacacagtggatagtaattatgtatttaaaaatgatcaattaaataaattggactacaaacataaaaagattattatggtaactgcacacagacgtgaaaattggggcaagggtatagagaatatatgcacggcattaaggagaattgtagaagaaaataatgatgttgaattggtctatcttgtacatttaaatcctatagttaaaaatgttgtgtacagaaatttaaataatataaatagagttcatttgctcccaccacttgatacaaaggaaactcataatttaatgaataagtgttttatggttatgactgattcaggcgggcttcaggaagaagcacctcatcttggaaaacctgtacttgtattaagaaatgtaacagaaagaccagaagcagttgaggctggaacagttaaattagtaggaactgacattaaaaatattgtagatgagacttgcagaataataaataacaaagatgaatacgaaaagatgagtagagctataaatccatatggggatggaagagcatcagaaagaatagtagattatatgctagattattttcattcattagtgaaaaatcattaa

SEQ ID NO: 15989 - DNA, 951 bp, Clostridium botulinum
atgcattacattaggaggatacacatggagtttaaacatatatctgtattattagaagagactatagattcacttaatataaaggaagatggtgtatatgtagactgtactttaggtggtggaggacattctaaagaaatattaaaaaaattatcccacaagggaaaattaataggcatagatcaagatacaagtgctattaaagcagctaaggaaagattaaaagattatgagaatgtaatttatgtacataataatttttataatatagatagtattttagaagagctagatatagataaagttgatggtataataatggatttaggggtatcttcttaccaattagatgaagcttcaagaggctttagttatatgaaagatgcacctttagatatgagaatgaatagagaagaaaatctttcagcctatggtgtaataaataattatgaagaagaagaattgtttaaaatattaaaaaattatggggaagaaaaattttctagaaaaattgctagatttatagtagaaaaaagaacagaaaatcctatagaaactacaggagaattagtagagataataagaaaagctattccagctaagtttcaaagagaaggacatcctgctaaaagaacctttcaagctataaggatagaagtaaataaggaacttcaaatattaaataaagctatagaagacagtgtaaatagactaaataaagatggaagattaagcataataacctttcattctttggaggatagaatagtaaaggtgaaatttaaagaactagaaaaaccatgtacttgcccaccaagcttcccaatttgtgtctgtgggaaagaaccacaaataaaaataataacaaaaaaaccaatagaaccttcaaaagaagaaaaagaaattaactctagaagtagaagtgcaaaattaagagtatgtagaaaaata

SEQ ID NO: 15990 - DNA, 1779 bp, Clostridium botulinum
atgggagaagcgctaagaggacttaagagaacaataatgtgtggcgagtctagagaaaataatataggacaaaaagtcacagttatgggatgggttcaaagaaaaagaaatttaggaggactaatctttgtagatttaagagatagaacaggaattatgcaaatagtttttggtgaagaaataaataaagaagccttcgaaaaatcagataatgtaaaatcagaatattgtatcgccgtaactggtgaaatagttaaaagacagtcaccaaacaatgatatggaaactggagctgtggaattaaagggagaagatataaaaatattatctgaatcagaaacacctcctatatatataaaagaagggttagatgcatctgaaaatataagattaaaatatagatatcttgacttaagaagaccagatatgcaaaagatatttatgataagacacaagacatgtaaagttgttagagatttcttagatgaaaatggatttttagaaatggaaacaccaatacttacaaaaagtaccccagaaggagctcgtgactatttagttccaagtagaaattacaaaggaatgttttatgcattaccacaatcaccacaaatatttaaacagcttttaatggtctcaggttatgataaatattttcaaataacaaaatgttttagagatgaagatttaagagctaatagacaaccggaatttacacaaatagatatggaattatcttttgtagaagaagatgatgtaattgaattaaacgaaagattattagctaaggtatttaaagaagttgggggaatagatgtaaaacttccgatagaaagaatgccatataaaatagctatggaaaaatacggttcagataaaccagatttaagatttggaatggaaataaatgatttaacagaagctgttaaaaattcagaatttaaagtattcaaaggtgctatagaagcaggtggctctgtaagagcaataaaagcagaaaattgtgctactatgggaagaaaacaaatagataagctacaagattttgttaaaacatataaagcaaaaggattagcttggatagcttataaagaggatgaaataaaatctccaatagctaaatttttaacagaagaagaaatgaaagctatattagaaaaaatggatgctaaagcaggagatttaatattaatagtagcagacaaaaacaatgtagtatttgaaagcttaggggcattaagactacatatagcaaaagaattagatattataaataaaaatgagtttagatttgtgtggataactgaattcccactattagcttataatgaagaagaaggcagatatcaagcggagcatcatccattcacagctataatggatgaggatatagaactattaggtacagagccaggaaaagtaagagcgaaagcttatgatatagtattaaatggagaagagctaggcggaggaagtattagaatacatgatagtaaatttcaagaaaaaatgtttagtgtattaggctttactaaagaaaaagcttgggaaagatttgggttcttacttgaagcatttaaatttggaccaccaccacatggtgggttagcttatggtcttgatagaatgataatgtttttagcaggaacagaaaatattaaagacgtaataacattccctaagaatcaaaatgccttctgcccattaactgaagcaccaaatgtagttgatgaaaatcaattagaagaattaggaataaaaaaaatagaaaaagaagat

SEQ ID NO: 15991 - DNA, 657 bp, Clostridium botulinum
ttggttacactaaaatcatacctcaataatggtgtttatttcctatatgacatattgggaaatttaatgttattaaggaggtattttattatggagaaaaactcaaaactattaaagaaacttatgttagcaatgattgtggcaatgggaattgtaatttcaccaattcttcgtattgagggaatgtgccctatggcccattttattaacattttatgttctgttatccttggaccctggtattcactgctttgtgctacattgattggtgtaataagaatgttttttatggggattccacctttagctttaactggagcggtttttggggcatttttgtctggagtttcatacagagtatctaagggaaagttaatttgtgctattgtaggtgaagttataggaactggtgttataggcgccatactttcatatcctattatgacatttatttggggcagaacaggtcttacatggatattttatgttccttcatttattatggctgcgcttattggaggaacaattgcatttatttttctaggagcattaagtaggacaggtaatcttacaaaaattcaaagaagtttgggggcaaaaatttatgataaagcaagaattaataataaacaaactattgcaaataagacagagtat

SEQ ID NO: 15992 - DNA, 960 bp, Clostridium botulinum
gtgaataaattaaaaaacaaaaaggctattatcttaatcacaattgtaattgcattattaataagtttaggtttatacagatataataaagttgaagcttataatagagttgtagaagcagctaataattatatggaaaaaggggaatatgataaagctatagatagctttaagaaatcattaaattataaagaagataaagaaatagataaaaaagtaaaagaagctcggcagcttaaaaacagtcaaaaagtatataatgatgctgtaaatttattagaagataaaaagtatgaagaggctttagaaaaattaagttctatagatgaaaataaggataaagtatacattttagcaaaagataaaatagatgggtgtataggcgaactaataaacttagctaatgaagagtttaagaaagaaaattatcatagtgctaataaatatttggatatggttttaaaatatgataaagacaatgaaaaagcattggatgtaagaaataatgtaaaaactaaaatagaggaaaagaaaaataatgaagaaaaactaaaaaaacaacaaaaaataaaaactttaaaagaaaagaaagataatgaatatgataaagataaggtaaataataaagataaggaaagaataagtaattctaaagaaaaatctaaatctaattctaataacaattatataagtgaaggcaaagctagggttttggtagaatctgttaaaccttctgatattactctaaattatttaggaattcaaacagtaccatactcccacataactacgccttataaggcatttccgcaggagcttaagaataagaaagtttatgtgtttgaaggagtatatggtaaaagtgatggaagctatacagtaagtcaatattatgtagatctcagtggtgaaatttacaaagatacttatccaagtgatggtaaatgtatcagagtaaaa

SEQ ID NO: 15993 - DNA, 888 bp, Clostridium botulinum
atgtttaaatcaggatttgtaaccatagtaggaagacctaatgtaggaaaatcaacgttattaaatgccataatgaaagagaaactttctatagtttcatgcagaccccagactacaagaaacaatatacaaacaatattaacagaagataattaccaacttgtatttgttgatacgccaggaatacataagcctaagcataagttaggagagtatatggtgaaatcagcatcagaagctatgaaggatgtggatttagtactttttttaataaatccagatgaaaagcctggtagaggagatttgtttataatagaacaattaaaagaagtaaaagtaccagtatttttagttttaaataaaatagatgaaaatccacaagaaaaagtagcagagactttaaaaacatattcagaacttatggagtttgaagaaataatacctatatctgcactaaaaggtaaaaatattgatttacttaaagaattaatgtttaaatatataccagagggaccacaatattatccagaagatatgataatagatcaaaatgaaagatttatagtggcagagatagtaagggaaaaagctttaagacttttatcagaagaagttcctcatggtatagctgtagaaatacttcaaatgaagaaaaatgaaaaaggaacttatcacatagaaggtaatatattatgtgaaaaaaattctcataaacctataattataggtaaaggtggtagtaaattaaagaaaatatctcaatatgcaagacaggatatagaagcttttcttcaaagtaaagtatatataagactttgggttaaagtaaaagaagagtggagagataaccaaagtttattaaaagaattaggttataaaaatatgaaa

SEQ ID NO: 15994 - DNA, 1389 bp, Clostridium botulinum
ttggagataaataaaataatagaagagctaaaagatgatcttatagactctactgcagaattagttaaaattaagagtatagaagatgaagcaaaggaaggtaaaccttatggggaaggcgtagccagtgctttggaaaaagcattagaaataagtgaaaagctaggttttgaaactgtaaacgtagatggatatgttggatatgctgaatacggtgaaggtgatgaatatgtaggtgttttaggtcatttggatttagtaccagaaggagatggatggaagtatccaccttatggagcagaaatacatgatggaaaaatgtatggtagaggaactacagatgacaaggggcctataatggcagcactttacggtttaaaagccataaaagaatcaaaacttcctttatctaaaaaggttagaatcttgtttggaacaaatgaagaaacaggttctaaagaaatagaacattatttagaaaaggaaaaaccaccagtacttggatttactccagatgctgagtatccaataatctatgctgaaaaaggaattacaatatttgatgtagtaaaaaaattagaaataaaaagtagtaaagctattaaattaaaatatattaaaggtggagaagcatctaatatggtgccagattattgtgaagctggtatagaatgtccagatacagatatgataataagatctttagagtattgtgctaatagaaatgggatagaattaacagcagaagaaaaaggtggtttagtagtaattaaatcttttggactatccgctcatggaagtacaccagagattggtaagaatgctataatgcaaatgtttaaatttttagcagaacttccattaggtcattgtgatgaattacaattcataagattttttaataataatgtaggaaatgaaactgatggtaaaacttttggtgtagagctagaagatgaaccatcaggtaagttaagttttaatgtaggaactatttctatggaaaataataaaataagaatgtcattaaatttaagatatcctgtaacatataaatcagaagatcttatggaaaagttcaataaaaagatagatggaacaggaataaaagtagaaaattttgaggatcaaaaacctttatattttgatgcagaacaccaattaataaaatcattacaaaaggtatataaagaacaaacaggaaaagaaccagaattactagctataggtggaggaacttatgcaaaagaaatgcctaatatggttgcctttggaccacttttccctggagaaccagatgtaattcataaaaaagatgaatatatagaactagaaaacttggtgttaaatgccaaaatatacgggcatgctatatatgaattagccaaa

SEQ ID NO: 15995 - DNA, 1317 bp, Clostridium botulinum
atgtatagaaaaaggggagggttagaaatgaaaaagttctttgactggatggaagagcattttgttccaatagcagctaaaataggttctcaaaggcatttagttgctattcgtgatggttttgctacaattactccaattattatggcaggggcttttgcagtattatttaataatttaggatggaaaccatatcaaaattttatgaattggttattacctgctaattggaaaaattttggtgatggagtctggaatggtactttcgctataatgtcattattagtagtatttactatatcctatcatttagctaaatcctatgaaaaagatgggttatcagcgggaattgtatctctatctgcattattaattttatataagccaacaaaagatggaggggcagtaccacttgagtttttagggggccaaggattatttgttgcattaatagttgcattaatagctacagaaatttttgttaaattagcagggaatccaaaattaattattaaaatgccagagggagttccaccagcagtagcaaaatcttttgcagcattattaccatcaattatagttttagctattacagcagcagtaaagcaaattttcggggcaataggaataccagatatacacaaagcattattttcagcattacaggcaccattgcaaggtgtaatgggaagtttgggtggtttattagttttagttttagtacagcaattcttatggttttttggcttacatggttcaaatatacttgcaccaattataaatgcggtattgttaccattaacagaagctaatgtaagagcatttaagaatggagttaatcctgagcatataataaatagtcaatttttagattcttacgtaaatatggggggatcaggtgccactatagctttattaattgcaatattcataattggaagaaagagcaaatcacaaaagactattgcaaatctaagtatagcaccaggaatgttcaatataaatgaacctgttatattcggtttaccaataattttaaatccaatatactttataccatttatactagcaccattggcatctggagtgattgcatatgtattaacttttatagggtttgcacctaaagttgtagtaatggctcactggacgacaccaccaatattaggagccattatatcaacaaattcactaaggggcggaattacagctcttatttgtatggtagtcagcataataatatatataccatttgttcgcatagctacaaagaaagaccaaaaaaatacagtagaggtagagaaaacacattcaatt

SEQ ID NO: 15996 - DNA, 516 bp, Clostridium botulinum
atgtcgagtacctatgaacttaaacttaatgttaaggagggaagaaaagtgccaagaaaaggacatatagcaaagagagatgtattaccagatccattatataacagtaaggttgttacaaaattaataaacagcataatgttagatggtaaaagaggagtagcacaaaagatatgctacgatgcttttgaaataatagcagaaaaatcaggtaaggatgcaatggaagtttttgaaactgccatgaacaacataatgcctttacttgaagtaaaagcaagaagaataggtggagctacatatcaagttccaatcgaagttagaccagaaagaagacagactttaggaattagatggatgctaattgccgctagaaaaagaggcgaaagaagcatgagagaaagactagcaggagaattgttagacgcatctaataatactggagcagctgttaagaaaagagaagacacacacaaaatggcagaagcaaacaaagctttcgcacattacagatac

SEQ ID NO: 15997 - DNA, 1443 bp, Clostridium botulinum
atgaactacccaatagtatttaaagtattaggagatgtaataaaatatgaagctttagttatgatatttcctcttatagcgtccttatattatggtggcaaggatgctaatagttttataataactattgcaataatgctgtgtactgcagttataatgtcaaatattagacctaaaaatagaactttttatgctaaagaaggttttttatctgtttctgtttgttggatagttatatctttatttggagcattaccattttatataagtggagcgataccttcctttgtagattgtatatttgaaacagtgtcaggctttacaactacaggagctactattttaacagaagtggaatctttatctaagggaatattgttttggagaagttttacacattggataggtggtatgggaatattaatatttacattagcattaatgccttctataggtggtactacaattcatcttttaaaggcagaaagtccagggcctactccagggaaaattgttccaaggataaaagaaacagctaaaataatgtatttaatatattttgctatgactatattacaaataagtttacttttaattgcagggatggaaccttatgatgcattaatacatgcctttggtacagctggtactggaggattttccaatatgaatagtagtgtaggagcatataataatgtatatatagaagttataataacagtgtttatgttattgttcggtgttaattttaatgtatattttcaactaatagcaggaaatattaaacaagcttttaaaaatgaagaagtgaaatattatataggtatggtattgattgctatgacaataatagcttttaatattaaaggaatgtatgggggatctttaaaggaaggttttaggcaatcatctttccaagtagcctctattgtaaccactacaggttatgctactactaattttgatttgtggccaacccttagtaaatcaatattagctttattaatgcttacaggatgttgtgcaggttctaccggtgggggaattaaaactgttcgtatagtacttttgtttaaagctatgaaaagagaaataagtaaaattattcatcctagaatggttaattcagtaaaactagatggtaaggttgtagaggatgaaaccatatcgcaggttggattatttgtatttgcctacgttagtataattgtaatagcagtacttttagtatctatagatggtatggatatggagaccacactttcttctgtgcttgcaactataggtaatataggacctggttttaaggtggtaggacctataggtaattttagcagctattcatcttttagcaaaatagtattttcattttgtatgttagcaggaagattagaaatatatccaatgctagtaatgttaagtccttcgagtatgagaaaaata

SEQ ID NO: 15998 - DNA, 1449 bp, Clostridium botulinum
atgaatttaaatttaatactaaagtcattagaatattcttttataaaagaaaataaaaaggaaatagaaaagatagaatatgattcaagaaaagttaaagaaagagatttatttgtttgtatagagggatatgcaacagatgggcataaatatgcgaaaaaagcttatgacaatggagctaaagtaattgtttgtgagaaggatttagaagacttatcctattataaagattggactataataaaagtttcagatagtagaaaagccttagctataatgtcatctaattattatggtaacccatctaaacatattaaaataataggtattacaggaacaaatggcaaaactacatctacttttatgatgaaagctatactagaaaaagcaggctataaagttgggcttttgggaactatagcaaattatataggaaataaaaaaatagaatctcatagaactactccagagtctctagaactacaaaaattatttaaagatatggtggatgaaaaagtagattattgtgtaatggaagtatcttctcattctttatatttagatagagtttatggagtagaatttaaagaggctatatttacaaatttaacgcaggatcatttggacttccataaaacctttgaaaattattttaattccaaactaattttatttaaaaatgctcaaaattcagtgataaatatagatgatagttatggagaaaaagtattaaagaaagctttaggaaataaaataacctatggtgtagagaaaaattgtgatttaaaagcggaaaatttacatatgcattctagaggagtagaatttgacactatatttaaaaatgaaaaagaaactatagctttaaatataccaggtaaatataatatatataatgctttaggaagtattggagcttgtcttttggagggtatccctttaaaaactataaaagaagcattagaagatatgccatctgtaccaggaagatgtgaaattgtaactaaaaattataatttaggttatgatgttatagtagattatgcccatactccagatggattagaaaatatattaaatactgctcgagaatttacaaagggaagattaataagtgtatacggatgcggtggagatagagatagaactaaaagaccaattatgggaaaagtggggtcaaatttaagtgatatagctataataacctcagataatccaagaacagaggatcctaaacttataataaaagatgtattagaaggtatagaaagagataactatatagtagttgaaggaagacgagatgccataagaaaagctatggaaatagcaaaagaaaatgatgttatagtagtggcaggaaaaggccatgaagattatcaaatattaaaggataaaactattcactttgatgaaagagaagtaatagaagaactaataaaagaaata

SEQ ID NO: 15999 - DNA, 210 bp, Clostridium botulinum
atgaaggctagagaattacaagaattaagaaaaagcagcccacaagagttacaatcaaagttaaatgatctaaaagcggaattattcaatttaagatttcaattagctacaggtcagttagaaaacccaatgagaattagagaagtaaaaaaatcaatagctcaaattaaaactatcttaagagaagaagagataagagcatatcaacag

SEQ ID NO: 16000 - DNA, 1110 bp, Clostridium botulinum
gtgatgaaaaaattaaaatttgctattgttggttgtggaagaatttcttataagcatgtagaagctataataaataataaagaagaagctgaattagtagcagtttgtgatgtagttgaagaaaaagctatagagaagaaaaatgattatatatcaaaatcaagtgaagaagttaatgtaaatatatatacagattataaggaaatgctagaaaaagaagaaatagatgtagttactatagctactgaaagtggatatcatccagaaatagctataaattgtatggataagaaaaagcatataatatgtgaaaaacctatggcactatctgtagatgatgcagatagaatgatagaatcagcaaagaaaaataatgttaaactttgtgtgagtcatcaaaatagatttaataaaccaatacaacaattaagaaaggcagtagaagctaataggttcggaagattagtaaacggtactgcaagaatactatggaatagaaatatgggatactatcatcaagcaccgtggagagggacttgggaacttgatggtggtactttaatgaatcaatgtatacacaacatagatttgcttcaatggatgatgggcggagaaattgatacagtctacgctcaatgtgatacttttctaagagatatagaagcagaggactttggagctatagtaataagatttaaaaatggagctatagggatagttgaaggaagtgcttgtgtatatcctaaaaatttagaagaaacattaagtgtatttggagaaaaaggtacagcttgcataggtggacttgctgttaataaaatagaaacttggaaatttgaagatggggctgaaaatgaagaagaagatatattaaaagctcaagagggagatccagattcagtatacggttttggacatactccattatttaaagatacaatagatgctgtaaaggaagatagagcacctctagtaagtggggaagaagggaaaaaaggtatggcaataatattagccgcttataaatcaagacttacaggcatgccagttaaattcccatttaataatttttcaacaatggatatggtaaatgtagaaaaaataaataaa

SEQ ID NO: 16001 - DNA, 2520 bp, Clostridium botulinum
gtgaggatgaataatatgggaattttaaataaaatatttggtacatatagtgaaagagaacttagaagagttaaccctatagtaaacaaaatagaagctttagatgaaaaaatgcaatccttaaaagatgaagattttaagctaaaaactgaagaatttaaaagtagattagaaaaaggggaaaaactagatgatattttaccagaagcttttgccttagttagagaagcggcacatagaaccataggacttaaacattatagagaacaattaataggcggtgtagtattacaccaaggaagaattggagaaatgaaaaccggtgaaggtaaaactttagttgctacattgccagcctatgtaaatgcattaacaggaaaaggggtacatatagttacagttaatgattacttggcaaaaagagatagggatttaatggctccggtatatgaatttttagggctaaaagtaggagttattttgcataatttaaataatgaagaaagacaagaagcttatggttcagatataacttatggaacaaatagtgaatttggctttgattatttaagagataatatggtagtttataaagaagaaagagttcaaagaaagttaaacttttcaattgtggatgaagtggactctatattaatagatgaagctagaactccattaataatatcaggtcaaggggagaagtctacagagttttataaggttgcagattatttcactaaatctctaatagctgaaaaagattttacaatagatgaaaaagctaattcagctatgcttacagatgaaggtgttaataaagcagagaatttctttaaagtagataactatgctgatgcagaaaacatggaaatacaacaccatgtagttcaagctttaaaagctaactatgtaatgaaaaaagataaagattatatgattaaggatggagaaattctaatagttgatgagtttacaggaagagctatggaaggaagaagatatagcgatggattgcaccaagctatagaagctaaagaaggcgttagagtagaaagagaatctaaaaccttagctacaataacttatcaaaactattttagaatgtacaataaattgtctggtatgacaggaactgctcaaacagaagaaaatgaatttagagaaatctatggattagatgtaattgtaatacctacacatgagcctatagcaagaatagataatgctgatgtagtatataaatcagaaaagggtaaatttaaagccatagttgatgaaatagtagaaagatataaaaaaggtcaaccaatgctagtaggtacggtaagcatagaaaaatcagaaatgttatcctctatgttaaagaaaaaaggagtacctcatcaagtattaaatgctaaatatcatgaaaaagaagcggaaataatatctcatgcaggggaatatgggatggttacaatagccactaatatggcaggccgtggtacagatataaagcttactaaggaagctgaagaagcaggcgggcttatgattataggtacagaaagacatgagtctagaagaatagacaaccaattaagaggacgttctggtcgtcaaggagatcctggtgaatcaagattttttgtatctttagaagatgatttaatgagaatatttggttcagaaagaatacaaggaatagttgataaattaggactggctgaagatgaagctatagaaagtaaaatggtaagttcagctatagaaagtgctcaaaagaaggtagaaggaaataactttgatataagaaaaactttattacaatatgatgatgtaataaataaacaaagagaaataatctataaacaaagaagtgaggttttagagggagaagacttaaaggatcaaataagagatatgataagggatgtggtttatactgcagtaaattctcatatttcaggagtagaagaagagtttcaaacagaacttcaaaatcttgttaattatttagaagacatatgcttaccaaaggccttagtaaaggtaaaagatataagtaatttatcagatgaagaaataaaagaaaaattattagaagcagtagagaatatatatatccgcaaagaaaaagaaattggggaagaacaaataagagaaatagaaagagtaatattacttagggttgtagatactaaatggatggatcatatagatgatatggatcacttaaaacaaggtataggactaagagcatatagacaacaagatccagttcaagcgtatcaatttgaaggtagtgaaatgtttgaggaaatgatctataacattaaagtagatacagtaagatatttattccatgtagaagtagaaaaagcacctgaaagagagaaagttgcaaaagaaacatcaactaattatgatgaagattcagtaaaaaaacaacctataaaaaaggaaaatagaataggtagaaatgatatgtgtccttgcggaagtgggaaaaaatataaaaattgttgtggtagaatggca

SEQ ID NO: 16002 - DNA, 453 bp, Clostridium botulinum
atgcatacagtttatgtggcctttgggagtaatataggtgaaaaagaaagttacataaaaagggcattggaaaagatagaagaaagaggaatggaaataattaaagtatcctctatatatgaaacagaaccctatggagtattagatcaagatagttttttaaatggagtagtaaaaatagaaactaatttaactccagaagatttaataggggagcttttaaacatagaaaaacagttaaatagagtaagagaaagaagatggggacctagaactatagatttagatattattttttatgatgatttaataataaatgaaaaagatttagttattcctcataaggatatggaaaacagagagtttgtattaaagcctttgtgtgatatagatgaaaattttatacatccggttttaaaaaaatcagtaagagaattgtatgatgagttgaag

SEQ ID NO: 16003 - DNA, 3534 bp, Clostridium botulinum
ttgtttgagttaaataattttgatgctttacaaataggtttagcttcaccagaaaagataagagagtggtcaagaggtgaagttaaaaagccagagactataaattatagaacactaaaaccagaaagagatggtttgttctgtgaaagaatttttggtcctatgaaggattgggaatgccattgtggtaaatataaaaggataagatataagggcatagtttgtgatagatgcggagtagaggttactaaagctaaagtaagacgtgagagaatggggcatatagaacttgctgcccctgtatctcatatatggtatttcaaagggattccatcaagaatgggattaatattagatatgtctccaagagctttagaaaaagttttatactttgcttcgtatgtagtattagatccaaaagaaacacctcttttaaagaaacaattattaaatgaaaaagagtatagagaatctatagacaaatatggagatgacagctttgtcgcagcaatgggtgcagaagctgtaaagactcttttagacgaaatagatttagaacaatcatctattgaacttaaagaagagttaaaaacaagtacaggacaaaagaaaataagaataataagaagattagaggtagtagaatcttttagaaaatcaggaaatagacctgattggatggttatagatgttataccagtaattccacctgatttaaggccaatggttcaactagacggaggaagatttgctacatctgatttaaatgatttgtatagaagagttataaatagaaataacagattaaaaaaattgttagacttaggggctccagatataattgtaagaaatgaaaaaagaatgcttcaagaagcagtagatgctttaatagataatggtagaagagggagaccagtaacaggaccaggaaatagacctcttaaatcattatcagatatgttaaagggtaagcaaggtagatttagacaaaacttactaggaaagcgtgttgactattcggggcgttcagttatagttgtaggaccagaattaaaaatgtaccaatgtggtttaccaaaagaaatggctcttgaattatttaaaccatttgttatgaaaaaacttgttcaaaatgggttagcacataatataaaaagtgctaagagaatggtagaaagagttcaaccccaggtttgggatgtattagaagaagttatttctgatcacccagtattattaaaccgtgcccctactcttcacagattaggaattcaagccttccaacctgtgttagtagagggaagagcaattaaacttcatccacttgtatgtacagcatataatgcggacttcgatggagaccaaatggctgttcacgtacctttatcagttgaagctcaagcagaggcaagattcctaatgctagcagcacataatatattaaaaccatctgatggtaaaccagtgtctgtacctacacaagatatggttttaggttcttattacttaacaatggataaagatggagtaaaaggtgaaggaaaagtattttcttgtccagaagaagtacttatggcatatcaatgcaaagctgtcgatatacatgctaaaataaaagtaagattaaagaaagttatagacggagaaactattgaaggaataatagaaacaacgccaggaaaaattatatttaatgaatctataccacaggatttaggatatattgatagaacagtacctgaaaataaattaaaactagaagtagattttcttgtatctaaaaagacattaggtggaataattaacagatgctatatgaaacatggtgcaacaaaaacttctataatgttagataaaataaaagcaaaaggatatcattattctactataggagctattactatttctacttcagatatggtagtgccagaagctaaaagagaattactacaaaatacagaaaaacaagtagaaaagatacaaaaaatgtatcgtagagggtttatatctgaagaagaaagatatgaaaaagttattgacctttggactaaaacaacagaagatgtagctaatgctcttatggcaagtttggatagttttaatcctatatatatgatggctgattcaggagctagaggttctaaaagtcagataaaacaattagcaggtatgagaggtcttatggctaatccatcaggtaaaattatagagttaccaataaaagcttcttttagggaaggcctagatgtgttagagtattttatatcaacacatggtgctagaaaaggtaacgcagatacagctttaaaaacagctgactcaggatatttaactagaagacttgttgatgtttcacaggatgttatagtaaggcaagaagattgtggaacagaagaaggatatgaagtatctgaaataaaagaaggaaatgaagtaatagagcctttagtcgaaagattatcaggtagatatccttcagaagatattattaatcctacaacaggagaagtaatagtaaaaagaaacacatatatgaatgaagatatagctaagaaggtatcagatgcaggaattaaaaaagttaaaataagatctgtattcacttgtaaatcaaaacatggtgtttgtgctagatgttatggtatgaatatggctacatcacaaaaaattcatataggtgaagcagttggtattgttgctgctcaaagtataggagaaccgggaactcagcttacaatgagaacattccatacaggtggtgttgctggagctgatataactcaaggtcttccaagggttgaagagcttttcgaagctagaaaacctaaggggttggctattgtaagtgaagtatcaggaacagtaaaaatggaagaaactaagaaaaaaagaacaataatagttgtaactgatgacggcgaagaagtttcctacgatattccatttggttctagaataaaagttaaaaatggagatattatatcagcaggagatgaaataacagaaggttcaataaatccacatgatattttaagaataaaaggtgttgacggagttaaaaattatcttttatcagaagttcaaaaagtttatagactacaaggtgttgatataaatgataaacatcttgaagtagttataagacaaatgacaagaaagataaaaattgaagattcaggagatacagaattattacctggaacaatgatagatgtttttgattttgaagaagccaatagagaaatattagaaaaaggtggagaaccagcagtaggtagaatagctttattaggaataacaaaagctgcactagctacagattcattcctttcagctgcatcattccaagaaactacaagagttcttacagatgctgctatcaaaggaaaaattgatccactgttaggcctaaaagaaaatgtaattattggtaagttaatacctgcaggtacaggtatgacaagatatagatctattcaaataaatactgatgatgaaaatattgaagaagattccatggattcaatagaggta

SEQ ID NO: 16004 - DNA, 1635 bp, Clostridium botulinum
atgaagttatcaaaaacattagtacatagtttaagagaggatccagcagatgtggagatggatagtcaaaaattattattaaaaggaggattaatagctaaagtagatagtggactatatgcatttacacctttaggatataggttcttagaagatattcaaaaggtagttgaaaataattcaaaaaaaattggcggttcccaaatatctataccttatgtaaacaatttggaagaggtaagtgaaaaaaataatggatttatattaaattttaatgaggagaccttaagctttataaactttttaaaaagcagtgtaacatcctataaacaattacctttgtttttttatgaaaacaatacagagtttagctataaaggtaaaaataatttaggaattatgggtggaagacaaatattaagagagtatttttatatggtgttagatggagaaaatgataaatttaataaaaaagaattaataaaactatataaaaatatctttgaaatcatgaatttacaatacaatatggtagaggatgaattagatggaaccataaaatttatcatatataataatataggagatttacatatagtcgcgtgtaaaagctgtaattatggtaatgaagtcaatagagcttcatctataccagattatcagatagaaaaggatttaaaagaattaaataaaatagaaacacctgatataaaaactatagaggagctaggtgaattttttaaggtgccttatagaaagtttacaaaaacaataatatataagtgcaataatgattctattgttgcagttatggtaagaggcgatagagatatagatgaatttaaggttattaaaaatttaggtaatataaagagtttagaattagcaggagaagatatagttagacaggctacaaatgcagaagtaggttttgctggtccaattaatttaaaagttgataagatattgatagatgaagaaataactaaaatgaataatttcatgataggtgcaaatgaaacaggctatcattatgaaaatgttaactatgaaagagattttaagggaatagttggggaatttagaaagatacataaatatagcaaatgtattctatgtggtgataaattagaggttaatgaagggtttgttataggggaaatcaaaaaaatagaagaaaacttaataaaaaatgaatgtgctacattcattgataataagggaaagagtaaaccgttcacaatttataaaggttttatggatatatataaaattatttcctggacaatagaacaaaataaagatgaattagggattgtttggcctatggagacatcagcatttaaagttatagtaactatagctaatgtaaaggatgaacaacagtttaaagtaggagaaaaaatttatagtagtttagttaatattggaataggtacaattttagatgatagaaaagaaagagcaggagtaaaatttaaagatgcggatttatggggaatacctattagaataaccgttggtaaaaacataaaagaaaataatgtagaaataaaattaaggaattcaaaggagaagaaagaaatcccaatagatcaattacaagaaagtattaaaagtttattgggtataggt

SEQ ID NO: 16005 - DNA, 1533 bp, Clostridium botulinum
atgaaaaaacaatctttaataaagggaactttcatattgggagttgcaggaataattgctaaatttttaggattattttttagatggcccttacaaatgctcataggagatgaaggtattggatactatcaaatgtcctatccattatatatgttttttatagcagctgcatctggaatacctgtagcagtttctaagttagtatcagaaagaaatgcagtaagagatgaaggtgggataatatcagttttaaaagaagctatgatatttatgtttataatgggcatgggatttacaattatacttttattattttcaaaggatataataagatttttaaaatgggatacaagatcctattattctttgataggaatatctttagcacctctttttatttctataatgagtgtgtttaggggattttttcagggaatgcagaatatgaattatactgccatatcacagcttatagagcagctagggagagtaatattcggagttggacttgcctatatattattaccaaaggggatagagtattcagcaggaggagcagctataggagcagctgcaggaggccttttaggaggaatatatctttttttaaaatatttaggtgtgaaaaaagaatttagagtaaaaaaagtaaaaagaaattttaaaataatgaatactatactttatacggcaattcctatatccataggttctgcagtaggaactatcatgagcttaatagattctgcattagttccacagaaactattagaagcagggtttacatacaaacaatccactatattgtatgggcaattaacaggaaaagcatttactttagttaatgtacctttaacattatctgtatctttgtgtgcagcattggtacctataattgcagaggattatatattaaatagaaaaatggcagttttgaaaaaagtggaattagctattaaaatttctatggttatagccgtaccttcctgtctaggacttaattttatggctaaacctatattgaacttaatatttccaggtcaagaagccggatatgagatattaaagcatttagcactaagtataccatttatagtattgtgtcaaactagtacagctatattacaaggcataggaaggtatataaggcctataattaatttatgtataggatgtatacttaaaatagtaattacgttgattttagtccctatgaacaatataaatatatatggtgcagttataggcacaatagctggttatgtaatatcagccatattaaatatgatgtctttaaaaaggagtttaaatataagtatcaattattatgaaattatgataaaacctcttattgcatctacaataatgataattgcagttgtatttatttacttctatgcctataattataccataagtagtaaaatagcttgtttaatagctgtatttttaggaatgataatctactttattataataggattaattggtatacttgattataattatataaagagaaaaatcataaaaaga

SEQ ID NO: 16006 - DNA, 876 bp, Clostridium botulinum
ttgaaagttcaatggagtgatgttaatttgatattaaaagatttactaatagaaggatatggtgttttaaaaaaagcatctataggtagctatcaaatagatgctcaacttttattaggaaaagtattaaaaaaggatagattgttcattttgactaatcctgattaccatataaaagaggaagagaaagaaaaatattttcaattaatagaccttagaaaaaataaaatgcctataaaatatatattaggtacaactgaatttatgggactaaattttaacataaaaaagggtgtattaataccaagaccagatacagaaatattagtagaaacggttttagaagaaataaagaataaaaattataagcaaatttgtgatgtttgttgtggtagtggtattataggaattactataggatataccttaaataatacagaaataatttgctatgatatagaagatattccatacaatactactaaagaaaatatactcaagcataatcttcaagatagagttaaagctttaaaaagtgatttacttacagaggcaataaaagaaaaaagaaggtttgatcttatagtatctaatccaccatatataagagaagatgttattgaaacacttatggatgatgttaaaaaatatgaaccctttgaagctttatgtggtggaaaagatggattatttttttatgagggtataataaagcaaagtttagaagtgctaaatgatgggggaaccatagcttttgaaataggttatgatcaaaaaatacaggtttctcacattttaaatgaatatggttttaaggatgtattatgtataaaagacttagctggaaaagacagagttataaaagctagaaagtat

SEQ ID NO: 16007 - DNA, 366 bp, Clostridium botulinum
atgctttcagcgtttatccagtcccaacatagctacccagctgtgccactggcgtgacaactggtgcaccagaggttggtccatcccggtcctctcgtactaaggacagctcctctcaaatttcctacgcccgcgacggatagggaccgaactgtctcacgacgttctgaacccagctcgcgtgccgctttaatgggcgaacagcccaacccttgggacctacttcagccccaggatgcgacgagccgacatcgaggtgccaaacctccccgtcgatgtggactcttgggggagatcagcctgttatccccgaggtagcttttatccgttgagcgatggccctcccacgaggtaccaccggatcac

SEQ ID NO: 16008 - DNA, 1458 bp, Clostridium botulinum
atgagtaaagtatatttaattggtgcagggccaggtgatgaagaattaataactttaaaagccataagagccctaaaaaaatgtactgcagttatgtatgatagattagcaaatggagaattgttaaaatatttagcaccaaattgtgaaatttattattgtggaaaagaaccgggctgtcattataaaagccaggatgaaataaataaaatgctagttaaattagcaaaagaaggtcatattgtaggaagaataaaaggtggagatccctatgtatttggaagagggggagaagaagccttggatattttagaagaaaatatagaatttgaagttataccaggtgtaacttctccagtatctgtactgaattatgcaggaattcctataacccatagaggaatatcaagagggtttcatatttttacagctatgactaaggataaattagatatagattggaagtctgtagttaatataggaggaaccttagtatttttaatggggcttggaagattagaattaataactaaaggtcttatagaaaatggaatggacaaagaaggtaaagtagcagtggttatgaaaggaactacctcaaagcaaaaaaaagttataggtaacttagaaaatatagtagaaaaagtaaaagaagctaaactagagtcaccagtaataatagtagtaggagaagtagttagtttttcagataaattaaattggtatgaaaaaaagcctttattcggaagaaatatatgcataacccgtacaaaagagcaagctaaggaattaaaagttcaacttttagatttaggggctgaagttacagaaataaattctatagaaataaaaaatacagaagataatttaaagtcttatttaagtaaattaaaggaatatgattatatagctttaaccagtgtaaatgcagttaaaatattttttgattatttaattaaagaaaatatagatattagaaatattaatgctaaatttgcagctataggaccagctactagtgaggcaataaggataagaggaataatgccaagcattaagtcaaagcattttgtagcagagagtctttttgaagaaatgagaaagcatatacaaaagggagataaaatacttgtgcctcgttctaaagatgcaagaccatttcttgtggatgcattaagaaaagaaggttgtactgtggatgaagtacatatatatggaaccctatgtggacaatgtacatatactgaaagatttgaagatgcagatacagtattatttacaagtccatctactgttagaaatatgatttctatggtgggcatagatagtataaaagaaaaaagtattatagcaataggtcctattacagcagcagaattagataaaaataatatagaatgtagtatttgtgatgaatattctataaatggcataatagataaacttttagaccttaac

SEQ ID NO: 16009 - DNA, 1413 bp, Clostridium botulinum
ttgggtatagtgtaccttttaactactataagctatgggttaactaccacctttataccaattcatacggagaatttggaaaatggaagcaagaaagaaagtaataaatttgtaaataatgtgcttaatactttttccataggaactattatcttaactatattaatgataatatttgcaaaatatataatctatatttttgctccaggatttcagaaagacttaattgttttcaatacttctattaaaataactagaataatgttattatctttgattttcataagtttacaaagtgttattacaggagtgttgcaatcccataaacaatttttagaacccgcggctatggcaatggtatctaatatagtctatattatatatctagtctttttagctagtaactatggaatgataggttttgcggtagctatagtattaggtttctttgcacaattcataataaatatacctaaatataaaaaaatgggttataaatatagtacatatattaatttagaagataacaaaactagacaaatgttcaaacttacaatgcctgttataataagcacttctgttattcaattaaattctgttataaatagagcttttgctactactatttttgggggagcagctactatattagacaatgcaaataaaataaatacattggcctatgaagtattcgctataggaatagcaatgatagtttatccaacgctatctgaattagctgctaaaaatgataaaaaacaatataaagtggaattaggaagagctataaatataatacttgtaataatggtaccagcagcagttggaattgcaacccttagggagccacttataaatgtaatttttaaaaggggagcctttagtgaaaatgctgcttctttaacggcacgagcattacttttatatactccagctatgatagcttatggggtaagagatatactaaataaagctttctatgctataaaagataccaaaacgcctatgattaatagttttataggtataataataaatgtagtaataaatagtttattaataaaatatttaggtgtgagtgggcttacattagcaactagtatatctgcatttgttataactataattatgttattagatttaaataaaaagctaaatggtatagatattaaaaatataatcatatcctttttaaaggtaattttatctgctttgattatggggataatagttgctgttataaataaatttactttgttaagcttaggcaatgaaactaaaggaagtgcgatatcgattttaatttgtatgattattggtgggatatcctatactttatccatatatttattaaaagttaaggagatacaagatatagtaggaccattattaaaaatattaaaacttaaaaaa

SEQ ID NO: 16010 - DNA, 3696 bp, Clostridium botulinum
atggtacatcctgtccaagttggcaaaaggactcgtatgagcttttctaggcttaaagaggttggtcaaatgccaaaccttatagaagttcagttagactcatatgattggtttttaaaagaagggttacaagaagtttttgacgatattaacccgattcaagattatacaggtaatctaaatttagaatttgtaggttacaaactggatttagatagtattaagtactctgttgaagagtgtaaagaaagagattctacttatgcagcaccattaaaagtaaaagttagacttttaaataaggaaactggcgaaataaaagaacaagaagtttttatgggagacttccctttaatgacagaacaaggaacctttataataaacggtgcagaaagagttatagtaagccaattagttagatcaccaggggtttattatgacatgactgtagataaaacaggaagtaaattattttcagctacagttatacctaacagaggtgcatggttagaatatgaaacagattcaaataacataatatatgtaagaattgacaagacacgaaaattaccaattactatattagcaagagcattaggttatggaacagatgctgaaataatagaatttttcggagaagatgaaagattaaaggcaacaatagaaaaagataacactaagactagagaagaggctttacttgaaatatataagagattaagaccaggtgaaccacctactgtggatagtgcagaatctttaattgaatctttattcttcgatgctaaaagatatgatttatcaagagttggaagatataaatttaataaaaaattagcaatccatttaagaataacaaatcaaattgcagatcaagatatagttaatccacaaacaggagaaattttagtacaaaaaggtgaaaaaatagataaagataaagctattgaaatacaaaactgtggcattaacgaagtatatatcaaaatagatgataagtcatttaaagtaattggcaatcactttgtagacatacatagtttggttccattcgatataagtgatttaaatattaaggaatatgtattctatcctgttttaaaagaaatactagataattatgctgatgaagaaagtataaaagaagaaataagaaagaatatatatagattaattcctaaacatattataagagaagatatatatgctaccataaattatgaattagcattaagttatgatattggttataaagatgatatagatcatttaggaaatagaaggctgagatcagtaggagaattattacaaaatcaatttagaattggtttatctagaatggaaagagttgttaaagaaagaatgacaattcaagatcaagaagtaataactcctcaagctttaataaatattagacctgtagctgcatctattaaagaattttttggtagttcacaattatcacaatttatggatcaaacaaatcctctatcagaattaacacataaaagaaggttatcagctctaggaccaggaggactttcaagagaaagggcaggttttgaggtaagagacgttcaccattcacattatggaagaatgtgtcctatagaaactccagaaggaccaaatataggtcttataaattctttagctacatttgctaaagttaatgaatatggatttatagaaacaccatatagaagaatagatcctaagaataaaagagccacaaatgatatagtatatatgacagcggatgaagaagatctatacgtaatagctagatcagatgaaccaattgatgaaaatggatattttatagatgataaggttacagttagggctaaagaggaagttttagttgttccagttagcgaagttgagtatatggatatatcaccaagacaattggtttctgttgcaactgcaatgataccattccttgaaaatgatgatgccagccgtgcacttatgggatcaaacatgcaacgtcaagcagtaccactattaaagccacaggctccaatagttggaacaggtatagaatataaagctgcaacggattcaggggttcttccaaaggctaaaaatgcaggaacagtagtatatgtttcagcagatgaaataagagtaagacgagatagcgatggaggaatagataaatataaattattaaaattcaaaagatctaaccaaggaacatgtataaatcaaagaccaattgtttctaaaggtgaagtagtagctaaggaaactctattagcagatggaccttctacagatcttggagaaatagcacttggtaaaaatattcttatgggctttataacatgggaaggatataattacgaagatgccatgttaatttcagaacaattagtaaaagaagatgtgtttacatctatacacatagaagaatatgaagctgaagctagggacacaaaactaggaccagaagagataacaagagatatacctaacgtaggagaagaagcgcttaaagatatagatgaaagaggtattataagaattggtgctgaagttagatcaggagatatattagtaggtaaagttactccaaagggagaaactgaactaacagctgaagaaagattacttcgtgctatatttggagaaaaagcaagagaggttagagatacatcacttagagttccacatggagaagcaggaattatagttgatgttaaaatatttacaagagaaaatggtgatgaattaccaccaggagttaataaattagttagatgctatatagctcaaaagagaaaaatatctgttggagataagatggcaggaagacatggtaataaaggggttatctctagagttttaccagaagaagatatgccattcttaccagatggaagaccacttcaaatatgcttaaatcctttaggggtaccatcacgtatgaatataggtcaggtgttagaagtacatttagggttagccgctagtaaattaggctggcatatagctacaccggttttcgatggggcaatagaatctgacatagtagattgtttaagaaaagctggttattctgaagatggaaaaactgttctatatgatggaagaacaggagaaccatttgataatagagtaacagtaggatatatgtatattttaaaactagctcatttagttgatgataaaatacatgctagatctacaggcccatactcactagtaactcaacaacctcttggaggtaaagctcagtttggaggacaaagatttggtgagatggaggtttgggctttagaagcttacggagcagctcatactcttcaagaaatattaacagttaaatcagatgatgtagttggaagagttaagacttatgaagctatagtaaagggagaaaatattccagaacctggagttcctgaatctttcaaagttttaataaaagaattacaagcattatgtttagatgttaaggtattgaatgatgataatcaggaaataaaattaaaggaatctgtggatgaagatgcagacgaattagaagtaaatatagaaggtacagaaaatcaaccagaagagaaagaagaaaaagaaaaagaagatagtgatgaatatgatgacttaagagaagaggacgtagaaccagatttagaagagttatcattagatgacttagatttagatgattttggtgatgaacat

SEQ ID NO: 16011 - DNA, 2178 bp, Clostridium botulinum
gtgaaaagggggcattcggtgaaaaatatttttaaaatttataatagagatctacaaaatataataacgaattgggtagctatagttgtaatgttaggactcatgatattgccttctttatatgcctggtttaatataaagtcttcttgggatccatactctaatacaaagtcaatatctgtagccgtagtaaataaagataaagctgccttttttaaagggcaaagtattaatgtaggggaagaacttgtaaacaagctaaaaataaataaaaatattggatggaaatttgtagatgaaaaagaggctgaaaagggagtaaagtatggaaagtactatgccagtataatgataccagaagacttttcttataaaattttatccataactagagataaacaagaaaaaccaaccttaatttattctgtaaatgaaaagagcaatgcagttgcacctaagataacaagtaaaggggttacaacaatacaaagtgaggttacaaaaacttttgtaaaaacagtaaatggtattatatttgaaatgtttaataagttgggaatagagctagagaaaggaaaaccaaagcttaaagatttaatgaatatgattttttatgttaatgataagataccagaaataaatgcctctatagataagctagaaaagggtgctataaccttagaagaatttatagaaaaaataaataaggatatccctttaataaaagatactataaatagtgctttaagtgcaggagataaaacaaaattattcttatcaaaatctaaggaaggaataaataatgtagcaccttatataaaacaagatttaattatagctagaaaaataaatagtacagcagaagttttaatagaagaaggtgtagatttaataggaaaaaattcttcaaaagctagagagaatttattatcatcaaaggataagttaactaatgtaaaagaaattttaaatagcatattggagttaattgatattataaataaagataaaaagaatattataatgaatgattttgaaaataacattaaaaatatgaaagaaagagtaaataataaaatagaaaatataaatactgtaatatcttctatagatagaggtgaaaaagtgtctgtagaagcattaaataggctaaataataaagccaatggtatagattctatattagaaaagactatagaggattttaatcctaaaatagtaccggctataaacaatgttcttaatgatttaatagtcgtagcggataatactatacaattattaaagaatgctaatgaaaatttaccaggggcaactgagctattagataagggatatactggagcagaaaaaggtataaaaggcataaaaattcttaaatctaacttaccctctatagaaaagtctataggagaggtatcaaataagcttaagactttagatgatgatgagagattaaatgaaataataaaactaatgaaaagtaatgcaaaaatagaaagtgattttatatccaatcctgtagaaataaaagaaaatagaatttatcctattcctaattatggatcagccatggctcctttttttacaactttatctctttgggtaggagcactaattttagtttctatactttcagtagaggtaaaagatataaaaggagcaaaaaaattaaaagtacatgaaaaatactttgggagatattttacatttatgactatagctatatttcaagctttaatagttagtttaggggatatatatttattaaaagtatatgtatcaaataaatcaatatttattttattttcaatatttataagcataatattttctatgataatatatacattagtatctgtgtttggcaatgtaggaaaagctttaggagtaatacttctagtgctccaaatatctgcttcaggaggaactttccctatagaagtcactccaggattttttcaaaggataaatccattattgccttttacgtattctgtatcaggtatgagagaggcagtgggtggggttatagaaggcatacttttaagagatataataatattgctaatttattttaccctatcaatattattagctttattattaaagaaaaagttggaaaaagcaaataaaaactttgtaaaaaagtttaaagaaagtggtttagtagaagaa

SEQ ID NO: 16012 - DNA, 1095 bp, Clostridium botulinum
atgaatttgaaaattgaaaaccttaccatgaaattcaaagaggtcattgctgtaaaggatttaaatttagatatagaagaagggactattgtaacattattaggtcctagtggatgtggtaaaagcactacattatatactatagctgggctgtacaagcctactaaaggaaatatatattttaatgataggattatagatagtttagagccagagaaaagaaatataggtatggtttttcaaaattatgccctatatcctcatatgactgtatataagaatatagaatttcctttaaaaatgaaaaagattaaatctaaagaagcaaatgaaaaagtagaagatatagctaaattggttaaaatagaagatttattagagagaaaaccttcacagctatctgggggacaacagcaaagggtggccatagcaagagccttggttaaagaacctgaaatactattgttagatgaacctttatctaatttagatgctaggcttagaattgaaatgagagaagaaataaggagaatacaaaaagaattaaatataactactatatttgttactcatgatcaagaagaggctatgacaatgtcagataaaattgctttattaaaaaaaggagaacttcagcaatatgataaaccagaaaatttatatataaaacctaaaaatttatttgcagctaaatttttaggaaatccacctataaatattttagaaggtaaagtagataaaaatagcaattctctaaaaatttttgaaggtaaaaccatattacctttagacgattttattaaagataaaaatatagaaaatggcacatataaaattgctataagatgtgaagattttatactaggagaaaaggatgtgtctgctataaaaggtactatagaaatgatagagatcatagggagagacactataataagggtaaaagtaggtaatgattatataagatgtataataccctatgaaaatttaaataaaaatgaaaaaacagtatatctaaatataaaaaaatataaggtgcatttttttagttttcaagatgaaaaaaatatattaattaaaggtgaagaaagtgaa

SEQ ID NO: 16013 - DNA, 552 bp, Clostridium botulinum
ttgttaagtgttttcggtctaatatttttggaggtgaagattattaacaaaaactatcttatgaatgagcaaatccgtgaaagagaagtaagacttgtaggtagcgagggagaacaattaggagtagtgtcttcaagtgaggcgcaaaagcttgcagatgaaaaggaactagacttagtacttatagctccaactgcaaaaccaccagtttgtaaaataatgaattatggtaaattcttatatgaacaaactaaaaaagacaaagaagctaaaaagaatcaaaaggttataaacataaaagaagttagactaagcccaactatagaagcacatgacatagaaattaaagctaataatgctagaaaatttttaaatgcaggaaataaagttaaagtaactgttagattcagaggtagagaagctgattattcctttaaaggaaataaaatattaaaatccttttatgaaaaagtagaagaacttagtgttatggaaaaagcacctaaactagaaggaagaaatatgataatgatattagcgccaagaaaagcg

SEQ ID NO: 16014 - DNA, 291 bp, Clostridium botulinum
gtgaatataatgagaaagtacgaaactgtatttatactaaacccaacattagatgaagaaggttataaagctaatgttgaaaagtttaaaggtgtaatcgaaaatgcaggtggaacagtagacaatgttgacctatggggtaaaagaaaattagcttatgaagttaaaaaagttagcgaaggttactatactttaatgaacttcacagctgatacagaattaccaaaagagttagacagagtgttcagaataacagatactgttataagacacatgataataactcaagaa

SEQ ID NO: 16015 - DNA, 1389 bp, Clostridium botulinum
atggcttttaaaaaaactatggataaagtggttgctttaagtaaaaataggggatttgtatttccgggatccgatatatatggaggattggcaaattcatgggattatggcccactaggagtagagctaaaaaataatgtgaagaaagcttggtggaaaaaatttgttcaagaaagtccatataatgttggaatagatgcggctattttaatgaatagccaagtttgggcagcatctgggcatgtaggaggattttcagatccgttaatggattgtaaagaatgtaaagcaagatttagagcagacaaactagtagaagagcacatgacagaacaaggtgttgaaaaagctagtgcagatggttggtcaaatgaaaaattaaaacagtatatagatgataatggtatagaatgtccaaaatgtaaagctaaaaactttacagatataagacaatttaatttaatgtttaagacatttcaaggagtaacagaagatgcaaaatcagaaatatacttaagaccagaaacagctcaaggtatattcgttaatttcaaaaatgttcaaagaacatctagaaagaaagtaccatttggtattgctcaaataggaaaatcttttagaaatgaaataactccaggaaactttacatttagaactagagaatttgaacaaatggaattagaatttttctgtaagccaggaacagatctagaatggttcaattattggaaagattattgctggaatttcttaataaatttaggtataaacaaagaaaatataagatttagagatcatagtcaagaagaattatctcactatagtaatgctacatcagatatagaatttttatttccatttggttggggtgagctatggggcgttgcagatagaacagatttcgacttgaaaaagcatatggagcattcaggagaagatctaaactatttagatccagcaactaaagaaagatatgtgccatattgtatagaaccatctttaggagcggatagggttgttttagcatttttagtagatgcttatgatgaagaagaactagaaggtggagatgtgagaaatgtattacatttacacccagctttggctccatttaaagcagcagtattgccacttagtaaaaaactttctgataaatcacaagaagtttacagtatgttaagcaaaaagtttaatatagattatgatgaggcaggcagcataggaaaaagatatagaagagaagatgaaataggaactccttattgtataacagtagattttgatacattagaagataatacggttactataagagacagggatactatgaatcaaataagagtcaatataaatgaactagaaaaatttatagaagataaattagaattt

SEQ ID NO: 16016 - DNA, 1110 bp, Clostridium botulinum
atgaaaaaaactaaaactaaattaggtgctatagattttactctttttgttactataacattgttggtatctataggagtaataatggtttatagtgctagttcttacagtgcctttttcaatccaaatataaaagatagtacttattttttaaagaaacagggagcatttgcaattgtaggaatagtatcaatgctctttataattaagattgattatcataaatataaaaagcatactaaaaaattaatgcttataactatagttttattacttatggtttttatatttcaaccagtaaatggagctagaagatggataagattgggtccattatctcttcaaccatcagagataactaaatatatgatagttatgtatatggcgaaaagtttagaatacaaaggagaaaaaattaaaacttttacctatggcataattccctatctattagtctcaggtttttatgcagggttggtatttgcagaaaaaaatcttagtatagcagctgttataatgatagttactttaataattttatatgtagcaggagctaaaactaaacatatatctcttgtaatgcttatggttctattagcaggagtagcaggcataatctttgaaccttttagagtggctaggtttttaagtttcttagatccttggaaagatcctaagaatactggatatcagcttattcaatccttattagccttaggatctggaggtatctggggagtaggcataggtagatcaaggcaaaaatgctactatataccggagcctcacaatgattttatatttgcaataataggtgaagaattaggtttaataggttgtatccttataattattttattctcaatattcatatggagaggaatagttatagctacaaaagctaaagatacatacggtactattttagctacgggaattacatctatagtagcagttcaagctataataaatatggctgttgttacaggttctatgcctgttacgggagtacctcttccttttataagttatggaggatcttctttagcaattaacttaatggccatgggaatattgcttaatatatctaggcaaactgaaaatactata

SEQ ID NO: 16017 - DNA, 1863 bp, Clostridium botulinum
atgaacatgaaaaaatataaaacatatttatataactattgggatataattttattttttattcttatactcacaaagcttttaacttatggtaataaacttcaattgaataactttaaatacagtagaatactatatccttctattgcatctattcttttaataattgctttaagctttatatttaaaagaaagggtcgatttatttttcttattttatttaatattttaatttctattactattataggagacttaaattattttagatattttaaagacttattttctcttcccgtacttataaatagttttcagctaggatcagtaggttctagtgtattggagctttttaacctttgggatctagtttatatattagatatactaattttaattcctttctttttcgtacttagaaagaaagtggtattttgtgaaaataactataaatttcattataaattaataattatacctttaattattgccatacctatagaatttataagtttttataaattatctcaggaacagccaaggcttatctcaactatgtacaataaagtttatattgctgaaaaattgggagttttaaactatcactatattgatttctattcttctagtacaaactttataaaaagaaaagttcctgtaagtgctaataaaaaagaagccatacaaaatgtcctggcacaaaaagatacatcctataactcttctaaatataaaggtatctatgagaataaaaatgtaatacttatacaggtagaagctttacaaaattttgttataaataaagaaattaataataaggaaataactcctaatttaaataaatttttaaagaaatctttatattttaacaattatttttatcaaatagcttccgggagtacttctgatgcagaatttataactaataactctctatatccagcatcttctggtgctgcttactttttatatgctggcaaccattttaattctcttccttcgaaacttaaagaaaaaggatataatacctctgtcttccatggatataaagaaaccttttggaataggaatttaatgtataagaatatgaatattgataaattttatagtgaaaaagattataaaatagatgaaaaaataggcttaggacttagtgataaatgctttttaaatgaaacagtagaaaaaatcaaaaagcttaaagaaccttctttctcttttattataaccttgacaagtcactttccctatgatgctacagataaatacggggaatttgatgtaggagaatatgaaggcactcttttaggaaattacatgaaatccatacattatgcggatgaacaattaggtgttttcttaaataaattagaaaaagaaaatattttagataattccataatagctatctatggagatcactatgctataccaagagaaaatgaaaaagatttgtctaatttcctgggaaaagatatagatgaattaaactggatagaacttcaaaaagttcctctaataattcacactcctgatgaaaaattaaagggagtagaaaatggatattgtggtcaaatagacttatatcctacattagcaaatttattgaatataaaaaataatattatgtttggaagggatcttttaaacagcaaagatgaatctgtaatttttagaaatggttcttttactgatggaaaaatattttatatatctccggtgaatagttattatgatataaaaactcataacaaaataagtgaaacagaagaattaaaagctaaaaaaaataatgtagtgagcgagttaaattcttctgataatatacttaaacatgatcttttaaaaaataataaattaaat

SEQ ID NO: 16018 - DNA, 2178 bp, Clostridium botulinum
ttgtcaaatagtaagtacagagacaaagtaataattagaaaaagaatgatgtttatatttgctcttctaattttagcttttataggtttagtaataaaaatgggaactataatgataggtcagtctccagagttgaaaaaaaaagctgtggatcaatggacaagtgaagtaaaaattgatgctaaaagaggtagaatattagacagaaatggtaatgaactagcagtaagtgctaatgtatacagagtagatttagatatgaatactttaagaagtaccatggaagaaaaaaaactatctaaaaatgacgtagcatcaaaactttcaaaagcattagatatggaacaaaaagaagtagaaaaagtattgaataaaaagcttccaagtggattacctttagcctctgctactttaaaaagaagaatagaaaaggacaaggctgacaaagtaagagatttagatttaagagggattttagtatctgcggacactaaaagatactatcctaataataattttttatctcatgtattaggacatacaaattctgatggaaagggacttacaggagtagagttatactataacaatatattatcaggtaagccaggagtaaggattgctgaaacggataataaaagcaaggaattaccttataccatttcagaatacactaaaccagaggatgggaaagatttagtattaaccatagatgaaatgatacaacactttagtgagaaaacagcagagcaagctttaaaggataataaagcaaaggcagtatctgtagtagtaatggatcctagaactggagaagtactagctatggcaaataagccagattataatcctaatgatccttggcaggaagggaaaagctatgaagaacttcaacaaaactggagaaatagatcggttaatgatacttttgaaccaggatctgtatttaaagtttttacagcagctaccgctttagaggaaaatttaataacctccgaggataagtttacttgtggtggaagcataactatagggaaaagaactatacgttgctggaaaagcggagggcatggtactcaaaattttatagaaatacttaaaaactcttgtaacgtaggttttgcacagttaggtcataagataggtaaagaaaaattaaattcatatattcaaaaatttggttttggtaaaaaaactggtatagatcttccaggagaagctccagggataacaaagaaaacggaaaatatatcagatatagatttagctacaatatcctttggtcaagctaacacgttgtctatagtacaatatctccaagcttttaatgcagtggctaatggaggaaatcttataaaacctcatgttatgaaagaagtaggacattttgatgaggaaaaaaataaagaaataatagaaaagaaaaataccatagaaagcaagcaaattttaaatagtcaaaagatggctaccctaagaagctacttagaaaaagtagtgtcagaagggggcggtaagaaggcttatatagcaggttatcatataggtggcaaaactggtacagctcaaaaggctggtaagggtggatatatgcctggtaaatatgtagcttcctttgcaggaatggcaccagctgataatccaagaataacagtatttgtttctattgatgaaccggatccttcaaattactatgcaggccaaatagcagctccagcagcacaggggctattcaaagatatatttaattatttggcattaaaaagtgatgcccaaggggaagatatagctaaaagtcttctaaaggatataactattcctgaagttagaggtaagtcaaaagaagaagcacaaaaaatattaaaagatttaaaattagattgtgagatacaatctgagggagaatatatagtagatatgaatcctaaaccagggtatactgtaaaagaaggcagtaaaattgttctttacacagggaacagtcaaaattataataaagtagtagttgttccgaatgtaaaagggtatacagtagaacaggccatgtctgtattaaatagtataggcttaagaggggatatacagggtgatggaattatttctcatcaaagtatagaagcaaataaggaagttaaaaaaggaactatggttaacttaaaagcagaaccaataggagat

SEQ ID NO: 16019 - DNA, 927 bp, Clostridium botulinum
atgaaaaaaatatataaaaatataacagaattaataggaaatacaccattattagaattagaaaaattaaaaaaagaaaataaattaaaagctaatataatagctaaagtagaatattttaatccggcaaacagtgtaaaagatagaatagccttctccatgatagaagaagcagaaaaagaaggattaatagataaagacacagtaataatagaacctactagtggtaatacaggagtaggacttgcttttgtagcagcggctaaagggtataaacttatactaactatgccagaaactatgagtatggaaagaagacttatattaaaagcctatggtgccgagttagtcttaacaccgggaaaggatggaatgaagggggctatagaaaaagcaacagaattatcaaaggaatataaaaattcttttgttccgcagcaatttgaaaataaatttaatccagctatgcataagaggactacagcggtagaaatttggaatgatacagacggggaagtagatatattcatagcaggagtaggtacaggtggaacaattacaggagtaggggaatatctaaaagaaaaaaataaggatataaaaataatagcagtagaaccagaagattcaccggttttatcaggaggaaatccaggaccacataaaattcaaggaataggagctggatttgtaccaagtactttaaacacagaggttttagatgaaatatttaaagtatctaatgaaaaagcttttgaagtaacaaagagtatagcaaaaacagaaggccttttagttggtatatcttcaggagcagcaatttatgcggctatgaaaatagctgaaagacaagaaaatcaaggcaaaaatatcgtggtattacttccagatacaggacaaagatatttatctacaggagtatttgag

SEQ ID NO: 16020 - DNA, 705 bp, Clostridium botulinum
gtggaggaaaaaatggaaagaggtaggttaatagttatagagggtagtgatggaagtggtaaagctacccaaactaaaaaactttatgataaattagtaagagaaaataagaaagttaaaaaagtagaattccctaattataaaagtgaatcatctgctttaataaagatgtacttaagtggagaatttggaaggaatccggatagtgtaaatccttatgcttcatctacattttatgcggtagatagatttgcatcctataaaaaagattgggaagagttttacctaaagggtggaattattattgcagatagatatactacatccaatatgatacatcaagcagcaaaaataaaagatgtacaagccaaagataactttttaaattggctatgggattttgaatttagaaagtttaatttacctgtaccagattgtgttatatttttggatatgcctcctaaattcagtaaaattcttatgaaaaccaggaataataaatttacgggagagaaagaaaaggatatacacgaaaataattatgagtatttattagagtcatataacaattctaaatatatatcagaaaaatatgattggaatagaattgaatgtactaataaggataagattaaaagtatagatcaaataaatgatgatataattaaaataataacacaatatatagatttcagtgaacaaagg

SEQ ID NO: 16021 - DNA, 687 bp, Clostridium botulinum
aaatatataataatcgcagtggttattataataatttgtgtaattttaggcttatatatagttgataaaaaagctaaagaaaaattatcagaggcatccaaagaagctagaagattaaaagaagaggctgaaagagatgcagaggcaaaaaagaaagaagctatattagaggctaaagaagaagctcataaattaagagcagaggttgaaagagaaaatagagaaagacgtaatgaagttcagcgtcttgaaagaagaataattcaaaaagaagaagctttagataaaaagagtgaggcccttgaaaacaaagaagaagctttaaacaaaaagcaacaaaaaatagaagatgtggaaacacatatggaggagcttcacgaaaagcaaagaacagaattagagagaatttcaggacttacaacagaacaggctaaagaatttttattagaacaggttagaaaagaagtaaaacatgaaactgcagtaatgataaaagaaatagaaactaaagctaaggaagaagcagacaaaagagcaagagaagtcattacatatgccatccaaagatgtgctgcagatcatgtagcagaaactacagtacatgtagttaatcttcctaacgatgaaatgaaaggaagaataattggaagagaaggaagaaatataagaacattagaaacgcttaca

SEQ ID NO: 16022 - DNA, 1728 bp, Clostridium botulinum
atggctttagatgggatttttttatttagtatgataaatgaaatgaaaaccaaaatattgaacggtagagtagataaagtaactcagccagaaaaggatgaaatagttttatccataaaaaataatagaaaaacttacaaacttttaattagttctagcgctgtataccctaaaatacattttacggatattcctaagaaaaatcctatgcagccccctatgttttgtatggttcttagaaaatacttaaattcttccaaaataataaatataagacaattggatacggatagaatagtcttaatagactttgaaagtgctgatgaaatgggatttaacagtatatatacgttaattatagaaattatggggagacatagtaatataaccttagtaagagaaagggataatctaataatggatagcataaaacatgttactcctgaaataaatagtgtaaggaatctttatccttccatagaatatatatatccaccagcctctttaaaactaaatccttttaatttttcactaaaagattttaaagattatataaaggataataacgtgaaacttaataaaactatgttttccaatatatttacaggagtagcaatgcccttttccaaggaaattctttacagattggaaaaagaaaataatctagaaattactttagaaaacatggatgaaatatatgttgttacaaaaaatatatttgattctataaaaaataaagaattctgttttaattgttatttagaaaaggacactgtaaaagatttttattgtgtaaaccttcatagtttgtataattttaaaaatatagattatgaaaatccttctcttcttatagaatctttttattttgaaaaggataaatcagatagattaaattctaaaagctccgatcttcaaaaactaataaatgtaaacattgaaagatgcgaaaagaaaatcaaaatattagaaggaaatctaaaggattgcaatgaaagagaaaaatttcagatatgcggagaaattttaaccgcgaacatatatgctcttaagaagggtatggataaagtaaatcttttgaactattatactaatgaatatatggatataaaattggatcctaacaaaaacccttctgataacatacaaaaatactttaaaaaatataataagctaaaaaagactgaagttgcagctaaagaacaaatagaacttacttgtgatgagttaaaatatctaaattctgttttaactagtataaaaaatgcagatagttatgatgatatagaagaaattaaaagagagcttattgaaacaggttacattaaatttaaaaagaaaaataataagaaatttaaaaatacaaaaccattgcactttatttcttcagatggcatagatatttatgtgggaaaaaacaatatacaaaatgattatctaacattaaaatttgctagtaatcatgacatttggatgcatacaaaaaatatacctggatcacatataatagttaaaaatttccaaggaaatgttcctgaaaaaactttagaagaagctgccaccttagcagccttttatagtaaatctaaagattctacaaaagttcctgtagactacacagaggttaaaaatgttcacaaacctaatggggcaaaaccaggtatggtaatatattacacaaacaaaaccatatttatagatccaaaagaacctaatttaaaacaaatt

SEQ ID NO: 16023 - DNA, 1803 bp, Clostridium botulinum
atgaaaaaattttcaagtgcaacggcctggattgttgttcttatattagttatattttcatctttaatgcttgttagaactggaactaactctacagctattaattttagtgaatttcaaaaaagttggatacaaaatgaaattaaaagttttcaagttaaagatgataaaatgacagtagttggaacattaaaagatggcaaacaatatgaaacgatagttccttcagaaagattgtttcaatttataaatgagcatcctaaaaatggagaagtaaaagaagtttatgttaaaccagcatcagtacctatatgggtacaatatttacctatgatactaatagttttaatgcttttaggattttggtttatgtttatgcaacaagcacagggtggtggcggaaatagaaatgttatgaactttggaaaaagcaaagccaaaatggccacaccggataagaaaaaagtgacttttgatgatgttgcaggggctgatgaggagaaggaagagttagcagaaatagtagattttcttaagtctcctaaaagatatatagatatgggagctagaatacctaaaggagtattattagtaggacctccaggaacaggtaaaactcttttagctaaggctattgcaggagaagcaggagtacctttttttagtatatcaggttcagactttgtcgaaatgtttgtaggtgttggagcctctagagttagagacttatttgagcaagctaagaagaattcaccttgtataatttttatagatgaaattgatgcggtaggaagacaaagaggtgctggtttaggtggtggccatgatgaaagagaacaaactttaaatcaattattagttgaaatggatggttttggtgctaatgagggtataataatgatcgcagcaacaaatagaccagatatattagatccagccttattaagaccaggaagatttgatagacaaatagttgttggagcaccagatgtaaaaggtagagaagctatattaaaggttcactcaaaaaataaacatttagcagaagagataagcttgggaatacttgctaaaagaacaccaggatttacaggggcagacttagaaaatttaatgaatgaatctgcacttttagcagtaagaaagagaaaagaattaatagatatggaagatctagaagaagcagttacaagagtaatagcaggaccagaaaagaagagcagagtaatagatgaagaagatagaaaattaaccgcttatcatgaagccggtcacgctgttgtcatgaaacttcttcctcatgcagatccagttcatcaaataagtatagttccaagaggcatggcaggtggatacactatgcatttaccagaaaaggatagctcatatatgtctaaatctaaattagaagatgaaattgtaggcttattaggcggaagagtagcggaaaagttaattataggagacataagcacaggagctaaaaatgatatagatagagctacgacaatagctagaaaaatggtcatggattatggtatgagcaatacgttaggaccaatagcttttggatcaggacatgatgaagttttcctaggaagagatcttggaaagggaagaaacttcagtgaggatgtggcctataaaatagatcaagaaataaaaaaattaatagatactggatataatgaagcagaaagacttttaaatgaaaatatatctaaattacatgctgtagcacaagaattacttaaaaaagaaaaattagaggcagatgaatttgaagaaatatttaaaaatagt

SEQ ID NO: 16024 - DNA, 873 bp, Clostridium botulinum
atgaggattgtgatatttagaataaatgggggatatatattaatggaatgttttaataaattttttatagagaatgagaaaataaaagaaataaatctatttgatgaaaatttccttaaagaaggaaaatctctttatgaagttataaggataatagatggagcgcctttgtttttaaaaagccatttaaatagattttacaactctgcaaaactagaagaactaaatttatggttagatgaagaggtaataaaagaaaaaataaatagacttataaaaataaataaagtatctataggcaatataaagttagtatttaattttaataaagagaagaataacaaatttttatgctattttttaaaacataattatccagaggatatagagtataaaaatggagtaagaactatactttatcatggagaaagagaaaatccaaatgcaaaggttataaatatggattttagaaaagctgtaggagaaaagataaaagaagagaaagcttatgaagcaatactagtagacaaaaatggatacataaccgagggaagtaaatctaatatatttatgataaaagatagtaaggtaataacatcgcctgtagaaaaagtattaccaggaataacaagacaaaatataatagatgtatgtaaaaatctaaatttggatattgatgaagaaaaagtacattataaagatatagaaaaattagagggactatttatatcaggtacatcaccaaaagttttaccaataaaatctgtagatgaaatggaattcaaatcttcagagaataaattaatactaagtattatggaaggttataataaagcaatagagaaagatataaaaagttataaaagtaaagaa

SEQ ID NO: 16025 - DNA, 798 bp, Clostridium botulinum
atggaaaaattattaatagataagaaaaatggtgaaaacattagagtgaaggtaggagatatagttataggtggagaagaaaagataattatatcaggaccctgcgctgtagaagatgagaaaacagttgtggctatagcagaaaaccttaaaaaattaggcgttcatatgttaagaggaggagccttcaaaccaagaacttctccttattctttccaaggtttaaaatttgagggacttaaaattttaaaagaatgtggaaagaaatttaatatgcctatagtaagcgaagtaatggatgctagggatttaaaagaagcttatgattatattgatatgatacaaataggttcaagaaatatgtataactacactctattaagagaagtaggaaagacaaaaaaacctattcttttaaaaagaggcatgagtgctactcttaatgaatggatttatgcagcagagtatataatgagtgaaggtaatatgaatgtagtattatgtgaaagaggtataagaacctttgaaagttatacaagaaacacactagatttaaatactgtagccgtaataaaggataaatatagagttcctataatagtagatccaagtcatgctacaggctttagggaatatgtaaaaccaatgtctttagcttctatagcgggaggagcggatggacttataatagaaagtcatataaatcctgataatgctatatctgatgctagacagactataaatgttaaagagatgaaagaaataattgataaagtaaaacaaatggataaaatatta

SEQ ID NO: 16026 - DNA, 1224 bp, Clostridium botulinum
gtggacttatttaatgttgtatctattaaagaggccaaaagtcttatagaaaaaaattttaatgtaaaaccgataaaggaagaagtggaacttttaagtagtatggatagggttatatatgaggatatagtttctcatataaatgtacctaattttagaagatctacagtagatggatatgctgtaaattctaaggatgtggcaggtgctagtgaaagtatgcccgctatgatgaactataggggagaagttttcatggggaaaattcctgaagttaatatcgattttcctggggattgtgtgtatgttccaacgggaggtatgattccagaaggatcagattctgtaattatggtggaatatacagaaagggttcatgaggatacagtacttataaataaagctacagcctatggtgaaaaggtagtagaaataggtgaagatatagctaaagaggaagtaataataaaaaaaggtgaaagattaagaccctatgaaataggggtattatctagtcttggaataactaaagtgcctgtatgtaggaaccctaaggtagctataatatctacaggagatgagatagtagatcctaataaagagccaaatctaggtgaggttagagatataaattcttatcttttacaggcttccattattgaagatggaggtattcctataaattatggaattataagagatgattttaatcttctaaaaaatacagtagaaaaagctatagaagatacggatattgtacttatatccggggggagttctgtaggaaaaaaagatgttactatagatgttataaatagtttaggagatcctggagtttttgttcatggcatagcaataaaacctggtaaaccaactattataggaaatgttaaggataaaatagtttttggattaccaggacatcctctatctgcagctgttgtatataaggttatagttaaatattatatagataaaattgcaggtgttaaagaaaaggtttttcctatagtttgtaagtttaatataaattatcatagtgcaaagggaagagaagagtatttaccagtaacattaaattggcaagagaatgaaataattgcatcacctatattttctaaatctggacttataagtggtttttctaaggcttatggttttataaagatggataagaatcttgagggaataaaaaagaatgagaaagtatttgtatatagattt

SEQ ID NO: 16027 - DNA, 264 bp, Clostridium botulinum
atggcaaatataaaatcagctaagaaaagaataaaagttatagaaactaaaactcttagaaataagatgttaaaatcttcattaaaaacaacaataaagaactttttaactgttgttgaaggtaaaaacgttgaagaagcaaaagctgcttacaaaacagctgctagagctttagatatgtctgtttcaaaaggaatagtccacaaaaacaaagctgctagaacaaaatctagattagctgcaaaattaaatgcattaaacgct

SEQ ID NO: 16028 - DNA, 1992 bp, Clostridium botulinum
ttgggtggaaccacgaaaatacactcgtcccatgtgttgggacgggtttttttatttgtaaatttttatttgaaggaggacaattttatgataaaaatcacattaaaagatggcaaagtaatggaatttgaagaaggaataaaaatatctgatattgctatgaaaattagtccagctctttataaaaaagctttagcagctaaaatagatggagaaactgtggacttaatgactgagctacacaaagatagtagcttagaaattttaacatttgaagatgaaatgggtaaatgggctttaagacatactggttcacatatgctagctcaagcagttaaaagattatacccagaagtaaaattagctataggacctgctatagacactggcttttattatgattttgaagcagattttacttttacaccagaaatgttagaaaaaatagaagcagaaattaaaaaaataataaaagaaaatcataagttagaaagatttgaattaccaagagaagaagcaataaagcttatgaaagaaaagaatgaagattataaggttgagcttatagaagatttaccagaaggagaagttatatctttctataaacaaggagattttacagatttatgtgcaggacctcatgtaccatctacaggaaaggttaaatcagtaaaattgttatctctagctggcgcttattggagaggcgatgaaaataataaaatgcttcaaaggatatatggtacagcctttactaaaaaaagtgagctagacgaatatttaaatatgattgaagaagctaaaaaaagagatcatagaaaattgggtaaagaattagatttatttagtatacatgaagagggtccaggattcccatttttccatccaaagggaatgattgtaagaaacattcttgaaagtttttggagggaagagcacacaaaagcaggatatcaagaaataaggacaccattaatattaaatgaagctttatggcatcaatcaggtcactgggatcactacaaagaaaatatgtattttactaatatagatgatgatgattatgcaataaaacctatgaattgtccaggtggaatactagtctataagaattctatgcattcttatagagatcttccattaagactttcagaattaggaatagttcatagacatgaattatcaggagcattacatggacttatgagagtaagatgttttactcaagatgatgctcatttatatatgacaaaagaacagataaaagaagaagtagtaggaataattaaattaatagataaattctataaactatttggatttgaatattttgtagagctttcaacaagaccagaggattctatgggaagtgatgaagattgggaaatagcaactaatggtttaagagaagctttagattctataggaaaagaatatagagtaaatgaaggtgacggagctttctatggtccaaagatagatttccatttaaaggactgtataggcagaacatggcaatgtggaactattcaacttgatttccaaatgccagaaagatttgatttatcatatataggtgcagatggtgaaaagcatagacctgttatggttcatagaactatatatggaagtgttgaaagatttataggtatattaatagagcaatacgcaggtgcattcccaacatggcttgctccagtacaagttaaattaatgaatataactgattctcaatatgattatttaaagaaagttgaagaagctcttaaagaaaataatataagggtagaaattgatacaagaaatgaaaaaatagggtataagataagagaagctcaacttcaaaaagtaccgtatatgctaatacttggagataaagaagtggaagcaggaaaagttgctgtaagaagtagaaaagatggagatttaggggctatatccttagaagaatttatagaaaaaataaagaatgaaattaagaacaaaactaac

SEQ ID NO: 16029 - DNA, 315 bp, Clostridium botulinum
atgagcaaaatacatgtaagaaaaaaagatacagttgttgttatatctggtaaagataaaagcaaaattggagaagttttatctgtattacctaaaaaaggtaaagtgatagttaaagatgtaaatgtagtaactaaacatcaaaaaccaaatagggaaaatatgcagggtggaataatacataaagaagccccaatatttagttcaaaagtaatgctatattgtgataaatgcaaatcagctactagaatcagtaataagattttagaagatggaacaaaagtaagagtatgcaaaaagtgcggagaaacattt

SEQ ID NO: 16030 - DNA, 669 bp, Clostridium botulinum
ttggaaatagaagacaatattaatagcataaaaaaaagtttaccaaaagatgtaactcttataggggtatccaaaactaaaccagtagaatatatagaggaagcatatgaggctggattgagagactttggagaaaataaggtgcaagagcttatagataaaatagagtattttaaagaaaaaaaagatataagatggcatttaatagggcaccttcaaagaaataaggtaaagtatatagtaggaaaagtttatttaatacattctttagatagcattagacttttagaagaaatagaagataaatataaaaaacaaaataagatagcaaatgtactaattcagataaatataggaaaagaagaaagcaaatatggcatatacaaagaagagttaggaaatatgatagatgctatagaaaaatgtgaaaatgtgaaagctaaggggcttatgaccataatacctaaaggatctgatgaggaatgtgctaaatattttagacaaatgaaagaaatcttttcagcattacaaaataaaagctttaaaaatatagaggttaactacttatctatgggaatgacaggagattaccctattgctataaaagaaggctctaatatgataagagtaggacaaggaatttttgggaaaagaaattatgatataaag

SEQ ID NO: 16031 - DNA, 2622 bp, Clostridium botulinum
gtgaaaccagaaattagtgttattatgccggtatacaattgtaagcagtatatctttgaatccattaaaagcatatgtaatcaaacttttgaaaactgggagcttattattattaatgataattctatagaaaatattgaggaagaaataaaaaaaatacaggatgacagaattcattatcatgcttttgtagaacatgaaggcttatttaattcattagaatatggtttgcagcaagcacagggagattttatcacatttcatgatccagatgatattagttctcctaccaggtttaatgaacagctcaattaccttaaatccaatgatgatttagggatggtttcatgccttatcagatgttttactaacgatactagttatcgtaatgcctgtacttttatagagaaaattcaaaatgcttatatatccaaagaacaaattgaaaatgcaattatcaataaattttctccagttatatttcctacaataatgatgcgtagaagtctattagatggaattgaattccataaagaagaaaatgaactagaagactacttccagatatttttatatttgcttaaacaaggtagattagaaaaggtcaacagcgttctttattattatagaaggcataaaaattcttatcatattcaaaatgaaaaaaattattctgaaacagtacaagcccagctaagtaaaagcggaatacaaaattttataaaatatagggaactctacaaagatttaaaaaaagagcagtatatagtcagtagatcgaagaaagatagccccttaagaatattgatgcttatagatgccctaaatattggtggaacagaaatgtatgtattagagcttgcaaaatccctggaaaagttaggggcacatgtagttatcggaacctctgggggcccgctagtagaagtattcaaacattatggattaaaagttgtaaaaattccttttactagcgactatatttctaataaaaacattatgaagctaattaaattaacaaagaaaataatagatgaagaaaaaatcaatttgcttcactgccacctttttgcaagcatgcgtctaggaaatgatatttataggagctacaagatcccatatatagtcacgctacatggcttattttatcctaatgacgtactatttgagtcctgtatcaatgcaactaaaattattgcagtaagcaagccaattaaaaaactaattgaatcaaaattaggctcaagaataagaggagaaattatggtgcttccaaatggaattgatatggaaaattttcatcctcagcatacagtaaaagattttaaaactcagctgggtatacctgaaaactctcagattataacttactgtagtcgtctggattggggaaaaacctttgctgccgaagcttttatttttgcatgttttactctaatggctaaaaataaacatctacatgcttttgttattggagatggggctgataaaaatttaatcacgcatgaagtaaacattctgaataaaatgttaaaaagagatgcaattcatgtagtaggtgcgaaatttgacgtactcccttattatcagaatgcagatattgtagttggtactgcaagagtggcacttgaggccatgagttgtggtaagccagttattgccgtagggaatcatggatataccggaatcattaatcctagatgtatgaacgagcaatggaatatgtattttggtgatcatgattcaataaaaaaagcagatcccttagcacttgaaaaagatttaaatggattgctacaagataccgaagcatgtaaatccttgggaaaatggggtagacgctggtgtgaagaaaaatttgataatcgacttgtagcaaaggatatttttaacttataccaagaagttttatccgaaaaagaagtaaaaaatacagataaagaaaatatgcctaataagatagaaaccgatatacagacaaaagaaagccctcttttagaaaaaacttcttccataattatcagaattcctgatgggattgaatttactccagaaataagtgaagtagtatttggttccaataatgcacttgcacgatactgcactcattgtacccattgtagatttgacattacggtgccttttactataatattgaaagataaaaaggattcctgtaaaacactaactgtgcctgatttgcttaatattgagttaaatagctctaactataataattgcattgacaaacaagattgtgaatctggagcactgataaatcttataaataagtgtggaatgagaatagaaaatgaaataaaaaataaccctattattgacgagaataaccagaatattatatttgagatcactaccaagctatacgctaacttctgtgatccagatatatttgatcttgaagctggaatttatggatcatcaagtcctattattggcgaagataatcttctaattaaaggtacaggaaagaatgaatttaaaaaaaatatcgctgacgaagattctaccaatatgcaccatgaacccttttattgttatgaagatgataaatccgattatgatgctaactcacttatgagaggatatccttataaaagaact

SEQ ID NO: 16032 - DNA, 636 bp, Clostridium botulinum
atgaaattatctaaatatattgatcacacactattaaagccacaagcaacagaaaaagatattctaaaacttattgaagaagctaaaacttatgattttgcatcagtttgtgtaaatcctagctgggttaagcttgcatatgaaaatttaaaagatacagatgttaaggtttgtactgttgtaggattcccacttggagcaacttcaactgcttctaaagtgtatgaaacaaaagttgccattaaagatggtgcagatgaaatagatatggttatttctgttggacaacttaaatcagggaatgatgaatatgtaaaagaagaaatcaaaaaaattgtagaagcatcaaagaataaattagttaaagtaattatagaaacatgcttattaacagaagaagaaaaagtaaaagcatgtactttatctaaagaagcaggggcagattatgtgaaaacttcaacaggattttcaactggcggagcaaaaccagaagatattaaattaatgagagaaacagttggtaaagatatgggtgttaaagcttctggaggaattcatactagagaagaaatggaagtcatgattgaaaatggtgccacaagaatcggtgcaagctgtggagtagaacttgtaaaa

SEQ ID NO: 16033 - DNA, 1038 bp, Clostridium botulinum
gtgttcacaatggaagatattctaaagttgcagcaaaaaatagttccggaaatgttaaagttattggaaaaaagatataacatattaaggactatttactataaacaacctataggaagaagagttttagcaaatgatttggaaataggggaaagaatagtaagaacggaaattaactttctaaaaagtcagagcttaatagatattaattcttccgggatgactgtaacaaaagaaggagaagagataatagataggttaaaatcctttatacatgaagtaaaaggactaaaagaaatagaaagtatacttaagaacaaattagaaatatttgaagttataattgttccaggaaatttagatgaagatataacagtaaaaaatgaattgggaaaagctgcagctaattatttaaagaatatagtacaagataaggatataatagcattgacaggtggtagtactgtaaaagaagttgtagataatatgccaaaaataaataccttaaaggatgcagttgtagttccggcaagaggtggcataggaagagacgtagagctacaagctaatactttagttgcaaacttagcttctaaaattaatgctaattataaattgatgcatgtacaggataaccttagcgaggcagcattaaaagctgttatggaagaaaaatcaataaaagaagtattagatatgatacacaaagttaatatactaatacacggcataggaatagctgaagtaatggctactagaagaggtattccatcagaagaaatagcctatatagaagaaaaaaaagctgtagccgaagcttttggatattactttgatatgaaaggtaatattgtacattcaagcccaactataggaataaaaagagaaagcataagaaatgcaaacaaacttatagcagtatcagggggtaaaaaaaaggctaaagcaatactggcagcagaagttagaaataaaaatagtgtattaataacagatgagggagctgctagagagatcattaatattttagaaaatgaa

SEQ ID NO: 16034 - DNA, 1893 bp, Clostridium botulinum
atggagaaaattaattcttataaagaattgaaaagctattatgaaaactataaggatttattaaaaagtagacataccacccatgaagaagaaacagcagtagaaaataaaaaatgtgaaagacttatattagtttgtggcggtacaggatgtaaatcagctgacagtgataaaattgtagaaaatttaaaagaagaaataaataaattaggactccaagaagaagtaaaagtttctattacaggatgctttggtttctgtgaaaaaggtcctatagttaaaataaatccagataatgttttttatgttaaagtaacaccagaagatgctaaagaaatagcagaaaagcatttattaaaagatgaagtagtagaaagattactttatgaagaaccaacacttaaagaaaaagtaaaaagacaagatgaaatgtctttttacaaaaaacaaaaaagaattgctcttagaaattgtgggcttataaatccagaagacataaaagaatgtatcggcttagagggatacttagccctaggaaaagttttaagtgaaatgacaccggatgaattaataaaattaataactgactcaggccttagaggaagaggcggcggtggcttctctacaggtaaaaaatggagttttggaaaaatgtatgatagtgatgttaaatatataatatgtaatgcagatgaaggtgatccaggagcctttatggatcgttccatattagaaggagatcctcatagcataattgaagctatggctatagctggctatgccataggagcttctgaaggtcgtatatatataagagcagaatatcctttagctgtaaatagattaaaaatagctatggatcaagctaaagagtgtggtcttttaggagaaaatattttaggcaccggttttaactttaatatagaaataaaatatggtgcaggagccttcgtatgtggggaagagacagcattaatacactccatagaaggagaaaggggagaacctacttataaaccaccattcccagcagaagctggtctttggaataagccaacagtagtaaataatgtagaaaccttagcaaatatacctgccataataaataggggagcagattggtataaatccataggaacagaaaaatcaaatggtacaaaagttttcgcactagcagggaaaataaataatgttggattagttgaagttcctatggggactactctaagagagataatatatgatataggtggaggtataaaaaacggcaagaaatttaaagctgttcaaacaggaggaccttcaggtggatgtattccagcttcacttttagatattcctatagactatgaatcattaacatctatagggtctatgatgggttccggtggaatgattgttatggatgaagataattgcatggtagatatagcaaaattttatcttgaatttacagtggatgaatcctgtggtaaatgtaccccatgtagaattggtaataagagacttttagaaactttaataaagataaccaatgggaagggttcagaagaagatttaaataaattagatgaattatcacatataataaaggatacttccttatgtggattaggacaaactgcaccaaatccagtactaagtactatgagatattttatggatgaatacaaagctcacgttgatgaaaaaagatgtccatcaggtacttgtaaaaatttactccattatgagattactgataaatgtatcggatgtactaaatgtgcaagaggttgcccagtatcctgtataataggaaaagttaaagaaaaacattttataaatcaagaaaaatgtattaaatgtggaaattgttatagcgcttgtccagttggggctattataaagaaa

SEQ ID NO: 16035 - DNA, 240 bp, Clostridium botulinum
atggcaggaagagaaggcggaagaagacaaagaagaactaagagaaaagtttgtactttttgtgcggaaaaatctgaagctatagattacaaagatatcaataagcttagaaaattcgttacagaaagaggcaaaattcttccaagaagaatttcaggaaactgtgctaaacatcaaagagaattaactagagctataaaaagagcaagaaacattgctttattaccatttactacagaa

SEQ ID NO: 16036 - DNA, 1125 bp, Clostridium botulinum
ttgggggtaaaacacatgaaagatttaaaagttacgcctttaagaggagtgtatgaagagtatggtgggaaaattgtagattttgcaggatatgaacttccaacacaatttaaaggctttttacatgagcatcatactgtaagagaaaaagcaggtctttttgatgtttctcatatgggagaagctatggtaacaggaaaagatgctggaaaattcattcaatacttaatgactaatgacataaatgttcttaaagataatgaggttttgtacacattcatgtgtaatgaagatggtggagtgatagatgatttattggtttataaatttgcagaggatgagttttttttagttattaatgcaagtaataaggataaagatgttaagtggataatggaccacaaaggggattttgatgttgaaattgttgatgtatcagatagcattgcacaacttgcattccaaggacctttagcagaagaaatacttcaaaaaatagtagatgtagatttacaagaaataaaattctttaaacttaaaagagatgttttagttaatgggaaaaagtgcttagtatcaagaaccggttatactggagaagatggttttgaaatttattgtaaaccagaggatgcaaaaggactatggcatgctatattaaatgcaggaaaagaagaaggtgcacagccaataggattaggtgctagagatactttaagatttgaagctagtcttcttttatatggaaatgaaatggatgaaacaattacaccattagaagtaggtatgggattctttgcaaaattaaaaattgaagaagattttataggaaaagatgctttaataaaacaaaaagcagaaggcgtaactagaaaattggtaggatttgaacttttagataagggaattccgaggcatggttatgaggttattaaagatggaaaagttataggacatgttacaactggatataaatctcctacattaaacaaagcaattggattagctttagtagaagaacaatattctaaaataggaacagagtttaatataaaagttagaaaaaaagaattaaaagctgttgctatagataagagattctatactaaaaaaacaaaaaccaaa

SEQ ID NO: 16037 - DNA, 1341 bp, Clostridium botulinum
atgaaaaacactaaagatactaatttaattgttggaattgatgaaaaaattagcttaagatacgccttttttctaggtttacaacatgtttttgctatggatttatacatagttcctataatattggcaggtattttatctcttgatgcccaaaatacagcctattttatacaaatgagttttatagccgctggaattgctacactaatacaaactggtttatgcatgcgattacctattatgcagggaccttcctatattcctataggtgcattagctgccatcggaagtaagttaggattacaagctatggttggtagtttaattccaggttcactatttttaatgatacttggttatccattacgttttctctcaaaaataatttctaaatttattccacatattgttggaggtactgttattgtaatagtgggaatatctttaatgcctgtggctatgactaatatttttactgcaccgggtaatttaaaaataaattgtatccttgctcttatttcatcagctttattagttggctgtatgatgataggacgtaaatccaataagtttggcaaagctgttcgacttacatctgtaatgatttcattaattggtggtactatagcagcttcattattaggagtcgtagattttacacctgttacaaaggcagcttggttttcattccctaaattattacctttcggaaaaccagtatttgatttaaaagcaattttaactatgttatttatttatgcagttattttagttgaaacttcaggaacttggtttgcagtttctgctgttacaggaagcgaattaacagatgaaggtttaaatagaggtgctgtgggcgagggaattggctgttttgtaggtgcattgtttggtggtactccaatgacaggctattccacaaatgcaggtattattgcggtaacaggtgttggtagtagaatggctattattgctggaggaatcatattagttgcccttggtatgttacctaaattaatgaatgtaattgcttgtatacctagcgcagttgttagtggagtttttgcagtagtttgtgtaattattgctatgaatggctttaagtcaattcaacatgaagaatttgatgaaagaaatatgttattgattggactacctattcttttagcacttggaactactgttttacctaaagatatcttaaatagtttgccaagtcttgcaaattatattttttcctctggaattacagtaggggctttggctgcagtaatattaaatatacttttacctaaggcacccgtagaagtatctaaatcacaagaatatgaagaggccgtg

SEQ ID NO: 16038 - DNA, 1272 bp, Clostridium botulinum
atggggaatgatattaaaaagaaaaaaaagactcgtaaaagaaaaaaaagtagaggtttaaaaattatcattatattcttttcttttattatactattaggagtattggggtatttttatcttttgggatttaatcataattcaaagttaggagatggaaaaataaatactaagaaagcggaagctggagagcctgtaaatatacttgttatgggagtagatattggagatcctaattctaaagatgcatcagaccctaaaagaacagatactatgcttgtagttaattataatcctaaaactaaaaagataaatatggtatccgtaccaagagatactcgtgtaactatgaatgggaaaaaaataaaaataaattcagctcatgccataaatggagtaaacggttctatagaagctgtagaaaatcttttaggcatagaaataaacaattatgctaagatagattatgaaggatttagaaaggttatagatgctatagggggagtagagatggatataacgagaaatatgaattatgatgatccatctcaaaatttacacatacattttaaaaagggcgctacggtacatttagatggaaaaaaagcagaagaattttttcgatggagaaaaaataacgatggtacaggttttgcagatggagatttaggtagaatagaaaatcaacataaatttatatcaaaggtagtggaaaaagtcaaaagcccaagtataatacctaaaattccaaatatattaagcactataccagattatgtagaaacagatatgtctccagaagaaataattaaatatggatatgctgtaactaaaggagataaatctggtattaatatggttactcttcaaggggaagctaagtatataggtaatatttcatattttatatatgatagagaaaaaaatagagacatagtacagactttaaaaacaggagtaacatcacaaagagatgatagtactgagatagataaaagtgaaattaaaatcaaggtattaaatggaacaaaagttaatggtttggctgctgattgtgaaagaaagttaaaagaaatgggatatagtaacattgttacaggtaatggagaaagaagagaattaacaaaagttcgcctaaaaaaagatagttttatatctacaagagaaatagaaaattatttaaatattccaaatatagagaaaaatatccaatccgatgaaaactttgatataataatattattaggaaaagattttgctaataatagaaat

SEQ ID NO: 16039 - DNA, 714 bp, Clostridium botulinum
atggaacgtttagataaaatactagccaacttaggatatggtacaagaaaagaagttaaggctttgattaaaaaagggcaagttgatgttgatggtgaagttgttaaagataatggtatgcaaatagatccagaaaaaaataaaatatttgtatttggaaaagaattagtttataaaaaatatatttatttaatgatgaataaaccccaaggggtagtttctgcaacttttgataactatgatgaaactgttatagatttgttagaagatgaagacagaatttttgaaccttttcccgtgggtagattagataaaaatacggtaggcttacttttacttactaacgatggagagttaaatcacagacttatatctcctaaatggcatgtggataaaatatattatgccaaaattaataaaaaggttactgatgaagatataaagaaatttaagaaaggtataatattagatgatggttatgaatgttttcctgcaaagcttgaaataataaaatcatttaatgaggaatcagaagtaagagttactatacatgaaggtaaatttcatcaagtcaaaagaatgtttgaaagtgttgataaaaaggttatttacttaaaaagagaagaatttggaccattaaaattagatgagagcttagaagagggtcaatatagggaattaacagatgaagaaatatctatattaaaaaatcta

SEQ ID NO: 16040 - DNA, 1176 bp, Clostridium botulinum
ttgaatatgggtagagataatttaaataatattgaagataatggtttaaatgctgaaccatatggtgaaataaattttaaaaagagtagaaaaagaagaaggatgaaaaatatactatttattatgattataattatagtatcagctttatgtggtggagtaacggcttcctatatgatagataaaaaattagaaaagaatccatatacacctactaatcagtccttattcgaacaaaaaagtgaaaaaaatgaaaaagaaaataaaaatgaacaattgcctaaaaattccataacaaaggttgctgaaagtgtaggaccagcagtggtaggcattagtaataaaacagaaggatattttggaatagaagatcgaggctcaggatcaggtataatatttgaccctaatggatatattgtaactaataatcatgtaatagaaggagcgcaaaaaataacagtaaaattatctacaggaaaagttctagatgcttctttagttggaagagatgttaggtcggatttagctgttataaaagttaatgctaaaaatctacctgtagccaaatttggtgattcatcaaaagttaaagtaggagatgtggctatagctattggcaatcctttaggagaagaatttgcaggaactgttacagcaggcatagttagtgccgtaaatagaaagattcattatgcaggggccttgtataaattaatacaaacagatgcagctataaatccaggaaatagtggtggggctttgtgtaatgatgcaggagaaattataggaattaatagtttaaaagaaaaagcagaagggataggttttgctatttctataaatgaagctaaagatataataaaatctctaatggattatggtaaagtatcaaggccttatttgggcgtatctggcgaaactatatcttcagaacaaactagagtatctggtgtatatgtaacagaggtagttcagggttcaggagcagctgcagcaggaattaaacctacagatataatagtagagttagatggtaaaaaagttactaagtgggacgatctgggagagatagtaggcagccataaaattggagatacggtaaaggttaaaatattaagaaatgataaatataaagaagttaatataaaattatctgaaatgaaggaaagtaataga

SEQ ID NO: 16041 - DNA, 1248 bp, Clostridium botulinum
atgaggcctttagcagatttaatgagacctaagaaattagaagattttgtaggacaaaagcatatactatctgagaataaacctttatataatttaatgaaaaataaatcaatatgtaattctatattttatggcccaccaggtacaggtaaaactactttagctaatattatggcaaattatgtggataagaaattttatagattaaatgctactacagcatctattaaggatattcaagaaataacttctagcataaacagtttgttaaattatagtggtgttgtattgtatatagatgagctgcagcattttacaaaaaaacaacaacaggctttattagagtttatagaggatggaagagtgatattaatagctagcactactgaaaatccttattttgttatacataaagcaattttaagtagatgcaatatatttcaatttaagccccttaatagagaggatattattttaggcttagaaaaggccataaacaaattaatagataagggtataaatataaaatatacttttgaatctttagaatatataagcgagatatgtcaaggagattatagaaaggcctataatattttagaactagctgtaaattctcactgtgggtttaatatagaaattaatttggactatatagagtctttggcacaatctaacattagagcagatgctacaggagatgaatattataacattttaagtgctttccaaaaaagtataagaggaagtgacgctgacgcagcagttcattatttagcaagacttataaaaagtggagatatgatatctattacaagaaggttatcagtaatggcagcagaggatattggattagcttatcctaatgcattaactattgtaaattctggtatagagttagctttaaaagtaggatttcctgaggcgcagattattttatctgaaatcacaatatacttagctactttgccaaagtcaaatagtgcatacatagctataaaaaatgctacgaaagatttagaaaatattaattttggagatgtgccagatcatcttaaagattctcattattatggtgctaaaaatttaggtatagggggatataaatatcctcatgattttaataatcattatgtcagtcaggaatacttacctaaagagttaaaggataaagtatattatatagcgcaacataataaatatgaagaaaatctaaaaaaatattgggaaaatattaaaaaatttaaa

SEQ ID NO: 16042 - DNA, 1032 bp, Clostridium botulinum
atggatacaaaattgtacataattggagctattacagctatagtgctatcagttattttaacacctatagtaaaaaaagctgcatttatattaggtgtagtagatatacctaaggataaaagaaaaattcataaaaaacctataccacttttaggtggtatagcaatatacatatcttttgtagttgctttgatattaaaaaaggggcctctaactttagaagaaataggaataatattaggatctacagttatagttataggcggatttattgatgataagtatgatatgtctcctataaaaaaaattctatttcaattagctgcagctatttgtttaataatatgtggattaaaaatacaattcataacgaatccttttgatcaccttaacttatatgtaggattacatatttttgctatacctataactatagtatgggttataggtataactaatgcattaaatttaatagatgggcttgatggattagcggcaggggttgcactaatttcatgtattacaatgtttgtaatagctgttctaaatcaaagatgggaagcagctatattaactagtatattaggtgggtctatattaggatttttgccctataactttaatccagcatccatatttatgggggatactggatctcaacttttaggatttttgttggcggccatatcaatagagggagctattaaatctgctacagcttttgctatagtcgtaccaatattagcgttaggattacctatatatgacacattgtttgccatgattagaagaaaaataaacgggaagccaataatgcaagcagataggggacatcttcatcatagacttttagatatgggattaactcaacgtcaagcggttataataatgtatttaataagtgctgtattaggaagctttgctataatagctatgcaaataagtaatcaaaagtcatattttttacttacagcaataatgctagctcttatattaatagcatggaaatgtggattttttagccataaagaa

SEQ ID NO: 16043 - DNA, 267 bp, Clostridium botulinum
atggaaaatcaaaagaaagatgctaaaaaagatatacaaacgagacttagaaggattgaaggacaggtaaaaggtatagagaaaatggtagaaaatgaatgctgttgtagagacgtgcttatacagatagctgctataagagctgctatgaacaaagtaggtggtttagttttagaaaattatgctaaacagtgttttttaggagaagataaggaaaaagatgaagctatagaagatttagtttctacctttactatgtttatgaaa

SEQ ID NO: 16044 - DNA, 2598 bp, Clostridium botulinum
atgaatattgaaaaattaactttaaaggtacagcaagctataaatgattctcaacttgttgcagttaagtataatcatcagcagattgatactatacatttattttcagccttaatttctcaagatgatggattaattcctaatattttagggaaaatgggagtgaatataagagatattaatgctgaaaccaatagggtcttagataatatgcctaaagtattaggtgagggagcacagtcatcttctgtgtatcctactagaaggtttgaagaggtttttgtaagggcagaacagatagcaaaggattttaaagattcatatataagtgtagaacatgttttattagcaataatggatgtggatagaaatactgttcttcctatattagaaaaatttggagtaaaaaaatcagagtttttaaaggcattatcagctgttagaggaagtcaaagagttgataatcaagatccagaggggacttatgaagctttggttaagtatggtagaaatttagttgaagaagctaagaaacataaattggatcctgttataggtagagatgaagaaataagaagagttgtaagaattttatctagaagaactaagaataatcctgttcttattggagaaccaggtgtaggtaagactgctattgtagagggattagcagagagaattgttagaggagatgtacaagaaagtttaaaaaataaaataatattttctctagatatgggagcacttattgcaggtgcaaaatatagaggagaatttgaagaaagattaaaagcagtattaaaagaagttcaaaatagtgaaggaagaataattttatttatagatgaaattcatactatagtaggggcaggaaaaacagagggttctatggatgcaggaaatttaataaaacctatgcttgccagaggagaacttcattgtattggagctactacctttgatgaatatagacagtatatagaaaaagacaaagctttagaaagaagatttcaacctgtaataacagatgagcctacaatagaggatacagtatctatattaagagggcttaaagaaagatttgaaatatatcatggaataagaatacatgattcagctattgtagctgcagctaagctctctagtagatatattacagatagatatctcccagacaaagcaatagatttaatagatgaagcttgtgctatgataagaacagatatagatagtatgccaacggaaatggattcaatgaaaagaaaaatatttcaattagaaatagaaaaggaagcattatctaaagaaaaagatgtggcttcaaaggaaagattagaagttttagaaaaggaattgagtgaactaaaagagaaagataaagaaatgacagccaagtatgaaaatgaaaaatctcatataacaaaaataagagatttaaaagaaaaattggatgatgttagaggtcagatggaaaaagccgaaagagaatatgatttgaataaagttgcagaattaaaatatggtttaataccagctcttcaaagagaaatagaagaaaaagagaaattaataaaggaaaatagtaacggaaatgctatgttaaaagaagaggttacagagcaagaaatttctgaaataatctctaaatggactggtatacctgtaacaagattagttgaaactgaaagacaaaaactattacaattaggagatcaattagaaactagagtaataggtcaaggagaggcagtaaaagcagtaactaatgcagttataagagctagagcaggactaaaagatccaagaaaacctataggatcatttatattcttaggacctacaggtgtaggaaagacagaacttgcaaaaactttggccagaactttatttgatactgaagaaaatattataagaatagatatgtctgaatatatggaaaaatattcagtatcaagacttataggagctcctccaggatatgtaggatatgaagaaggaggccagctaacagaagccgttaggagaaaaccttatagtgttatattatttgatgaaatagaaaaagctcatgacgatgtatttaacatattccttcaaatattagatgatggaagacttacggacaataaagggaaggttatagattttaaaaatactataattataatgacttctaatttgggaagtaactatttattagataatgaaagcaaagaaggtatagatgaaagtataagaacaagagtaaaagaggctttaaaggctagatttaaaccagaatttttaaatagagtagatgacattataatgtttaaacctcttacggtagaagacattaagagaataatagatatattcttagatgatataagaaaaagacttaaagataagaatatacagcttaaaattactgatagtgcaaaagatataatggccaaagaaggttatgatccaatatatggcgcaaggccgctaaagagatatatagaagatactatagaaacagaaatagcaaaacaaataatagtaggtaatatatatgaaggtactactgtaggagtagacttaaaaggagagtcaatagttatagaaagaata

SEQ ID NO: 16045 - DNA, 1092 bp, Clostridium botulinum
atgaaaatatgttatttagctgatgctaatagtacacatactaaaaaatggtgtagattttttaaaaataaaggatatgatatagatgtaatatcattaaatgatggagatatagacggagttactgtacatagttttaataaagatttagataagataagaaaaggaagctcttttaataaaatttcttatataagatattttagtgacataaaaaaaattatagaaaaaataaaaccggatgttgttcatgctcattatgctactagctatggtttattaggagcattatcaggatttcatccctatataatatctgtttggggtagtgatgtatatgatttccctaaggggagttatataaaaagaaaaatggttgagtataatttatccaaagcagatattataatgtctaccagtaaagtaatggcagaagagacaaatcaatatactactaaaaatatagaaataaccccttttggagtaaatatagatacatttaagccttgcgccgataaatatgaaaaaaaagaaaatttagtaataggtacagttaaaacattagagcctaaatatggtatagaatacttagttagagcttttgcaaaggtaaagcaaaaacataataatattaagttagaaattgcaggagtaggggaccaaaaggactttttacttaatctatgtaatgaacttaatataaaagaccatgttaaatttttaggatttataaatcaagaaaaggtaatagaggcttttaatagatttgatgtagctgtgtttccttccacattagatagtgaaagtttcggggtagcagcagtagaagcacaggcatgtgggactccagtaattgtttctaatgtaggaggattacctgaagctacagctcctaataatagtagtatattagtaaataaaaaaagtgtagatgagctagcagaggccatagaaaaattaattaaggatgacaatttaaggataaacatgggtaagacaggaagaaaatttgtggaagataattttaatatagaagataattttaataatgtagatataatatataaatctataatagatggaggagataat

SEQ ID NO: 16046 - DNA, 462 bp, Clostridium botulinum
atgagaaatattaaaatattttttgtgtttgcaatagtatttttgttatttggttgttctagtaatattaatgaactcaaagaaagcaaaaatatgggagtaaaaagtgataatgaaagattactttattttcaacacaaatacaaagataaagaagttttaaaatgtgcggagaaagatttaaataatgataataaattagatttaattgttatttataaagaaaataatgataaaaattctatggtagttgtattaagtgataaagaaaaatataagattacaaatgaagtttcagcacctatagaaaatcaaaaaatagagtttaaggatatagataaaaaaccaccaatagagtttgtagtatcaggatctaaaaatggaagttttggatatgcaatttatagaatagaaaaaggtaaaataataaatctatttggagaagacatgaaagattgttgc

SEQ ID NO: 16047 - DNA, 1707 bp, Clostridium botulinum
atgaaaaaaaaattaacattatcaatacttataattttaatatttacattaacaatagtatcatcacttttcttaataaccattaataatcaatatatagaaagcagtaaaaatagattaaaaaataataattcctttatattgaaagtaataagaaatgaagatcctaaaaatattgttaattttataaagaataattatagagataatgatataagggtaactttattagatcataaagggaatgttttagtagattctaaagaaaatagagtagaattagaaaatcataataaaagagaagaaatagtaaatgcaaaaaaaaatggagaggcttatagtgtaagatatagtaatacaagaaaagtagaaagtctctattttgcaagcaaagttaataatgattatattataagaagtgccatagatatgaaagatataaaattattagaaaaaaaatatagtaaatactatatttctataatattattttcttttgttctatcttttttattttcatccagaatatcaatggctatgataaaacctataaaaaatcttgaatttgtaacttcaagaatagcaagaggagactttgatagaagagtaataataaattcagaggatgaaataggacgacttggaagaaccttcaatgctatggcagatatattggaaaatagtttggtggaagttagagataaacaaaatagactagaggctatacttaagagcatggacagtggtgttgtagctatagacaaagagtttaaagttattatgattaatccttatgctaacaaattatttggtataaaaagagatataataggggaaaaccttatggataatataagagattttgaattagaaaaagtattaagggataaagaacctggctataaagaaataggcatattatggccagaaaaaagaacccttagagttaaaactacagatataataagtaaatatgataatataggtactgtggcagtagtgcaggatataacagatataaagaaactagaaaatatgagagagcagtttgtagcaaatgtatcccatgaattaaaaaccccattaacatctataaagggtttctcagaaactttaaagtatgtagatgataaaaagaatagggaaaaatttttacaaataataaacgatgaagcggatagacttacaagattaataaatgatatattagtattatccaatatagagaaacaaaagcaagagttaataaaagagaaaatagatttaaatgaattaattgaaaaagtatattgtttagtaaaaaaatctgcagaggataaaaatataaaaataaatattgtaggagaaaaagtacctttattaataggaaataaggataaatataatcaaatgataataaatttagtagataatgccattaaatacacagagcctaatggttatgtaagtataggtacaagacaagataaaggtaatatagtattttgggtagaggatacaggagtaggtatttccgaagaacatctagatagaatatttgaaagattttatagagtggataaagccagatctagagtagaagggggaacggggctaggtttagccatagtaaaacatatagttctaagtattaatgggaaaatagaagtaaaaagtgaacctaaaaaaggaactaaatttatagtaaaaatacctttaagtataata

SEQ ID NO: 16048 - DNA, 555 bp, Clostridium botulinum
atgtttattgatgattatccttatctagaaaataatcagaatgatgaaaatatgaatatgaggcctatgccttacatggcttggggcggttctccaatgtataatccatatatgcctaatgtggattgttctatggataacataaattatgacaatatggatagatgcaacaataacataactaatgaaaatgaagattatatatatattgataatagattacctatgactagtgatccgcctcagactacccctactcctacacctactcctacacctacacctgcacctgcgcctacacctacacctgcacctgcacctactactcaatttctaccttctgtacaggatgatatattatataatcaaggttacttaaaaactcaaataggaaaaagagtaaaaatagaatttttaataggtactaatatgctaatagatagagaaggaaccttagtaggcgttggaataagttacgttttaataaacgaagtagacactaatgatttaattatggctgatatgtactctataaaatttgtaagaatatttgac

SEQ ID NO: 16049 - DNA, 924 bp, Clostridium botulinum
atgaagaaatccatattttctcatatggttggaataaaatatcctattattcaaggtggaatggcatggattgctgatagttcactagcagcggcagtttctaatgcaggaggtcttggaataataacaggaaatgctccagtagaatgggttagacaagaaataagaaagacaaaagaattaacagataagccctttggagtaaatataatgcttttagcagaaacagcagatgaaatagcccaaatggtttgtgatgagggagtaaaagtagttactactggagcaggtaatccaggaaagtatataaaaaaatggaaagaacatggcataatcgtaatacctgtagttccttctgtagctttggctaagagaatggaaaaatcaggggcagatgccataatagcagaaggttgtgaatctggtggtcatgtaggggaattgacaacaatgacattgataccacaggtagttgatgctgtagatatacctgttatagcagctggaggaataggtgatggaagaggtatagcagctagttttatgttaggagcagatgctgttcaagtaggtactagatttttagtagcaaaagaatgtactgttcatcaaaattataaaaataaagttatgaaagctaaggatatagatacacaagttacaggtagacctacaggacaccctgttagaattataagaaataggttatctagaaagtttcaaatactagaaaaagaaggagctcctttagaagaatttgaaaaattaggtaggggagcattaagcaaagctgtaatagagggagatattgataatggttctgttatggcaggtcaaattgcaggacttataaataaggaacaaacttgtagtgaaattataaatgaaatatttgatgaagcatatacactattagattataaa

SEQ ID NO: 16050 - DNA, 1221 bp, Clostridium botulinum
ttgagtaatgtatatgacatattaaaagaacgtggttatataaaacaattaacacatgaagaagaaataagagaacttttaggtaaagaaaaaatttctttttatataggttttgatcctacagcagacagcttacatgtaggtcacttccttcaaatgatggttatggctcatatgcaaaaggctggacatagacctatagcattagtaggtggaggaacaggaatgataggggatcctactggtaaaacagatatgagaaagatgatgacaaaagagcaaatagagcataactgtaactgttttaaaaagcaattagcaaaaataatagatttttcagaagataaagctattatggttaataatgcagattggcttttaaatttaaattacatagaattcttaagggaaataggagttcatttttctgtaaataaaatgttaacagcagaatgttttaagagtagattagaaaaagggttatcttttttagaatttaattatatgttaatgcaaggttatgatttcttagaattaaatagaaaatataactgcgttatggaattaggtggagatgaccaatggtctaatatattagcaggtgtagatttgataagaagaaaagaaagcaaatcagcctatggtatgacatttactcttttaactaatagtgaaggaaagaaaatgggtaaaacagaaagtggtgccctatggttagatccagaaaaaacatcaccatatgaattctatcaatattggagaaatgtagcagatgcagatgtagaaaaatgtttacgtctaataactttcttaccaatggatgaagttagaagactttcatcattagaaggagcagaaataaatgaagctaaaaaggttttagcttttgaagttactaagcttatacatggagaagaagaagctcaaaaagctaaaattgctgcagaagctttattcggtggaaatgctaaagatttaggaaatatgcctacagcttatatagataagaatgatttaaataatctattagtagatctattagttaagtgtgaaatattgccatctaagagtgaagccaggagactaataaagcagggtggtctttatttaaatgatgagaaagttacagatatgaatttagtagtaacagaagaacatgtgacagaagatggaataatgattagaagaggcaaaaagaattttaacagaatagttgtagag

SEQ ID NO: 16051 - DNA, 573 bp, Clostridium botulinum
atgtataaaacaagtaaaaaagttttgtgtagtagtgtacacgagatattattaggaggaattaaaatgtttaaaaaaattaaatctcttttatcgaatgataaatcagacgttcaacaagaaaatttaaatgaagtatttgtaagccctatttctggagaaataataagtctagatgatgttccagatgaggtattttcacaaagaatgatgggagatgggtttgccatacaacctgaaaatggagatgtattttcaccagtggatggaacaattacagcagttttccctaccaaacatgctatttctataaaaagcgaatctggagttgagattttaatccattttggattagatacagttaacttaaatggagaaggttttcaggtttatgttgaggaaggaaatcaagtaaaagcaggagatatgttactaaaggttaatattgaagaaataaaggataaagttccttcacttattgttcctataatatttatggatcttaatggaaagaattttagttataatactggtaaggttacagctaaagagccaaatataataacattaaag

SEQ ID NO: 16052 - DNA, 429 bp, Clostridium botulinum
atgaatagaagaaaatcaagagaagtagccatgagattattatttcaaactacattaaatggagaaaacttagaggaggccctagaaaatttaaaggatgttagagaatctgaagagattacaaaagaaaaagattatgaatctgtagatttaaaagatgtggatatagattatgttaaaagaataataaaaggtatagaagaaaacaaagaagaaatagatgaaaaaataaaaggaaatttaaaaaattggaaaatagaaagactatctaaagtagatttatctatacttagattatgtacatatgaattgaaatttgaagaagatataccaaatagggtatctgtaaatgaggctatagaattagctaaaaaatattcaggagaaaaatctgcaacttttataaatggtgttttaggtaaaatgatt

SEQ ID NO: 16053 - DNA, 1941 bp, Clostridium botulinum
ttgttaaggatggtgaaattaatggttgtattaagttgtaaaaacatttcaaaagcttatggtgttgatttgattttagataatttaacatttaacataaatgaacatgataaagttggtttaataggtgccaatggtgctggtaaatccactttatttaaaattcttacttcttctttagagcaggatagcggagatatttttatagataaatctaaatctttagggtatcttgctcaacatctctccttagattctaataatactatttatgaagaagtgttagatgtttttcatgatcttataaaaatggaagaaaaactaaataaattagaaaaattaatgaatgaaccctatgataaaaacaataaagaatatcatgataaaatcataaaagattatactacctatacagatttatatataaatagaggtggttatacttataaaggtgaaattcatcgagtactaaggggtttaagttttgaagaagaagattttaataaacaaataaatatattaagtggtggtcaaaaaactagagtagccctttgtaagctcttacttcaaagcccaaatatattgcttctagatgagcctacaaatcatttagacttaacagctataaattggttagaagaatatttaaaagcctataaaggtaccgtactgattatatctcatgatagatattttttagatgaaattacaaaccaaacctttgaacttataagcggtcatataaattgttataatggtaactactctaaatttatagaacttagaaaaaaagagtatgaagtaaaattaaaagcatataatcttcagcaagctgaaattaaaagacaagagaaaataatagaaaaatatagatcttttaatagagaaaaaagcataaaagcagctgaaagcagacaaaaatctttagataaaattgaaaaaatagacgctccagataaattacctaaacctgtaaaaataagttttgaaactcaaataaaaagcggaaatgatatacttcacgtagaaaatctaagcaaaagttatggagatatgactttgtttgaaaatgtcgaaatggatataaaaagaggagaaaaaatcgctttaattggagataatggtagaggtaaaaccacgttatttaaaataataatggatgaaattcaaagcaactctggaacaaaatatataggtaaaaatgtattcattggctattatgatcaagaacaatctgacttaaatgagtgtaatactgtattagatgaggtttgggatgagtttcctgaaatgactactacagaagttagaaatgctttagccgcatttttgtttactggagatgatgtatttaaagaaatatctaaacttagtggtggagaaaaatgtaaagttaatttattaaaattaatgctttctaaatctaattttcttcttttagatgagcctactaaccatttagatataatgtctcgtgaagctttagaagattccttattaaattacgatggtacagttttagttatatctcacgatagatattttctaaataaggttataggaaaaatctatgaactaaatatagatggtataaaagaatatttaggtaattatgattattatattcataaaaaaattaatcctaatagatttgactatgaagctataacctctgaaaattcaaaaactaaaactcaaatacatcaagaaagaaaaaagaaaaaagaagaagaaaaaaaactaaaacaagaaaagcttaaaatgaaaaatttggaaaaggaaataacagacctagaaaaagtagtaaattcccttcaagagcaactttgtcttgaagaagtatattcagattctactaaaagtgaaaaaataaataaagatataataaataagcaaaaattaatagaagacctttattcagagtgggaaaactttatggaa

SEQ ID NO: 16054 - DNA, 399 bp, Clostridium botulinum
atggcttttgtagaccgctcagaaaaggtgttaaacatgatttgcatgtaccttaattggcgagactggaatgaggaggtgtttttaatgtacgcagttgtagttactggaggaaagcaatataaagttgctgaaggagatatactattcgttgaaaaattaacagctgatgttgattcaacagtagaattagacaatgttcttttagtaggaaaagacaacggagaaactgttgttggaaaaccaatggtagaaggtgctaaagttacagctaaagtattagcacaaggaaaagctaaaaaagttgttgtatttaaatacaaaccaaaaaaagactacagaaaaaaacaaggtcacagacaaccatatacaaaaatccaaatagaaaaaattaacgca

SEQ ID NO: 16055 - DNA, 723 bp, Clostridium botulinum
atgattaaagaaaaaagcatatacaaactgaaaaaggaagatattccagtatttttatttacaggaatagtaggaatggttggatatcatattttcttttttaaggcttctacatatactacagctacaaattcatctttaatagctgcatctaaccctattataacctgtatactaagtgttatatttcttaaagacaagctaagttcaaaaggaattataggaattattctttcttttactggagttctcttaaccataactaatggtgctatagctaatattttaaatattaattttaataaaggtgatattttaatgataatagctgtattatgttgggcttcttatggagtctttagcaaaaaggtaatgccaagatattctccaatgaccttaactttttatagttttttattttgtactttatttttaattccttttgtcatatatgagaaacctttatctttaataaataaggttccttattattcatatatatcaattttatacatgagtatatttgcttctgttataggctatttagttcaacaaatatccataaaacaaataggaccttctaaaacttctatttttgtaaatttagttcctatatcttctatagttttatcatctatgatattaggtgaaaaaataactataataacacttttatcaacagccttaataattgcaggggtttacatatgtcaaaaatctaat

SEQ ID NO: 16056 - DNA, 1020 bp, Clostridium botulinum
atgaaagaaagcataaatattttagctatagaaagtagctgtgatgaaacttcagcggcagtagttgttaatggtagagaagttttatctaatataatagcatcacaaataagcacccatgaaaaatttggaggtgtagtgccagaagttgcttcaagaaagcatatagaggttataagtgcagtagtacaagaagctttagatgaagcaaattttactttagatgatatagatgctataggtgtaacctatggaccagggttagtaggagctctacttgtgggattacaatatgcgaaagggctagcctttgcaacagggaagcctcttataggagtaaatcatatagaaggtcatataagtgcaaattttatagaatataaagacttaaagccaccttttatgtgtttagtagtatcaggaggacatacttttatagtttatatgaaagattatggtgaatttgaagtgttaggtgaaactagggatgatgcagcgggagaagcttttgataaagtggccagggccatagggttaggctatcctggaggacctaaaatagataaaatatcaaaggaaggaaacgaagaggctataaaatttccaagagcaaattttcataatgatactttagatttttcctttagcggaataaaatcagcagtattaaactatttaaataagaaggaaatgaagggagaagaaataaataaagcagatgtggcagcatcttttcaaaagtctgtggtagatgttcttgtagacaatactataaaggcttgtatgagtaaaaaagtagataaaatagcagtagcaggaggagtagcatctaattcctgcctaagagagactttagtaagagagtgtaagaaaaaaggaatagaagtgttaataccaccttttatattgtgtacagataatgcagctatgataggaagcgcagcttattttgagtatattaagggaagaaggacttctttagatataaatgctgtaccaaatttgaaacttggagaaaga

SEQ ID NO: 16057 - DNA, 2289 bp, Clostridium botulinum
atgaatattaaaataaaaaagagagatggacaatatgaaccactacaagtagaaaaaacaaaaaaaatggttaagctagcctgtgagggtatagaaggatgtgaccctcttgaactagagttggattccagaatacaatttagagatggtatgactactaaggaaattcaaagaactttgatacaaactgccatcgaaaaagttattcaaaatagcaaagataacaatggaaataatataaaaaaaactaatgctaattggcagtatgttgctgcaagacttttatgttttgatttatacaaggaagctaaaatcagccgacactataatagctttggttatggtgattattatcaattggtaaagaaattagttaaaattaaactttatggagagtatttaatccaaaattattctgatgaagaaatcaaagaattagcaaagtatatagtaccagaaagagatgaattatttaattatgaaggattaaaattattaaatgatagatatttaattaaggggaataatggagaaatattagagcttcctcaagaacgctttatgacaatagctatgcatttagctattcctgagggggataaaaaagttttttatgcaaaaaagttttatgatcttttaagtgagttaaaagttacagtggccactcctactttaggaaatgcaggtacacctttttatcagttaagtagctgttttatatctgttgtaggggataatttatggtcaatttatgatgttaatcaaaagtttgcacaagtctcaaaacatggtggagcactaggcatttatactggaaaaataagagcgttaaacagtgagataagagggcataaaaatgcatcagggggggttgtaccctggataagactttataatgatacagctgtagctgtagaccagcttggcaagagaaaaggtggagcagctataactttagatatatggcataaagatatatttgattttttagatcttaaaactaataatggagatgatagaagaaaggctcatgatatttttccttctgtaagcattccagacttatttatgaaaagattagagaaaagagaaagttggtctttatttgatccttatattgtagagaagataatgggctacaagttggaggattattttgacgatgaagatcgcaaggaatttacaaataagtacttagaatgtgaaagaaatactaatattccaagagatacagtaccgactcttgatattatgaaaaaattaatgaaaagtgcagtagagacaggtactccttttattttttttagggatactgtaaataaagcaaatcctaataaacataaaggtatgatatattcatcaaatctttgccatgaaatagctcaaaatatgagtgaaagtcgacttctagaagaggaaataattgatggcaatggttactcagagattgttcaaagagttaaggctggagatatggtaacctgtaatcttaattcaataaatcttagcaaagtgaaaaaagaggaatttaatgagtgtatcccttttcaaataaggatgctagataatgttatatctcttaataagcttcctgttaaagaggcaaaagttaccagtgacaagtatagagctattgggttaggaacaagtggatatcatcatttccttgcaaataacaagataagatgggaaagtgatgaacatattaaggtagcggatgaaatctatgaagagatagcctatatagctataaaatcttccatggaattagctaaggaaaaaggcagttatccagcttttaaggattcagaatgggaaacaggaaaatattttgaaagaagaggttacaattctgaaagatggaagaagctacaaagtaatatcaaaaaatatggtatgagaaatggttatattactgctattgcccctacaggaagtacttctaatatagctaatacaacagcaggaatagaccctgtatttaaaaagttttttatggaagaaaagaagggtagctttacaccaaaaacagcaccagacttaaatgaagaaaatttttggtattataaagaagcacatactatagaccaacaatggagcattaaggcttgtgccgtaagacaaaagcatatagatcaggctcaatcctttaatttatatataactccagaaataaaagctaaagaaattcttaatatgtatatagaatcttggaagcaaggagttaaaactatctattatgtaagaaataaatctttagaaatggatgaatgtacaagttgctcaagc

SEQ ID NO: 16058 - DNA, 744 bp, Clostridium botulinum
ttgaatatattagagaccaataatttaaatgtgtatttagacaaaaatcatatattaaaaaatttaaatttaaatatagaaaaaaataaagtaacagctataataggaccttccggctgtggcaaatctacattgcttaggactttaaatgggataataaaagaagagataaattttaatatagaaggggatatttactttaatggagagaatacagaaagtattcctttagagtttttaaggagaaaaattggttgtgtatttcaaagtccagcaccctttcctttttctatatacaaaaattttaattatgttttaaaatattatggaataaaagataaatctaaagtaaataagataatagaagaaaagttaaaattagtgggtttatatgatgaagtacaagataatttaaatatctctgctttaaaattatcaggaggacaacagcaaagactatgtataggaagggctttacttccagagccagaaatacttttaatggacgagccgtgttcagccttagatataaaaaatacagctataatagaaaaacttttattagagttaaagaagaaatataccatattaatagttactcataatttagcccaggctaaaaggatttcagatagtaccatttttatgttaaatggagaagtaatagagagtgggaagacagagaaagtatttaatagtccccaaaatgaggaaacaaagaactatataagcggaatttatggc

SEQ ID NO: 16059 - DNA, 1236 bp, Clostridium botulinum
atgaagatcatgagaatattgcatacctccgattggcacttgggaaagaaccttgaaggctttagtagaatggatgaacaggaaagatttatagaggattttattaacattgtggataaaaataatatagatatggtgataatagctggagatatatatgataacgggaatccaccggctagagcagaaaaaatgttttatgattgtataaaaaaaataagcaataagggagaaagattagttttaattatagcaggtaatcacgataatccagaaagattagttgctgcaagttctttagcctatgatgagggaataatacttatggggacccctaagactatagttccaaagggaaagtatgggaattttaaggtaataaattcagatttagcctgtttagaaataggggtaaaggaagaaaaggcagtgattatatctttaccttatcctagtgagaaaagattaaatgaaatactgtctaaagaaatggataatgatgaggatagaagaaaaacttattcagaaaggataggagatatattttctaatttacaggaaaaatattataaagataacactgttaatttagctatttctcatatatttgtaaatggatcagaggaaacggattctgaaaggccaatacaacttggagggagtctatcagtagatgtagacaagttacctaaaaaagcacaatatataggccttgggcatcttcataaaccacaaaaggtaagggggatagataatgcctattattctggttcaccactgccttatagtaaaagcgaaagaggatatagtaaaggatgcaagataatagatgtacatccaggggagaaagctgttattgaagaggtttattttaataactataaacctatagaggtgtggcattgcaacggtataaaagaggctataaataaatgtgaagaaaataaagaaaaggatatgtggctatatttacatataaaaacaaaggaatatataagtacagaagatataaaagccttaaaagaaataaaaaaagatatagtagagatagtaccagaaatagaggaaaaaagagaagaaacttttaatggaaatataaaagaaaaatctatggcagaattatttaaatccttttatttaaatcaaagaggaatagaggctagtgaagaattaatggatttatttttaagtatagctcaagaggaggatgaatatgaaaccgaagaaacttgtgat

SEQ ID NO: 16060 - DNA, 1068 bp, Clostridium botulinum
ttggtgtcagttttggcaaataaagttaatccagaaaaattaaaagccatagaagcagctatgggacaaatagagaaacaatttggaaaaggttctataatgaaacttggagaggatagtatattaaacgtagaatccatatccacaggaagcttagatttagatatagcattaggtatagggggagttcctagaggaaggataatagaaatatttggaccagagtcctcaggtaaaactactgtagcacttcatatattagcagaagcgcaaaaaataggtggggcagcagcttttatagatgcagaacatgctttagatccatcttatgctagaaatttaggtgttgatatagataacctaatagtttctcaaccagatacaggagaacaggctttagagataacagaagctttagtaagatcaggagcagtagatgttatagttgtagactctgtagcagctttagttcctagggcagaaatagaaggagaaatgggagactcacatgtaggtcttcaagcaagacttatgtctcaagccctaagaaaattagcaggatctataaataaatctaagtgtgtagctatatttataaaccaattaagagaaaaggttggtataatgtttggaaatccagaaacaactcctggtggaagagcattaaaattctattcttctgttagactagatgtaagaagaatagattctataaaacaaggtgatcaaatcttaggtaatagaacaagagtgaaaataaataaaaataaagtagctcctccatttaaaatggcagaatttgatataatgtataatgaaggaatatcaaaggtaggaaatatattagatgtaggtgttagagaagagctagttgacaaaagtggttcttggttctcttataaagatacaagattaggacaaggaagagaaaatgcaaaacaatttttaaaagataatatgaatatagccttagagatagaaaatactataagaaaaaaacatgatttaccagttgttgatgcaaaaaacttaaatatagagaataaaaaagaagacaataaggaagga

SEQ ID NO: 16061 - DNA, 225 bp, Clostridium botulinum
atgaaggctttagttgaaactatagcgaaggcattagttgatagcccagatcaagttcaagtgaatgaaattttaggagagcaatccgtaattcttgaactaaaagttgcacctgaagatatgggaaaagtaataggaaaacagggaagaatagcaaaggctattagaactgttgttaaggcagcagctataaaggaaaataaaagagttgttgttgaaataatt

SEQ ID NO: 16062 - DNA, 411 bp, Clostridium botulinum
atgagaatattaggtctagatataggtgatagaactattggaatcgccataagtgatccattaggttttacagcacagggaattacaactataagaagaaaaagcgaggcatatgatttagaagagataaaaaaaatatgtgataaatatgaagtggatactatagtatcagggcttcctaagaatatgaatggtacattagggccgcaaagtgaaaaggttctagagttttgtgatttaataaaagaacatttaaatattgaaataaaaatgtgggatgagagattaacgactgtagcagctactagagctatgctagaggcggatttatctcgctcaaagaggaaaaaaatagtagataaagtagctgctacttatatattacaaggatacttagatagtttatcaaaa

SEQ ID NO: 16063 - DNA, 177 bp, Clostridium botulinum
gtgttacatatggcatacaaaattacagatgcttgcgtaagctgtggagcatgtgctgcagaatgcccagttaatgctataagtcaaggagactctatatttgatatagatgcagacacttgtattgattgcggaaactgtgctaacgtttgtccagtaggagcaccagttcaagac

SEQ ID NO: 16064 - DNA, 1053 bp, Clostridium botulinum
ttgatcctaagatgcgtcaataaaggggggaatgtgatggagagaatattagaggtaagaaatttaagagtttcttatcatacttatgcgggagaagtacaatctgttagaaatataagctttcatcttaataaaggagagacccttgccatagttggagagtcaggatgtggaaagactgtgacagctaaagctataatgagattaatacaagaaccaccaggagaaattaaagaaggatcagaaataatttttaatgataaaaatatattagatatgaaggaacaggaattgagacagttaagaggtgctgatataagtatgatatttcaagatcctatgacttctcttaatcctacaatgaaggttgggaaacaaatagctgaaagtttaattattcataggggaatgaataaatcagaagcttttaaagaggctgttaatatattgaaattagtcaatatacctaatgcagaaaaaagagctaatcaatatccacatgaattttcaggaggaatgaggcaaagagctatgatagccatagctttatcctgtgatcctaaggtgcttatagcagatgagcctactacagcattagatgttactattcaagctcaaataatgaatcttataggagatttgcaaaaaaaattaaatacagcagttataatgataactcatgatttaggagtggttgcggatacagctcatagaatacaagttatgtatgcgggacaaattatagaaagaggaattacaaatgaaatattttatgaatcaaagcatccctatacttgggcattactccaatcagtaccaaggttggatacaaagcataagggagagctttactccttagaaggaactcctccagatttgattaaaccaccaaaaggatgtccctttgcatcaagatgtgaatattgcatgaaaatatgtaaagaacagattccaaaagtaacaaagctaacagaaactcatgaggtttcttgctggttacagcatcctatgtcacctaaagttcatagttcttttttatctgggggtgaaaaa

SEQ ID NO: 16065 - DNA, 477 bp, Clostridium botulinum
atgaatataagcattccgcaaattatagctgcaatattaaattttattatactgcttttaatagtaaaacacttttggtttgataaaataactgctgtagttgattcaagacaaagtgaaattataaataaaatagaagatacagataagaatcaaaaattagcattagaactaaaagaaaaaaatgaattagaactaagcaatgcaaaaaaacaaggtaaaactatagtagaagaatataaatcaaaagctgaaaatgtatatgaggatattgttaaagaagctcatgaagaagcagatagaataataaaaaaatcaagattagaagcggaaaggcaaaagaaaaatgcagaagaagaaataagggcagaagcagtagaacttgcagtattggtttcttctaaaacattagaaaaaactatagatgatcttgagcatagaagacttataaaggattttataagtaaggtaggtata

SEQ ID NO: 16066 - DNA, 756 bp, Clostridium botulinum
atgaacaaagaagggatcagtgatatgatgaaaattgtttctaaaaaaaatccaatacctcttcattatcagattaaagagatattacaagagatgatagaaaatgaagaattaaaacctggagatgctgtacctacggaaagagaactttgtgaaatccaaggtgttagtagaatgacagtgaataaggccataatgtctttagttaacgagggattattatatagagaacaaggaaaagggacttttgttgctaaacctaaagaaaataaagaaatagctggtttaaaaagttttagtgagataatgcaagataagggattaaaaacagaaacaagaattttattttttcacataaaggaggctacaaagaaaacaaaatctgttttaaatttatcagataataataacaaagttattgaaataagtaggcttagaatgtgtgaaggtgaaccagtggctatagaaaccgtatggataccacataatttatgtagtgatatggaaagacaaaccatagaagggaagtccctgtacgaaacatttaaaaacaaatataattatttccctgaaaaagcaaagcaaactatagaacctataattttaaatgaatatgaatgtaagcttttaaatcaagatgaaaatgctttagccttaatgtttagaagaactacttatataaaaggtgaaattccaatagagtacacaaaagcaatttatagaagtgatatatataagtatgagttggttttccag

SEQ ID NO: 16067 - DNA, 540 bp, Clostridium botulinum
ttgtctatatcatatataaataaaataaagataataaagggtgatattacaaaagaaaatgtaaatgctattgttaatgctgcaaatagtagcttgcttgggggtggtggtgtagatggagctattcatagagcaggtgggaataagatacttgaggaatgtaaaagtattgtaagtaaaataggtcaattaaagacaggagaagcagtaataacctctggagggaatcttaaggctaaatatgttattcatactgtaggacctatatggcatggaggaaagagtaatgaagaaactcttttagctaatgcctataaaaacagctttaaattagctgctgaaaaaaatattaaaaccattgctttccctaacataagcacaggggtatatagatatcctaaaaatcaggcagcaaaggttgcctataattcagtaaaagagagcttaataaaatatgaaaatatagaagaagtaagatttgtatgttttgatgagtacaattataaattatatcaggacttactatttgctgatactaga

SEQ ID NO: 16068 - DNA, 888 bp, Clostridium botulinum
atgttcgtaaacacaggaaaagaacttataagagtatgtgatgaaaaaaaattaaaaatatgggaatatactttaaaaatagaagcagaaagtaagaatgtaagtgaaaaagaagtatttgaaactatgagaaaagctcttaaggttatgcaacattcagcagaaataggaagagaaaaagaagttaaatctgtaagtggattaataggtggagatgctttaaagttagaaaaatattccaagggggaaaatacactaacaggaaatttcatggtaagggctatggctatggctatttcaacttctgaagttaatgcagctatgggaagaatcgtagcatcaccaacagcaggatcagcaggaatattgccagctgtagtaatagctgcaggagaaaaattaaataaaagtgaagatgatttagttaaggctttatttacagcctctggattaggaatacttatttctaaaaatgctacaacagcaggagcggaaggtggatgtcaagcagaatgtggttcagccgcagcaatggcatctgcagcagtagtagaaatgatgggaggaagcgtagaacaagctttagatgcaggagctatagttataaaaaacatactagggcttgtttgtgatccagtggcaggacttgtagaaataccttgtgcgaaaagaaatattgcagggacagtaagtgctttaactacagcagacatggtaatggcaggagttacaagtcatattcctttcgatgattcggtagaggcaatgtatagagttggaaaacaacttccatcttgtcttagagaaacagctttaggtggggtggctgttactgaggcagggctaaagcttaaagaaaaagtattcggatgcacaggttgtaaaaaa

SEQ ID NO: 16069 - DNA, 495 bp, Clostridium botulinum
atgagaattgatcctagcactttaaatttaaaagaaaaagttgttcatataaacagagttgctaaagttgttaaaggcggtagaaactttagatttagcgtactagttgttgttggagacgaagcaggacacgttggcgttggtacaggaaaatctatagaaatacctgaagcaataagaaaagcaatagaagatgctaaaaagaacatagttgaagttaaaacagtaggaactactgtaccacatgatataatcggaaagttcggtaagggagaagttcttataatgacagctaaagaaggtacaggagttatagcaggtggtcctgttagagccgtacttgaacttgctggattaaaggacgttagagctaaatcaaaaggttctaacaacccaacaaatatggttaatgctacaatagatggattagcaagattaagaacagttgaagatatagctaaacttagaggtaagactgtagaagagattttaggt

SEQ ID NO: 16070 - DNA, 576 bp, Clostridium botulinum
atgaaaagaatttgtgtttattctggctctaatctaggtttacgttctgaatataaagaaagtgctaaactactaggtaaaatattggctgaaaacaaaattgaattagtatatggtggttcaagaataggtcttatgggagagatatcaagtgaagttttaagaaataacggaaaagttattggggttatgcctaaaggtcttttcgcaggtgaaatggttcataaagatttgactaaacttattgaagttgaaaacatgcatgaaaggaaacaaactatggctgaactttctgatggatttatagcacttcctggtggactgggtacttttgaggaactatttgaaatacttagttgggctcagcttggtattcataaaaagcctattggcatattaaatatatcaaacttctttgaccctcttttacatatgattaaaaacacttgtactgaaggttttatgaatgaatcaaatattaagcttatttcagtttcagacaatcctccagaattaatcaaacaaatgaaaaactatgtgccacctttaatggaaaataaatggcgtgaattagta

SEQ ID NO: 16071 - DNA, 807 bp, Clostridium botulinum
atgtttaagatatatgctgtgtcagattctattggtgaaactgcagaacaagtagctaatgctacagcataccaatttggtagttctgtaaaagtagaaagagtaccttatgtaaaaacttttgaagatgttaataatcttataagtataataaaaaatcccaatgaagccatgattatatccactattgttttagtagacataagggaatttttagtccaaaggtgtgtagaatctggcattcatatatctaatgtattgggcccttgtataagtttagtatcaactatattaaataaaacaccagaatataaacctggtgctgtttgggatatggataaaaaatactacaaaaaaatagaagcaatggagtttgctataagatatgatgacagtaaagatcactcaggtataaagcatgcagatattgttttaataggcttatctaggacatcaaaaacaccactaagcatatatttagctaataagggcataaaagctctaaacataccattaatgccagaggtacctgtaccagaagaattatttgaaatcgatagaaagaaaataataggacttaccatagatcctatgcatttaattgaaataagaaggcatagagtagataatatgatgaaaattcctacagaacttaaatatgctaatgctgaaagggttttagatgaattagaatttgcagacaagattatgagaaaattaaaatgtaaagttatagatgttactaaaagagctatagaagatacagcattgattataatggaaagtgttttttctgataggataata

SEQ ID NO: 16072 - DNA, 2106 bp, Clostridium botulinum
atgtcaatgacagctgaacatgcagaagaattaaaaaatgaacatgctgtagtttgttgtagaacagaagaaggaacaatattatcagcagataatttagaagatccagaaatatttccggatatggtagattcaggactattaactatcccagataattgtttgaaagttggagaagtaataggtgctaaattgttgaaaactgtagattcattaactccactaacttcagatatagtagagggtgctaaaaaaataggcaaagaagataaagaagattctactactgaagaagcattgactgaaggaaatgaaaaagcagttttaaaatataacctaaaagcaggagatattatgaaagctagtgacttagaaaacccaatgcatttccctaaacttgtagattctcttttaatttcattagatgaaagagtacttacaagagaagaagttgtaggggctaaattaagtgtagatacaccagctttaactcctgtaacagcagatatattagaaggatttgaggaggaagtaaacatgagtgttgattcaaaagcaacagtaagtggtggaactttaagaatcaaaattgctgaaggtagaggaattgatatagaagttcctttaaatggcaatgtaggtgctggaaaatcagcaaaggttccaacagtaaaagctgaaaaaggtgaagtagtagcagctccagcagtagaagctaataaagaagttaaattagaagaaaaagttataagaagtcttactagaaaacattataaaatagacaaaatagaatttggctctgaaacaaaaatagaaggaacaactctttatataagagaagggatttctcaagatgctaagaatgtgagctcactagtaaaagatgtcaaaatagatataataactccagataaatacaatacttatagtgaaactataatggatgtacaaccaattgctactaaagaaggagataacaaattaggaacaggtgtaactagagtattagatggtgttattgtaatggtaacaggaacagatgaaaatggagtccaaataggtgaatttggttcttcagaaggtatattagaagaaaatattatgttcaatagaccaggatcaccagataaaggtgaaatatttataaaaacacaagtaactataaaagaaaagactaatatggaaagaccaggtcctatggctgctcacaaagctactgatttcataactcaagaaataagggaagctatgaaagctttagaggatgagtctttagtagttaatactgaaacttttgaacaaaaaagaagaccaggaaagaaaaaagttgtagttgttaaagaaataatgggtcaaggtgctatgcacgacaatttaatattaccagtagaaccagtaggttatttaggtggtaaaccaaatgttgatttaggaaatgttccagtaatgctttcaccacttgaagtattagatggtggtatacatgcattaacttgtattggacctgcttctaaagaatgttcaagacattattggagagaacctcttgtaatggaatgcatgaaggatgaagaattagatttatgcggagttatatttgtaggaagtccacaaattaacagtgaaaaattctatgtatcagaaagaatgggtatgatggtagaagctttagatgttgatggtgcttttgttacaactgaaggctttggaaataatcacattgactttgcaagtcacgtagaacaaataggtatgagaggaataccatgtgtagcattctcattctgtgcagttcaaggcgctctagttgttggtaataaatacatgaaatatatgatagataataacaaatcagaaggcggaatagaaaacgaagtgctagaatgcaacacattatgcccagaagatgctataagaggcgttgaaatgcttaaagctgctatgactggagaagatgttaaaaaaccagaaagagcttggaatgcaaatgttaaagaaaataacttagaattaatagaaaaagctgaaaatgcgaaaatagaaagagtcttaaatgaaacttcaataccaatgagtgaaaagagaaaagaaaaatacagcacaaag

SEQ ID NO: 16073 - DNA, 1074 bp, Clostridium botulinum
atgttagaaagacttaattttatagaaaataaatatgaagaactatcaaataaaataagtgacccttcagttatggcaaatcaaaaagaatggcaaaaactttgtaaagagcatgctgatttagaaattatagttaatacatatagagagtataaaaaggcacaagaagatttagaatcagacaaagaaatgctaaaggaagaatcagacaaagaactaagagaaatggcacaggaagaaataaaagagttaactttaaaattagaagatttagaaagagaattaactatattattactaccaaaagatcctaatgatgataaggatgtatttatagaaattagagcgggtgccggtggagaagaggcggctttatttgcttctaacttattaagaatgtatacaagatatgcggaaagaaaaaattggaaagtagaaactataagcttaaatgctacagacataggtggttttaaagaagtaactgtagcggttaaaggaaaaggtgcttatagtagattaaaatatgaaagtggagttcatagagttcagagagttccagacacagaatcaagcggtagaattcatacttctacagctactgtagcagtacttcctgaggtagatgatgtagatataaatataaatgctaatgatttaagaatagatgtttatagagcgtcaggacatggtggacagtgcgtaaatactacagattctgctgtaagaataactcacttaccgacagggcttgtagttacatgccaagatgaaaaatcacaattaaaaaataaagagaaagcgatgaaagttttaaaggctagattgtttgaagctgcagaggctgaaagagcggcatctatagcagaagatagaaaaagtcaggttggtacaggagatagaagtgaaagaataagaacttataactatcctcaaggaagaatcacagatcatagaataggtttaacattatacaaattagaaactttcttagatggtgatatagatgaagctatagaagctttagtaacagaagatcaagcggaaaaaatgaaagatttaggtagagttaat

SEQ ID NO: 16074 - DNA, 588 bp, Clostridium botulinum
atgaaaaacttaaatgatatgaacagtgaagaattaggaaaatacataaaagatacagaaaatcaaatacataatttattagatgaatacataaatagggttaacaataaaatagataaaaataagaatgctaaaactttgaaagagaaagcatatgcattaagtaaactatataaatatgtagaatgggtaaatgatggtatagaaatgaataataatgtcaagaataggattaggatagttcctaaacgaggtgaagtttggacctgtgaattaggtcaaaatataggatcggaagaaaataaaattagaccggttattattatacaaaatgacacagggaaccaaaatggacctacaaccatagtagtacccatttctaataggccaaagaagatagctgtacatatttccataagaaatggagattttgaattagctaagggagaaaaaatggaaataacaggaacagtgttggcggaacaaataagaattgtatcaaaagctagacttggaagacacgtagccactttatcagacaaattcatgcagcttttggattctaaaataaaaatttcgctagatttg

SEQ ID NO: 16075 - DNA, 1404 bp, Clostridium botulinum
atgaaagatgtggttataaatactataaaaaaatataatatgattgaagctaatgacaaaataatagtaggagtatccggcggaccagattctatgtgtcttttacatatgttatgtttattaaaaaatcaattaagaataaaagatatatatgtggctcatataaatcatggtgttagaggagcagaatcagatgctgatgaaaaatatgtagagaatttttgttatacgaataatttaggatttttttctaaaacaataaatatggataagatagctaaagaaaaaggaatttccagtgaaagtgcaggaagagaagcaagatatgatttttttaactatttgagaaaagaactaggtgctcaaaaaatagcaacagctcataatgcaaatgatcaagcagaaactgtacttatgagaataatgcgaggaacaggattacagggattaataggtataaacccaataagagatgatttatatataagacctttaataaatgtattaagagaagatatagaaaattattgtgataaatatgagctaaatcctagaatagataagacaaatttacaaagcatatatacaagaaatagaattagattagaattgataccttatataaaagataattttaatgaagatatagtaaatactttatgtagattttctaatatagtttctaaagacaataactatttagaagaagtatcaaaagataaatttgaaagatattgtactaaaaaattacaaagggtaataatagataagagagcttttttagagcatgaaagtatttcaactagaatattaagagaggctatactttatataaaccaaaacttatataatcttgaaatgaggaatatatatgatgttttagaattaagtttaaatacaacaggtaaatttgtaaacttgcctagcaatataaaagctgaaaatatttatggagatatacatttatataaagaagataattttataaagaaggtaaataatgttcagtgtgaacttaaaataggatttaatcaagtagaagatttaaatattaatttaaaaatatattctataaaagatcataattataatataaatgataataaatatatacagtattttgattatgataaagtaagtaatgaaaaaatttatttaagaaatagaaaaaatggagataagtttactcctttagggatgaaaggtagtaaaaaattaaaagatttttttatagattcaaaaatacccagagagcaaagagataagttaaaacttgtatgttttggggaagaaatagcttggattataggttgtagaacaggcaataattttaaaatagataaaaatacaaagaatgtattagaaataactgttgaaagaggggaagcaaatggatttgataag

SEQ ID NO: 16076 - DNA, 678 bp, Clostridium botulinum
ttggagaagttttcaccattattttatattaacttatttggatataaatttggtattacctcaagtttagtaattcaatgggtaattattgcaatagtagcgttattaagtattatattaacaagaaatttaaaaaaagttccagacaaaagacaaacagttatggaaatgatgctggatttagttagaaatctagttaatgaaaatatgggagaagaatttaaaagttttattccctttataggaacacttatgatatacttattgcttatgaatttagttgggttattaggcttgaaaccaccaactttagattatagcgtagtgttaggaatggcattaatatcttttgtggtaatacaaggatatgctataagaaagactggattaaaaagttattttctaggatatggtaagccatatttatttttattgcctttaaacgtaatagagagagttatgcttccagtatctttgagtttaagattatttggtaatataacagcggcagtacttattatggatttggtttattcagctttagctagtataagttggtttgcccaattagtagttcctattccacttcatatatattttgatttgtttgatggaactattcaaatggttatatttgttatgttaactatgattaatataaaagtaatagcagaacat

SEQ ID NO: 16077 - DNA, 669 bp, Clostridium botulinum
atgggtcaaaaagtacatccacacggcttaagagtcggcgtaattaaagaatgggatgctaaatggtatgctgataagaaaaattttgctgacaacctagtagaagaccacaaaataagaaattttgttaaaaaaaattcttatgcagctggtgtgtcaagaatagaaattgaaagagcagcaaaaagaataaaattaaatatatatactgctaaaccaggtatgattataggaaaaggtggtcaaggaattgaatcactaaaaaacaaacttcaaaaaatcgtttcaaacaaaaatattttaattaatatagtagaagtaaaaagacctgaagcagatgctcaattaatagctgaaaatatagctcaacaattagaaaaaagaatagctttcagaagagctatgaaacaatctatacaaagagcaatgagatcaggtgttaaaggtataaaaacagcttgctcaggaagacttgctggagcagaaatagctagaacagaacactataatgagggaacaattccactacaaactttaagagcagatattgattatggatttgctgaagctgatactacttatggtaaaatcggtgttaaagtttgggtgtataaaggagaagttcttccagctagaaagaatataaatgaaaaggaagaagctaacgca

SEQ ID NO: 16078 - DNA, 813 bp, Clostridium botulinum
ttgaaaaaatttttgagtattttaattataggaactttatcattaggactatttggatgtgctaatggaaaagtagaagaaaaaaaagaagatacatccagtaagaaagaatctaaagaaaatcttgatataactgtatctgcagctgcaagtttaacagaggccttaacagagatacaaaaaaaatatgaaaaagaaacaggagctaaagtttcaataacttttgatgcttctggtacaattcaaaagcaaatagaacaaggagctccaacggatttatttatatcagcatctaagaaaaatatggacaaattacaggaagaaaaattaatagataatgatacaagaaaagatttactaggaaataaacttgttttaatcgtatctgaagaaaataaagataaaaaaattgaaaaagtatctgatttaaaaaatattgattctaaattagctataggagaacctgaagctgttccagcaggaaaatatgcaaaagaagcgatagaatactataaattgtgggatgttttaaaagataaaattgtatacggaaaatctgtaaaacaagtcgctaaatatgtagaaagtggagaagctgctgcaggaattgtttataataatgatgctaaagtattaaagaaaagttacataagatatacttttgatgaaaaatctcataaacctattgtttatccaatggcagtagttaaaaatagtaaaaataaagagggatcaaagaaatttgcagaatatatccaaacaaaagaagctcaagatatatttataaaatatggatttgattatatagcaaaa

SEQ ID NO: 16079 - DNA, 954 bp, Clostridium botulinum
atgagtaatataattaaatataagaaaaaaattttaaatggagatttactaacaaaagaagaagtagaagagcttttagaggaagatattacagatcttgcagcaacagctaatgaaattagagaatctctatgtggaaataaattcgacttatgtacaattataaatgggaagagtggaaggtgccaagaaaactgtaaatattgtgctcaatctgctcactttgacacagatataatagagtacaacatcttaaatagtgatagaattataaatagtgcaatatcaaattataataaaggagtacatcgtttttcagtagtaacctcaggtcgtgcactaaataataatgaagtagatacattgtgtaaaacctattcaaaattaaaagaaacatgttctattagactttgcgcatcccatggtttattaaaatatgaagatctaaagaggttaaaagattctggagtaacgcgttatcacaataatttggaaacctcaagaaaattttttacaaagatatgcactacccataaatatgatgacaaaattgaaactataaaaaatgcaaagaaagctggtattgagatatgtagtggtggaattattggtcttggagaaaccatggaggaccgaatcgatatggcttttactttaagagagctttcagttgaaagtgttccagttaatattcttaatcctattaaaggaacaccacttgaaaatcaagaaattttatcctatgaagaaataattaaaactctagcacttttccgttttattttaccaacagtgcaaataaggttagctggaggtcgtactattataagtgataaggggaaaaaggccttagaaagtggagtaaatggagcaatttctggagatatgctaactactttaggaattgaaacttctgaggacattaaaatgataaagaatttaggatttgaggta

SEQ ID NO: 16080 - DNA, 771 bp, Clostridium botulinum
atgatagatattcacagtcatataataccatctgtagatgatggggcaaatgatttagattattctttaaagatgcttaaaatggcagaagaaagtggaacaaaaaaaatagtagctacacctcattattatatgggtaggtatgaagagaaatattttaatataaaaaaatatctagagcaattaaatgaaatagctaaaaaaaataatataaatatagaaatatttttaggacaagaggttcttatacataaaaaaactatagagttttatgagatgggatatatagggactataaataatacatcctatatgctagtagaatttcctatgactacttgggaaaattattatatggatgttctttatgaattaaaagtaagaggcataaatcctataatagctcatccagaaagatataaatttattcatgaaaatatttgtaatataaataaatttatagaggaagagtatttagtacaaataaatacaggaagtatagaggggatatttggtaaggatgttcaaaaaatatcaaaggagtttataaaaaatagaatatgtaactttataggctcagatgctcatagtttgaatacaagaaaacctgatatgaataagggggctgagattataaaaactatggataagtctctttatgatgaaataattataaattcaaataatcttcttgagaataaagaaataattagaagttatagcaaaatagaaaggaaaaaaaatatatttagctttctaaaaaatatgatt

SEQ ID NO: 16081 - DNA, 1836 bp, Clostridium botulinum
atggtttggaaaaccattaaaaaattaagaaagaaggagataataatgaaattaaaaacacatgacgatagacttacccttacaaatggaagttatcatgctttagtaaatgcaagaaagcctaaaggaattgaagataaaaaagcttatttaataggtacaggaattggtgctttagctgctggttgttttttaattcgtgatgctcacatggatggcagcaagattaccttcttagaacaattagacattcctggtggatctctggacggagaggttcgtcaaaatatggattatgtagcacgtggtggacgtgaaatgggtcaccattttgaggttttatggggcttatttagttcattaccatctacagaagaccctaatatgactgttttagatcatttttattatacaaactacgatgatccaaactttagcaattgtcgtatcactaaaaaccaaggtgagcgttatgacaatggaaaatttaatttgggccaagacttggcaaaagaattagctgcttttgtaaatgtaacagatgaagaacttgaagataaatctattgaagatgttctttctgaagaacttttaaacactgatttctggacatactggagaacaatgtttgcttttgagaattggcatagtgctttagaaatgaaattatatatgaatcgtttcattcaccatgttgggggactgccaaatctttctgctttacaattttcaagacatgatcaatacacttcatttgtaaaacctatggttaaatatttagaagatcatggtgctaaatttgaatatggagttactgttaataacgttgagttctcaatttcagatgataaaaaggttgcaaagagaatagatgcaacagataaagctggaaaagatatctctattgatttaacagaaaacgacttagtgtttattactaatggttctatgactgaaggttcaggatatggtgatgataacactcctgcaccatttaatagagagccagaaggatgctggaagctatggagaaatatagcagctcaatcagatgaatttggaaagccagataagttctgtacagatacagaaagatctaattgggagtcttgtacagtaacttgtcatgatgaacgtgttcctgagtacattgaaaagatcacaaaacgttcaccatacggtggacgcactgtaacaggcggaatagttacagctcttgactcttcatggttgatgagttggacaataaaccgtcaagaacaatattatggacaaccggaaaaagatgttgttgtttgggtatatggtttattctctgatgttcctggagattatattaaaaaacctatgagagattgtactggtaaggaaatcacaaaagaatggttatatcatataggtgttcctacagataaaattgaagaattagcagaatcatgtagcgcagttcctgttatgatgccatttatcacatctcaatttatgcctcgtgcagctggagatcgtccatatgttgtaccaaagaatggagtaaactttgctttccttggacaatttgctgaaacattggatgatccaggccgtgatactgtatttactatagaatactcaggacgtacagctatggaagcagtatatgttttaactggagttgaaaaaggagttcctgaggtattttcttcaagatatgatatccgttatttattaaatgcaggtgtatgtttattagatggagaaaaaccaaaacttgatttaccaccaatggctaaacgtaaagttttaaaacaagtagcaggaacagacattgaaaagttattaaaagaatatggaattatt

SEQ ID NO: 16082 - DNA, 1839 bp, Clostridium botulinum
atgaagagcaataaaggtttattaagtaaaatatatgcaactttagtttatgtttttttatatttgccaatctttgttttagtagtattttcttttaataagtctaaactaaatgctacctttacaggctttacactagattggtacaaaaatttaataaataatgttcaaatattagaagcattaaaaaacagcttaataatagcttttataagtacttttttcgcagtaattataggaactttagctgctataggtatgtatagatataaatttaaggggaaaagggctatggagggactgctttatatcccagtagttatccctgaaatagttatggggatatctatgcttgcctttttctcttcccttaatttgcctgcaggacttataactttaatacttgctcacataactttttgtatttcttacgttattatagtagttagagctagactagatgggtttgatgctgcactagaagaagcagctcaagatttaggtgctacaccttggcaaactttaacgaaggttacactacctgtaatatcaccaggaattatatcaggagcactgcttgcttttacactatctttagacgatgttattataagtttttttgcggcaggaccagatagcaatactttaccacttaaaatattttctatggttaagtttggtgtaacccctgaaataaatgcactatccactgtgatgatggtatttactttaagtatggtagttatagctgaaggtataagaagaaatatgcttaaaaataaaaaagtaaaaaagacactatcctttatagtaatattattaatggttactggggttggctttactatttttggtaatacagctaaaacagaaaagcaagtgttaaatatatttaactggtcagaatttttaccacagtctgttattgaacagtttgaaaaagaatacaatgtaaaggtaaattattctactttttcctctaatgaagaaatgcttgcaaagttaatgggaggaaatgtgccctatgatttagtagttaccagtgattatgctattgaaataatgactaaacaaaaattaattcaaccaatagacaaaaataatgttccaaacttagctaatatagataaaaatgtacttgatttagcttttgatcctaaaaatacttatagcttaccttatatgtggggaggcaacaatatagtaatagataagactaaaataactaaaaaaattacttcttttgatgatctgtgggacagtgaatttaaaaattctatggtaattttggatgatccaagggtgatgataggattagctctacaaaagaatggatattctataaattcaaaaaatccaaaggaacttcaaaaggctaaagaggatttaataaaattgatgccaaatgtaaaagcatttgatagtgaatctccaaagactttacttataaatggagaagcttctataggatatgtatggggaacggaagcatatcttgctaaacttgaaaatcctaatttagaagtagttttaacaaaagagggagtaattcctcaatatgataactttgtaatacctaaaaaggctaaaaataaaaaattagcagaggaatttataaacttcatatataaacctgaaataagtgctcaagtgtctgaggaatttccttatgcaaatccaaacaaggcagcataccctttaatggataaagataaattaaatgatatagctgtttatccaccaagagaagcggtagaaggaaatgagcttattaaggatgtaggggaaactacaaaattatacgatgacatatggactgaaattaaaaatagtaaaaga

SEQ ID NO: 16083 - DNA, 651 bp, Clostridium botulinum
gtgatttctttgaaaaatatagagggagcaatttttgatttagatggaacattaatagattctatgaaaatatgggaaaaaatagactatgattttttaaataaaaggaacttaaaggttcctcaagatttaaaagataaaatagaaactcttacctttgaggaaggggctaatttttttaaaaaaaactttaaactaaaagaatcgcaagaagaaattttaaaagaatggcataacatggtagttaaagaatattctcataacataaaattgaaaaataatgtgagggattttcttataaaattaaaaaataaaggagtaaagttggctattgctacaagtaatactcccgaactgactaaattagtattagaaaataataaaatattggatttatttgattccataacaactattagtgaagttaatagaaataaaacctttcctgatatatatcttttatgtgcagaaaagctaaagcttcctgctgaaaaatgtgccgtatttgaagatatacttcctgccataaaaagtgctaaaacggctaaaatgaaaaccattggaatttacgatgattcatctaaagatgatgaaaataaaataaaggaaatagcagattattatatttatgactataaagaattaataata

SEQ ID NO: 16084 - DNA, 612 bp, Clostridium botulinum
atggataaaatatacaatttaaatgaattgattaagtctattcctcttattattggatttatggtacctggatatatttttttggaaattaaaaatttttatactaaaagtaagagagaaaaagatgataatataatattgaaaagtttaattataagttttgtaattaatagcattacaaatatttttatatcagaaaacaattatctttccaatataatttcaattatactggcaattgtagtttcagtattatatgtgaaattcatatattctagtcatatggagaagactacacataaatttaagctatataaaacatttagaaaagatgcatttgatgatgttgttgatttagaattaggaatatggatgtatatttatttaaatgatgagaatataatatattcaggaaaattaatttattatgaaaatacaacagaagataatcatagatatattcagctatcaaattattcgtgttattcttatgatggagaagaaatatgcaattatgtagatgataattgtagaactgttctgctaaatatcaaagatgtaaaaagaatagaattagtttatgatgataatagtactaaaataaagagctca

SEQ ID NO: 16085 - DNA, 945 bp, Clostridium botulinum
atgttagaaatagaaaagccaaaaatagaatgtgttgaaaatgctgaagatggttcttatggtaaatttgtcattgaaccattagaaagaggttatggaataactcttggtaatgctttaagaagaattcttttatcgtcattacctggagttgctgcagaccatataaaaattgacagtgttcttcatgagttttcaacagtacaaggtgtaaaagaggatgttacagaattaattcttaacatcaaatgtttagcacttactatgaatggagaaggtccaaaaactatatatatagatgaagtaggacctaaagaagttacagcagctgatatcaaaacagacggagatgttgaagtaataaacaaagatttacatatagcaacccttgacgaaaatggtaagatgtatatggaaatcaacgttaatcgtggtaggggctatgtaactcaaaacaagaataaaactaaggatatgccaataggaagtatagcagtagattcaatttatacacctgttaaaagagttaacttttccgttgaaaatactagagttggtcaaataacagactatgataaattgactatagaagtttggactaatggaactataagaccagaagaagctgtaagtttatcagctaaaattcttatagagcactttaagttatttatgactttaactgaccatgcagatgatatggaaatcatggttgaaaaagaagaagataagaaagaaaaggttctagaaatgacaattgaagaactagatctttcagtaagaagttataactgcttaaaaagagctggaataaatacagttcaagaactatgcgaaagaagcatggatgatatgatgaaagttagaaaccttggtaaaaagtccttagaagaagtagaacaaaagttagaagctttaggattaggcttaagaaaaagtgaagat

SEQ ID NO: 16086 - DNA, 3582 bp, Clostridium botulinum
ttgagtgataaaaagtttacacatcttcatcttcatactggatatagcttattggatggggctggaaagataaataatataatagccagtgctaaagaactgggtatggatagtatagctataacagatcatggagctatgtatggatgtgttgatttttataaagccgctaaaaatgcaggattgaaggctattataggatgtgaagtttatattgtccccaaatcaatgagtataaagaatagtgatcctaataacaagatttatcacctagtgcttcttgtgaaaaatgaaataggttataaaaatttaattaagatagtttcaaaggcatctattgatggtttttattataaacctagaactgatcaccaatttttaaaagaccatagtgaagggctaatagctttaagtgcttgcttaggtggagaaatacaatcaaatttgttaaatgaaaataaggaaaaagcaaaagaaattgcattattttataaatcaatattcaaagatggtttttatcttgaacttcagtatcatggtaatgacgctgagagaaaagttaatgatatgaatataaggctagctagagaacttaaaataccacttgtagctacaaatgatgtccactatatagaacaaaaagattctaagtttcatgatattctattatgtatacaaacagggaaaactgtaaataaagagaatagactaagatatccttcagatcagttctatttgaagtctgcagacgaaatgtgggagatgttttcacatgttccagaagctttaaaaaatactgagaaaatagcagaacaatgcaattttcattatgattttcatacttcaaagcttcccaaatttttactaccagaaggaacagatccttttgaatatatgaaaaaattttgttttaaaggtctaattaagcgatgtgatttgtttagagatctcttaactaaatcatttaatataaatgaaataatagcattgggtaaagaaaatgaagaagctaagatttatatagatagactccaatatgaactttctgtaatagatcatatgggatatgtagattactttttaatagttagcgattttataaagtttgcaaatgagaaaaaaatacccacaggcccaggaagaggctctggagcaggatctttagttgcatatactttaggaataactaagattgatccaataaaatatggtcttatctttgaaagattccttaatcctgaaagaataagcatgccagatatagatagcgatttttgctatgaaagaagaggagagattatagattatgtagtagaaaaatacggaaaggaaaacgtatcacaaataataacatttggaacaatggctgcaagagtttgtattagagatgtaggaagagccatgaactactcttatgtagaagtggataaaatcgcaaaaatgatacctattgtgcctggaataataattactatagataaggcattagctctaaatccagaattaaagaatgagtatgaaaataatttaagggttaaagaattaattgatgttagtatgaatttagagggactgccaagacattcttcaacacatgctgcgggaattattatatcatcaagccctatcggggactatgttccacttcaaaaaaatgagcataatattgtatcccaatttgatatgactacacttgacgaacttgggtttttaaagatggattttttagggctaaagactttaactgtattgaaagatgctgttgatatgataatgcaaaaccacaatgtagatatagacttagataaaatagatattaatgataaagaagtatataagatgattggagaaggcaaaactattggaatttttcagttagaatcaacaggtatgacttcttttatgaaggaacttaaaccagattcattagaggatattatagcaggaatatcactatatagaccagggccaatagatgaaattccaaaatatatagaaaataaaaaaaatcctgataaaataacgtatttgacaccacaattagaaccaatattgaagattacatatggttgtttagtttatcaagaacaagttatggaaattgttagaaaactagcgggctattcaatgggacgtagcgaccttgtaagaagggctatgtctaagaaaaaacataaagttatggaagaggaaagaaagaactttatttatggaattgttaaggaagatggagaaatagaagtccctggatgcattagaaatgaagtatcagaaaaaatagggaatgaactatttgattctatgatggattttgcctcctatgcatttaataaaagtcatgctgtcgcttatgctctggtagcttatcaaactgcatacttaatgaagtattatccagctgaatatattgccgcaaaactaaattcggtgatgggggacaatgggaaagtagcatattatataaattatgctgaaagtttgggaatacaggtacttcccccagatataaatgaaagtttttctaaatttatagttgaggataacacaataagatttggtcttgatgcaataaaaaatgtaggtataggtgcagcgaaaattattgttaaatcaagaaaaaagaatggaaactttaagtcacttattgactttgctagtaaaatagatttaacaaccataaataaaagagcaatagaaagtcttataaaagcaggtgcttttgattgcttcaaagtatttagatctagacttcttgcagtatatgaaaaagttttagacagtatcagtaatcaaagaaaaaggaatatagatggtcaggtaagtctttttaatgctgataatacaatagttaacatacctataataaaatatcctgaaataaaagaatttgataaaaaatatctacttgcaatggaaaaagaaatgctaggaatttatataacaggacatcctttagatgaatatgcacagagtttaaaaattcaaacttctattagaattgaaaaaatcttatgttctcataacaaagtgctaaatgatgattcaattatagaaatatcaagcgataataacattataagaggagatataaatgatggtgaaagagttgttattggaggaataataactaaagtatcaagaaaaataactagaaataatactattatggcttttttaaagcttgaagatcttagtggaattattgaagtaatagttttccccaaaaccttagaaaatgttaatccactgataaatgaagattcattggtagttataagaggtagagtatccctagcagaagatgaattacctaaactaatatgtgaaaaaatacatccacttgaaaaactcaatttatctaaggtatatattagagttaaggataataaaaaagtaagaacagcaaataagtttttaaaaactatactaaaatctcataagggagatacccctatatatatattctctgaaaaggagaaacaaaattttagacttagtaaaaatttattgatatccttagatgaagatatactgtctacattaaggagctattttggagatgaaaatataaaagtcgtggat

SEQ ID NO: 16087 - DNA, 2100 bp, Clostridium botulinum
ttgtcaaatttgaaacgatgggaggaaaagcaattggcgaacaaagaatatccattggcaaaatttcgtaatatcgggattatggcccatatagatgcgggaaaaactacagcaacagaacgtatattattctatacaggaaaaactcataaaataggtgaaactcatgagggtgcagctacaatggactggatggaacaagaacaagaaagaggtataacaattacatctgcagcaacaacttgtttttggaaagaccatcaagtaaatataatagatacaccaggacacgtagattttacagttgaagttgaaagatctttaagagtattagatggtgcagtaacaatattagatgctaaaagtggtgttgaaccacaaacggaaacagtgtggagacaggcagacaattataaggtaccaagaatggtatttataaataaaatggataaattaggggcagactttttaatgtctgtaggaacactaagagaaagattacatgcaaatgcagtgccacttcaattaccaataggtgcagaagattcattttcaggaattatagatcttgtaaaaaatgatgctgttatttacaaagatgatttagggactgtaatggatgaaacagaaattccagaagatatgaaagaaatagctgaagaatacagaacaatgttattagaagctgttgcagaagtagatgaagacataatgatgaaatacttagaaggtgaagagatttctgtagaagaaataaaaacagccttaagaaaaggtgttttagcaaacaaaatagttccagttctttgtggatcagcttacaaaaataagggtgttcaattattactagatgctataattgaattcatgccttcaccattagatatagaagacgttaaaggaacagaacctacaacaggtgaagaaatgacaaggccagcagatgcaaaagctccattagcagcattagcatttaaaatagccacagatccattcattggtaagttagcatttactagaatttactctggtacaatgaagagcggtacgtatgtatttaactctaacaaaggcaagagagagagaataggaagattggttaaaatgcatgctaaccacagagaagatgttgaagaattaaaggctggggaattaggagctatagttggtcttaaagatacaactacaggagatacactttgtgatgatgcagacccaattatacttgaaaacatggaattcccagaaccagttatagatgtatcaatagaaccaaaaacaaaagctggtcaagaaaagatgggaatagctttagcaaaacttgcagaagaagatccaacatttagaacatatacaaaccaagaaacaggtcaaacaattatagctggtatgggagaacttcatcttgaaataattgttgatagacttataagggaatttaaagttgaatgtaacgtaggccaaccacaagttgcttataaagaaactatcaaaaagcatgttaaagctgaaggtaagtttataagacaatcaggtggacgtggacaatacggacattgttggattgaaatgatgccaactgaaggagaatatgaattccaaaatgctgttgttggtggatcaataccaaaagaatacattccagcaattgacaatggtattcaagaagcttcacaaagcggtataattgcaggatatcctgttattaactttaaagttaaattatttgatggatcataccatgatgttgactcatcagaaatggccttcaagattgcaggttctatggcctttaaaaatgctatgtcaaaagcagatgctgtgttattagaaccttcaatgaaagttgaagtagttgtaccagaagaatatatgggtgatgtaataggtgacatcaactcaagaagaggtagaatagaaggaatgactccaagagcaggtgcagaagtaataagagccttcgtaccactttcagaaatgtttggatatgctactacattaagatctaagactcaaggtagaggaaattatgtaatgcaatttgatcattatgaagaagttccaaagagcattcaagataaagtaattggagaaagaaaa

SEQ ID NO: 16088 - DNA, 882 bp, Clostridium botulinum
atgagtaaggtaaaatttatatataacccatattcaggagaaaaggctataatatctcaaatagacaaagtaataagaatacatcagaaatatggatatgaagtagtgccttataggataagtttagaatatgatcttgatgatgcttttaaatctattgatgaaagctataaatatatattagtagcaggtggagatggtactgtagacaatgtggtaaatcatttaaaaaaattttcaattgatcttccaattgcaatattacctacaggtactgctaatgattttgctaaatttattggtatgccaacaaatgttggagaggcctgtgagcaaatactaaagagctctgtaaaaaagattgatttaggaaaaataaatgataaatattttattaatgttgctagcacaggactatttacagatgtatctcaaaaaaccgatgttaatttaaagaatactatgggaaaacttgcctactatgtaaagggattagagcagcttcctaatttcagaagattaaaggttaatgttagatctgaggaagttaattttgatggagatatgtatcttatgatggtgttcaatggacaaacagcaggcaatcttcatatggcttataaggcagaagttgatgatggcatgttagatgtaataataataaaggcttgtgctattaaggatatgataggattatttataaaaatgataagaggagatcatctagaagatgtaaatgctctaatatattttaaaacaaataaactggaaatagaatctaatgaagagatagttacggatatagatggagaaagaggtccagactttcctttgcagatagaatgtgtaaaagaaggtttggatattttgggcatattagat

SEQ ID NO: 16089 - DNA, 990 bp, Clostridium botulinum
gtgattaaatttaaagtattaaacatattatttttcggaggtgcttttatgaaaatagtattagctttaggaggaaatgccttacaatcagatccaaaagacaagactccagaaagtcaattaaagacttgtaaggatacagcaaaatctatagtagatttaattgaagaaggacatacagtttcagtagttcatggaaatggtcctcaagtaggtcaaatattagcttctgtagaagcaggatataaagcaaataattctaacgtattatttccatttgatgtttgtggagctttttcacaaggttatataggatatcatcttcaaaatgctatagaagaagaattaaataaaagaaatattaataaaccagtaggaacagtagttactcaagtattagtaaaggctgatgaccaaggtttccaaaatcctacaaaaccaataggttctttttatagtgaagaagaagctaaaaaattagaagctgaaaaaggttatgtaatgaaagaagatgcaggaagaggatatagaagagttgttgcttcaccaaaacctgtagatgttatagaaaaagccatgataaaacaattagttgaagcaggaaatgtagtaatttcttgtggtggtggcggaattccagttgttaatgataatggcattataaaaggtgttccagcagttatagataaagattttgcagctgaaaaattagcagaaataatagatgctgatatgttattaattcttacagctgtagatcaagttgctataaactttaacaaaccaaatcaagaatctttagctaaaatgactttagaagaagttgataaatatattgctgaaggacaatttgcaccaggaagtatgcttccaaaggttgaagcttgcaaaaaatttgttcaatctagcgaaaataaaattgcattaatagcatcccttgcaaaagcaaaagacgctattaatggaacttcaggtacaagagtagtaaga

SEQ ID NO: 16090 - DNA, 1059 bp, Clostridium botulinum
atgtcaaagggtatagttgctttagctatgagcggaggagtagatagttctgtatctgcttatatattaaaagaaagaggctatgatgtaattggaatttacatggatttatggagagatgaaagaaaaggatactgtaataaatcagcagcagaagatgctagaagggtagcagaaaaattagatattccatttcatgttataaatatcgaaaagaaatttaaagataatgttattgattattttatagatgaatatttaagtggtagaactcctaatccttgtgtagcttgcaataaaaccataaaatttgaagctttttttaatgcagccaaagaatttggagcagattttatggcaacaggacactattgcaaaatagaagaaagaaatggaagaaaagttatagttaaagctgaagatgataaaaaggatcaaacctatatgatgtataatctaaaacagtatcagctagagagaactataatgccttgtggtgaatataaaaaagatcatataagagaaatagctgaaaatatagggttagatgtatataataaaaaagatagccaagagatatgctttataccagataatgatcatggtggatttattaaaagaaattataaaagtaaaataaagcagggaaattttgttgataaagcaggaaaaataattggaaaacataaaggaataatatattatactataggacaaagaaagggactaggcattgctttaggaaaaccagcttatgtaatagatataaaccctatcactaatgaggtagttataggagatgaagaagatatttttcgcacagaattaatagcaaaggatgtaaattttattccttttgataaattagaaaaatccatggaattagaagctaaggttagatattctgctaagccttctaaagctactataatacctttagaaaataataaagtgaaagtagttttccaaaataaacaaagggctataacaaaaggacaatctgtagtgttttatgataaagatatgttagtaggtggaggcataatcgaagaaatagta

SEQ ID NO: 16091 - DNA, 3759 bp, Clostridium botulinum
gtggggaatgaaataaaaacattattcgtagaaaaaaaaccgcaatttagggtagaaagtaaaaaaatattaaatgactttaggttaagtctaaatatgaaaaatatagaagacataagaattttaaatagatataatataagtggtgtaagcgatgaagaatacaatttggctaagtatactatattttcagaaaaaactgtagatgacttatatgaagaaaaatttccttatgatagtgaggataaaatttttggagtagaatatttaccaggtcagtatgatcaaagagcagactctgcggctcaatgtatacaaatacttactcaaagagaaggtgtaattgtaaagtatagtaaaatttttgttataaaggggaatatagcaaaagaagaactagaaagaataaaagaatattgtataaataaagtagattcaagagaagcacaactagaaaaaccaaattcactacaagatatacaattagaagtgcagtctgtggaaatattacatggatttatagatttaagtggaaagaaattgaaagaatttttggaagatagaaatttagctatgacctctgaagatttaaaattttgtcaagaatattttagagacaaagaaaaaagaaaccctactataacagaaattaaggttatagatacttattggtcagatcattgtagacatacaacctttatgacagaaatagaggatataaaaatagaagagggattatattctaatgcaataaaggaaagctatgaaacttataaaaatataaaaagacatatatatgcaaaagaacgggctacttgtcttatggatatagctacaatagctgcaaaagaattaagaaaaaaaggactaatggaggatttagatgtttctccagagattaatgcttgtagtatagtagtagatgccgaaataaatggtaaaacagaaaaatggattgttatgtttaaaaatgaaacacataatcatcctacagaaatagaaccttttggtggggcagctacttgtgttggaggtgctataagagatccactctccggaagggtttatgtatatcaggctatgagggttacaggtagtgcagacccaagacaaaatatagaagataccttagaaggaaaactccctcaaaagaaaataaccactgaagcagctcatggatatagctcttacggaaatcaaataggcttggctacaggtcaagttgcagaaatttatgatgaaggctatgtggctaaaagaatggaaatcggcgcagttattggtgcagcgcctatggaaaatgtaataagaaaggaacctaaaccttcagatatagttatattattaggaggaagaacaggtagagatggtataggaggagctactggttcttctaaaaaacatacagaatcatctatagaaaattgtggttcagaggtacaaaaaggaaatgcaccaacagaaagaaaaattcaaagattttttagaaacaaagaagtaagtactatgataaaaagatgtaatgattttggagctggtggagtagctgtagctattggggaacttacagaaggtctatacatagatttaaataaagttcccaaaaaatatgatggcttagatgggacagaattatctatatcagaatcacaggaacgtatggcggtggtaatctcaaaggaagatagagaaagatttattaaactttcagcagaagaaaacctagaagctacagtggttgcagaagttaaagaagaaaaaagactcaagatgttatggaaagatagcattatagttgatttggacagagagtttttaaatactaatggcgtagttcaaaagactaaggcttatataaatactccagaaaaagaaagctattttcaagaaataactataggttctaaagaaaatataaaggataaatggattgaaaatataaaggatttaaatgtatgtagtcaaaaaggattagtagaaatgtttgatagcacagtaggagctggtactgttgtaatgccattaggaggtaaataccagaaaactccgcaggaaggtatggctgctaaacttccagtattagaaggagatactactacagctacagttatgacctatggatttaatcctaaaatatctaaatggagccctttccatggggccatgtatgctgttatagaatccgtaactaaggccgtagctatggggatagactataaaaaaataagacttactttccaagagtattttgaaaaactagaaaataaagaagaaaaatggggaaaaccattagcagctcttttaggagccctaaaggcacaaagagaattttctattgcagctataggtggaaaagatagtatgtcaggaacttttaaagaaatgaatgtaccaccaactttagtatcttttgcagtaggagttacaaatgtgaatagaataatatcctcagaatttaaagaagcaggaagtattattttatatataaaagctaaaagaaataaagaagaaataccggactttaacattcttaaggaaaattatgaaaaggtatatgaagctatagaaacaggtaatgttttagccacctctactattaaatctggaggaatctcagaagctataagtaaaatgtgctttggtaataatataggggcgaagttaaagaatttagaaagagaagaattgttttcaagagactatggatcaataatattagaggttaataaaaactttgatttaaatttattaaaagaaataaattataaaataataggtgatactactgaaagagcttctatagaaattttaggtgaagaaatattactagacaagtgttatgaggaattcgaaagtactctagaagatgtatttatatcaaaagtagaaaaagaatataaaaaagatttagatatatcattatatcgaaataaaaataaaaaatcaccaagtgtaaaagttcctaagccaaaggttctaataccagtatttccaggtactaattgtgaatatgattccaaaagagcttttgaaaaagccggtggagaggtagaattagttgtatttaacaatatgagttcgcataatataaaagaatctatagataatttaagttctaaaataaaacagtctaatataattatgttacctggaggatttagcgcaggagacgagccagaaggttctggtaaatttatagcgactatatttagaaatgaaaaaattaaagattcagttatggaattgttaaaggctagggatggattaatgctaggtatatgcaatggatttcaagctttaataaaattaggtttagtaccatttggtgaaatccgtgatataaatgaaaattgtccaacactaacttataatgatataggaagacaccaatcaaaaatagcatatactaaagtagcatctaatttatcaccttggtttaacaacgtggaagtaggagatatacatgcaatacctatatcccatggagaaggtaaattttatgctaaagataatgtaatgaaaagactaatagataatggtcaaatagttactcaatatgtagatgttaatggaaatgttacttccgatataagatataatcccaatgggtctatatcttctgtagaaggtatttgcagtcccgatggtagaattcttggtaaaatggcccattcagaaagaataggctatggcacattaaaaaatgtaccaggcaataaggatcagaaaatatttgatgctggaataaaatattttaaa

SEQ ID NO: 16092 - DNA, 216 bp, Clostridium botulinum
atgctagttataactagaaaaaaaggagagtcccttttaataggagatgatatagagataactgtagttaaattagatgatggttctgtaaaattagccatagatgcccctaaaaatttaactatactaagaaaagaactttataatgaagttcaagaggaaaataaaaaagctactaatttcaatccttctattttaaaaaatataaaaagtaaa

SEQ ID NO: 16093 - DNA, 1194 bp, Clostridium botulinum
gtggattttttagccataaagaataaggaggcaagaaaagtggataagataaaaaccattactatatttggaactagaccagaagctataaaaatggcacctttagttaaagaattggaaaaaagagaagaaatagaaaatagagtgtgtgtgacagcacaacatagagaaatgttagatcaagttttagaattatttaatataaaaccagattttgatcttaatataatgaaatcaaaacaaagtcttacaggcataactaccagagtattagaaggattagaagaaatttttgataaagaaaaacctaatttaatattagttcatggtgatacaactacaacttttgcaggagctttagcaggtttttataagcaaataaaagtggggcatgtagaagctggattaagaacttttgataagtattttcctttcccagaggaaatgaacagaaaacttacaggaagtatagcagatttaaattttgctcctactgtgggatctaagaataatttactaagagaggctatagatgaagaaagtatatttgtaacaggaaatacagtcatagatgctatggagtttactatagaacaagactatattttcgaaaatgaagatttaaatatgatagattatgaaaataaaaaggtaataatggttactgctcatagaagagaaaattggggtgaaggtatagaaaatatttgtaatgcactaaaaactatagtagaaaaatacaaggatgtggagattgtatatttagttcatttaaacccagtggtaagagatacagtttatagtatattaggagatttagaaagagtacatttattagatccattagatacaaaagaaacgcataatttaatgaataaatgttatatgttaatgacagattcaggtggactccaagaagaagcacctcatttaggtaaacctgttttagtattaagagatgtaacagaaagaccagaagctgtaaaagtaggaacagttaggcttgtgggtacagataaggaagttataactaaagaggtattcgatttaatagaaaacaaacaaaagtatgatattatgagcaaagctataaatccatatggggatggtaaagcgtcaattagaatagtggatagtatattatattattttgataagatagaaaaaagaccacaagaatttcatgctaataaa

SEQ ID NO: 16094 - DNA, 1419 bp, Clostridium botulinum
atgaaactaaatttaaatgaagatgatattttaatgcttttaaatgatattactataaacgaaaatgaatttagcgatgtagatcttaatgaaattgaaaagaaaaaaatctgtgaaaatattattagtaaagtacaacctaagaaatctaaaagtaaaaggaattttattgcagcggcagttatccttttgataagtattcctttacttatatcccctaaaaatgttttagctaatatgctagaaaaacttactgtcatatctggtattggagaagtaaatgtttcttcagataaaccaagaattcttaaaaatagtcttaaaaaaggtaatataactttagctaatatgtatgtagataacaataaaattatagttactttaactattgagccagaagaacttacaccatcttattacactgttagagatgaacatggtaattcctacgaacttcatagaagcgacaatcttgctatgatgccagataatcacataggttcatacagagcagaatactatggtgaagtaaaaaaagccaataaatatactttaaatattatagataatgataaaaaacttactaaagcaacttttaaactaaaaaattctcattttaaagaagctcctgaatcaaaaattttatatactgcaactaatggaataactacattaaacgtgacttcattaagaaaagagggaaatattttaaaagtagattattattttacagataccttacctgattttaaatggaaaagaatagatacacttaattatggaacatttcaagaagggaaacaatggggtttaaaagaaccaattaatacaaaatcaataaataataatcctacagaagctcctaatattatgatttctgatgaatataataacgcagtatatgggcataacaatactaattatttagatcaagaaaatgaatctttattcgatttaagcaaactcactggtaaaaaattaaaattaactgttttaaatgtaaattattcatttggaaatgattacgtggataaaaataatagttttaagttggacaatgattttaagttggagttagatgttcctaaatcaggtaaacgcatcttaaacaaaacaggtgaatataagggatttaagtataatattattagtattgagcgattgtcaaacaatagcgtagaattaatttacaattatataaatgacagcaatgcaaaatttcaaattcacaatatttcctttgatagcattactccgtgggaaaatggttctagttctactaaaccatataataataatattaaacatattcttaagaagaaaagcaaaataggtgacaaattacaattaaataatattaggtgttctttttattcagttggtccttttgaaatagatcttgatccatcaacaattaaa

SEQ ID NO: 16095 - DNA, 366 bp, Clostridium botulinum
atgattcagcaacaaacaagattaaaggtagcagataattccggagcaaaggaaattatgtgtataagagttttaggtggttcccacagaaaatggggaaatatcggagatgtaatagttgctagtgttaaaagtgcaacaccaggcggtgttgttaaaaaaggtgaagttgtaaaggctgttatagtaagatcagttaaaggattaagaagagcagatggttcttacataaaatttgatgaaaatgcagcagttataataaaagatgataaaaacccaaaaggaactcgtatttttggaccagttgcaagggagctaagagataaagagttcaataaaatactatcattagcacctgaagtttta

SEQ ID NO: 16096 - DNA, 1614 bp, Clostridium botulinum
atgaatgtatttgctatgttaacaggtcttattggtggattaggtttattcatctatggcatgaacttaatgggagatggattgcaaaatgtagcaggagaaagagtaaaggttttttttgaaaaagtaacttctaaccctataaaaggagtcctaacaggcgtagtagtaacaggagtaatccaaagtagtagtgctactacagttatggttgttggatttgtaaatgcaggtttaatgactttaacccaagctgcaggtgtaattatgggagctaatataggtactacagttacaggacaattagttgcttttaatgttactgctggagctccattatttgtaggagtagggactgcaatagttctatttgccaaaaagaaaaagactaaagaaataggtaatataatactaggttttggtatattattcatgggaatggaaataatgaaagaagctatggctccattagggcaaagtgaagcatttaaaagcttagctttatcattatcacataatgtatttttaggaatagttgtaggtatgggaatgacagctatagtgcaaagttcctctgctactataggtatattaatagctttatcaagtaatggagtacttccattatcagcagcattaccaatattatttggagataacataggtacttgtgtaacagcactattagctagtattggcgcatctaaaaatgcaagaaaagcagcattgtttcacttaacatttaatgttataggaacagtaatatttgcatttattttagtaccattaactccatttgttagaataattactaatttgaccccaggagatgtaggaagacaaattgctaatgcacacacattgtttaatttaattaatacatttatacaaatatggtttataaaatatatcgttgcatttgttaataaaatgataccaggtagtgatccatatgaaaagatggctcctaagtacatagacgaaagattattagaaaatcctacaatagctattaatcaaactataaaagaagtagtaagaatggcgaataaagccaaagaaaatttgcaattatctatagatgcatttgaaaaaaatgatttagaattagtaagtaaagtatatgagaacgaaaaacttataaatatactaaataagagtataactacatatttggttaaattaaataacttaaaattatctgataagcagttaaatttagtaggttctatgtttcatgtggtgaatgatatagaaagaataggggatcatgcagaaaacataatagatttaactagtgaaaagatagaaaaaaggattcaattttcagatgatgctgcatatgatataaaacatttgtttaattatacattagattcattaacaagaactattgaaggctttgaaagtaacgatgtagaaagatctcaaagtgttatgtatattgaagaaaaaatagataatttagaagaacaattaagagaaactaatataaaaagattaaataagggaacttgcaatgccaatgctagtgctatatttttagatattataaataattttgaaagagttggagatcattgtacaaatatagcacaaaccgttataaacaga

SEQ ID NO: 16097 - DNA, 2274 bp, Clostridium botulinum
atggcaaagaaaagaactaaatctaataaaacagaaaaaaagaataatgatataacaggtataattctaataagtatgggaatttttgtactttttagtgtgttttccccttctgcctctggaatagttgggagtttcataaaaaaagtacttatagctgtattaggtttaggatctttagtatttccaatactaataatattcacaggatgttgctttataggaaagaagaataaaataaatttgaactctaaattttatggaatagttcttttttctataaatacacttttatttttacaaatgatacttttaaaaagttatggcacagaagatataatgcttggcatatcaaaattttatagagaagatacaatgattcatggtggtataatttcttatctaatagatgttcctttatataaactgtttggaactataggatgttacatattgtttatatgtgtttatataataagctttatattaatatttcaagtatctttaggtactatactacagactttacaggtaaaaagaagtataaaaaataaaaaagttaaagaaaaatctatagaagataaagaagacatagacggtatagaaaaagaattagctccggacttagaaaaagatgaaggtttaactaggaatattaaagacaaaatcaaaatattagattttatgaaaaactcagaaataaaggaaggtccactaaatattgtggataattctgttagtgaaaacatagaaaaatctaaagaagataccggggaagaggctataaaagaagaacttagtaaaaatataaatgaagggggaaacaatgtaaaaatagaatataactatccaaccttagaacttttaaaacaaaatattcagtcaaaactaaataaacaagataaaaaagaacttataaataacgcaaataagttagaggaaactttaagtagttttggtgtagaagctaaagttatgcaagtaagtagaggaccttcagttacaaggtttgaacttcaacctaatgcgggagttaaagtaagtaaaatagtaaatttagcagacgatatagcgctaaatttagcagcttcaggagttagaatagaggctcctataccaggaaaatctgcagtaggtatagaagtgccaaacaaatccttaacaccggtatatttaagagaagttatagaaggagatgaatttcagaaatttgatgatggactagcttttgctttgggaaaggatataagtggtagttgtgtagtatcagatttatcaaaaatgcctcacctattaatagcaggagctacaggttcaggaaaaagtgtatgtataaatacattaataataagtattttatataaatattctccagaaaatgtaaaattacttatggtggatccaaaggtagtagagcttagcatatataatggtatacctcatttattgattccagtagttacagatcctaaaaaagcggcaggagctcttcattgggcagtaaatgaaatgacaaagagatattctttatttgcagaaaatagtgtaagaaatatagagggatataataatttatatgaccagggtaaaatagaaaataaattaccttatgtggtaataataatagatgagcttgcagatttaatgatggtttgtccaaatgatatagaagactacataagtagattagctcaaatggctagagcagcaggtatgcatttagttatagcaacacaaagaccttctgtagatgttataacaggaataataaaggcaaatataccttctagaatatcctttgcagtatctagttctatagattctagaaccatattagatatgtcaggagcagaaaaacttttaggaaaaggagatatgttattttatccaacaggatctccaaaacctactagaatacaaggagcttttatatctgaaagtgaagtggaaaaggtagtttcatgtataaaggatgagcaaggagaagcagaatatagagaagaaataatagatcaaatagatacagctgtaaatgtagaagccggggatgaggatgagcttctagaagaggctataagaatatgtatacaattaggagaggtatccacatcactaattcaaagaaaacttagaataggatataatagggcagcaagaataatagaacagctagaagctaagggaataatttccggaagagatggtaataaaccaagacaagtaataattgataaaaacaatgaaacctacggaaaatatttccgaggaaatatg

SEQ ID NO: 16098 - DNA, 1047 bp, Clostridium botulinum
atggaaggaaaaatgaaagcagtagctttacatgcaattaaggatttgagatatgaggaagtagatatacctactataggcgaaaatgatgtattagtaagagttaaatatgttggtatatgtggttcagatatgccaagagctatggtaagtggagcatatcattatccaacaataacaggacatgaattttcaggagaagtagttgaaattggtaataatgtagatgatataaaggtaggagagagaatagcagtagcaccattaataccatgtggagaatgtgaattctgtaaaaaaggaaactttgctttatgtgaaacttatgaatttttaggttctagaaatgatggtggttttgcagaatatgttagagttccaaaagaaaacgtattaatacttccagaagatttagattatgaaacagcagcaggaatagaaccagcatctatatcataccaagcaatgagcaaaacaggaataaaagttggtgatactgtagcagttgttggttgtggtcctataggacaatttgctattcaatgggcaaagatatttggtgcatcaaaggtaatagctgtggatgttttagaggataaacttaacttagctaaagaattaggcgcagatatcataataaacagtaaagaatgtaatgcagttgaaaaagtattagaaattaccaatggtggagtagaggctgttgtagaaactgcaggaatgaaaattacagaagaacaatctgttcttatgtgtagaaaacttggaaaggttgtattcttaggaatatcacatgatgaattaagatttagcgaaaaaacttttgatagaataatgcgtggagaaattacattacaaggttcatggaattcatatgcagctccattcccaggaatagcttggagaactacattagatttcatggaaaaaggacaaatagtatttaaaccaatggtatctcataaaatcaaacttgaagaattaccagggtatttccacaaaatgtttaacaaagaaattaattataataaggtattggttgaaatt

SEQ ID NO: 16099 - DNA, 135 bp, Clostridium botulinum
atggtaatgcctggagaccacatagatatggcagtagaattaatcacaccagtagcaatgcacgaaaacttaagattcgctatcagagaaggtggaagaacagtaggttcaggagttgttacaacaatatctgaa

SEQ ID NO: 16100 - DNA, 2643 bp, Clostridium botulinum
atgtcagaaacaagagaaatggcaaaaacttatgatcctaaagagtttgaagaaagactttataaaaattgggaagaaaaatcatattttacaccagaggtagacgaaaataaaaaaccatatactatagtattaccaccaccaaatataacaggaaagcttcatttaggtcatgcattagatgatactcttcaagatatactaatgagaacaaaaagaatgcaaggctatagtactttatggttaccagggcaagaccatgctagtattgctacagaagttaaagttgaaaatgaattgttaaaagaaggtatagtaaaaaaagaaataggaagagaagctttccttgaaaaagtatgggaatggacagatgaatatagaaataaaataagaaatcaaattaaaaaattaggttgctcattagattttacaagagaaagatttactatggacgaacagctagataaagcagtaaagcatttctttgtaaaattatataatgaaggtttaatttatcaaggaaatagaataacaaactggtgtccaaaatgtaaaacagcattatctgatgcagaaatagaatatagtgaacatgagggacatttctggcatgtaaaatatccagtagtaggtagtgacgaatatttagaaatagctactacaagaccagagacaatgcttggagatacagcagtagctgttaatccaaaggatgaaaggtatgctcatttagtaggaaaaactcttatgttgccactagttaacagagaaattccaatagttgctgatgattatgtagatatggaatttggtacaggagcagttaaaataactccagctcatgatcctaatgattatcaagtaggtaaaagacataacttaccagaaatcaatgtaatgtttgatgatggaagaattaattataaagaaactagataccatgaaatggatagatatgaagccagaaaagctatagtagaagatttaaaaaatgaaggtttcttagtaaaaataaaagagcataatcataatgtaagctgtcatgatagatgtaatacggtaatagaacctataatttcaaaacaatggtttgtaaaaatggaggaacttgcaaaaccagctatagatgtagtaaaaaataaaaaggttaagtttgtaccagaaagatttgataaaacttatttcaactggatggagaatattcaggattggtgcatatcaagacaattatggtggggacacagaattcctgtttggtattgcaaagattgtggtgaagttatagtagttactgaagaaccaaaaaaatgtccaaaatgtaatagtgagaaattacagcaagataatgatgttttagatacttggtttagttcagcgctatggcctttctcaactttaggttggccagataaaacaccagatttaaaatatttttatccaaacaatacattagtaacaggatacgatatcatattcttctgggtagctagaatggtattctcaggactttattgtatggatgatattccatttgatacagttttaatccatggtatagttagagattcagaaggaaagaagatgtctaagtctttaggaaatggtgtagatccaatagaagtaatagatgaatatggtgcggatgctttaagatttacattagtaacaggaaatgctccaggaaatgatataagatattaccctgaaagagtagaagctgctagaaattttgctaataaaatatggaatgcatctagatttgttcttatgaacttagataaggatttaatggataaatataaagataataaaaactatactatagctgataaatggatattatcaagattaaatacagtagttaaagaggttacagaaaatatagaaaaatttgagcttggaatagcttctcaaaagatttatgattttatatggggtgaattctgtgattggtatatagaacttgtaaagccagtattatatggagaagatgaacagtcaaaaggaatagctttcaatgtacttcataaagtattagaaacttcattacaattattacatcctataatgccatttataacagaagaaatatatactcatttatatacagaatatgaatcaatagttatatcaaaatggccagaatatgatgaaattttaaaagatgaaaaatcagaaaaggatatggaatatattatagaagctattaaatctataagaaatgttagaacagaaatgaacgttccaccttctagaaaagctaaattaatgatttatttaacagaaaaagaagcagagagatcctttaaagaaggagaagtttattttcaaaaactagcttcagcttcagaagttagcttcttagaaaataaagaaacatcagataaaaatgtatctgtagttacaagaggtgcagaaatatttataccattattagaattagtagatatagaaaaagaattggaaagactaaataaggaaaaagaaaaattagaaaaagaaatagatagagtagaaaagaaattggctaatgaaaaatttgtatctaaagcaccagaatctgtagttaatgaggaaagagaaaagggcgaaaagtataaagcaatgcttaagtctgtgcttgagagtttagaatcattaaaa

SEQ ID NO: 16101 - DNA, 1350 bp, Clostridium botulinum
atgataaataaaaatataaaaattcaaatatctaaaggggtagagtatattataaatactttacaagaaaatggttatgaagcatatatagtaggtggtgcagttagggatagcttacttgaaaggaaagttaatgattgggatataactactagtgccaatccgcaagaagtagtgaacatatttgaaaatttaggttataaaattatacctacaggattaaaacacggaacagtaacaatattaatcaattctataggttatgaagtaactacatttagagttgatggggaatatgaagataatagacatcctaaagaagttaagtttacatcaaatttaagagaagatttaaagcgtagagatttaactattaatgcaatggcttacaatgacaaaataggattggtagattatttttatggattggaagatttaaataataaaataattagatgcgtaggaaattcaaaagataggtttaatgaagattcattaagaatgttaagatgtataagatttgcttcacaattaaatttttgtatggaagaatctataaaacttaacataagaaaattaagtagaaatatagctaatgtatctatggaaagaatcagagatgaattatgcaaaatattagtaagcagccaaccggtttatggcataagaaatatagttgaattaaatttaatggattatattattcctgaactaaaagcttgtgtaggctttgagcaacataatatacatcatgataaagatgtatatggtcatatattatctgtagtagaaaatgtaccaaataaattagaattaagattagcagcactattacatgacataggaaaacctaggtgttttagcataggggacaatggacaaggacatttttatggtcatcaaaagataagtgcagatatgactaaagatatactaaaaagattaaaatttgataataaaacaatagataaggtagataaattggtttataatcatatgactagatacaataaattaagaactcctaacataaaaaagtttattaataaagtaggaattgataatttagatgatttatttgagctacaaatagctgatataaaaggaagtgctaaggaatatcatagtttcgataatgtattaaatctaaaaataaagtgtgaaaaaatacttagtgaaaaacaacctttaacaattaaggatttagatattaatggatatgacttaatgaagttaggaataaaccaaggaaaagaaataggtattatgttaaataaattattggacataattttagaaaatcctaatttaaataataaagaagacttaattaaaatagttgaaagtatt

SEQ ID NO: 16102 - DNA, 1191 bp, Clostridium botulinum
ttgggggtatggaaaatgaaaaatgttgttattgctagtgctgtaagaacacctataggaaaatttggaggaacattaaaaagtgtttcagctatagaattaggaagtattgttattaaagaagctttaaaaagagctaatgtaaaaccagaagatgttgatgaggttataatgggtaatgtacttcaagcaggtcttggtcaaaactcaacaagacaatctgcagtagcggcaggtataccagtagaagtaccaagctttacaataaataaggtttgtggttcaggacttagagcagtaagtttagcaactcaattaataaaactcggagatgacgatatagtagtagcaggtggtacagaaaatatgtctgcagctccatatcttttagaaaaagcaagatggggacagagaatgggagatggaaaaattgtagacgagatgataagagatggactatgggaatcttttaatgactatcatatgggaattacggctgaaaatatagcagagcaatggggaataacaagagaagagcaagacgaattttcagctaaatcacaacaaaaagcagagaaagctgtaaaagaaggaagatttaaagaggaaatagtaccagtagttattaaaagtagaaaaggcgaagtagtatttgatactgatgaatttcctagatttggtgctactaaagagagcctttctaaattaaaaccagctttcaaaaaagatggaacagttacagctggtaatgcttcaggtataaatgatggagcagctgctttagttatcatgagtgaagaaaaggcaaatgaattaggaattaaacctttagctaaaatagttgcttatggtacaagtggagtagatccaaagataatggggtatggaccattttatgcaactaaaaaaactttagaaaaagccaacctaaaaatagcagatatggatttaatagaagcaaatgaagcttttgcggctcaaagtttagcagtagctaaagatctaggttttgatatggataaagtaaatgtaaatggtggagctatagctttaggacatccaattggatgctcaggggctagaatattaactactttattatatgaaatggaaaaaagaaattcaaaacatggcttagctaccttatgtataggcggtggaatgggaacagctattattgttgaaagatat

SEQ ID NO: 16103 - DNA, 1026 bp, Clostridium botulinum
atgcttaaaaaaatgatatttaacgaaaaggggcaacggggaacggaatcaatgataaatggaaacactactaacttaagagagtggaatagaataaaatatagctgggctagcgatttttatagaacaatgcttaataatttttggataccagaagaaatttctttaaatgaggatataaaacaatttccgtacttaacagatggagaaagaaatgcctttgataagattatttcttttttaaattttcttgattccgtgcaaagtgaaaatcttcctaatatatcgagatatattactgctgcagaggtttcttctcttttaaacattcaaaccttccaagaagaaatacatgcacaaagttattcatacatacttgatacagttacgaatccaattactagagataaaatatatgatcaatggagagaagatgaacatctcttagaaagaaataaatttatagcaggtatttatgaaaagtttaataaagaacctgaaatccataattttttaagagcaatcatggcaaattatatattagagggaatatacttttattccggttttagctttttttataccttagctaggcagggtaaaatgactgccactagtacaatttttaaatatataaatagggacgaagttactcatcttgtactttttcagaatattattaaagaactaaaaaatgaaaatttgcatatttttacagaagaattagaagaagaatttaggcagatgatgagaatgggagtagagcatgaaatacaatggggacaatatgttacaaacaatgaaatattaggtcttaatgatgaattaatagaaaaatatattaaatatctttctaatttaagattagtagctatagggttaaaacccttatatccagaaattaacaaacatcctatggagtggatcgatagcttttcaaaactcaatagtacaaagactgatttttttgaagcaaaggttacgaactatacaaaagcagcagcttttgattttgatgatcttgat

SEQ ID NO: 16104 - DNA, 951 bp, Clostridium botulinum
atgaatagaatagtatatgcagtgcttttagcctttttaatatcaatattaggaggaccaatattaatacctttattacacaaatttaaatttggacaaaatataagagaagagggaccagaaagtcatagaaaaaaagcaggtacccctactatgggaggagtaatatttatattatcatctataataacaatggctttaactataagaaggccaggggatgaagctatggtagctttatatgcttttatagcttttggaataataggagctttagatgatggattaaaaataattcataaaaataacttaggattaagagcttaccaaaaaatgctattaatcttagtggtatctggtatatttggatattattctgccaataatcctaatataggtacttcaataataatgccttttactaggaaaagtttagatttaggagcgttttatataccaggtataataatatattttgcagctacaactaatgctgttaatttaacagatggattagatggattagctacttctgttacattacttgttatgactttctttgctttagtgagtttcggaatgggtcactatactttagccatattttgtgcagtggtagcaggagctcttttaggatttttaagatataatgcattcccagcccaagtatttatgggagatacaggttctttagctttaggtggagcagtagctgcagtggctatgatactaaaattggaaatattagttataatagtaggtggaatatatgtattagaaacgttatctgtaataatacaggttctatcctttaagcttacaggaaaaagagtatttaaaatgagccctatacatcatcactttgaactaagtggatggcatgaaactaaagtagtatctgttttttcaataattacagtaatattatgtttagttgctttcttagcatta

SEQ ID NO: 16105 - DNA, 867 bp, Clostridium botulinum
atggatggagtaataaatgttttaaaaccaaaggggataacatcctttgatgtagttagagacataagaaaaatagcgaaaataaaaaaagtcggtcatacaggtacattagatcccttagcttctggtgttctccctgtatgtataggtaaggctaccaaaatagttgattatataatggaaggaactaaaacctacagagtagaaatgaaacttggaactaccacagacacttatgatagagaaggtactgtattagaggaaaaagaaatagatctaactcctatagaggtagaagagactattaaaaaatatataggagacatagatcaagtacctcctatgtattctgccttaaaaattaatggacaaaaactttatgacttggccagaaaaggtatagaagtagaaagagaagcaagaaaaatacatatatatgatatatgtattttaagtatagatttgccctatgttatatttgatgttaagtgttcaaagggaacttatataagaagtttgtgttttgatataggaaaggatttagattctggagcagtaatgtggaatctacaaagattagaagcaagcccctttaatataaaagaagcaataaaattagaagatttaaatgaggaaaatataaaacagtatataacacctatagatgaagctttaaaggattatgaaaaattatctttagataaaaaatttgaaaaacttgtactaaatggtgtaatattaaaagatagaagagttctagataatatagaagaaaataaactatatagaacttatatagaagatgataattttataggattaggaatgaaaaatgcatatggatttaaaattcataaattattaact

SEQ ID NO: 16106 - DNA, 222 bp, Clostridium botulinum
atggtatttgaaaaagttaaaaacattatagtagaacaattaggtttagatgaaggagaagttaaactagaaacatcttttgaagatttaggagtagattctcttgacttatttcaaataataatagaaatagaagaagcctttgatatacaagtagaagaggcagaaaaaataaaaactgtagaagaagcagtaaaatatgttgaaagtaaaatagaaaaa

SEQ ID NO: 16107 - DNA, 1299 bp, Clostridium botulinum
gtgtataatttatttacattagataatggactaagagtggttctagagaatatagattatgtgaaatctgtaagtgtaggactttggatagaaaatggttcaagaaatgagaatttaaaaaataatggtatttctcattttatagagcatatgatgtttaaaggcacagaaaatagaagtgcactacaaatagcagaatgtatagaagatgtaggtggacaaataaatgcatttacaggtaaagaagccacttgttattatataaaaatactaaattctcatatagaattggctttagaagttttatctgatatgttatttaatagtaaatttaaagaagaggacatagaaaaagaaaagggagtaataattgaagaaataagtatgactgaagattctccggaggatgtactatcagatttacattgcaaggctatatggggagatgattctatttcctaccctattttaggaacagtagaaactgtaaaatcctttaaaagaaaagatatagtagattacataaataaatattatattccagaaaattctgttatatctatatgtggtaattttgatataaatgaattagaaaaattaataaataaatattttggtaattggaatagcggtgaaaataaaaacataactgtttattccaaacctaaaatagaaaataaccacttatttaaaaataaaaatatagaacaacttcatataagtttaggttttgagggattagaattaggaaatgatgatgcgtatcctcttatattacttagtaatgtgttgggtggaggagcttcatctatactatttcaaaagataagagaagaaaaaggattatgctatagtatatattcttatatgtcttcctttaataaaacaggtgcggtaagcatttatacaggattaaatccagcctatacagaagacactataaccttaataaaaaaggtagtaaatgatttttcaaaggaaggtataaataaagaaaaattaataaaatcaaaagagcagttaaagggaagttatatattaggcttagaaagcactagtactagaatgtttaataatggtaagtctgtgctatttctaaatagaataaatgatccagaaataataatgaaaaaaatagataaaataactgaagataaattacaggaaataatggatagaacctttggggctggaataaaaaattcagcctttgtaggagaaaaattaaatttagaaaatgtaaaaaatattctagataggaaccaaagagctttcaaagaagctaaatcaaaattaata

SEQ ID NO: 16108 - DNA, 1896 bp, Clostridium botulinum
atgttagatgatttagtatatgttattcctaaagaaatgcattccgaagagcaacttaaagaatttttagtttcccatcctgaaataaaatttgtgtctttagtttgtatcgatttggctggtaatgatactgacgaaaaaattcctataaaattatttttagaagacatgagtaaattcataaaaggctgtgttcaaacagacggatcctctgttgtccttccaggtattgcaactcttaataatgctaaagttgatatgattgtggacatggatgttaactggtttatagattataactatgaacttatagactgtaaaaccgaaaaaccaaccggtactcttagaattccttgctttctttaccacgaaaataaacccgtggattccagatatatattaaaaaaatcaatagaatattttaaaacaactctattaaatttaataaagactaaccctgaatctatatcttctttcaatataaaatatgaagatatagaaaaagtagatgtaacttgtgctacagaactagaattttgggtgaaaactccaaatgacaatgcagaagtagatgaattgtgtacttctcaagttcttcatgaacaatactggaatagaaccaaaggaagcgttagaactgctttagaggaatctttattacttatggaatatcacggattagagcctgaaatgggtcataaagaagttggtggagtaaaagctaaattaactagttccggtggatttactcatataatggaacagctagaagttgattggaaatattcaacagctcttcaagcaggagataatgaattattagtaaaaagcataataaaagaaacctttagaaataacaaattagatgttacattttttgcaaaacctatagatgaagttgcaggcagcggaaaacatgtgcatttaggggttgcgcttaaattaaaaaatggaaaaagaattaatcttttctctacagataaaaaccactacctaagttcttttggttatgcttctataatgggcatactaaaaaattatgaagtgataaatccttttgtttcatcaactaacgattctttaaaaaggctgaaaccaggctttgaagcacctgtatgtatagtaacatctttaggccatactgtacaattaccatcaagaaatagaacaatcctagttggggttataagagacttagataattctttagctacaagatttgagttaagatcaccaaatcctcgtagtaatacctatctaacagtagcttctttatgtatgtctatgattgatggaataaaatatgctatagaaaacaataaatgtgaagatgatcttttaaaagagctttctaaagctgctgaggaagatactagctatcttgaaaagggaagacaatatagaagtgaagaagacgtatttgaatactacagtgaagaagaaagaagtaaaatctttggcacagcaccttctactgtatatgaaaatatatgctctttagataaatatatggataagatagaagtattaaaagctggtgaggtattcacctctaaaattgttaatagctataaactagctgttattgaaagatggttagttgaaataacaaatagaataattccaaattatgtagaagaaatcagaagcttttctcaattacatgaagtaaacaaagcctctgatttagatattcataactggtcaaaaatcaatgagcttagacaatgtctaatgaaagatacctactctgataaatctttatttggacaaataagagaagctaaagaaaataacgattatgaaactatttctaatttacaattagaaatagataaaaaaatgaaattacttagaaaactttattccgattataaaaaaaatcttttagatata

SEQ ID NO: 16109 - DNA, 1359 bp, Clostridium botulinum
atgaaatttaaaaaattaacagctcttattacagcatttacattaacctttgggttagcagcctgtggtagcaataaggaagatgtatcaaaaaaggaggagtcaaaagctacaatagccacagagataaaagagcctgttactattgaattttggcatgctatgaatggtgataatgaagctgctctaaaggagataacagaggaattcaacaaaaaaaataaagataagataacagtaaaattagtatatcaaggtcagtataaagaattattttcaaagttagatggtgctgctaaatctaaaaaattaccagcattaactatgatatatccaaatagattaacagcttatgttatgaatgatttagtagaaaatctaaatccttatattgaaaatgaaaaaataggatttaaaaaggatgtatgggatgatattcctgaatttgtaagagataatggtatgtggaatgataagcattattcactcccatttaataaaggtacatatcttcttttctacaatgaggatttactaaaaaaatataatgtaaaagttccaaacaattggaatgaattaaaagaagcttctaaaaaattaactgtagatactaatggagatggaaaaaatgatatatatggtctaggattaaattcatccgtaggaatagattcaagtttttgggtagaacaagcaggtggacatttaatagatgaagccaatgataaacttcttttcaattcaaaagagggagcagaagcctttgactttttatcagaattagttaaatcaggtaatgctaaaatatccactgaagaaaaatacatgactggtgcttttagtaggggagaagcagctatgggaatttcttcaatatcagccttgccagatataataaaggcttgtaaaggaaacaatataaactttaaaactgcagtgctaccagaaggaaagaaaaaagcagcattattttcaggtacagatgtagcaatatttaatactccttcaccagaagagaaattagcagcctttgaatatttaaaattctttatggaaaaagaaagtcaaacaaagtgggctactaaatcaggttatttaccacttagaaaatctgttatagattcaaaagaatttaaagattatgtagaaaaagaaaatccagcaaagggagaagccgttaaagaatttgattatggctactgtgatcctaaagtattgaatggatatgctatacatgataatatggctaaagccttagatcagataatagctggaaagaaagattcaaaacaagctctaagtgatgcagaaaagaaagcaagacaagagttagatgaagctaaaaaagcttttggaaag

SEQ ID NO: 16110 - DNA, 1914 bp, Clostridium botulinum
atgaataattcacaatattacataagagtatctactgcttgtcctgtaactaatgtggcagatatagattttaatatagacaacataaaaaagtgtatagatatatgtatagaaaaaaaatcaaaattaatagtttttccggaactttgtataacttcttatacttgtggagaacttttttcacaaagcctattaatatccaaagctctagatggaatacataatatatgtaaatactctatagataaagatgttttaatagctataggatcacctttattatataaaaatagtctttataattgtgctgttgtaatatttggaggaaaaatactaggtattgtccctaaaagttacttacctaattattcagagttctatgagaaaagatggtttactgaaggatataaaataaaaagtgaaagaattaatttaccattccaagagaacattccttttggagttaaccttattttttctgataaaattttcaaatttgctttcgaagtatgtgaagatctttgggttacaattccacctagtagttatcttgcattaatgggagctaatattattggaaatttatctgcctctaatgaaatagttagtaaatccgattatagacgaaatttagttgcatctcaaagtggtagatgcttagcatcttatgtatattcctcatcaggggtatatgagtcttctacggatttagtatttagcggacacttattaattggagaaaatggctctatattaaaagaaaacaaaagattccaaagagaaaatgaagttattacaagtattatagatatagataaaattaatagcgaaagacttaaaaatgtgagctttacagataactcaatgaatatgaacttggaattagaagaaataacatttcaatttgcaattaacgatgttggtgactttgatagacctatagacagatacccttttgttccttctaatgaagaaaaaagagcagtaagatgcaaagaaatatttaatatacaaacctcagctctagctaaaagacttgatcatactaatatgaaaaaagcagttataggtatctccggtggattagattctaccttagctttattagttatagctaaaacctttgataaattaaacattcctagagaaaacataataactataacaatgcctggttttggaactacagatagaacttataataatgctgtaagtctatgtaaacacttaaatacaaccttaaaagaaataaatatagtagatgcagcattacaacattttaaagatataggccatgacaaggatatacatgatgttacctatgaaaatgttcaagcaagagagagaactcaaatacttatggatatagccaataaagaaggtggcttagttataggaaccggtgatttatctgaattagctttaggctggtgtacatataatggagatcatatgtccatgtacagcgtaaattgctctattcctaagaccttagtaagatatctggtgagatatgtagctgaaaatgaagtagcaaaagaaatatcagaaatacttatagatattttagatacacctgtaagtcctgaactgttaccaaaggataaagagggcaacattgttcaaaaaactgaagatatagtaggaccttatgagttgcatgatttctttctttattattttattcgtcaaggagctactccagataaaataaaacaattagctaaaatagcttttaaagattcctatgataaagaaactattgacaaatggttctcttattttataagaagattctttacccaacaatttaaacgttccgcagtaccagacggtcctaaagttggaactataagtttatcccctagaggagattggagaatgccatcagacgcaagttttaacctttggaaa

SEQ ID NO: 16111 - DNA, 1689 bp, Clostridium botulinum
atggattacaaaaatctagtagctgaaagaataaaagaaaatacagaattagaagttgatttaatagaaaaacttatagagattccaccaaagaaagaaatgggagattatgctttcccatgcttccaattagctaaaacttttagaaaagcaccaaatttaatagcagaagaattaaaagaaaaaataaataaagaaggttttgaaaaggtagtaactgtaggaccttatttaaatttctttgtagataaaactatactcataaaagacgtattagaaaaagttttaagtgaaaaagaaaaatacggttcttctaaagtaggagaaggaaaaaatgtagtagttgaatattcatcaccaaacattgcgaaaccattccatatagggcatttatttaccacagctataggtaatgcactatataaaatactatcctttgaaggttataattgtataggaattaaccatctaggagattggggaacacaatttggtaaacttatttctgcatatagaagatgggtagatgaagaagcactagaaaaggatgctataggagaactcttaagaatatatgttaaatttcatggagaagcagaaaaagaccctgaacttgaaaaagaagctagattaaactttaaaagattagaggaaggttctgaggaagaaactgaattatggaatagatttaaagatctaagcttaaaagaattcaacaaggtttatgacatgctaggaataaaatttgactctcttgcaggagaaagtttctatagtgataaaatggatgcagtagttcaagaaatagatgataaaggattattagtagatagcaatggtgcaaaggtagttatgcttgatgaatacaatatgccaccttgcatgattaaaaaatctgatggagcaactatttatgctactcgtgatttagcagcagctatatacagaaagaaaacttatgatttccacaaatgtatatatgtagtcggaactcctcaagcactacactttaaacaagtatttactactttaaaacttatgggacacgattgggcagatgattgcaaacatgtaggctttggccttgttaaattagcaaataaaaagctatctacaagaaatggagatgttgtattcttagaagacttgttaaatcaatctgtagaagaaacattaaaaattataaatgagaaaaatcctaatttgaaaaacaaaggagatgtggctaaaaaacttggtataggtgcagttgtattcacatatctaaaaaacaatagagaaagagatattgtatttgattggaaggaaattctatcatttgatggagaaacaggaccttatgtagaatatagctatgcaagaggaaagagtatattaagaaaagcaggagaattaactggagaagcagattattctaaattatcatctaaagaagagtttgaattagcaaaacttcttggaggctttaatgatgctataatgaatgctatagataaattagaaccagctatggtaactagatatgtaattgaagtagcaaaagctttcaacaaattctataatgctcatggtatattaaatgcagaagataatgatgtaaaattagcaagggtaaaacttgtagaagctacttgtcaagtaataaagaatgctcttaacctattaggtatagatgtagttgaagaaatg

SEQ ID NO: 16112 - DNA, 600 bp, Clostridium botulinum
atgacttttgtaatgggatgggaggaattttatatgagtagtgcttcacttactgctatagtaagagaaaagagtggtaaaaaatgcagaaaagaagggtttgcaccaggaataatttatggagcagaaatgaaagaatctataaaggttaaatttgaagttcctagccttttaagatatttaaataaagctggtattaattcaagattatggcttaatattggcaataaaaaagagtatgtattaattaaggaaatacaaaaagaaccaacaacaggtgagatacttaatatagatatgcaggctgtttcacatgatgaagttataaaaaatagtatacctgtaaaatttgaaggaaaagaacaattagaacataaaggatttttattagaagaatttactccatatatagaggtagctggaaaagtaggtatacttccagaaataatagtggtaagtgttggggaaaatgaaccaggggataatataaaagtgtcagatataaaattagatgaggatataaaattatatacagacccagaagaattactagctacagtatcttataatggaaaaggtacagttgaagaaactgtaagt

SEQ ID NO: 16113 - DNA, 1593 bp, Clostridium botulinum
gtgaaaacgatatcaaaaaagagtatgttgttggtatttacaatgctaatagctataagctttttgtttacaggttgtaaaggaggtaaaaaagaggcagaagctaccaatgcaaataataaatcagaaaaaaaagacgtaaatattaaattagaaggtggagattggggagaaccaaatccatataaaacatatcctagaggaccaggaatgtccaagaccaatttaatatatgattcccttatagaaaaggatgaaaagagaattataccatggcttgcagaaaaatgggaggtaaaaagcaatgggaaggaatatttatttaaaataagggaaggagtaaaatggcaagatggtaaggactttactccagaagatgttaaatttacttttgattattataaaaaacacccaccagtaagcaaaaatatatacataggtaaaaaatgttttatagataaggtagaagtattaaaggataactatataaaaataacagttaatacagtaaatgcagcttctttagaaaatctaggaactactagaataataccaaagcatatttgggaaaaggtagaggatcctaaaaaatttgatggcaaggaagcttttataggttgtggaccatacatgctggaggattataataaagaaagaggttcttataaatttactgcttttgaagattattggggaccaaaacaaaatgttaaaactatagagtttattccagtgagtgattctatacttgcctttgaaaaaggtgatatagatctagtaggaagtgttaaaccagatatagctaaaaaatatgaaaataataaagaatataaattaataaaaggacataacttctttggatatagattatgtttaaatatgaataaaaatccagaatttaaggacaaaaatgtaagacaagctatagcctatgctatagatgaaaaagaaataatagataaagttatgagaggaataggaacagaaggaagtgcagcctatttgccaaaggaacatatatggtataacaaagatataaaaaaatatgattataatgtagaaaaggctaaagaacttttaaagggtaaaaatataactttccaaattattgtatctaataaaaaagataatttaagaatggcagaacttttaaaattacaattagaaaaaacaggaatgaaagttaatgttaaaagcattgatatgaaaagtagagatgcagcggtaaagtcacgagattatgaagctattataactgaacatggtggctggggtaaagatgcagatgttttaagagaactttataagtccaacaatgataaaaacggtggaagcgttataaatggtataccaggatataaaaatgaagaaatagataaactttgtataaaacaaatgcaggagatggatccagataagagaaaagaaatagtatttcagcttcaagaaaaaatagcagaagaaatacctatgatacctattataaatacatcttctatatcagtgcacaaaactgataaatatgatggatatatgaatatgtatgatcattttgtggtatctcatagtaaattaacttatttacaaaggaaa

SEQ ID NO: 16114 - DNA, 1155 bp, Clostridium botulinum
atggagagaaaaaaattactaattatatttagatacatagctatattatttcttatatttggtatagcttcttttgaaaaagaaaatattacaactaatgcagttattttaatattattatttattataaataatcaaatcagattttttgttttaaataaaaataagaatttggttttgatttctataatattagagtgtattttagcttacattggatatattaattattctggaatattgtttttttatttttttacagatattttagattcagctctttttcttaaagatgggatatcttacttagcctgttctataatattaattatagtcgtatttctcggatggaatttaaatttaagcgaaattttatctatagtaacttcttttattatgttgtttatattagctacttatataaaagaagaaaatagtggtaaattaagggcgcaaaaattatatgataaacttagaatttcagaagagaaattaaaaaaagctaataaggacttagagagttatgccaattctatagaggagcttacagttctccgtgaaagaaatagaatatctagagaaatacatgatagtgtaggacatagtttatctacaatgataatacaattaggagctatagaaaagattgccgaaaaggataagaagctcacatcagaaatggcgaggaatttaggcgaatttgctaaaaatagtttagctgaagtaagatgtgctgtaagagcgttaaaacctagggaatttgaaaaatatgagggtatattagcggtagaagaacttacaaagaactttgaaaaacttacaggggtaaaagtaaagctaggattttcaaaggaaaagtggactcttaactcagatcaatgttttgttttatacagggtggtgcaggaattcttatctaattctttaaaacatgggaaagcaacaagagtagacatatttatgggatttaatgaagagaatttaataataactcttaaggataatggacaaggggcagataaaatagaaaagggtgtaggccttaaaagtatatgggaaagagttaatgaattaggtggaactgtagcatataatagtaaaaaagaagaaggatttttattaaaagtagtattatatccaaaaattaatgaaacc

SEQ ID NO: 16115 - DNA, 1074 bp, Clostridium botulinum
ttgaaaattaatcttttagaagaatacatagaaagaaggaggtgtaattttatgaagtattactccaataaaaatatactaataataggtggaactggtactataggtaaagggttagtaaaagagataataaaacaaaatcctaaagttataagaatattaagtagagatgaatataaacaattcattatggaaaatgaaatagactctagactaagaagaaaatttagatttttgataggtgatgtaagagattatgacagagtagaaagggctatgaaaggtattgatatagtatttaatttagcggctatgaaacatgtgccttcctgtgaatataatcctacagaagctataaaaactaatataaacggcatggaaaatgttataaaagcagctattttcaataatgtagaatgtgtattatttacaagttcagataaagctataaacccaactaattcttatggtgctacaaaacttttagcagaaaaattagtacaagctgctaattatagtaaaggacctgtaaaaactaaatttgtagcagtaagattcggtaatgtaatgggttctagaggatccgttattcctttatttaaaaaacagatattagaaaaaggtaaaattacagtgacagaacctaatatgagcagatttatgatgacattaaaggatgcagtaaatttagttatgaaatcttgtgagatatcaaagggtggagagctctttgtacttaaaatgccaattattaagcttaaagatttgtcagaagttattatagaagaggtttgtaaaaaaaataatttagataaagataaaatagaaacaaagataataggttttagagctggagaaagaatatatgaagagcttatgactttacaagaatcacaccatgccaaagatttaggtaatatgtatgtagtgtttccaacgggatactataatgattggtatgaaagttattataataagtatgaggattgtaaaataggaaattattcttcacataatataggacctataagcaaagaagaggttagaaaagtgctaataaatgaaaaattaata

SEQ ID NO: 16116 - DNA, 1806 bp, Clostridium botulinum
atgagtattaaaaaagaaagaattaaagtatatgatatgacatgtacctcttgtgaaaatcgagttgaaaaagctattaaaaaattagaaggagtattacatgcaaaggcttcttacatgggagagtttgttgaaattgaatatgatgataaattatgcaaccaaaataaaattaaatccgctataaaaaatgctggatacagcacacaaagttctaatgactataattttatgggagttcttataatagctgcagttattatactcttaggcttaaagactagtggttttgatatggaagaaaaacttactaatgcttcctatatagttctttttgtagtaggagtcctcacatcaattcactgtgtaggcatgtgcggtggaattatgctttcacaaagtttatctagtgaaagtaataataagtttgaagctatgaaaccagcagttttatataatttaggaagagttttatcttacacactacttggtggaatagttggtaccctaggttcagtattttcgctttctattactacaaaagcagcccttcaaatatttgctggtctatttatgattatgatgggttttaatatggctggatttaatatatttagaaaattccatattaagttaccccactttgcatgtacagttaaaaacaaatctggttcaccatttatcgttggtcttttaaacggatttatgccctgtggacctcttcaaactatgcagcttttcgctctaggtacaggaagtggagttcaaggttctttatcaatgtttatgttttctttaggaacagtgccacttatgctaacctttggtgcattatcaggtcttttaagtaaaggtcatactaaaaaattacttaaatttagtggagtccttattatagttcttggacttataatgggtaacagaggtcttactcttgctggtataaatattaatcctataactgctcttgctagcaatactaaaagttcagatgatttttctaatacaaatgttgctaaagcaactttagaaaatggtgttcaggttattaaaatgactgctaataacaatggttacacacctaatgctttttatgtgcaaaagggaatacctgttaagtggataattaatggagaacaacttaattcatgtaataattccattatagctcaatctataatggaaaaagaatttaagataaaaaaaggagaaaatattataaactttacccctggtgacaaagatataaattttagctgttggatgggaatgataagtggcgtaattaaggttgtagataaccttgatgccgtagatacatcaaaaactgatccatcattacctcctgcgagcacaggtcctagctgttgtgctgtaccagtagatgaatctgatcaatcagaacaatctagcatttatggcaacaatatggctctagtgccaactgaaaagttaattaataaagctctgccatctggtgaataccaaagtgcaacgtttaaaggtattggttctgaattacagccattaatagctgttacaggtaatggttcaaaaactaaattaacctttaatttaaatgatttcgataatgctgaaggtaaatatataatcttagatttagaaactcgtaatgatatcttttcatttaccgcaaaaaaaggtgtaaatgaagtagagtttagtcctaaaaaagctggtagttatggaatattaaaagataatgtaattttagggataattgaagtggttgatgatttagagtctgctgatatggaaaaaatacgagaaaaacatgttgatgag

SEQ ID NO: 16117 - DNA, 1428 bp, Clostridium botulinum
atggattttgaagcagttataggattggaagttcatgctgaactttcaacaaatactaaaatatattgtggatgcactacagaatttggtggtcaacctaatactcatgtttgtccaatatgtttaggattaccaggttctctacctcaattaaataaaagggtagtagagtatggaattaaggcaggtttagctttaaattgttctataaacaaagtttgtagaatggatagaaaaaattatttttatccagattgccctaaaaattatcaaataactcaagatgaagttccaatatgtagagatggatatattgaaatagagttagaaaacggtgaaaagaaaaaaataggcatagaaagaatacatatggaagaagatgctggaaaattacttcatactaatgcgggaacattggtagattacaatagagcaggagtaccattaatagagatagtatcaagaccagatataagaactccagaagaagctacaaaatacttagagaaattaaagagtatactatcttcaatagaagtatcagattgtaaaatggagcaaggttccttaagatgtgatggtaatatatctgtaatgcctaaaggtagcgaaaaatttggagtaagatcagaaataaaaaatatgaattcttttaaagcattggaaaaagctttatcatatgaatatgatagacatgtagaagctgtaacaaagggagaaattttagagcaagaaacaagaagatgggacgaagctaattctgttacagtgcttatgcgaagcaaagaaaaagctaatgattatagatactttccagaaggagatttagttacattaaatatttcagatgaatggatagaagaagtaagaaaaactataccagagttaccacatgaaaaagctgaaagatttgtaaatgaatttggaatacctaaatatgatgctatggtattaactttaacaatggatatggctaaattttttgaagaaactgccctaaagagtgaagatgcaaaagctgcttctaactggttaatgggtgatatttcaagacttatgaatgaaaaagctatagaagttaaagatttgaaatttaatcctgaacaattagcccagctaattaaattaataaacgctggaactatatctaataatataggtaaaaaagttttagatgatatgtttaagtcaggtaaaaatcctaaagatatagttgaagaaaaaggtttggttcaaaataatgatgaaggtgctatattagaagtagttaaaaatattatagagaataatcctcaatctatagaagacttcaaaaatggaaagaaaagagcattaggtttccttgtaggtcttgtaatgaaagaaacaaaaggaaaagctaatcctcaaatagtaaataaattagtaagtgaagaagcaaataaaatg

SEQ ID NO: 16118 - DNA, 639 bp, Clostridium botulinum
atgttacaagatatgttatttaaggctctaaaggaaactctatatatggtttctatatctactattttatctatatcattaggatttataccatctataattcttataattacagacgaaaaaggattaaaacctaataaagtaatatataaatctttagactttgttgttaatttattaagatcctttccttttataattcttatggtggcgatccttccttttacaaaggctatagtagggaaaaccattggaactacagcagctatagtgcctcttacaatagccgcaataccttttgcaactagagtattggaatctgccatgaaggaagtagatgaaggagtaattgaagcagctaagtctttgggtgctagtgatattcaaataatattcaaagtaataataaaagaatctatgccttctatgattgtggctataactttaactataatttcagtggtagcatattcagctatggcaggggctataggtggaggtggactaggagatgtagctattaagtacggatattatagatttaaaacagatatcatgatatatacagtagttatattaataattttggttcaggtaatacaaagtttaggaaatatactttacaagagattagataaa

SEQ ID NO: 16119 - DNA, 945 bp, Clostridium botulinum
ttgaatgaatttttaaagaaatatccagttcctattgtgggacttatgttagggttggcagcggcaggaaatcttgttcaatcctatggagaaatatatcgtagtatatttggaataatatcagctatattacttattttaatgattgtaaagattgtaaagtatcctaaaggtgtggcagaaagtttggataatccagtggtagctagtgtattcccaacattgtcaatgggaattatgctattatcaacttattgtactccatatgcagcatcctttgcttatataatgtggattataggaattgctttacatattatattaatattatggtttacaaaaaaatttgtttttaattttaagattaaacaagtattcccatcttggtttatagtttatgttggtatagtagttacaagtgtaacagcaccggtttataaaatggcaaatgcagggaaagcagccttttggtttgggtttgtaacttatttaatacttttaccaatagttatttatagagttttaaaagtaaagggaatgccagagcaaacattaccaactatcgcaatatttgcagcacctgcaagtttattattagcaggatatatgaaatcatttcaagcaaaaaacatgacaatggtttggtttttaatggtgttatccattattatgtatatagcagttattattatgttatttaagcttttaaaattaaagttttatccaagttattcaggatttacatttccacttgtaataagcggaatatcaataaaacttacaaatggatttttaactaagtctggacaagctattcctttattaaagtatttagtgaaattacaggaagtagtagctgttatcataacactatatgtattaattagatatattcaatttcttttacctgaaaaacatgactgtattagtattaataaggccaat

SEQ ID NO: 16120 - DNA, 753 bp, Clostridium botulinum
atgaaaaattttccacttaatatagctcaccgtggtgctagttctttagctcctgaaaacaccttagaaagctttaagaaggctatagaattaagatgtgatggaatagaactagatattcatatgacaagagataatcaattaatagttatacatgatgaatttttagataggactactaatggtactggatctgttagaaatttaacccttaatgaaataaagaaattagacgctggaagccattttagtaataaatttaaatactctaaaatccctacttttaaagaagcattagatttaatagttccttctaacattttacttgatgtagaaattaagcaatgggcacctgaaatagagaaaaatgtgataactatgatacaaaattataactatgagaaaaaaactataataacatcttttaatccgatgtcagttttaaaatgcaaagaaatttccaaggatattaaaacaggtcttttagttttttttcttcaaactaaccctttagacatgaaaaaaaaattaaaaatagattatctatgcatggatgtaaattatattaaactactttcacaaaataatattgatactctaaaaaagaataatttaaaaatactaactttcacagtagatagaaaggatgatatgtcatacatgattaaacataaagttaatggcattataactaataaaccacaattattaaactcatttaaatataatccctttaactttataaaatttaag

SEQ ID NO: 16121 - DNA, 2058 bp, Clostridium botulinum
atgctaaattatgtaataatatttagggggattagtataatgtttactaaagaaaatcttaagaaacttagttttaaaaagaagatagtaataacttctctattgatttttttaatttcaatgagtttattaacgggttttacttttaaaatggtaagtagtaaattcaaaaatcaagttagagaagatgggttaaacttagcaaatcaagtaagctatcaaattacttcatctcaaaaagctacaaaggagatagataaagttttagcagacaaagttttatccatttcaaagatggttatagaaaacaaaaatatttctaatgaatatttaaccagtgttgcagtaaaatgtaatatacaagaaataaatataacagataaaaatgggaaaataatatattcaaatatgccagaaaatataaactatgtatatcccttggattattctggacaagatatattaaagggtaaaaaagatgaaattattgaagaaataagacaaaataaagtaaatcataattattataagtattgtgcattagctatgcctaatggtggtctaatacaaacaggtattaatgcaaatgaaatccacaatattaataaatctgtagatccacaaattatattagaaaaattaacaaaagatagtaatataaaatttgctttagttatggataataaacttaaagttacccaccatagtgataaaaaaaggataggaaaaattttaactgatactggaagtaaaactgcaatagatactgggaagaattatacatctacatatgattatgaaggtgaaaaagtttatgatattataatgcctttaaaagatgaaagtggtaaactattaggatctatggatataggagtatctttagctactcaagaaaccgctcttagaaatatattaataacttctatattgataagcttaataacttttgttttagctggattagtaatactttatataataaaactatctttaaaaccactagataatttgtctagtatagctcaaaaggtttcaaagggtgatttaacagaaaaggttgaaattgttaatgaagatgaaattggaaagctaagcaaaatatttaatactatgatagatagtttaagagaaattacacgaaatataaataatttttcaatacagttagctggttcctctcaggaaattttatcctctgcagagcaaacttcagcagtatcagaggaaatttctagtgctactgaagaaattgcttcgggagctgaaaatcaagtgaaggctagtaatgaatcttccctattaatgaatgatgttatgggaaatatgtatactttaaaagaggagtttgatgaaataatatctttttctaataatacgaatacattagcttcaaagggacaagaaaacatgtctaatatggtacagcaaatggctacaataaaaaatagtgtggtaaattcatctaatataatgtatgatttacaaaagaattcagaggaaataggaaatattgtagaaattataaatactatagcagatcaaactaatttattagcattaaatgcctccattgaagctgctagagcaggagaagctggaaaaggttttgcagtagtagcagatgaagttagaaaacttgcggaagaatctataaattctgctaataatattaagaatttaataatgaatactcaagataaaactaagactgctttaaattctataaaggatggtgcttcacaatctgaaaaaggtgaaagcatagttgctgaggtaaaagaatctttaggagaaattttaaattcattttctaatgtgaaccataagtttgcaagtgtagattctatgattacagcttccaatgatagtattacagctatggcatcaaaattatatgatatagaaaccatatctaatacagcctccgctaatacagaagaggtagctgcttctacagaagaacagagcgctaccatagaagaaattactgaatctatagagaagttagttagtatggtagaaaatttaaaggaaagtgtatctatatttaaactt

SEQ ID NO: 16122 - DNA, 366 bp, Clostridium botulinum
gtgaaacctatgtttaagaagaatgatagatctcaatcaagaacaagacgtcatatgagagttcgtaaaaagattttcggaacagctgaacgtccaagactatcagtatatagaagtgaaaaacatatatatgctcaattaatagatgatgtagaaggaaagacattagttgctgcatcaagttcagaaaaaggattcgatggtgtaggaagcaacaaagaaggcgctaaattagttggaaaaatggtagctgagaaagcgttagaaaagggattaaaaaaagttgtatttgacagaggcggattcatatatcacggaagaattaaagaacttgcagaaggtgcaagagaagcaggtcttgatttt

SEQ ID NO: 16123 - DNA, 975 bp, Clostridium botulinum
atgcaaaaccccaatttttggaatgatataaaagaggcacaaaaaataacttcagaagaaaagtatttaaaggataagttaaccaaatataatcatttaagaaatactatagaagatattatatctctttgtgaaatgttatcagaagaagatgatgatatgaaaaaagaaataatatcagaatataaaaatataaaagaagaaacagatagatttaaaatagaaaccctattatctggagagtatgatagaaataatgtaataatgaccctacattcagaagtaggaggaacagacgcgcaggattggacagatatgctatttagaatgtatacaaggtgggcagaaaaagaaggatttgctgttaagattatggatttattagaagctgaagatgcaggtataaaaagtgtaactctaaagattactggagagtttgtatatggatatcttaaaagtgaaaagggaatacacagattggttagaatatctccttttaatgcaaatggtaaaagacagacttcctttgcatctatagaagtattaccagaactaacagatgatcaggaaatagaaataagaagtgaagacttaaaaatagatacctatagagctggtggagctggaggacagcatgttaataaaacggaatctgcagtaagaataactcatatgccaacaggaattatagtacaatgccaaaatgaaagaagtcagcatactaacaaagaaacagctatgaaggttttaaaatcaaaattagtagaactaaaagaaagatctcataaagaaaaaatagaagatctaacaggagaactaaaggatatgggatggggaagtcaaataagatcttatgtatttcatccttataatctagtaaaggaccatagaacaggagcagaaactagcaatgtagattcagtgatgaatggtgatataaatatattcataacacagtatctaaaaggaaatttt

SEQ ID NO: 16124 - DNA, 972 bp, Clostridium botulinum
ttgaaggttatttatcaaagaacaactaagtttaatattaaatttgttttatttttgtatgtagaaaggggtatacttatgaaagttaaaaaggccataattcctgcagcaggattgggaacaagatttttacctgcaactaaagctcaacctaaagaaatgttacctatagttgataaaccaactatacaatatataatagaagaggctgtaaaatccggtatagaacaaatattaataataactggaagaaataaaagagctatagaagatcatttcgataaatctgtagaattggaaaaggaattagaagaaaaaggtaaagctgaaatgctttctatggttaaggatatatctaatatggctgaaatatattatataagacaaaaagaacctaaaggattagggcatgctataagttgtgctaaaacttttgttggcaatgaaccttttgcagtaatgttaggagacgatgtagtctatagtgataaaccatgcttgaagcagcttataaaatgctacaatgaatatcaaacaactatagtaggtgtacaagaagtaccagaggaagatgtacataaatatggtattgtgaaaggtatgtttatagaagatagaatatataaaataaaagatttagtagaaaaaccacctaaggaagaagctccatctaatatggctatattagggagatatattataagtcctgctatatttgatattttagaaaatacaaaaccaggtaaaggtggagaaatacagcttacagatgcattgagaacattgattaataaagaggccatgtatgcatataattttgagggtagaagatatgatgttggagataaactaggatttcttcaggctactgtagagtatgcactgagaagagaaaagttaaatacaaatttcgtcaaatatctacaacaattgaaaaataacgaagaatttacagcactatttaaaactgaa

SEQ ID NO: 16125 - DNA, 468 bp, Clostridium botulinum
atgaataatgcatattgttatgaaacccaaattgggaaaatagtaattgtcgaaaatgggacatctattactcagctgtgttttggagaagatattcctaaagatgtaaccattcttgagactgatttactaaaagaagcaaataaagagcttgaagaatattttagaggaaaaagagaaaagtttgatttatcctttgatccacaaggtacggaatttcaaaaaaaggtttggaaggcgttacaagaaataccctatgggaaaacttatagctacaaaaatgtagcagtaaatataggcaatgagaaggcttgtcgtgcggtaggtatggccaacaataagaatcctatacctatttttattccttgccatcgtgttattggagctaatggtagtttagttggttatgcaggtggactagatgtaaaagagaaacttttaaaaatagaaaaagagaactcaaaaggg

SEQ ID NO: 16126 - DNA, 2166 bp, Clostridium botulinum
atgaatagatttaaaaacataattaaggtatataagagagatattaaaagcttaaataagaatttcattgcaataatcataatattaggggtttgtgtattaccctcactttatgcttgggtcaatattaaagcttgttgggatccttatgaaaacacaagtacagtacctatagctgtaattaataatgataaaggtacagattttggaggtaaagagctcaatgtaggaaatgagatggtgaaaaaacttaagagtaatgataaaattggatggaagtttactaataaaaaggaagcggatatgggtgttatagatggtacatattatgcaagtatagaaataccaaaggatttttcagcagatatagttagtgttttatcagacaatcctaaacatccagaaataatttacaaagttgatacaaaagaaaatcctgttgcagcgaaaataactggaatggctaaaaatacactaataaatgagataactactacttttattactactgtaaataaaactgtattttcttctataaatgaaataggtagaaatcttgaaaaaaataagaatgaaataataaaacttaaagaatctattatttcaatgaatcgaaacatggatttaattttagcaggattggaaagcgtaaatactaattctaaaaatctaaatgaatatttaagtgtagttagaactactttcccagaaataaccaaggggttagaaaatattaattctaaatcctcaaatacaaatgaaacaataaatcaaactaataatatatttaataattccttaaataatataaatgttatattaaagcaagctatatctactaataatcgtgttcaatcagtattagataatttaatagttttaaataatgaatcttcaagtaacgaagcaaatagctctatagcaaatttaattatggatatagatagtgcaaataaaaatattgattctatggtagaattccttgaaaaaataaataacacaaagccaaatactgaagtgtcaaaatttatagtatcccttaataatgttaaaggagctttaaatgaagaaaaacaaaaattattaaagatacaagaaattgcttcaaattctagtaaagtaaatgaaaattcaataaatgaattaaaaagaaacatatctaatacaaataagcaaattgaaagtgtaatgaatgtttttaattcaaatacaagacaggaattaagcactataattaataattttaaaaattctattcaagatgctagtaaacttataaaggcaggtaatggattaaatacacaaatagaaaatttattagcaacatctacaaagggagctgatttatcagcaaagctaagtaaagaattaattgataagttaacagaatataaagggataataggtcaactaagtaaaaaattagagctggttagtaatgatgatttaatacaaataataagtgtacttcaaaataatcctatgctaatgtcacagaccgcagcatatccttttaatattaaggaagaagcagtatatactatacctaattatggttctgcaatgactccagtatatagtgtgttagccctttgggttggaactttaatactggtatctttgctaaaaacagaggtggtggattttgaaggcagtgagaatataactataagacaaaaatactttggtaaaatgcttacatttataactttagctgctatgcaagggtttatagtagctgttggaaataaggctatactaggagtttatacagttagttttccccttatgcttgcgttttctgtagtatcatctattgtatttgctataataacttatactttggtggccatatttggtaagtttggtaatgccatagcaatagtatttatgatattacaattagcaggtagtggtggaacttatccaatacaggtggatccattaatatttagaatactacaaccatttttcccatttacctatagtatagggggttttagagaggcaataggaggacctcttgtatctagtgtaatattagattttataatgcttatattaatgggaggcatatttgttttaataggatttttcttaaaatctccgttacatcataaaattagtaagtttgacgaagactttaaggcttcaggaatatcagaa

SEQ ID NO: 16127 - DNA, 684 bp, Clostridium botulinum
ttgaaggctatgtatattagaaaagagggtgttagtttgtttactggcatagttgaggaagtcggaagaatattaaaaatagaggaaggaaaagactttcttcacatcaccatagaaggaagtaaggttttaaatccattaaatttaggagagagtgtagcagtgaatggagtatgtcttacggtaactagttttaatagtaatagttttacagcagatgttatgacagaaactctaaataaaagtagcttaggaacattatctaaaggaagtttagtaaatttggaaagagctgtaactttaaataaacctttaggtggacatatagtttctggacatatagatggaacaggggaaataataaatatgaaaaaagaaggtattgctacattattagaaataaaagcaaaggaaaacttactaaaatatatgatacctaagggatctgtagcattagatggtgtaagcttaactttagtggatataaaagaaaaaagttttacagtatctttaatacctcatacaaaagaagaaaccatattagtaaacaaaaatataggtgacataataaatatagaatgcgatgttctaggaaaatatatatataagtttatgcattttaaaaaagaagaagctctaaaaaataatataagtttagattttttaagcaagacaggattttta

SEQ ID NO: 16128 - DNA, 987 bp, Clostridium botulinum
atgcttattttaacagcagaagatattaaaaaagtgtttactatgagagatgctatagaagcagataaagaagcttttagactttattcaactaataaagctgaagttccattaagaacaaatataaatatacctaaatataatgggacaagtctttttatgccaggttatgtcgaggaattagatacagcaggaatcaagatagtatctgtatttcccgaaaatgtcaaattaggaaagccagcagtaccagctaaaatgatactgttagacggaaaaacaggagaagtttcagctataatggatggaacttatttaactcaacttagaacaggtgcttctgctggagcagcaacagatattttagcaaaagaagatgctaaaataggagctttgataggtacgggtggtcaagctttatgtcagttagaagccttattagcagctagaaatttagaaatagtaaaggtttatagtagaaactttgaaaaggtaaaagcttttgtagaagaagctaagaaaaatttaagtaaatatggtacggaaataataggagtaaacagttcagacgaagctattgaaaatgcagatgttataacagtagtaactacagctacttcaccagtttttgacggtagaaaggtaaaagaaggagctcatataaatggcgtaggatcttatatgaaacatatgcaagaaattgatgaatatattatatctagggcagataaaatatatttagattcaaaagaagctgttttaagtgaagctggagattttataatacccctacaaaaaggaattataaaaaaagataaaattacaggagagttaggacaagttatttcaaaggctatagatggaagaacaaccgaaaacgaaataactctatttaaatctgtaggtatttcagtacaggatgttgtaactgcatataaaatatatgaaaaagccctagaaaataaagtaggtaaagaaatagaaata

SEQ ID NO: 16129 - DNA, 708 bp, Clostridium botulinum
atggaagaaagattacaaaaatatatggcctcttgtggagttgcttctagaagaaaatgtgaagatattattttagaagggcgagtagaagtaaatggtattaaaataaaagaattaggtacaaaaattatatctggaaaagacattataaaagtagatgggaatattatagaaccagaagaaaataaaatttacattttacttaataaaccaaaagggtacgtatgtactgctaaagatgaaaaggacagaaaaactattttagatttagtaaaagttaaagaaagaatataccctataggtaggttagatatggatacatcaggtataataatactaaccaatgacggggaaatatacaataagattattcatcctaaatttgaaaaaataaagacttataaggctaaagtaaaaggtactataaaaaaagaccatatagagttatttaaaaaaggtatagatataggagattacttaacagctccagcaacattagaaattttgaaaataaataaggatacttctgaaataataataaaaattcacgaaggtaaaaatagacaagtaagaagaatgtgtaaatctataggtcatgctgttatagatttagataggatttctataggtaatataacaaaaagtgatttgaaattaggtgaatggcgatatttaactaataaggaaatagattatataacaaagata

SEQ ID NO: 16130 - DNA, 1287 bp, Clostridium botulinum
atgtctaaattagatgaaaaaaaacagttgaaatgttcattctgcggcaagacacaagatcaagtaagacgacttatagcaggcccaggagtatatatatgcgatgaatgcatagaactttgctctgaaataataaatgatgagtttgaagatgatatacaagtggatttaacatcactaccaaaacccacagagataaagacttatcttgatcaatatgttataggtcaagaagatgctaaaaaatcattatctgtagctgtgtataatcattacaaaaggataaattcaaatacaaataatgatgatgtagaacttcaaaagagtaatattcttcttttaggacctacaggttcaggaaaaacattattagcacaaacattagctaagtttttaaatgtaccttttgctatagcagatgctacaacacttacagaggctggatatgtaggagaagacgtagaaaatattcttttaaagcttattcaaaatgctgattatgatatagaaaaagcagaaaaaggaatagtatatatagacgaaatagataagatagcaagaaaatcagaaaatccttctattactagagatgtatcaggtgaaggggtgcaacaagcattattaaaaattcttgaaggtaccgtagcagctgttccacctcaaggtggaagaaaacatccgcatcaagagtttatacaaataaatactacaaatatattatttatttgtggtggagcttttgatggagtggataagataatagaaagaagaacaagaactagttctttaggatttggagctgaaattcaatctaagaaagaaaaagatttaggaaaacttttgaaagatattatgccaggagatttattaaaatttggtttaatacctgaatttattggaagattacctatagtggttactttagataaattagatagagaagctctaataaaaatattaactgaacctaaaaatgctcttgtaaaacaatataagaaattgtttgaattagatgacgtagaattagagtttaaccaagaggcattaaaggaaattgctgatgaagcaataaatagaaacactggagctagaggtcttagagctataatagaagacatgatgagagaaattatgtttgatataccatctcaagaaaatataggtaaggtaatagtaaatgaggattgtataaaaactaaaaaaccagagcttatagaggctgaaggtggtaaaagattacctattaaacctaaaaaaggtaagaaaagaaaagattctgaaacagcg

SEQ ID NO: 16131 - DNA, 216 bp, Clostridium botulinum
atgtcaaaagatgatgtaattgaaatgcaaggtactgttttagaatctctacctaatgctatgtttgaagtagaattagaaagcggtcataaaataattgcacatatatcaggaaaattaagaatgaatttcataagaattttaccaggtgataaagtaactgtagaactttctccatacgatttaaccagaggaagaataacctggagagccaaa

SEQ ID NO: 16132 - DNA, 216 bp, Clostridium botulinum
atgctttcagcgtttatccagtcccaacatagctacccagctgtgccactggcgtgacaactggtgcaccagaggttggtccatcccggtcctctcgtactaaggacagctcctctcaaatttcctacgcccgcgacggatagggaccgaactgtctcacgacgttctgaacccagctcgcgtgccgctttaatgggcgaacagcccaacccttgg

SEQ ID NO: 16133 - DNA, 933 bp, Clostridium botulinum
ttgagtaaggatatagggaaaagacttattatactattatctataggggttaccattctagtaattacatacgcttatatttatactaaacctaatgcttatgaggtactagtaaataataatcctgtagcatatgtgaaaaataaagaagattttaataaaatatataaagaagtagaaaataatataaaaaaaagatttaatttagatatgagaaataatataaatttcgaaaatataaaggtaaagggagatatacttacaagtaatgattttataaaaaaatctatattagaaaattctaatataaaagtaacagctttcaaagtaaagtttcaagatgaatttataggaatattatcaaataaaaaggaaattcaagatttaagtaaaataataagtaaaaaatattctgtaaatataataaatcatataaaaataaaggaagagactatatcagtggaggaaataaacactatagatgagcttgcaataaatatatctaaatcacagaaattgcaaaactttatgaatagtaaaaggctatcaagaggagatataaatgaggaaatagctttagcaatgcccacaaatggatgcataacatctaaatttggtaaaaggtggggtaaatttcataaaggtttagatataggtgctcctaatggtactgacatttattccagtttagatggtaaagttatatattctggttgggaagaaggatatggaaaagttataaaaatacaacatagttctgaacttataactatatatgcacattgtagcaatttatatgttaaagtaggtcaatatgttaaaaaaggagaaaaaataggagaagtaggtagtacaggaagaagtactggtcctcatgtacattttgaattaagaaaaaataatgaaccttgtaatccattaacttatataaaa

SEQ ID NO: 16134 - DNA, 957 bp, Clostridium botulinum
atgataacccatggaaaaggtattaaaattttttcaggtaattctcacccgaaattagctcaagatattgctagtattttaggtactactgtaggtgattcacaagtaggaacatttagtgatggggaaatatctgttaatattaatgaaacagttaggggaacagatttatttattgtacaatcaactaatgaaccagttaatgataacttaatggaacttttaataatgattgatgcatttaaaagagcttcagcaggaagaataacagcagttgttccttattatggatatgcaagacaagatagaaaagctaaggctagggatccaattacagctaaattagttgcggaccttttaacagcagcaggagcagatagagtattaacaatggatttacatgcatctcaaattcaaggatattttaacattccattagatcatttattaggatcaccaatacttgcaaaatattttgtacaaaagggatttgcagatagaaatgatatagttgtagtatctccagatttaggaagtgtaactagagctagaaaatttgctgataagctacagtgcccaatagctattatagataaaagaagacctaaagcaaacgtatcagaggtaatgaatataataggagatataaaagataagactgttatattagttgatgatatgatagatacagctggaactataactaatggagctaatgctttaatagaaatgggagctaaagaagtttatgcttgttgcactcatgctgttttatctggaccagctatagaaagaatagaaaagtcagtaataaaagaattagttatgttaaacactatagatttaccagaagaaaaaaatctagataaatttaaagttttatcagttgcgcctgtatttgcagaagcaattaagagaatatacgaagatacatcagtaagtaaaatatttgaagat

SEQ ID NO: 16135 - DNA, 1359 bp, Clostridium botulinum
gtgatgaattacatgggtagaatgttcggaacagatggagtcagaggaatagctaataaggaattaacagcagacttagcatataaattaggtaaagcaggagcttttatattaacagaaggaacacatagatctaagatacttgtaggtatggatacaagaatatcaggggacatgctagagagtgctttagtagcaggtatattatctgtgggagcagaagctatttgtgtaggtgtaataccaacaccagcaatagcttacttaacaagaaagtataatgcggatgcaggggttgttatttcagcatcacataatccagtagaatacaatggtataaagttttttaataaaaatggatacaaattatccgatgaattagaagatagtatacaagcattaataagagatgattttaaggatgttccagttttaactggagaaaatataggaagaaagattgaagaagatggagaggctataagagattacatagattttgctaaatcaactataaagggtgatttgaaaggattaaaagtagctttagattgtgctaatggagcatcatatataacatctgtagaagcttttaaagaattaggagcagaagttcatgttataaacaacaaacctgatggtataaatataaatagaaactctggctcaacacacccagaagatcttatggagtatgtagttaaaaataattgccacatgggattagcttttgatggagatgcggatagatgtctagccatagatgaaaaaggtaatttgataaatggagactttatattagccatttgtggtaaggaattaaaaaaacaaggtagattaaagaaaaatacaatagtagttactgtaatgagtaatcttggattagatatagctatgaaaaaagaagaaataaatactataaaaacaaaagttggagatagatatgtcctagaagaaatgcttaaaaatgattatgcaataggtggagaacaatcaggacatattatattctcagattataacactacaggggatggacttgtaactgctctacaattagctcatatagtaaaagaaagtggtaagactttttcagaactatgttctataatgaaagaactaccacaagttttagttaatgctaaagttcctaatgatcaaaaagatatttatttgaaggatgaagaaataaaatctgaaatagatacaattacaaaaaatttagatggctcaggaagagtgcttataagaccttctggtacagagcctttagtaagagtaatgcttgaaggggaaaaccaaaaggaaattgataaattagcacatggcttagctaaattaatagagaataaagtaaaa

SEQ ID NO: 16136 - DNA, 1539 bp, Clostridium botulinum
atgaggtggaaaaatatgtcacaaaattcacgaacaactaaaaaattaactttgataccattgatattaatgatttttacttcggtgtttggctttgctaacatgcctagatctttttacttaatgggttatggtgctattccttggtatattttatctggtgtaacattctttattccttatgcatttatgatggcagagtatggtgcggcttttaaggatgaaaaaggtggaatttattcctggatggagaaatctgtaggagcaaaatatgcttttgtagggacctttatgtggtatgcatcctatataatttggatggttaacatttgttcaacactatggattccaatttcaaatgcaatttttggtaaagatactacttcaacttgggcattcttgggattaaattcaactcaagttttaggtgtattaggtataatttggataatacttgtaacttttactgcttctaaaggattagaaaaaataactaaagtaacttctataggaggaactgcagttgcacttttaaatattgtcttgttagttagtgcaataattatccttatagcaaatggtggacaactagcagaacctataacttctgttaaatctattgtacaatctccaaatcctgcatatcagaatccaatttctgtattagcttttatagtttttgctatatttggttatggtggtatagaagttgttggaggacttgtagatcaaactgaaaacgctgaggtaacttttcctaaaggaattactattgcagctattatcattgcagtaggatattcaattgggatattcttatgtggcatagttacaaattgggatagtgttttagcttccaaagacgtaaatataggaaatatagcatatgcactaatgcataatttaggatatcaattagggcattcttttggaattagcgaagcatcatcaatattaatgggggattggatcgcaagatttgtaggattttctatgtttttagctttaactggagctttctttacattatcttatgctccactaaaacaacttatagaaggtactccaaataaattatggcctggaaaaatggccaaaattgaaaacggcatgcctttaaatgctatgcgtgttcaatgtataattgtaatggtatttattgcattagtatcttttggaggagacgcagcagctaagttttttggaaaattaattcttatgaccaacgttgcaatgactataccttatatgtttttatcaagcgcattcatttcttttaaaaagaaaaccgaaataaaaaaaccatttgaagtttataaaactaggaaaagtacagttattgctgcagttgtagttacatttactatagcttttgctaattttttcacaataatagaaccggctacaaagggcaatatatcagatacaatattctcaattattggacctatattttttagcatagttgctatattaatgtataattcctatgagaaaaagtatgttattaaaagtgaaaagggtaaaactaaaaattta

SEQ ID NO: 16137 - DNA, 1944 bp, Clostridium botulinum
atgaaaatattgagtaatatggactttttacccataagtaaagaggatttgaaaaaaagaaatatagatgttttagattttataatagtaactggtgatgcttatgtagatcatccatccttcggtactgcaattataggcagagtattagaaagagaaggatttactgtgggaattatagctcaacctaattggaataacatagaggactttaaaaaactaggcaaacctaaatatggatttttagtcaactctggtaatatagactctatggtaaatcactatactgcatctaaaaagaagaggcatgatgatttttattccccaggtggcaaatctggatatagacctgatagagctgttattgtttactgtaataaaataaaggaagctttcaaagattcgcccataataataggtggtatagaagctagtttaagaaggtttgctcattatgattactgggataactcagtaagaagaagtattctagaagattctagcgcagatttattaatatatggtatgggggaaaaacctatagttcaagtttctaaccttttaagatatgggatgaaaatagacagcataaaaaatgtaagaggtacaacatatatagaaaaagatatatcctctttgaaggattatattgagataccatcctttgaagaagtttctacaaataagaaatcctatgcagaagcttacaaaatacaatattatgaacaagactccataaggggtaaaaccttagtacaaaaacataaagaaaggtatgtagtacaaaatcctccacaaccgcctctgtctcaagaagaaatggatgaagtttatgcacttccatatgctagaacctatcatcctatgtatgaggctgaaggcggaattcctgctattaaagaggttaaattttcaataactagccatagaggctgctatggaagttgctctttttgtgctttaacctttcatcaaggaagggttattcaaaatagaagccaagactctattttaaaagaagcaaatatgatgactaatatgaaggatttcaaaggctacatacatgatgtaggtggtcctacagctaactttagacatagggcttgtaaagttcaagaaaaacatggaacttgcaaaaacaagcaatgtgtattcccaaaagcctgcaaaaatttaattgtagatcataaagaatacttaagtttattaaggaaaataagaaaaatacctaatgtaaaaaaagtctttatacgttctggtattagatttgattatttgatgtatgataaaaatgatgaattttttaaagaattatgtgaacatcatataagtggacagttaaaagttgcccctgaacatataagtgataaagttttaaacttaatgggtaaacctactagaaatgtttatgattcttttgtaaaaaaatattatgatataaataagaaaatacataaaaatcaatttttagttccttatttaatgtctagtcatcctggtagcgatttaaaggctgccatagaactagctcaatatataaaaaaaatgggctatactccagagcaagtacaagatttttatcctactcctggtagtttatcaactactatgtattatacgggaataaatcctttaaccgaggaaaaagtttatatacctaaagatcaaaaagaaaaaagaatgcaaagggcattattacagttctctattcatgataactatgatctcgtaaaagaagctttgataaaagctcatagagaagacttaataggaaatgggcctgattgcttaataccttacaataaaccttataaaaaatctcataaaaaaaataatgctaagaataataataaccattataataaaaataataattataataagaataaggatattagtaaaaaaaataaaaaaaactctctttctaagcacaaaaaaagaaaa

SEQ ID NO: 16138 - DNA, 600 bp, Clostridium botulinum
gtgttgattattttctttggggaggggcaaaatatgtggactgaggaacaaatagatacatatttaaaagaaaatttaaaagaagatagatataatcatgtaataagtgtaaaagaaacagctgtaaaactagcagaaaaatatagtgttgatgtatataaggctaaaattgcagctttatgccatgattgtgctaaaaatatgagcgataatgaattattgaatatgataaaagaacataatataaatttagattggatttcattaaaaaatttacaaataactcatggattagtggcaacaataataatgagagaaaaaatgggaatagaggatatagatatattaaatgcagtaaaatatcatactacaggaagaaataatatgagtatgttagaaaaaattatttatttagcagatataatagaaccattaaggggatttaatggagttgaaagattaagaaaattagcattgatagatatagacaaagctatgatagaatctttaaattcaacaatacaatatgtggttagtaaaggagaactattacatatcgatacagtgatagctagaaattgcttagtaaatgataaattg

SEQ ID NO: 16139 - DNA, 333 bp, Clostridium botulinum
atggaagctaaggctatagttagatatgtaagaatgtctccaagcaagattggagttgttcttgacttagtaagaggtaaagatgttaatgaagcatttgctatattaaaatatactccaaaggatgcagcggaagtaatttataaagctttaaaatcagctgttgcaaatgcagaaaacaatttaaatttagatgttaatagtttatatatatcagaagtacatgtaggtcaaggaccaacattaaaaagatatcaaccacatgctcaaggtagagcgtttagaataagaaagagaacaagtcatttaactttagttgttaaagaaagagtt

SEQ ID NO: 16140 - DNA, 1581 bp, Clostridium botulinum
aaaagttttgtacaaagagaaaaaggcatagctgatctttggaaagataggggtgtcatagaaaaaagctttaatttgaatgaggatggagagtattttacgttctatgatggtccaccaacagctaatggaaaaccacacgtaggtcacattcttacaagagtaatgaaggatcttattccaagatataaggttatgaaaggatataaggttctaaggaaagctggttgggatacacatggtcttccagtagaacttgaaatagagaaaaaattaggtatatcaggtaaaccacaaatagaagaatatggtatagaaaaatttgttacagaatgtaaagatagtgtatttaaatatacaagtctttggaaacaaatgtctgaacaactaggattctgggtagatatggatgatccatatataacttatgataataactatatagaatctgtatggtgggcattaaaacaaatgtggaaaaaagaacttttatataaaggtcatagagtaacaccatactgtccaagatgtggaactgcattatcttctcacgaagttgctcaaggatataaggacgtaaaagaggcaacggcttttgtaaaatttaaaattaaaggaaaagaaaacaaatattttcttgcttggactacaactccttggacattaccaagtaacgtaactttagcaataaacaaatcttatgattatgtagaaatattaaacaatgatgaacactatatattagctaaggaacttttaggaaaagtaatagaaggcgaatacgaagtagttaaagaatttaaaggcgaagaaatagtaggtgttgaatatgaacaactatttaaattcgaagttcctgaaaagaaagctttctatgtagtgcatgcagattatgtaacacttacagatggtactggaatagttcatacagctccagcctatggagatgatgatagtaaaacaggtaaaaagtatgatttacctttaataaacttagtcgatagtgaaggtaaatttgtagattcagtagaaccttggaaagggatgtttgtaaaaaaagctgatcctaaaatattagaatatttaaaagaaaatggtatgctttataaatcagaaaaattcacacattcctatcctcattgttggagatgtaatacaccacttttatactatccaaaggatagctggtttgtaagaatgacatctttaagagatgatttagtgaaaaataataataccataaattggtatccagacaatataagaacaggtagatttggaaaatttgtagagaatgtaatagattggggtatttctagagatagatattggggtacacctcttccaatatgggaatgtgattgtggccatagagaatgtataggaagtgtagaagaattaaaagaaaagggaataaatgttccagaaaatatagaacttcataaaccatatatagatgcagttaaattaaattgtccacattgtggaaaagaaatgactagaacaaatgaagttatagattgttggtttgattcaggttctatgccttttgcacaacatcattatccatttgaaaataaa

SEQ ID NO: 16141 - DNA, 540 bp, Clostridium botulinum
atgaatatggaaaaattatttatacaaaaaagaaattgtaaaaatagtaataaagtaagaagagatggaaaagtaccaggtataatatatggaaaaaatttaaacaatttaatgttcgaagtaggagaaatagaattaaataatatgatttcacaggtaggggaacatggagtaacagatataaattatgaaggaacagattataaagttcttataaaagaagttcaaaaggatccagtaaaaaagaacgtaatacatatagatttagaaaatgttactaatagttctaatctaattaatgcagaaataccaatacttttttcaggtgatgatttaatcatgaaaaagggagggatagttcaaaaagaaaaaaatagtgttaaggtaagatgtccagaggaaaaacttcctaataatataatggtagatttatctcaatatgatattggtaagacattcagaatatctgatttagaattaggagaagatataacttttatggagaatttagatagtactatagtttctatattctttgga

SEQ ID NO: 16142 - DNA, 714 bp, Clostridium botulinum
ttgctaagagaaaaggggagtcttagcatgagtaaaaattctgttattatagttgctgccggaaaaggtaaaagaatgaatagcagtataagtaagcagtttttgcagataaaaaacaaacctattctttattatactttaagcaaattttcaacccatgaatctatagatgaaatagtgctagttaccttagaagataaaatagaagtttgcagtgatattatagataaatataatatcaataaggtatctaaaatagttccaggaggtaaggaaagacaagattctgtttataatggactaaagggtgtatcaaaggattgtgaggtagtattaattcatgatgcagcaagaccttttgttactagtgatattatagagaatggtataagatatacgaatcaatatggggctgctgcttgtggggtaattccaaaagataccataaaaataaaaaatgaaaaaggatttgcaatagatactcctaacagagaggatctatttatagttcaaactccccagtgttttaattacaatataatattaagttgtcatgaaaagttaaaaaaacataataaaaaagtaacagatgatactatggttttagagaattacggtaaatcagtatatttatatgaaggaagctatagtaatataaaaataacaactcctgaagatttaatattaggagaacaaatattagaaaagctaact

SEQ ID NO: 16143 - DNA, 591 bp, Clostridium botulinum
ttgtttataatgaacttagcaaataaactaactatattaagaatttttttagttccaatatttcttatatttatatcagtaaaaaacataccctatggtacagtaatagctactgcagttttcgtaatagcttcagctacagataaattagatgggtacatagccagaagtagaaatcaagttactagatttggtaaaataatggatcctctagcagataaaatgttagtaacagcagcattaatatctttagtagattttcaaatagtacctggatgggcctgtataataattatagccagagaatttgcggtaacaggacttagaagtgtggcttctgcagagggggtagtaattgctgctagtaaatggggaaaggctaaaactgtaatacaaattgtagctataatatttgctcttgtaaatctaaattacaaagagggaatatatatattaggaaattgggctgtaaattatataaatattatagcgaatataaccaatattactatggcattagctataataataactatagtatctggtgtagattactttgttaaaaataaagatgtaatgagccatgataag

SEQ ID NO: 16144 - DNA, 2709 bp, Clostridium botulinum
gtgaaaaataataatttaaaaagttttattatatttataattatatttcaattactacaagaagaagaacgagaaaataatatatataatttaattaatctatccaatctaaataaaagggaaagattaattaaggaagagaaggagaaccaggtttcaaaggagcataatcaattaaagaatgaaaagagtaaacggcttcccatagtgaatgttgaattaagaaatgagaagagtaagcagatttacaaggaacataatgaattaaaggaagaaaaaaataaagaagtttccaatgaaagtattcaattaaagaatgaaaagagtaaacagcttcctaaaataaatgttgagttaaaggaagagaaaagtaaacaaattataaaggaacacaatgaatcagagaataagaaaaataaacagatcccaaaagtgaatattgaattaagaaatgagaagagtaagcatattatcaaggaacataatgaattaaagaaagagaaagataaatatgtttccaatgaaagtattgaattaaagaatgaaaagagcaaacagcttcctaaaataaatgttgagttaaaggaagagaaaagtaaacaaattatcaaggaacataatgaattaaagaatgaaaagagtaaatcgattccaaaggaaagtattaaattaaaggaagaaaaagataaacaagttttcaaggagcacaatgaatcagagaatgaggaaaataaacagatttccaaagtgaatgttgaattaaaaaatgaaaggagtaagcagcttcctaaaataaatgttgagttaaaagaagagaaaaataaacagagcatcaaggagcataatgaattaagggaagaaacaaagaaaaagcttcctaaggtaaatattgagttaaaggaagaaacaaagaaacaagttcctaataaaagtcttgaattagatgaggaaaaagataaacaagttttcaaggaacacaatgaattaagaaatgagaagagtaagcagattatcgaggaacataatgaatcaaaggatgaaaaaagcaaacaggtttctaaggggaatattgaattaaagaaagaaaaaagtaaacaaattataaaggaacacaatgaatcaaagaatgagaaaaataaacagattcccaaggtgaatgttgaattaagaaatgagaagagtaagcagatttttagcgaacataatgaattaaataaagagaaagataaatatgtttccaatgaaagtattgaatcaaaggatggaaaaagtaagcagatttccaataggaatactcaattaaagaatgagaagaataaacagacttccaaggtgaatattgaattaagaaatgagaagagtaagcagattattaaggaacataatgaattaaaggaagaaaaaaagaaacagcctcctaaggtaaatattgaattaaataaagaaaaagttaaacaggttttcaatgaaagtattaaatcaaagaatgaaaaaagtaagcaggttttaaatagaaatactcaactaaagaatgaaaagagtaaacagcttcctaaaataaatgttgagttaaaggaagagaaaaacaaacaaattatcaaggaacataatgaattagagaaaggaaaaggaaaacagcctgataaagtaaatattgaattaaataaagaaaaagttaaacaggttttcaatgaaagtattgaatcaaagaacgaaaaaagtaagcaggttgtcaatagaaatactcaactaaagaatgaaaagagtaaacagcttcctaaaataaatgttgagttaaaggaagagaaaagtaaacaaattagcaaggaacataatgaattaaggaaagaaaaaaggaaaaagattcctaaagcaaatgttgagttaaaggaagaaaaaagtaaacaaattataaaggaacacaatgaattaaagaatgagaaaagtaaacaaactccgaaggtgaatgttgaattaaataaagaaaaagctaaacatgtttttaatgaaagtattaaatcaaagaatgaaaaaagtaagcagatttccaaggaaaacaccaatattgaactaaacgaagaaaaaaagaaacaagttattaaggaagatattcaattaaagaataaaattattaaaaaatctcatacgaaaaaagaacataaaaaaataagaaaaaatataatttctaaagtacccatagtaatagcaagttttgaaacagaaataacagatagcgtttttactaaaatagaaagtacatttgtagatataaaagaagttaaaaataatatttttatagaagaggctaatttaataaaattaaattctaataaggctaaattatttattaatggttatattagaagttatataggatacataacattagataaaataaataaaagttctattgaaactaagaaccaaggaataatttcacataaggattttagcaaagctataaatatagatttattattttttgataatatgaaagaaggggaagctttttttgtagattttaataatgatataaaagataaaaaagctttgttaggtaaaatagaaagattagatataaaatctagtaatatttataaggatgtacaggacgtgcatttaggaagagaaaaatcttatttaatgttacaacaaaatttatttataagggcaaaaattgatgttttacaaaaaaacattatttcttta

SEQ ID NO: 16145 - DNA, 594 bp, Clostridium botulinum
ttgactttatttatggttttatctgtatttataggagctttatgtggatatttttttattccagaaagctttattcctaatatagaatttataagcactatagctttaaatttacttatcctatttgtgggaattgatgttggaagtaataaaaatctaataaaggatttaaaaagaaatgggttgaaagtacttttaataccactctcaataataataggcagtcttaccggtggaataataactgcaatattttttaaattatctataaaatcagccttatccatagcagcaggatttggatggtatagtttatctgcagttatgcttactagcttggaaagcgccaaaataggaaccatagcatttttgacgaatgtatttagagaaataatagcagtaattacaataccatttttagcaaaaaaattaaatcattttacagctatagccccagcaggagccacatctatggacacaaccctacctataatatcaaaaaatacatctccagaggtagccatagcatccttcataaatggagtaatactaagttctttagtgccaatgctaatatccttcatatacaccatg

SEQ ID NO: 16146 - DNA, 225 bp, Clostridium botulinum
atgattaaagtatatacagcagaaggatgcccatggtgcacaaaagcaaagacatatttaaaaacaaaaggaatagcatttcaggaactaaatattgaaaaagatgagaaggcaagagatgaaatggttcaaaaatcaagccaaagaggtgtacctgtattagatatagacggatcaattataataggatttaataaaccggctatagatgaagctataaattta

SEQ ID NO: 16147 - DNA, 753 bp, Clostridium botulinum
atggcaagagttatattaaatggttctaatgggaaaatgggtaaggttatatgtaatttagcagaaaattattctaatttagaaattgtagcaggtatagataaaggtgaggcaacttcttcttttcctgtttttactgatataaacaaatgtaatatagaagctgatgttatactagacttctcaagacctgacgcattaaatgatttgctaaactttgctacttcaaaaaatatgcctataataatatgcaccacaggtttttctgagaaccaaataaaacttatagaagaaactgcaaaaaaaatacctgtttttagatctgccaatatgtctataggtattaatatagtcaacaatatattaaaaaacataagtgcttttatgtataaaaactttgatatagaaataatagaaaaacatcataaccaaaaggtagatgctccaagtggaactgctattcttctaggggatactataagggattcaataaaagaagatactaaatatacctatggaagagaaggtagttcaaaacgaactcatgatgaaataggtatgcatgccataagaggtggtactatagtaggtgaacatgatgttatatttgcaggatccggagaaactatagaaatcaaacatacagctttatctagagaagtatttgctgtgggagcattaaacgcttgtttatttatgagtggaaaagaagccggattatacaacatggataacgtaatacaagcagctcta

SEQ ID NO: 16148 - DNA, 2820 bp, Clostridium botulinum
atgaaggataaaattattattaaaggcgctaaggttaataatttaaaaaatataaatcttcagttgccgagagataagtatatagtatttacaggcctatctggttctggtaaatcctcattagcttttgatactttatatgcagagggacagagaagatatgtagaatctttatctgcctatgctagacagtttttaggacaaatggataaaccagaagtagattatatagaagggttatcaccggccatatctattgatcaaaaaaccactaatagaaacccacgttcaactgttggaactgtgacagaaatatatgattatttaagactgctatatgcaaaaataggaaaacctcattgccctaaatgtggaaaagaaataactcaacaaacagtagatcaaatggtagataaaataatgactatggaggaaaggactaaaatacaagtgttatctcccattataaatggaagaaaaggtgagcacattaagactatagaaaacataataaaatcagggtatgtaagagccagaatagatggaaatatagtagatttagaagaggaagaaataaagttagaaaaaaataaaaaacataccatagaggctgtagtagatagattagtagttaaagaaggcatagaaagtagacttgcagattctatggaaactgcattaaagctatcagaaggaatagtaataataaatgttgtgggacaagaggatatgctttttagtgaaaaatttgcttgtgtagattgtaatataagtataggagaaatagctcctagaatgttttcttttaactccccttatggaaagtgtgataaatgtgatggattaggtaccttaatggaaatagatgaggacttagttataccgaataaaagtaagagtatagtagagggagcaataattccattaggcagtggtagtttaaaggaagattcatggacttttagtatattaaaagctttgtcaaaggaatataaatttgatttaaatactcctatagaaaaattagatcctaaaatagtaaagattattttatatggactagatggaaaaagaataaaagtaaattataaaaaagaaaatagaatcatggaattaaatcatgcttatgaaggtgttataaataatcttagaagaagatatatagaaactaattctgattatataaaaagagatattgaaagatatatgagtgataatccttgtccaaaatgcaaaggtgcaagacttcatgatgaggctttatctgttacagtagcagataaaaatatatttgagttttgtaatatgtccataaaaaaagaacttgattttatagaatctttagagttatctaaaaaagaggaaataataagcaatcaaatactaaaagagattcgcagtagactaaaatttttaatagatgtaggtttagattatcttacattatctagaaatgcatcaactttatctggaggagagtctcaaagaataagattggctacacaaataggctctagtttagtaggggttttatatatattagatgaacctagtataggacttcatcaaagagataatgatagacttataaaaacattaaaaaatttaagggacttagggaatactttagtagttgtagaacatgacgaagataccataagagaagcagactatattgttgatataggtccaggtgctggtgaacatggtggagaagtagtagcagcaggaaccttagaagatataatgaataccgaaaagtctataacaggacaatatataaagggagttagaactatatcagtacctaaagaaagacgaaaatgtgaaggtaattatatatccataaagggagctagagaaaataatttgaaaaacgtaagcgctaaattccctataggattatttacttgtgtaacgggagtttcaggttcaggcaaaagtaccctagttaatgaaatattatataaaggtattcataaaaagctaaataattcaaaggataatccaggtaaacataaggagattactggcatagaaaatgtagataaggttataaatatagatcagagccctataggtagaaccccaagatccaatcctgccacctatacgggagtatttgatattataagagaagttttttcaaatactcaagaggctaagatgcgaggatataaaccagggagatttagtttcaatgtcaaaggtggaagatgtgaggcttgcactggagacggaattataaaaattgaaatgcaatttttatctgatgtatatgttccttgtgaagtatgtaaaggaaaaagatataatagagaaactttagaagtaaaatataaagggaagaatatatcagatgtattaaatatgactgtagaagaagctctagacttttttgaaaatattccacgtataaaaagtaagcttcaaactcttatggatgtgggcttaagctatataagattgggtcaatcctctacacaactttcaggaggggaagctcaaagaataaaattagcttatgagttatctaaaagaagtacaggaaaaactctctatatattagatgagcctactactggacttcatatggaggatgtaaataagttaataagtatactacaaagattaacaaattcaggtaatactgtagtggttatagagcataatttagatgttataaaaaatgcggattatttaatagatttaggaccagaaggcggagaaaagggaggaactataatagcagagggaactccagaaaaaatttcaagagctagtaactcatatacaggacaatatttaaaaaagatgtta

SEQ ID NO: 16149 - DNA, 627 bp, Clostridium botulinum
atgagtaaagtaacacaaatagcacatccattaattcttcataaattagccttaattagagataaaaatactggttctaaagattttagggagttagtagaagaagtagctatgcttatggcttatgaagttacaagagatttacaattaaaggaagttgagattgaaactcctatatgtaaaacaaaatgcaaaatgctatcaggtaagaaagtagcaatagttccaatattaagagcaggacttggaatggttggtggcatgactagcttaataccagcagcaaaagtgggacatatagggctttaccgtgatgaggaaactttaaaacctgtagaatatttctgtaaattacctcaagatattggtgatagagatgtaattgttacagatccaatgcttgctacaggaggatctgcaaaagatgcaataacattattaaaacaaaaaggagcaaaacatataagactaatgtgtcttgtagcagctccagaaggaattaaagaagttatggatgaacatccagatgtagatatatatgtagcttctgtagatgaaaaacttaatgaaaagggctatgtagttccaggcttaggagatgcaggagacagactatacggaacaaaa

SEQ ID NO: 16150 - DNA, 1254 bp, Clostridium botulinum
atggataagatagtggttaatggtggaagtcaattaaaaggtgatgtaaacataagtacagctaaaaattcagtattaccaatcattgcaggtagtatattgagtggaaataaatgcgttatagataatgcaccaatgctagaggatgtatttgttattggagaaattttaaaaagtatttcagccaaagttaatatagatgaggttaataacagagttataatagattctaaaccagtggataatttagaacctgatagtgatttagttaaaaaaatgagagcatcatttttgctaatgggacctatgatgtctaggtttggaaggtttaagatatcattaccaggaggatgtaatataggtacaagacccatagatttacatttaaaaggattcactgcccttggagcaaaagttaacatagggcatggttatgtagaagctgtagcagataaattaataggaaataaaatttatttagattttccttctgtaggggctacggaaaatataatgatggcatcagttatggcagaaggagagaccgttatagaaaatgcagcagaagaaccagaaatagaggatttaggaaggtttttaaacagcataggagcaaatattataggagcagggacagatacagtaagaataataggagttaatgaattaaagggaacaacacatagacctatatatgatagaatagaagcaggaacttttatgatagctgctgctataactaagagtagaataaaaataaatggtgttatagaagaacatttaaaacctataatcgcaaagcttacagagatgggcgttgatataaaaataaaaggagaaactgctatagtagatgggagaaaaatattaaatccagtagatataaaaactatgccctatccaggtttcccaacggatatgcaggcgcaaatgatggctttattggccactataaaaggaaccagcattatcacagaaactatatttgaaaatagatttatgcatgtatctgaaatgaagagaatgggtgcagatgtaaaaatagatggaagaagtgccgtaatagaaggtgtaaataaattaacagggacagaagttaaagctacagatctaagggcaggagcggctcttatattatgtgctctagcagctgaaggaaaaacagaaataacagatgtatatcatatagatagaggatatgtaaaaatagaggaaaagttaaataaattaggagcaaatattagacgagtacat

SEQ ID NO: 16151 - DNA, 2439 bp, Clostridium botulinum
atgggaaactatagtactaaaatcgacgagaaatggcaaaaaaaatgggaagaaaactctctatacaaatttaataataaaaatttagataaaaaattatatgtacttgaaatgttttcttatccatcaggtagtaaattacatgcaggacactggtttaactatgggcctgtagactcttgggcaagatttaaaagaatgcaaggttacaatgtttttcaacctatgggttttgatgcttttggtcttccagctgaaaactatgcaataaaaactggtatacatccaaaggattctacctttaaaaatattgaaactatggaaactcaattaaaagccatgggtgccatgttcaactgggaaaatgaagttataacttgttcaccagactactataaatggactcaatggttatttttaaaactttacgaaaagggtttagcttataaaaagaaagcacctgtaaattggtgcccaagttgtaatactgttcttgctaatgaacaggttttagatggaaaatgtgaaagatgtgatagcaatgttgataaaaaaaatctagagcaatggttcttaaagataactgactatgctgatgaattattagaaaaactcgatgaattagattggcctgaaaaaactaaggctatgcaaaaacactggattggaaaatctgtaggtgctgaagttacatttaatgtagcagattcagacttgagctttaatgtatttactacaagggtagatactttatttggagttacttatgtagttttagctcctgaaaatgatttagtagataagctaactactcctgaaaacaaagctgaagttgaatcatataaaactcaagctaaaaatcaatctgatatagaaagacaatctataactcgagaaaaaactggtgtattctcaggctcttatgccataaatcctataaacggtaaaaaagtacctatatggataggagattatgtattaaatacctatggaacaggttgtgtaatggcagttcctgcccatgatgaaagagatttcgcttttgctactaaatataaccttcctatagaaagagttatagaaggcggtgattctcttccttatacagaatatggtggaatggttaatagtggagaattcgatggtttattgggaaatgaggctaaagaagctgtaatttctaagttagagtctatgaatcttggtagaaagaaaataaattatagattaagagattggcttgtatcaagacaaagatattggggagcacctattcctataatttattgtgaaaaatgtggtacagtggaagttcctatagaacagctccctgtagaattaccatataatgtagaattctctccagatgggaaatcacctttaggtaaatgtgatgactttataaatacaacttgcccaaaatgtggtggtccagcaaaaagagaagcggacacattagatacctttgtatgttcttcttggtactatttaagatatccagataataataacgaaaaagatgcttttaatcctgaattaataaataaaatgcttccagttgataaatatgttggcggtcctgaacacgcttgtatgcatcttttatatgctagatttataactaaagctttaagagatatggggtatctaaactttgatgaaccattcttatctcttactcatcaaggattaatattaggacctgatggcttaaaaatgagtaaatcaaaaggaaatactatatctcctgatgattatataaaagaattcggtgcagatgtatttagaatgtatttaatgtttggatttgattatacagaaggcggcgcttggagtgacgatgctataaaatccataggtaaatttgtagacagagtagaaagaatattagaaaatgctagagaagaaataaaaaattctaaagataataaatctactatggataaagatgagaaagaattaaactacgtaaggcatcatagcattaaatctataactgaagatatagataaaatgcagttcaatacttccatagcaagattaatggaatttacaaatgctctatctaaatatcttggtattgatgctattaaaaatgctttattcttgagagaaagtataattgactttataacattattagcaccttttgctcctcattttgctgaagaacaatggaaacttataggcattaattcttccattttcaatgaaaaatggcctgaatttgaccctaaagccctaataaaagatgaagttgaaatagccgtacaagtaaatgggaaaataagagctaaaataaatatatctactagttcatcagaagatgaaataaaagaatcagcattaaataatgaggatattaaaaattctataggtgataaagaaattaaaaaagttatagtaataaaaaatagattagttaatatagttgctaaa

SEQ ID NO: 16152 - DNA, 177 bp, Clostridium botulinum
gtggctaaggttaaaataacattagttaagagcttaataggtagaaaaaaagatcagatagctactgttaatgctcttggactaaaaaagattggtaacatagttgaacatgaggaaactcctcaaataagtggaatgataaaaaaggtaagttacttattaaaagtagaagaagca

SEQ ID NO: 16153 - DNA, 1224 bp, Clostridium botulinum
atgaaaatcctatttttgactcaatactgtccacctgaagttggagcacctcaaaatagaatttttgagtttgcaaagcaactaaaaaaattcggtcatgaggttacaatattaacggctatgccaaattaccctaaaggtgaaatatttgatggttataagggaaagaaaatagtaaaagaggaactggatggaataaatatcgttcgtacaagtatatatgcaacgaaggataaatcctttgtaaaaagacttagaaattatctttcgtttactttttcttcagtatttacaggctctaaatatattgataatcaggatgctataataacagaatctccaccgctatttttagggtggtcaggatatattttatctaaaaggaaaaaagcaaaatttatttttaatgtatctgatttatggccagaatctgctgtaaaattagatgtattacataataaatttcttataaaggcatctacatggcttgaagagttttgttataaaaaagcagcagcagttactgggcaaacaaagggtatagttgataatattgtaagtagaggttttgataaaaataaagttcatttaataactaatggagtggatacagaattttttaaaaaagaaaatagggatgaaagcttaagagaagaatggggattaaaggataaatttgcagtatgttatgcgggtatacatggcctagctcaaggattagaagttgttataaatgcagcggaattattaaaagaagaaagagatatacaatttgtatttataggagatggaccagaaaaatctgagcttatgactatggtaaaagaaaaaaaattaactaatgtatcttttcagccaatgcagcttaagcctaatatgcctagaataatagcatctatggatgctaccgtagttcctttaaaaaaattagatttatttaagggtgcactaccatcaaaaatgtttgaagcattggcatctgaattgcctatagtattagctgtagaaggggaagcagaaaagcttataaatgaagctaatgctggaataactgtagaaccagagaatgcaaaagaagtttcacaagcagttttaaagttatataaaaataaggatattaaagagaaattgggacaaaatggtaggaattatgttataaaaaattattctagagaaagtataactagaaagttagaaaatatattgttaaaattaaagaatagt

SEQ ID NO: 16154 - DNA, 888 bp, Clostridium botulinum
atgaaagataaattagttaaggctattgctaaggatggacaggtaagaataataggagcaataacaacagaattagttaatgaaggagtaagattacataattgtgccccaacagcagctgctgctttaggaagaatgcttacagcaggagcattaatgggaactacattaaaatcagagaaggacactttaacattacaaattcatggtggtggtattgctaagggagttgtaattacatcatatgcagatgggcatgttaaaggttatataggtaatcctacagcagatatagagccaaatagtaaggggaaattagatgtaagtggaattataggtaagaatggtaatttattagttataagagacatgggattgaaagagccttatatagggcaggtgcctatatatactggagaaataggagaagatttagcttattattatacagtatcagaacaaacaccttcagcggtaggtttaggagtattagtagataaagatttatctataaaatcagctggcggatttataatacaaatgatgcctggagctgatgaaatgttagcagatttaataagttatagattagaagaaataccttctattacagaaatgatttcaaagggaatgacaatagaggaaatattagaatacatatttgaagatatggatttaaaaatattagaaagcatagtgccagaatatagatgtgattgttcacgagaaaaggtagaaagagctttggcgagtataggacaaaaggatttaaaagaaatatatgatgagggcaaagaggaagaactgaaatgtcatttttgtaataaagcatatgtttttagtcatgatgaggttggggatattttagaaaattattatagtgaaaaa

SEQ ID NO: 16155 - DNA, 1071 bp, Clostridium botulinum
atggctaattgcaaattaataattgaagttatggataagataaaagctatagatacaagtcctttgaagataatggaagtgtgtggtagccatactgaagttataggtagattaggcttgagagatattttatatcctaaagtaaatttagtatctggtcccggttgccctgtatgcgtaacagatgaaagctatatagatgcagccttaaagcttttaaatagggaaaatatattaataaccacttttggtgatttaatgaaagttaaaggtactactaatagtttaatggatgaaaaaccaaatcacaataatataaaagttatatactcgccattagaggcgcttaagatagcaaaagaaaataaatctttagaggttatttttctagcagttggttttgaaactactatccctttaatagccttatctataaagcaagctaaaaatgaaaagataaaaaatataagttttctactaggtttaaaaacaatgaaacccatattagaacatatatttaaagataaaaatcataatatagatggggtaatttgtccaggccatgtagcttctgttaagggcgctaattattttagatttataagggatgcatataatattcctgcagtaatatcaggatttgaacccttagatatcttaagctctatatattttattataaatagtaatataaaaaataaaaaaacttttataaatttatataaaacctgtgtaaaagaagatggaaataaaattgctaatgagcttatagatgaggttttttgccaaaatgattcaaattggagaggtataggattgattaaaaactctggattagatctaaaaaatatatatagtgactatgatgctttaaaaaaattcaatgtgaaaattgaaaagcatgaaaaatccactagatgtatatgcggtgaagttatattaggtaaaaagtctcctaaagaatgtgacctgttttctaaagaatgtaatccaggccattcaaagggcccttgtatggtatctaaagaaggggcttgttctatattttatagatacaataaatttaagctc

SEQ ID NO: 16156 - DNA, 798 bp, Clostridium botulinum
atgaaaaatattaaaaaaatatcttcaatttttattgtattttctttatttacatctatactagtgggatgtgctaacagcaagagtaccgaagctgtaaaaaaggaagaaactaaagtagaatctttagtagttttttcgggggcagggcttaaaagacctatggaagagataggaaaaatgtttgaaaaagaaaataatataaaaatagaatatatatttgcaggctcaactcaattaatatctcaaatggaattagggaataaaggagatgtttttatagtaggatctgtaaagacttatgatatagctaaagataaaaatcttgtaaatcagtataaaaaggttgctcatcataccccagcaatagcagtccaaaaaggaaatccaaagaatataaaatctcttgaagatatggctaatcctgggatgaaaattatattaggagatgaaaaagctaatgcaataggtataactgctcaaaaaattataaagaaaaatgatctccctaatataaataaaaatgttatatctaaggcagccactgttaatgaaattgttgctcagctaactacaggtaaagcggatgctgccatagtaacagcagattcaatttttgaaaataaagatgttgaggcaatccaaattcctaaggataaaaatatagaccaaatcatacctgtatgctctttgaaaaactctaaaaataaagaacttgcagaaaaatttgttgatttggtagcttctgataaaggtaaaaaaatatttgcaaaacatggattccatcctgttgaaaaa

SEQ ID NO: 16157 - DNA, 351 bp, Clostridium botulinum
gtggcaaagaaaatatattcaactgaattgaaattagagattgtaaaaaagtacttatctgataatgtaagctttggagtgttagcacaagaatgcaatattaataaacaagatattcagaaatgctttgttgtctatagagagcatggtgaagcagtactttctactgttaacggtacttattacactggagattttaagataaatgttgtagaccatatgcataactgttctgctcgaagtactgcggcatattttgatattccaataagaggagattacctggataattcaataatgaaaaacttctttgaattactaaaatttgagttgttatatatacgaagaatt

SEQ ID NO: 16158 - DNA, 1413 bp, Clostridium botulinum
atgggaaagattattactattgatcctataactaggattagtggatttttagaaataaaggtaaaggtagaagacaacattattgtagatggtgaaaccagcggattattatttagaggctttgaaaaaatgttagaaggaagacctcctttagattctatatattttactgaaagaatatgtggcatatgttctactgcccatgctacggcatctactttagctttagaaaatgcattaaatataactccaagtataaatgatatatatataagagatatgatgcatggatttgaatttatacaaaaccacctaaggcagttttattgttttactgtgccaagctatgtaaacctacctaatataagacctatataccctcaggaatatagtgattttagattgcctaaaaagctaaatgaaagaataagttcccattatgaagagggcataaaatatagtaggttagcccatgaagccttagctgtattgggaggtaaagcacctcatagtcatggtattttcgtaggaggagttactgtaaatatagattcttacaaattaacaaaaatacaatccatattaaaggcaataaaaaagtttgtaaatatctatatgttagaggatatgaatataattgctcagtattaccctgaatattttaaccttggaaatacttatggaaattttatgagttttggtgtatttgataaatataaggataaaaatataagctatgtaaaaccgggagtaataataaataataaattagaaaattttgatagagataaaataacagaaaacattcgctatgcttggtatgtaagcgatactataatagaaaatccgattatgaacaatgaatatactgtagatttaaaaaaagaaggagcttatagtttcgtaaaagcacctagatatgctgatttacctatggaagtaggtcctctagctcgattaaaaattgcaggagaatataccggaggcaattcctctatggatagaaatatagcccgtgttctagaaactaaaaaaataataaatatattatataatatatcagaaaaaattcaattactatctaataatcaatctgcatataatattccagaaggcgcctttggagaaggtcttatagatactactaggggagccttatcacactttataaaaatagagaataaaactataaagtactataatattataactcctacagcttggaatatatctcctaaggattcaaagggtacaagaggtgtaggagaaaaatccttaataggctcaaaaatagataatatagaaaaacccgtagaaataggaagaataattcgttcttttgatccttgcatttcctgtgccacccatttagtaagtaataataatgaaccagttaaagttgaagtattagta

SEQ ID NO: 16159 - DNA, 621 bp, Clostridium botulinum
atgaaaagagagttaatagatacagtatatgaaaaatttgaatatagaaaagcaaagcctataggtaatttcaaaagaagttcagtaatgatattattaaataaagtaggtacaaatattaatataatatttgaagtaagagcattaactttaaaaaatcaaccaggagatgtttgtctgccaggtggaaaaatggaaaagggagaaagacctctagaagcagctttaagagaaactgtagaagaacttaatatagataaagaaaaaataaaggtaataggacaaatggattatttcattagtccatataattttgtgatatatccttttgtcgcgatagtggaagatatagatatagctcctgataaagaggaagtagatcacgtatttgaagtgcctatagagttttttttagaaaatttacctacttgttacgaaatagatatagtacctagtataacaggagatttccctttttctcttataagaaatggtaaaaactataaatttagtaagggaactatccctgaatatttctatgaatatgaaggtaatgttatatggggatttacagcgcttattgtaaaaaattttatagatataattaaggacaaaaaaaat

SEQ ID NO: 16160 - DNA, 930 bp, Clostridium botulinum
atgaatattgtagaaataaaaaatcttgaaaagaaatttaagaataatactgctgttaataatataaatttaactgttaaagaaggacaagtctttggattcttagggccaaatggggcaggaaaaagtactactataaatatgatttgtggacttttaactcctactaagggtgagatatttattttaggtaagaaaatggacaataaagctaaggatttaaaaaataatattggtattgttccgcaagacatagctatatatgaggatctaactgcctatgaaaatgtagctttctttggaggactttatggtgtgagaggacaagaactaaaagaaagagcaaaggaaactttagaatttgttggcttattagatagagcaaaggattttccttataaattttccggcggtatgaaacgtagattaaatattgcctgtgctctagtacatcaacctaaacttataataatggacgagcctaccgtgggaattgatcctcaatcaagaaatcatatcttagaatctataaaaaaactaaatgaaagaggctgtacaataatatacacaagtcattatatagaagaagtagagcagttatgtacagatatagccattattgataaaggaactattatagctaagggcaaaaaagatgagttagtagaaaaatactctgatttaaatatggttgtaattaatattaaagattcaactaaagtaaatataaaagcattaaaatctatagaaggtgtagtggaggttaatattaaagaaaatactattgaaattacaaataagtcctctgataatttggatgatataataatgtactttttaaacaataaaataaaaataaaaaatatagagaataaacatagtgatttagaaactatattccttaaattaactggcaaaaaattaagagat

SEQ ID NO: 16161 - DNA, 369 bp, Clostridium botulinum
atgaaaaaagaagaaatcattcaagctataaaagaaatgacagttttagaattaaacgaattagtagaagcatgtgaagaagaatttggagtaagcgcagctgcaccagtagctgtagcaggagcaggagctgctgcaggagcaggagctgctgaagaaaaaactgaatttgatgtagtattagctgatgcaggttcagaaaaaatcaaagttatcaaagctgtaagagaagtaacaggattaggattaaaagaagctaaagctttagttgatggagctcctaaaacattaaaagaagctgcatctaaagaagatggagaagctataaaagctaagttagaagaagttggagcaaaagtagaattaaaa

SEQ ID NO: 16162 - DNA, 780 bp, Clostridium botulinum
atggaaaaatctttaattatagatgattacaataagatgatagataaagaagagtttatgatagagactaaaaatatcaaaaaaacctttggtaacttaatggtttttgaagatttaaatttaaaaattaaaaagggagaagtagtagtaataatagggtcttctggatcaggtaaaagtacttttttaagatgtttaaatgctttagaagaaataaatgatggaattatagaaatagaaggaaagattttaaactccaaggataaaaaatctatgaaagaattatgttctaaaatgggaatggtatttcaaaattttaacttatttcctcatatgactgcattagataatgtaatgatagggccattagtttctaaaaaggaaaataaagaaaaagttctaaaaatagctaaaaatcttcttaaaaaggttggattagaagataaaatggattattatcctagtaaattatctggaggacaaaagcaaaggatagctatagcaagggcattagctatgaatccagatataatgctttttgatgaaccaacatctgctttagatccagagttagtaggagaagttttatctgttatgaaaaagttggcagaagaaggtataactatggtagttgtaactcatgaaatgggatttgccaaggaagttgcagatagagttatttttatggatggaggtaaatttgtagaagaggcaagtccagatgtgttttttacatgtccaaaagaagaaagaactaaggaatttttaaaaaaagtacta

SEQ ID NO: 16163 - DNA, 195 bp, Clostridium botulinum
atgaatggtacagtaaaatggtttaatggagaaaaaggatttggatttattacaggagaagatggaaatgatgtttttgcacatttttctcaaataaattcagaaggttacaaatcacttgaagaaggtcaaaaagtttcttatgacgttgttaagggaccaaaaggacctcaagcagaaaatatcactattatt

SEQ ID NO: 16164 - DNA, 4290 bp, Clostridium botulinum
atgaaagaaatattaaaaatgggcttagatgtaggctcaactactgtaaagatagttatattagataagaattacaacatattatacagtgtttatgaaagacacttttctgatataaaaaatacaataggtaagttaataaagaatacttttaataaatttaaagatcatagtgtaagtattatggttacaggctctggtggtctttctgtatcaaaatggtttgatataccttttatacaggaagtagtagcctgcacaaatactattaaaaaatttgctacaaatactgatgtagctatagaattaggaggagaagatgctaaaattactttctttgatgatggaatagatcaaagaatgaatggaacttgtgctgggggtactggtgcctttatagatcaaatggcatctcttctacaaacggatgcaaagggactaaatgagcttgcaaaaaattataaagttatacatcctatagcagcaagatgtggagtttttgctaaaacagatgtacaaccactaattaatgaaggggctacaagcgaagatatagctgcttctatttttcaagcggtagttaatcaaactataggaggacttgcctgcgggaaaactataaagggtaatgtagctttcttaggtggacctctttattttttatctgaacttagaaaaagatttatagaaacgttaaaattaactaagaatcaggttgtttttcctgaaaattctcagttgtttgtagctatgggagctgcattaactgcaaaagatagcaaaatagttacattaaaatatttgttggataaattagatgaattagagaatactaggttggaatctgtagcaacattaagaccattatttgctaatgaagaggaatatattgaattcaaaaataggcatgaaaaacataaagcagtagaaaaaagtttagaagattttaaggggaattgttatttaggaatagatgctggatctactactactaaggttacacttatagatgaaaaaggacaattattattttcaagttatggaagtaatgaaggaaatccattaaagtctgtaataaatatacttaaagatttatattcaaagttacctaaagaagctcagattctaaattctgtagttacaggttatggagaaaaattaataaaagctgcattagatatagatattggagaagttgagaccatatcacattataaagcagcagaattttttagccctggagtagattttatcttagatatcggtggacaagatatgaaatgcttaattataaaagatggtgttatagaaagtattatgcttaatgaggcttgttcatcaggatgcggatcctttatagaaacctttgcacattctctaaaaatgagtgtgcaagatttcgctaaagaagcattaacctctaagaatccagtagatttaggatctagatgtactgtttttatgaattccaaagttaaacaggctcaaaaggaaggagctactataggagatatatcagcaggtctttcctattcagttataaagaatgctcttttaaaagtaataaaaataagagatcctaaagaaatgggaaagaaaataatagttcagggtggaactttttataatgaagcagtgttaagagcttttgaacttatatcacaaagagaggcaataagacctaatatagcaggacttatgggagcttttggagctgcacttatagctaaagaaagatatgaaaaagactataaaactaccttagctacaatggaacagttggagaaattttccgtagaaacagaaatgaaaagatgtgggaaatgtcaaaataattgccttttgactattaataaattttatgatggtacacaatttgtatctggtaatagatgtgaaagaggagaaggaaaagaaaaaatagaaaataaaattccagatctatatgaatataaatataaaagaatatttaattatatgccactaaagaaagaagaagctgaaagagggatagtaggcataccacgagttctaaatatgtatgaaaattatccgttttggtttacattctttacaaagttaggttttagagtagaactatctccccgttctactaaaaaaatatatgatttgggaatagacaccattccttcagaatcagcttgttacccggctaagatagttcatggacatattagaagtcttgtagataggggaataaatttcatattttatccagctatagcctttgagcaaaaagaacaaaaagaggctaataaccactataactgtcctatggtaatttcttattcagaggttataaaaaataacatggatataattagagaaaaaaatataaaatatatgaacccattcctatctttagataataagaagaagctagctaaaagactttatgaggaatttaaagatatttttaatataagtctttatgatataaaaagagcagtagaggctgcttatgaggaagatcaaagggttaagctagatataaggaaaaaaggagaagaagttatagactacttaaaaagaacaggtaaaaaggggatagtattatctggtaggccttatcatatagatccagaaataaatcatggtataactaatataattacatctttagatatggcagttttaacagaggattctatagctcatttgggaatggttgaaagacctttaagagtagtggaccaatgggtttatcattcaaggctatattcagcagctagttttgtagctaaagaaaataatttagaactagttcaacttaattcctttggctgtggattagatgcggtaactacagatcaagttgaagaaattttaaaaagaactggtaaaatatatacccttataaaaatagacgaaggaagtaatttaggtgctgtaagaattagactacgttctttaaaagcagctatatatgaaagaaagaaaaagaactttaaacctgctaaactttatgatatgtctgaaagaccagtgtttactaaaaaaatgaaagaaaaccatacaatattatgcccacaaatgtcaccaatacattttcaatttatagaaacagcttttaaagcctctggatataatttagaagttcttccatctgtggataagaaggctatagatgagggattaaaatatgtaaataatgatgcgtgctatcctagtataattgtagttggacaaatgattgaggcattaaaatcaggtaaatatgatgtgaacaatacttctgttataataactcaaaccggtggaggttgtagggctaccaattatattggctttttaagaaaggcattaaaagaagctggataccttaatgtgcccgttatatctttaaatgtagtaggattagaaaagaatcctggatttaaaataaccccttctttagggaataaatctatgatggctttagtctatggtgatttatttatgagggttttatataaagtaagaccttatgaaaaaataccaggttcagcaaacttactttataaaaaatggatagaaaagtgtaagaaaagtattttgaatggcgatttaaaagaatttaaacaaaatataaatgatattgtaagagattttgatactttagaaattaaaaaaataactaaacctaaggttggagtagttggagaaattttagttaaatttcatcctacagccaataatgatgtagtaagtattatagaaaaagaaggtggagaagctgtagttccggatttaatagatttctttttatactgtgcttatagtgaaaactttgtatatagatatttatcaggtaaaaagagaaaagcagtattaaataatattggaataaaagctatagaattttacagaaaagaaatgaaagaggttttaagaaacagtaaaagattttcaccaccaaaagaaatacaagaactagcaaaattagctaagccaatagtttctataggaaatcaaacaggagaaggttggtttttaaccgcagagatgattgaattaatagaaagtggaacgaaaaatattatttgtatgcaaccatttgcttgtttacctaatcatgttacgggaaaaggtatgataaaagaattaaaaaggaattttaaaggaactaatatagcagccatagattatgatccaggagcaagtgaagttaaccaattaaatagaattaaacttatgatgtctgcagcctttgaaaatttagaattagaagaagtaaaaaaggcaaaggaagagatagcagtatctaagaaagatgatattataggagag

SEQ ID NO: 16165 - DNA, 264 bp, Clostridium botulinum
gtggataaaatgttagaaagagaattaactgtaaacagttcaactggtttacatgcaagaccagcaactttattagtaaaaaaggcttcatcctttaaatcagatttatctattgaatttaatggtaaaaaagccaacataaagagtcttataggagttctttcattaggagttacaagtggagcaaaaataaaattaatagcttctggtgatgatgaaaccctagctatagaagaaatctcaaaattaataaatacattagaa

SEQ ID NO: 16166 - DNA, 1311 bp, Clostridium botulinum
ttgcaaaatttgttgcaatattatattcactattgggaggtaatcaatatggcaaaagaaaatttaaatccatttgaaaatgcgcaaaaacaagttaaaacagcttgtgacaaattaggtatggaaccagcagtatatgagttattaaaagaacctcaaagagtaattgaagtttcaattccagttaaaatggacgacggctcagtaaaggttttcaaaggttatagatctcaacataatgatgcagtaggtccaacaaaaggtggagtaagattccatccaaatgtttctttagacgaagtgaaagcgttatcaatctggatgacatttaaatgttcagtaacaggaattccatatggtggtggaaaaggtggaatcatagttgatccaaaaactttatctaaaggagaacttgaaagattaagcagaggatacatagacggtattcacaaattaataggcgaaaaagtggatgttccagctccagatgtaaacacaaatggacaaataatggcttggatggtagacgaatataataaattagtaggaagaagtgctatcggcgttataactggtaaaccagttgagtttggtggttctttaggaagaaatgcagctacaggttttggtgttgcagtaactgcaagagaagcagctgctaaattaggaatagatatgaaaaaagctaaattagctatccaaggtataggtaacgttggaagtcacacagtattaaattgcgaaaaattaggtggaacagttgtagctttagctgaatggtgcaaagaagaaggaacttatgctatctataacgaaaacggtttagatggaaaagctatgatagaatatgttaaagaaaatggaaatttattaggttatccaggagctaagaaaatatctttagatgagttctgggcattaaatgtagatatattaatcccagcagcacttgaaaatgctataactcatgaaaacgcttcatcaatcaatgcaaaacttgtttgtgaagctgcaaatggccctataactccagatgcagatgctatattaaaagaaaaaggaataacagttactccagacatattaactaatgctggtggtgttacagtttcttacttcgaatgggtacaaaacttatatggctactattggacagaagcagaagtagaagctaaagaagaagaagctatggtaaaagctttcgaatcaatttgggctataaaagaagaatatagcgttacaatgagagaagcagcttacatgcactcaattaagaaagtagcaggagctatgaaattaagaggttggtat

SEQ ID NO: 16167 - DNA, 531 bp, Clostridium botulinum
gtggattttatgttaaaagaattaatagaagttgtaaaatctataatagtagctgtgatagcagcttttttaattataacttttgtatttgaaaccgtaagtgtagaaggtcattctatggatccaacattaaataatagagatagacttatagtagaaaaggtaagttactattttagaaaacctaaggatggagatatcgttgtaattaaatatccatcagatactagagaaaaatttataaaaagagttatagctgttccaggagatacagtgagtatacatgataataaagtatatgtaaatggtaaagctaaagaagaaaactatatattagaaaagtatatggaagattttaatgaagtaaaagttccagaaaactcagtattcgttatgggagataacagaaatcatagtagagatagtagattcccagatgttggttttgtaaattataaattagtagtaggaagagcagcaataagaatatatccttttaacaagtttggtagtttatattctaaaaataaa

SEQ ID NO: 16168 - DNA, 924 bp, Clostridium botulinum
atggcattagtaacgactaaagaaatgtttaaaaaagcttatgaaggtaaatatgctataggagcattcaacattaacaatatggaaatattacaaggcgttgtaaactctgctaaggctgcaaactcagctgttatacttcaagtatctgcaggagctttaaaatatgctggtcctaaatacttaaaagcaatggtagatgcagctatagctgacactggaatagatgtagctctacatttagatcatggtgcaagcttagatgttgtaaaattagctgtagaaagcggatttacttctgtaatgtttgatggctcccattatgattatgaagaaaatgtagctaaaactaaagaagttgtagaatatgctcactctcatggtgttgtagttgaagctgaattaggagtattagcaggagtagaagatgatgtgcaaagtgatgtacatatctacactgatccagaacaagctgtagacttcgtaaatagaacaggtgttgattctttagcaatagctataggaacaagccatggtgcttacaaattcgccggagaagctcaattaagatttgatatattagaagaaattcaatcaaaattacctggatatccaatagttcttcacggagcatcttctgtagatccagaatctgttgatacttgtaacaaatacggtggagaaataaaaggagctaaaggggttccagctgatatgcttagaaaagcatcttcaatggcagtatgtaaaataaacatggatacagatttaagattagctatgacagctggtataagaaaagtactttctgaagatccaaaacaatttgacccaagaaaatacttaggtgaaggcagagcaagaatagaaaaaatcgttgaagataaaataaaaaatgttttaggttcagctgattctttaaaa

SEQ ID NO: 16169 - DNA, 831 bp, Clostridium botulinum
atggaggttttatttatggacagattactttttggaatatccggcctacctataggtgatggaactactaaatttaattataaatcaggcataacatatttaaataatataggcttagatgccatggaattaccctttgtaagatctgttaatgttacagataaaaacaaagaaggcatattagaggaaaaaaataataataatttttatttatctgcccatggttcctactttataaatctaaacgcagatgaaatagagaaacaagaaaaatctatggaaagaataataaaaggtgctgagggcttaaaacaagttcagggaagaagcttaatatttcatcctggattttatcttaaggactccaaagaagagacttttaaaactattttagagaatttgaaaaaattacccgatttaggagtagactatagattagaaactactggaaaaggaactcaattcggttctttagaagaaaatgtagccttatgtaaagaagttgatacttgcaaattatgtatagacttttctcatatacatgctagatctaatggtggtttaaaaagctataaagatttttataatatattaagttatgtagaaaaaaatctagggagatctgccttagatgatatgcatatccatctttccggaatacattatagtgaaaaaggtgaaagaaaccatcttccttttgaagaaagcgattttaactatattgcttgccttaaagcttttaaagattttgatattaaaggttgtgtaatatgtgaaagtccaatacttgagaaagatgctcttcttcttaaaaattcatattacgaactt

SEQ ID NO: 16170 - DNA, 441 bp, Clostridium botulinum
atgaaagttatattattaaaagacgttaaatcattgggtaaaaagggggatctagttaatgcatctgatgggtatgcaagaaattatctaatcccaaagaaattagctgagcaagcaacagaaaataatgtacacattttaaacaataaaaaagaagcagaaagaaggcaaaaattaaaggaactagaagaagctcaaaaattagcaaaatcattaatgggaaaagaaattaaatttaaagttaaaattggtgaaaatggacgactattcggttctataacatcaaaagatatttcagaaaagttaaaagaacaatacaatatgaatatagataaaaagaagatagtagcagaaactataagacaaacaggagtttatgaggcagaaataaaaatttacccagaagtttcaactaaagttaaagtttctgttttagaagaa

SEQ ID NO: 16171 - DNA, 885 bp, Clostridium botulinum
gtgtataaaataattgaaaaaaaagaattagcaccgaaaatatattctattgaaatagaagcaaaaagggtggctaaatcagcaaaaccaggacaatttattatagtgagaatagatgagaagggagaaagaatcccacttactgtagcagattataataaagaaaaaggaacggtaactatagttgtacaggctgttggatcttcaactaatagaatggtgcagcttgaagtaggggactattttatggattttgttggaccacttggtaagccatcagaatttgtagaagaggatttagaaagtcttaaaaatatgaaattaatttttgtagcaggtggagtaggcgcagcacctgtataccctcaagtaaaatggctttgtgaaagaggaataaaaccagaggttataatagggggaaaaagcaaagaatttatattgttagaaaaagaaatgatagatttaggagcaaaggtatacccttgtacagatgacggttcttatggattctatgggcttgtaactaataaattaaaagaattaatagatagtggagaaaattatgatagagtaataactatcggtcctatgataatgatgtattttgtaactaagttaacaaaggaatacaaattacctacaattgcaagtttaaacacacttatggtagatgggacaggaatgtgtggagcctgcagggtaactgtaggaggagaaacaaaattcacttgcgtagatggaccagaatttgatgcacatctagtagattttgatgaagctatgaaaagacaagctttatataaaacagaagaaggaaaaaggcttcataaaatagaagaagaaaaagaaggtcacgtatgtcatatcggagcgggggagaatgcg

SEQ ID NO: 16172 - DNA, 1074 bp, Clostridium botulinum
atgggaaaaggtatatcaatttttttaggaatggataatagtatagataaaatattagagttaattaaaatagcaaaaaataatggttatgatagaatatttacttctcttcatattccagaagctaactatagtgttatagtagaggaatttaaactagttttagatatggcaaagaaaatgaatatgaaaataattgcagatatatcacctaaaggctttgaatatttacagattaaagatatggatttaaacaaaataaaaagtataggtatagatgtattaagattagattttgggtttacagaagaacaaatagctaaatttacaaataataatttagatataaatattgagctgaatgcctctacaataacaaaggattttttaaacaaattaaataagtataatgttaattataaaaatattcaagcatgtcataattattaccccagaaaagacaccggaatttcagaaagtttatttttaaaaaagaattctatgttaaaggaaataggagtagaagtttcagcctttgtgccttctttaataggtaaaaggggacctatatatgaaggacttcctactattgaaaaacatagatttatgaatccttatttatctgccaaacacttatttgcaatgggagtagacaatgttttttttggagatgcaatgccatcgaaggaagaaataatggaagttggcatgattaaagaagatataatagaattagaagtggatttagaagataattccctaattacatgtaattatttaaaccaagatttttatacaaatagagtagatgtagctgaaaatgttataagagctgcggaaggaagacttatagtaaataatagtgtaatagagccatttaatacagtagatagaaaagtaggatatgtgactttagataataaaggatatttgagatatatgggagagttacagattctgctaacggacttagaaaaagatgatagagtaaatgttatagcaaaagttaaaaaagatgagctgtttttattgaagtatataaatgaaggaagaaaatttagatttaaaatagaa

SEQ ID NO: 16173 - DNA, 417 bp, Clostridium botulinum
ttgaaatttagtagaggtgaatttatgtttataaaaatagtaattgttattggacttgcatggcttctacaaactgtattaggttttttacaatttaaaaattttaataaaaattttaaagaacttagacaaaaaggaagagtagtaatagggaaaaataggggacgtgtaaagaggggttcagtaatactgattgctattgatgataattgctctatacttgagagcagaatcatgaaaggaattactattttagctagatttaagcctatggagattttgaataatcaaaatctccatagcataaatcccaatatattggaaagtttagaccagcaggcagctttggcagtacaagatgggatcaaaaattataatgaatattataaaacaaaggaggagattgattctaattta

SEQ ID NO: 16174 - DNA, 1350 bp, Clostridium botulinum
atgaaaaaatctaaatacaataaaataatcaaattagaagatggaaaaactatagcttttaatagtgttacttgtgcgttagcagaggtagatcaggatttcttagctgtattagcaaacatagaaaatatagatatagaaaatttagatgaaaaaaagagagagttagttgaaaacatgtcaaagggtaattatatagttcatgatgatatggatgaattaaagttattaaaatatagaaattacaatgggaagttttcaagtggcgcattaggactagttattgctcctacactagcttgtaattttgcttgtccttattgttatgaaactccaaaagcaggccttatggacaaaaaagttcaagatagtttaatagaaatgatagaagaaaatgctaaaaataaaaataatataagtataacttggtatggtggagaacccttattagcaaaggagatgatatttgacttttctcaaagggctatagaaatatgtgaaagagaaaatgttaaatatagtgcatatattgtaaccaatggatacttgatagatgaagaaactatagaaaatatgaaaaaagctaaaataacaggggcgcaaattacagtggatggccctccaagtattcataataaaagaagaatattaaagaattcagatgaggaaacttttactacaataatggctaatgtaaaaaaacttatagagggtggaattaaaaatatagctattagaataaatgtagataaaacaaatgttgatcatgtggaggaattattagatatattagaagaaaatggattgaaagatgttgttgttaatctaggacatgttactgcatatacagatagttgtaacggaattgcaaataattgtttaaatacaaaagaatatgcaaaaagtgatactaaatatcagaaagtactttttgaaagaggatataaggtggcaggagcatatcctttctatccaagcgtaaaagcaaattattgttgtgctgataatgttggagcttatgtaattgattctgaaggatatatgtataaatgttggaatgatgttggaaatgttgatagggcggttggaaatgttactacaattaaagacaaagtagatgaaaaaatgtatgcaagaaatatggaatatatattatggtctccatttgaatatgaagagtgtaaggagtgtagcatattaccaatatgcatgggaggatgtccatataaaggaacaatgaatgagaagcctgaatgtgaaaaatggatatataaccttgaagaaacaataatagcaacatataaccaaaaaaatgaggctgaatgtagtcagcagggatgttgctgtgaa

SEQ ID NO: 16175 - DNA, 699 bp, Clostridium botulinum
atgcgtaaattatcacaagaggaatttaaagagatattaaagaataggaacccaaaagaaaggcttgttttaaaagagatagaactttttgatatggattttacaagttggaatttatctaatattgatttttctttgagtgcattccatcgagttaagtttgatgaggcaaatctagagtatagcagtgtttttaatgtattatttgatgaatgtactgtacgtaaggcgaattttagacatgcaaatttagaatgtgcagtgcttcggtatgtagatatgactggctgtaatattgaaggtgcaaatttatatgctgcagtgttagagtatgctaaattggatgatattattttcgatgaggatacaaaatggtttcatttacattgtccagagaaaggagcatttcttgcatataaaaagtgttttaataatcgtttagtacagcttctaataccggcagatgcaaagcgcacttcggcaacgttaccttcttgtcgctgtaataaggcaaaagttcttacaatcaaaagcttcgactataaagaaagttatatggaagcttggtctttagtagatgagaactttgtttatcgtgtaggtgaatgggtagaagtaaaagattttaatgaggatcgatggatggactctactacgggcattcatttttggatgacaagagaagaagcaaagaactat

SEQ ID NO: 16176 - DNA, 648 bp, Clostridium botulinum
atgttgaggaggtgcaaagaaatgaaaaaagctatattaggtaaaaagcttggtatgactcaaatatttaatgaaaatggtaaagttataccagttactgtaatagaagcaggtccatgcacagttatacaaaagaaaactgtagaaaaggacggctacgaagcaatacaagttgctttcggtgatataagagaaaaattaagaaacaaaccaataaaaggacactttgcaaaagcaggtgtttcagttaaaagacatataaaagaatttaaattagaagattcaaatagcttagaaataggtcaagaaataaaagcagatgtttttgaagctggagaaagagttgatatatcaggagtttcaaaaggtaagggattccaaggaacaatcagaagatggaatgctcacaggggaccaatgagtcacggttcaaaattccatagagcggttggttcaatgggtgcttcttcagatccatcaagaacatttaaaaacaagagaatgccaggacatatgggtaatgttaatacaacagttttaaaccttgaagttgttagaataatacctgaaaaaaatctaatattaataaaaggcggagtaccaggaccaaataaaggtttagtacaaataagaaatacagttaaggct

SEQ ID NO: 16177 - DNA, 1992 bp, Clostridium botulinum
atggataacaagttagaaaagatgaaggaacttgtagaagaattaaatcagtatgcctatgagtattatgtattagataatcccagtatatctgataaagaatatgacttgaaatatgatgaattagtaattttggagaagaaaactgaagttacattaccttattcaccaacccaaagggttggtgataaaatattaggtgaatttagtaaatatactcacaaaggaagactctggagtttggataaagcccaaaatatggagcagttaatagagtggcataatagaaatttaaaagttatagagcaatataattctatgagtgaagataaattaccagagttgagatatatagttactaaaaaatttgatggattaacggtaaattgtacctatgatgaaaatggaattttaataaagagtgctacaagaggaacgggaattataggtgaagatataacagctcaaataaaaactataaagacagttccattaaaaataaaaaataaccacgttatagaagtgcatggagaagccataatgactaaaacagcttttgaagaatataataaagctgctcaagttccactaaaaaatttaagaaatggagcagcaggagctcttagaaatttagatattaaagaaactgctagaaggaatttatccgcatttttttatgatgtaggttataatgaaggtcccgaatttaaaagttatagagaaatgatgaattttataaaaaatatgggattgcctcaggataagtatattaaagaatgtactaacatggaagaagtggaaaaagaaattgaatatatagaatcaataagaggagaactagattatgatatagatggagcagtaattgttgtagatgatattaaaacaagagagatattagggtatactataaaattccccaaatgggctatagcttataaatttgaagctaaggaaattactacaaagcttctagatgtagaatggaatgtgggaagaagcggaagagttactccaacagctttattagaacccgtagaactaggcggagttacagtaaaaagagctacactaaataatatggatgatattaagagaaaaaatgtaaaattgggtgctaaggttttagttagaagatctaacgatgttataccggagataatgggagtagtagaagaatctttagaggaaagcaaggaaatacaggcaccagatagatgtccttattgtaatagccatctagtacaaaatggagtacattattattgtgagaatacattatcttgtaaaccacagatggtaaaaagtatagttcattttgctagtagagaagctatgaatatagcaggattcagtgaaaaaactgcagaacaactttttgaaaaattagatataaaatctatagcagatttgtataagataaaaaaagaagaactattaactttagaaaaatttaaggataaaaagtctcaaaatcttatagatgctatacaaaatagcaaaaattgtgatttggcatcctttatatacgctttaggtatacctaatgtaggtaaaaagactgcaaatgatttagtaatgaaatttaaaactttagaatctataaagaatacaacaatagaacaattagtagaagttccagatgtgggagaaatagtagctaagagcatatatgatttttttgaagacgaaaaagttataagtaacatagaagaattattaaatttgggtgtaaaaccttattatgaagaagaaagaattgatgagaatccttttatggataaaactatagttgtaacaggaagtttgaataattatagcagaggggaaataaaagataaattacagtctttaggagctaaagtttctagtagtgtaagtaaaaatacagactatgtcttagtaggggaaaaaccaggatctaaatatgaaaaagcaattgaattaggagtaaaagtaatcaacgaagaagaattttctaataaaattaaa

SEQ ID NO: 16178 - DNA, 462 bp, Clostridium botulinum
atgaaaatatatgaaggtagattaacagcagaaggtttaaaggtaggaataatagtttcaagattcaatgagtttataacatcaaaattattagctggatctatagattgtctaaaaagacatggtgctaaagaggataatatagaagtatgttgggtacctggtgcttttgaaatacctgtaatagcgaagaaaatggcatcaaagggtaaatatgatgcagtaatatgtttaggagcagtaataagaggggcaacgcctcattttgactatgtatctagtgaagtttcaaagggagtggctcatgtatcattggataaagaagtgccagtaatatttggagtattaactacagataccatagagcaagccatagaaagagcaggtacaaaggcaggaaataaaggctacgatgcggctatgtcagctatagaaatgtcaaacttaatgaaagtcttagat

SEQ ID NO: 16179 - DNA, 1194 bp, Clostridium botulinum
gtgtttaaaataattatagaattaaataaaaatagtttcccagaagagttcaataagatagaagtacatgagggtagtatgaatatatttatgaataaaaataatattacccctttaaaaatttttaatgtgctagctcctgcagccaatataataaagcaagaaatactggctttaggtggagattgtgctgtaaataaatattgtataaattgcaaagtggaaacttcagatataattttattaggaaccaaaagacagtacaaaaaattattgcaaaagcttaaatgcatgactttttttagaatagaagaaatagtaggggaattagaaaactatattaaaaataatggagctgttaaaacagttctaaaggatgaaagagaaataaactatgaaaatttaaaggttatgggaattataaattgtactccagattctttttatgagggttctagaaaagattctacagaagaagccttaaaaactgcagaaaagatgttaaaagaaggtgcagaaattttagatataggcggagaatccacaagaccaggttctgacccagtagatgaagaggaagaaataaaaagagtagttcctgttataagagagataaagaataaatttaaggatgtcataatttccatagatacttatagagcaaatacggcaaagtctgccatagaggcaggtgcagacatagtaaatgatataagtgctatgaagtatgatgaaaatatggtgaaagtagttaaagaatacaatgtacctgtaatacttatgcatgtaaaaggaaaaccaaaggatatgcaaatagatccagtttatgagaatttaatgaaagaaattcatctttattttaatgagagaatagagtactgcaaatctcatggtataacagaggataaaataatattagatccaggcataggttttggaaaaactgtagagcataatctaaaaataatgaatagaatagaagaattaaaaagctttaatcttccagtacttttagcagcctcaagaaaagctaccataggaaaagttttaggaaacttacctacagaagaaagattagaaggaaccatagctttatcctgtttagcggtagatgtaggaattcagatggtgagggtacacgatgtaaaagaaaatataagagccataagaatgttagaggcagtaagaaaaata

SEQ ID NO: 16180 - DNA, 945 bp, Clostridium botulinum
atgtctttttcattaaaagtaaaaaatgaagtatgtaaacatgtagaagtaaataaacaagaagccatagcagaattatcagcaataatgaaggtaagtggtacattattatttactaataaacaatttaattttaaaataactacagaaaatgcagctattgctagattagtttttaaaattttaaaagaacattttggtatccatacagaaataatgataaagaaaaacaattctttaaaaaagaataatatatatattatactaatatctgaagaagaaggagtaaaatccttattaaaagaagttggtataattaaagaaactataaatgtatttagtttagattataacatacctaagagtattatagaatgtgatgagtgcaggagagcttatataagaggggcttttttaggtggaggaagtataagtaatccggaaaaaacatatcacttagaatttgttactcataatgaagagtatgctaaagacttaagtaatttaataaattcgtataatttaaattctaaagtaataaaaagaaagaatagttatataatttacttaaaagaaggagagcaaatagtagatttattaaatataataggagctcatgcctcattattagagttagaaaatgttagaataatgaaagaaatgagaaataatgttaatagactggtaaactgtgaaactgctaatttgagtaagacggttaatgctgctgtaagacaagtagagagtataaagtttatagaaagagaaataggattaggaagattacctaaaaatttaagggacgtagcagagctaagaattaaatatcctgatgaatccttaagagaattaggaaagatgctaaatccaccagtaggaaaatcaggagttaatcataggttaagaagaatagagaagattgcagatgaattaaaacaaggaatt

SEQ ID NO: 16181 - DNA, 2319 bp, Clostridium botulinum
atgaaagaaaacttagaagttcttcctttaattccattgagaggaataattatatttccatatatgattttacattttgatgtaggtagagaaaaatctattttagctttagaagaagctatggaaaatggacaaaaaatatttttatctgctcaaaaagaggctgaaacagaagaaccaattgtagaagacatatatgatataggaactatatgtgaaataaaacaaatactaaaattgccaggagatacagttagagttttagtggaaggaaaaactagaggtagaatagttaattatttagaagaagaaccatttttaaaagtagagatagaagagatagaagataatcaatatgaagatgataaggaagtggatgctcttataagattagtaaaaactaattttgatgagtatattaagctttcaggtgattcatcttcagatttaactgtaggagtagaagatttagaagaaccaggtagaatagcagatgttataggttcatacataaatataaatcaagaagaaaaacaagagctcataggaattattgattctaaagagagattagaaagaatattaatcattataaatgaagagatagaaatactaaagattgaaagaaaaataggaattaaagtaaagaacaaaatagacaaagtacaaaaggaatattatctaaaagaacaattaaaggctatacaagaggagctaggggaagacgaggaagataaaaaagaaataaatttatataaagagaaaataaataaagcaaaacttcctaaagaagtaaaagaaaaagctatatatgaattagataggctaaaaaattctggtaatttctctgcagaggggggagttattaggacttatttagactggatattatcattaccatggaataaagatactaaagataatttagatataaaaaaagctagagagatattggataaagagcattatggattaaaagatgtaaaagatagaataatagaatatttagcagtaagaaaagttagtaaaaccctaaaagggcctatattatgtttagtagggccaccaggggtgggaaagacatctatagccaagtctatagcacactctttaaataggaattttgtaagaatgtctttaggtggagtaagagatgaagcagaaataaggggtcatagaaaaacttatgtaggagcaataccaggaagagtaatttatggtatgaagcaagcaaaatctaaaaatccattatttttacttgatgaaatagataaaatgagtaatgattttagaggggatccagcagatgcgttattagaggttctagatgcagaacaaaatgctacttttagagatcactatttagaattagattttgatttatctaaagtactatttataactactgcaaatactttaagtacaatacctggtccattgttagacagaatggaagttatagaagtatctggatatacttcagaagaaaagttttatatagctaaaaatcatcttattcctaaaaaattaaaagagcataatatggaagatgggaaaattactttttctaattcctctatatattatattatagataattatactcgtgaatcaggagtcagaggattagaaagaaaaatatcctctattataagaaagtctataacagaaatgatcgaaaaaaataaggatacaaccaacgttacaataaatcatgttaagaagtatttaggaccagaagtattttcctatgaaaaagcagataaagaagataaaatcggtgtggtaacaggcttagcttggactgcttatggtggagatactctacctatagaggttactgctatggatggtaatggtaagttgcaacttacaggaaaattaggagaagttatggtagagtctgcaaaagcaggatatagttatgtaagatcaaatgccagcaaatatgaaatagatactgatttttataaaaataaggatattcatatacatgtaccagaaggagcagtgccaaaagatggtccttcagcaggagtaactatgataactgcattaatttcagctttaggtggtaaaagagttaagcataatgtggctatgacaggagaaattacattgaccggaagggtactacctattggtggattaaaagaaaagtcattagcagcctatagggctggaatagatacaataataattcctaaagctaatgaaaaagatttaagaaatattcccaaaactgtaaagaataaaattgattttattgtagctgatagaatagaaaaggttcttgataatgctttaataaaagaacaa

SEQ ID NO: 16182 - DNA, 1596 bp, Clostridium botulinum
atgaaagtgaagaaactattagccatgatattagtagcctcaactaccttagtagctactgcttgtggaaatagcaatagttctagcggatctacagccaaagaaacttccgccaaagaaaatattaaggatggaggaaatttagtattttctatccgtggtgaaccagaaatacttaatccgatttatgcttatgatagggatactatgactatggataatgctctatttgcacctttattttatattaatggagataaaattgattacactctagctgaagaagtaaaacattcagatgactttttaacttacacagtaaaactaaaaaaagatttaaaatggcatgatggtaaacctttaactgctgatgatttagtatttactatgaaacaaataatggatgaaaaacaagattcaccttttagaagtgcctttgttattaatgataaacctgtagaggtaaaaaaggtagatgacttaaccatagagtttaaactaccaacggttcaaatgccttttatgaattctttaggacaagtatctcctattcctaaacatgtatttgaaggagaaaaggacattaaaaaaagtattaaaaatgaaaaacctataggttctggtgcctttagatttaaagaatctaaaaaaggtgaaagtataacgctagaaagattcgataactatgttggtggaaaacctcaccttgacaccataacctatagaataattgctgatccaaattcatctaaggtagctcttgaaaatggcgaagtttctgctaattatatagatattagtggtataagtaaatttgaaaaaaatgaaaaattaaaagtagttgcctatgatgaaggtatggtggataatttagtcttaaattgtaaaacaaaaggtttagataaaaaagaagttagacaagctatagcctatgctttaaataaagatgatttaataaatgctgcttatgaaagtgaaaaatacgctcctaaggcctattccccactacctaagaatgccttatattatacagaggatgttactaaatatggcttaaataaagataaagcaaaggaattactaaaaaaatccggtgctgaaaatttaaaacttaagctagtttatagaaatgataaaaagactttagaaaatcaagctttagtagttaaagaaaatttaaaagatataggaatagatgttgaattaaagggattagaagcaaatgccttttttaagcaaatcgatgatccttctaaagctgattttgacttgatatttaatgcctatttaatgggtaacgagcctgatgcttataaagaagtatttatgacaaacggagcttttaacgcttctagatataataataaaaaactagatgacctttggaataaagctgccgtagaaactgataaaacaaagagagaagaaatttataaaactattcaaaaggaacttatagaagatatgcctgtatacccaatttgctattctaatgccacaatagcagtaaataaaaatgtaggaggtataaaagaagcaaaaacagctcctatatatatgttccaagacttatcaaaactttatatcatagaagaa

SEQ ID NO: 16183 - DNA, 1410 bp, Clostridium botulinum
atgtcatatcggagcgggggagaatgcgtaatggatagaatgaaaaaggtatcagttagagaacaagatccaaaggtaagagctactaattttgaagaagtttgtttaggatataatgaagaagaagctgttaaagaagctagtagatgtttaaattgtaaaaaaccaatgtgtgtaacaaaatgtccagtttcaataggaataccggaatttatacaacatgtaaaagataaagagtttgaagaggctgcaaaaactatagctaaatatagtgcattaccagcagtctgtggaagagtctgtcctcaagaaagtcaatgtgaaggaaaatgtgtacttggcataaaaggggaacctgtagctataggtaaacttgaaagattcgttgcagattggtcaagggaacataatgtagatttatccgaaagagaagaaagtaaaaataaaaaggtagcagtaataggaagtggtccagcaggacttacttgtgcaggagatttagctaaaaaaggatacgatgttactatatttgaagctcttcatgaaccaggtggagttttagtatacggaataccagaatttagattaccaaaggaaactgtggtaaaacatgaaatagaaaacgttaaaaaattaggcgttaaaatagaaactaatgtaattataggaagaacagtaactatagatgaacttatagaagaagaaaaatttgatgcagtatttataggatcaggagcaggacttccaagatttatgggaataccaggagaaaatgcaaatggagtgttctcagcaaatgaatttttaacaagaaataatttaatgaaagctttcaaggatgaatatgatacacctataaaagtaggacagaaggtagctgtagtaggtggcggaaatgttgctatggatgctgctagaacagccctaagacttggagcagaagttcatatagtatataggagatcagaagaagaacttccagcaagggtagaagaagtacaccatgcaaaggaagaaggaataatatttaatcttttaactaatccagtagaaatattagaggatgaaaaaggatgggttaaaggaatgaaatgtataaagatggaactaggagaaccagatgagtctggcagaaggagaccagtagaaataaaagattcagaatttgtaatggatgtagatacagtaataatgtctttaggaacttctccaaacccattaatatcttctactacaaagggattagaaataaataagcgtaaatgcctagtagcagaagaggaaacaggattaactacaagagaaggggtatatgcaggtggagatgcagtaacaggcgctgctactgtaattttagctatgggagctggaaaacaagctgctacagccatagatgaatatttaagtaaa

SEQ ID NO: 16184 - DNA, 2166 bp, Clostridium botulinum
ttggaggtaaagatgaacaatataaacagtattttatcaaaagaacttaacatatccattaaatatatagatgcagttatagatttattagatcagggaaatacagtaccttttatagcaagatatagaaaagaagtaacaggaggtatgagtgacgaaacgcttagagagctctttgaaaggcttacatatttaagaaatttaagttccaagaaagaggatgttataagactcatagaggagcaaggcaaacttacagaagagcttaaaacatctataattaattgtaaaactgttacagaagtagaggatttatatagaccttatagaccaaaaagaaggacaagagctactatagcagaagaaaaaggattaaagcctttagcagaaataatattagaaggtaattttaaagaagatataaaagtatatgctagtgaattcataaatgaagaaaaagaagtaaagactattgaagaagctcttcagggtgctatggatataataagcgaagttatatctgatgaagcagaatacagaaaatggataagaaattttgtttttaatgaaggagtaatagaaactaaaggtgaaagcatggaacctactccttacgaaatgtattatgattataaagaaaatgtaaaaaatattcctcctcatcgaatactagctataaatagaggagaaaaagaaaaaatattaacagcaaaagttacttgtaatgaagataaaataatagattatttaaaaagtagatcattaaaaggaaataaggaaacggatgtatatatagaggagtctgttaaagattctttaaaaagattaatatatccatccatagaaagagagataagatcagagttaacagaaaaaggtgaagaaggagcaataaaaatatttaaagagaatttaaaggcccttttgatgcaagcacctataaaggataaagtagttttaggatatgacccagggtttagaacaggatgtaagatagcagtattagatgaaacaggaaaattattagatacagctacggtttatgctacagcaccacaaaatgatgtagaagggtctataaaagtattaaaaaaattaatatacaaatatgatgttgatgtaatatctttaggaaatggaacagctagtagagaatcagaagaggttatatcaaaaatgcttaaagaaataaaagaagaaaaaggcaaagatatatattatgttatagtatctgaagcaggagcctctgtttattctgcgtcaaaattagctacagaagaatatccagatataaatgtttctttaagaggggctatatctatatgtagaagacttcaagatcctctagcagaacttgtaaaaatagatcctaagtctataggggtaggacaatatcaacacgatgtatctcaaaaaaaattagatgaatcattaaaaggtgtggtagaagattgtgttaatgcggtaggagtagatttaaatactgcaacaccatcacttttatcttatatttcaggcattaatagctctatagctaaaaatatagtagcttatagagaggaaatagggaaatttaaaaatagaaaagaattattaaaagtaaaaaggttaggacaaaaagcctttgagcaatgtgcaggttttcttagagttatggaaagtaaagaacctttagataatacaggagtccatccagagtcctatgagggaaccaagaaatttttaagcttgttacaatatgatataaaagatgtaaaaaataataaattacaggatatagatgatagggttaataatataggactagatgatatatgtaataaaatagatatagggaaacctacactattagatattataaaagaaataaaaaaaccaggaagagatccaagagaagatttacctaaacctatattaaagacagggattgttgatataactcaattaaagccagacatggttctaatgggtaccgttaggaatgtagctgattttggagcctttgtagacataggagttcatcaagatggcttagtacatataagtcaactttcagataggtttgtaaaacatcccttagatatagtaaaagtgggagatatagtggaagttagaatattggaggtagataaaaagagaaacagaatttctttaagcatgaaaaaa

SEQ ID NO: 16185 - DNA, 1383 bp, Clostridium botulinum
atgaaagaatttgatactatagctgctgtagcaacaccagtaggagaaggtggtatatctattataagaatatcaggagataagtcattagatatagtaagtagcatatttaaaggtaaaaatgatagaacattagatgatataaaaccttattctatgagatatggctttataattgaaaaagaaagtaaagaaatgatagatgaagttctagtaagttatatgaaaggccctagaagtttcactgctgaggatactttagaaattaattgccatgggggtgtaataccaacaaaaaaaatattaaaagaattaattaaatctggagcaaggcttgcagagccaggggaatttactaaaagagcttttttaaatggaagaatagatttaagtcaagcagaggctgttatagatataataagatctaaaacagacctttctatgaagtctgcattaaagcaggctgaaggaactctttcaaaggaaattaattctattagaaatagaatgattaaaattatagcacatatagaagctactgtagattatcctgaagatgatttagaggaaataacaggccaaaaaattaaagtagatttaaaagagataataaataaaatagataatttgataagtgcatcagaagaaggtaaaatattaagagaagggttaaatactgtaatagttggaaagcctaatgtaggaaaatcttctttgttaaatgcattaatcaatgagaataaagctatagtcacagaaataccaggaactacaagagatgttatagaagaatatataaatattgatggaatacctataaaaatagtagatacagcaggaataagagaaacagaagatgtagtagaaaaaattggtgtagaaaaatcaaaagagaagatcgatgaagctgatttagttatattcatgttagatttaagcagaaaaatagatgaagaagacatagagataatggattttataaaaaataaaaagtatatagttttattaaataaattagatttaaataaagatttaaatgaagaaaatcattttataaaagaattagattctaaatatataataaaaacatcagttaaaaacaattcaggattgaatgaattaaaagaatgtataaaaaatcttttctttagtggagaaataaaatctgatgaacttatagttacaaatgctaggcatcaggaagctttaataagatctagagaatcttgtattcaagctatagaaactttatcagatgaaatatcaatagatttagcatctatagatattagaaatgcgtggaaatatcttggagaaattactggtgatactttagatgagaacattatagataaaatattttctgaattttgtttaggaaag

SEQ ID NO: 16186 - DNA, 444 bp, Clostridium botulinum
atgtctcttaaggaaacactacaagaccactggaaacaagccttaaaagctaaagagaaagagaaagctagtactataagcatggttaaagctgccattcttttagcagaaaaaaattcagggaaaactcttgaagattcagaaataatagatattctatctaaagagataaaacaacgcaaagaagcgttagaagacttcaagaagggaaacagacaagacttagtagatgcaactaattttgaaatagaagttttgctaaaataccttcctcagcagttgacagaagaggaaattacagaaataattgaaaaagcagttaatgaaactggtgcaaatagcatgaaacatatgaaaaatgtcatgagtatagttatccctaaaactaaaggtagagcagatggtaaacttgtaagtgaaaaagtaaaaaatatattgagtaaa

SEQ ID NO: 16187 - DNA, 756 bp, Clostridium botulinum
atgaaaaattttttttcaagtaacaaaaaagctagtacagatacgaatttagatatgaacaatataccaaaacatattgctatcataatggatggaaacggaaggtgggcaaaggaaagaagtttgcctaggactatgggacacaaagccggtgtagagactataagagaaatagttaaagaatgcaataatttaggggttaaatacttaacattatatgctttttctacagaaaactggaaaaggcctaaagatgaggttagcgctcttatgactttattagttcaatatttaagaaaggaagttaaggagcttaatgaaaacaatgtaatagttaatgcaataggtaacatagaaaagttaccagaggtgtgtataaaggaactagaaaaagcctacgaagaaactaaagataacacaggattagtattaaatttagctttaaattatggtgggagagatgaaataataagggcagtaaaatatatgtatgaagatataaaagtaggaaagataaaagaagaggatataaatgaagaaaatctttctgattatctttatacaaagggtatgctagatccggatttaataataagacctagcggagaaaaaagaataagcaattttttattatggcaatgtgcttattcagaattttggtattcagacataaagtggcctgattttaaaaaagagcatcttcataaagctatatatgattatcaaaatagagatagaagatttggaactgtaaaa

SEQ ID NO: 16188 - DNA, 543 bp, Clostridium botulinum
atgattaaggaagttatagtagtagaaggcagagatgatattacagcagtaaaaagagcggtagatgcagagatgatagcagtgggtggatttggaataaattctaaggttataaaaaaaataagagaggcgcagaaaaggcaaggggtaatagtattaacagatcctgattatgcaggagaaaagataagaaaatatatatgcaatagggttaagggtgtaaagcatgcttatatatcacaggaagaaggaacaaaggaagatgatataggagtagaaaatgcagctccagaagccataataagagcgttaaatttagctaaatgtgaagttaagcaagaaagaaaagaatttgatatgaatgacatgatattttttaaattaacagcgaatgaggagtcaaaagaaagaagagaaaaactagggatggctttaggaataggctattgcaatactaatcagtttataaaaagacttaacaattttggtataaccaaagaagagtttataaaggctataaaagatttagataaggggaatgaa

SEQ ID NO: 16189 - DNA, 642 bp, Clostridium botulinum
atgtttatgttaaatgaattttatactaaaggtgaagaaatagcaaatgctataactcatggtattggtgctttattatctatagctgccttagttattttaattgtattttcagctaagtatggagatgcttggtatgtaacaagttacagcatatttggatcatgcctttttatattatatttggaatctaccttataccatagtctccagggcagcaaagtaaaaaaaatatttaggatctttgatcattcctctatttttcttttaattgcaggtacctataccccttttatacttacctctcttagagatcctttaggttggactatatttggtatagaatggggccttactttaataggaatcattttaaaagtatttacaactggtaaatacgaaaaactatccactgctatatatattttcatgggttggcttataatgcttcatgctaaaaaattagttttagttatacctagaatatcccttatatatcttatagtaggtggagttatttatactgttggagcctttctttttatgttagatgatataccttacaaccacccaatatggcatttatttgtaataggtggaagtgtttttcactttttctcacttttctatatgatacctaga

SEQ ID NO: 16190 - DNA, 444 bp, Clostridium botulinum
atgaagttgtcaactaagggtaggtatggagtaaaggctatggtagatttggcaattaactacggtgggcaaccagtttctataaaaaatatttcagaaaggcaacatatatctgagtattatttagaacaactattttccccacttagaaaggctaaacttataaaaagcataaggggagctcaagggggctatattttaaataggcatcctaaggacataactgtggcagatattatggaggttttagaaggccctatagaaatatctagttgtttagagggagaggatagttgtagtaatatggattgttgtgcaactagacttttgtgggcaaagataaaggaaagtctagataatataatggaatcaactaccttacaagatatggtagaagactataagaaaataaattcaccaattaaaaggagtgaaaataatgaa

SEQ ID NO: 16191 - DNA, 783 bp, Clostridium botulinum
atgaacagtattacaacaacaaatttagtcatcgcttatgaggacaaacttatagtggatggtttgaatatgaatataccaaaagggaagataactaccataattggaccaaacggttgtggaaaatcaactgtacttaagactataggacgtattttaaagcctaaagaaggcttagtatacttaaatggtgatgatattagaaatctttccactaaagaagtggcacaaaagatggctatattgcctcaatctccccaagcccaaggaggacttaccgttggtgagcttgtatcctatggtcgattcccacataagaatggatttggtaaattgtcaccagaggataagaaagtaattgaatgggcattagacattacaaagctgactgaacttgagatcacaatggtggacaacctttctggtggacagcgccagagagtatggattgcaatggcactagcccagcagactgatttgatattgctagatgaacctactacttatttggatatggcatatcagttagaggtgttggagcttttatacaacctaaataggaaacaaagttgtacaatcgtcatggtactacatgatttaaatttagctgcacgttttgctgattatatgatagcgatacgtgatggaagtattataaagtgtggaactccaaaagagattatgacaaaagaagttttaaaggatacttttaatattgatgcagaaattgtgtggggatccaaaacggggcgtcctacatgtatttcctatgaattgattaaa

SEQ ID NO: 16192 - DNA, 2583 bp, Clostridium botulinum
ttgatacataaatatatgggggtaataaatgtgtatgaatttatattaaatgaaagaaatgtatctgtttcagaggatattaatttacttgaatatttgagggataatgaggatttaacttcagtaaaaaatgggtgtgcagaaggagcctgtggagcctgtatgatacttgttaatggtaaggcgcttagagcctgtatatgtacaactgcaaaggtgaatggaaaagatgttaagactgtagaggggttaacagaatttgaaaaggatgtttttacttgggctttttctaaagctggagcagtacagtgtggatattgtattccagggatgataataagtgcaaaggcacttttagataaaaatctaaatccaaataagaaagaaattaaaactgctattagaggaaatgtatgtagatgtactggatatgtgaaaataataaaagccattgaaatggcagcaggggcatttagaaatggtaaacttccatttgcgaaagaatataaagggaaaataggtgaaaatattccaagaatagatgcaaaagataaaattttaggtataggaaaatatgtagatgacatgaagatagaaggaatggtttatggttctgctttaagatcaaaatatcctagagctttagtaaaaagcattgatataagtgtagctttaaaacatccagaagttgaagctattcttacagcagaagatgtcccaggaaataggcttataggacatattgtaaaggattggccagcaatgatagccgtaggagaaggaacaaggtatgttggtgatgcagtggctttagtggcagcaaaaagcaagaaggctttaaaagaaatacttaatttaataaaggtagaatatgaagaattagaacctatttctaatcctaatattgcaatagctgaagatgctcctaaaattcatcctaagggaaatattttaacagtggaaaaagttaatagaggagatgtagatgaggcaatagccaattctaagtatgtggttactaatcattattctactccctttactgaacatgcttttttagagcctgaaagtgctttagctatgccagatggggatggagttattatttatacaggaagccaaggtatatatgatgagcagagagagatttctgagcttttagggcttcctaaagaaaaagtaaggactattagcaaatatgtgggtggaggctttggtggaaaagaagatatgagtgtacaacatcatgccgctcttcttgcatggactattaaaaagcccgttaaaataactttaagtcgtaaggaaagtataaagattcatcctaaaagacatgctatggaaatgacaattactactgcatgtgatgaaaaaggaaatttaactgcttttaaagcagatattatatcagatactggtgcctatgcatcattaggaggacctgtactccaaagagcttgtactcatgcagctggcccatataaatgtcctaatgtgaaaataaaaggtaccgctgtatatactaacaatcccccaggaggagcttttaggggatttggagtaacacaatcagtttttggatcagagtgcaacttaaatcttttagctgaaaaagttggtatatctccttgggaaataagatttaaaaacgcagtagaacctggagatgcactacctaatggacaaattgctgataaaggaactgcaattaaagaaactatattagctgtgaaagatgtatataaaaagagtaaatgtgcaggaatagcctgttgtatgaaaaattcaggagttggtgttggaataccggatattggaagatgtaacttaatagtaatagatggaaaggttcatataagaactagtgcagcttgcataggtcaaggtcttggaacaattcttacacaaataatatgtgaaacaataggtttattaccagaacagataattttagatttaccagatacaaaatttgcaccagattcagggacaactacagcatcaagacaaacagtatttactggagaagccacaagaatggcatcattaaagcttaaggaaaaattattaactacatcattagaagagtgtgaaggtgaagaattttatggggaatatcaaagtattacagatcctattaattctgataaaaagaatccagtaagtcacgtggcttatggctatgcaacacaagttgttattcttgatgatgatggaaaagtagaaagagtagttgcagcacatgatgtgggaaaagctataaatttaactaatgtagaaggacaaattgaaggtggaatagttatgggacttgggtatgcatttacagaagattatccattaaataaatctatcccaactgctaagtttggcacattaggtttgtttagagctactgatataccagaaattgaaacaacaataattgaaaagaatactaatgatttagcttatggtgcaaaaggaataggagaaattacaaccataccaacagccccagcagctcaaggtgcttactataaatttgatggaaactttagaaaaaagcttccacttgaggatactgcttatagaagaaaaaaa

SEQ ID NO: 16193 - DNA, 1125 bp, Clostridium botulinum
ttgttaataaaggaggctaattttatgaaaataacttgtcaaaaaaacattttactagaaggtatatctatagttcaaaaagcagtaactggaaaatcaactttacctatattatctggaatacttattagagctaataaaaatgaattggtcttaactggttctgatatggatcttagtattgaaactaaagtaaaagctaacattttagaagagggaactatagttttagatgctagactttttggtgagataataagaaaattacctaatgatctaatagaaataaatacgttagaagataattctatagaaataatatgtcaaaattctagatttaatctaatatatatgaatccaggtgagtttcctaatccacctattatcaatgaaaatatgatattttctataggtgaaagtaaattaaaaaatatgattaaaggaactatatttgctacagctcaagatgaaacaagacctattcttacaggtgttttatttcaaataaaagacaaaatgttaaatttagtagctttagatggctataggttagctttaagaagcgaagttgttgataatgataatacgataaatgctgttattccagggaaaacattaaatgaagtttcaaaaattttagaagaagataatgaaaatgttaatattacatttactcctaatcatattttatttagtataggagaaacaaaaataatttcaagattattagaaggagaatttattagctataagtctataatacctgaagaatttaacttaaaaataatagctaaaagatcagagcttttaaattctatagaaagagcctctcttatggctaaagaaggaaatactaatttagttaaatttgatttctcagatgataaaattgtaataacatcaaattctcaattaggaatggttcgagaagaattaaaagttgtattgcaaggagaagatttgcaaattgcatttaattcaaaatatcttttagatgtgttgaaaactatggaagataatgaggttgtattagaattttcaagtagtgtaagtccttgtattataaaaaatacagaaataaacaattgcacttacctagttttaccagtaagattaaacaataat

SEQ ID NO: 16194 - DNA, 2370 bp, Clostridium botulinum
atgaacatgagaaaaatagaattactagctccagctggaagcgtggaaagtttgtatgctgcagtacaggcaggagcagatgcagtatacatggggggaagcaaattttctgctagagcctatgctaataattttgatgatgagcaattaaaagaggctataaactattgccatttatatggtgttaaagtatatattacagttaatacattaataaaagaaggagaaataaaagaagctataaagtatataagatttttatattctataggggtagatgctttaataatacaggatactggaatagcgaaattaataaaagaaaacttaccagattttgaaattcatgcatctacccaaatgactgtacataatggagaaggcgctatatttttaaaagaattaggttttaaaagaatagttttatcacgagaactttcattaaaagaaatagaatatatctcaaaggacttagatatagaaacggaaatatttgtacatggagctctttgtatttgttattcaggacaatgtttaatgagtagtatattaggtggaagaagtggaaatagagggagatgtgctcaaccttgtaggcttccatatacattgataaatgaaaagaatgataaggaaacaaaggggtatctattaagccctaaggatatatgtaatatagaaaacatggaagatttaataaaggctggtgctacatcctttaagatagaaggaagaatgaaaagaccagaatatgtagcaggcgtaattagaagttatagaaaagctatagatgcagctataaataaagaaaattttgaagaagaacaaaataaaaaagagttaatgcaattatttaatagagagggcttttcaaaggcatacctttatggaaacaagggtaaagatatgatggcatattcttttcccaaaaatacaggattacttctaggagaggtaaataaggataaaagtataaaattagaagagaatttaaaaataaaagatggtataagaaatgctgataaaggttttatagtgtctagtataattaaggataataaagaagtagaaaaagcctacaaaggagatttagtaaaaataaaaccttcaaattataagtttaaggataaattatataaaacctcagatacggaacttttacagtccttaggtaaaatatatgaggataaatttaataagaaaatttatttagaagctaatgtagagtttaaagtaggcgaaaaaataaaattaagttgcagatacaatggagaagaatattttgcagaagggaaagaaatagaaaaggcactaaaaaaacctttatccatggaaaaaatagaagaaaatttaatgaaaagtggggaaactcctttcaagataaataaaattaaatttgactcttatgaagaaggatttttacctgtttcagagataaataattgccgtagaatacttataaattccatagaagaaaaaataatacaaaataatccacattgtggaaaaataaaaagggttaatgtggataatatatacagtaacataaatggaataaaagaaaatgatttaccaaagtatatattttcaatatatacctatgaacagttaaaagctgtagcggataatggctttaaaaatataatagtagatttatttacaaggaatccattaaacttacataaaataaaaggattatatcaggatttaaatatatatttaaaagctcctaatattataaagagtgaatttgattatgtagaaaagataatagaagagaatctatataacataaaaggtatagtaacggctaatctaggtatagtaaataagtttaataatagaacaaagataataggagactataaattaaatatatttaatagtttcgcaggggatttttataaggactttattaaaggaagttgtttaagtatagagcttaataaaaaagaagtaaaatctataactaaacatatgaatttagacagtcaaatgcttatatatggtaaaatagaaaatatggtcagtgaatactgtcctataggcagtacatttggaggtaaaaatagttattctacttgtaataaagcttgtgaaaaaggaatttatacattaaaggataggatgagtgctaaattcccagttaaaacagatatattctgtagaagtcatatatacaataattcagatattaatttaataggaaatatagaggaactaaggacatttggaattaatagttttagattagattttctagaggagaattatgaagaaattgaatatatattaaaatctcttaaagaagaaaattggaagagagattttaaaaattatacaagaggtcattataaaagaggggtagaa

SEQ ID NO: 16195 - DNA, 1224 bp, Clostridium botulinum
atgaaagatgtattagaaagattcttagggtatataaaagtagatacccaatcatcagaggaatctgatactgtgccaactactaaaactcaattagagtttgcaaaaaaattaggagaagaattaaaggctataggacttaaagatgtatctgtagatgaaaacggatatgttatggctactctagaatcaaacatagataaaaaagtgcctacaattggctttatagcacatatggatacaagtccagacttatcaggaactaatattaatcctagaattgtagagaaatatgatggacaagatatagttttaaacaaagaaaaaaacatagtattgaagattaatgaatttccagaaatattggaatacaagggacaagacatagtagtaacagatggaaatactcttttgggagcagatgacaaagctggaatagcagagataattacggctatggaatatctaataaatcatccagaaataaaacatggaactataaaagttggttttaccccagatgaagaagtgggtaaaggggcggaccactttgatgttaaaaaatttggagcagatttagcctatactttagatggtggcggtatcggagagttagaatgtgaaacttttaatgctgcaaaagctaaagttattatagaaggaagaaatgttcatccaggttctgcaaaaaataaaatgacaaatgcagtattagtagctaataaatttataaatatgcttccagaaaatgaagtcccagaaagaacagaaggatatgaaggatttttccatctattatctgtaaagagtgaagtagaaacagcagaattaaattatattataagagattttgatagaaaaaaatttgaagaaagaaaagaacaaataaaagaagttggtaaaaaaataaatgaagaatacaataaagaaatagtatgtgtaaaagtagaagaccagtattacaatatgaaagaaaaaatagatgaagtaaaatatgtggtagatatagcttatgatgctatgaaagctattgacattgaaccaatattagtgcctataagaggtggtacagatggttcaagactatcttttatgggattaccaactccaaatttatttgcaggtggacataatttccacggaagatttgagtttgttccagttctatcaatggaaaaagcagcagaacttgtggttaaaatagctgaactatatgctaataga

SEQ ID NO: 16196 - DNA, 774 bp, Clostridium botulinum
atgtatacaacaggtttaataggtaaaaatattaattattcagagtcaccagaaatacacaataattattacaaaaaaaataatataccattcttttataaaatatttaatttaaagcaggatcaaattgatgattttataaagaacttacataagaataatataaaaggatttaatgttactattccatataaagaaacaatattacaatatttaaatgatatagtatatccagcagataagataggagcagtgaatactgtagcagtacaggaagataaactaatagggtataatacagactatataggatttataaaaagtttacaatattacaatatacaggttaaaaattttaagtgtctcattataggatcaggtggaagtgccaagtgtatatattatgcattaaaagaattaaatgcaagagatatatgtatagtttctagaaatcctgagaaagcaagactaaaatttgaaaaaaaagttaaaatattaaatattaaagacgaaaataaattagatagatatgatttaattgtaaactgtacacccataggcggacctaatcttaaagaacaaaaacctatagaacttaaagagatcaaaaaaaattgtgtggtttatgatttgaattatactcctaaaagatctaaattattaaaagaagctaaagaaaatggggcatttattataaatggagaaaaaatgctcatttttcaggcctatagtgctataggtctttggtgcttaaatggtattaaaggaggacga

SEQ ID NO: 16197 - DNA, 900 bp, Clostridium botulinum
atgaaaattggagttataatgggtggaatatctacagaaagagaggtttccttgaattctggtagagaagttataaaatatttagagcttttagagcatgaaattattcctattattatagataaaaaagaagatgttatggaaaaagctaagggtatagattttgctttcttagcattgcatggtaaatttggtgaagatggaacagttcaatcagttcttcaaactttagatataccttattcaggatgtggtcctttaacaagcgctatatgcatggataaggatatgactaagaaaattttaaaatatgctaatataaatacagcagattgggtaaatgtatctagtgtagagaatatagattacgaagctatagaaaaaatagggtacccagtgttcgtaaaacctaatagcggtggttctagtgtagctacaaacttagtaaaagataaagagggtataaaagaagcagtagaacttgcattaaaatatgataaagaagttatgatagaaaattatacaaaaggtgaagaaataacttgctgtatgctaaatgggaaaatgttaccagtattagctataagaccacacgcagaattctttgactacacagcaaaatatgcagatggtggatcagatgaagtggttatagaattagaagaaaatcttcataaaaaggtagaagaaatggccttagcttgttggaaagaattgaaatgtgaagtatatgtaagggtagatatgatagttaaggatggaattccttatgtattagaattaaatacattacctggtatgacaaaaaatagcttgtttcctaagagtgctaatgcagtaggaatatcctttgcagaattattaaattcaatagttaaatattcattagaagtagaaaga

SEQ ID NO: 16198 - DNA, 552 bp, Clostridium botulinum
gtgataaaagaaatattaaaaaaagcagatgaaaaaatgggtaaaactattgtagctttaaaaaaagaattagcttcaatgaaagctggtagagctaatccagctatgcttgatagaatagaagcagaatattatggttctatgactccactaaatcaattaggaaatatatctgtaccagaagcaagggttcttttaatacaaccttgggataaaggtgctttatcagctatagagaaagctatattaaaatcagatttaggcttaaatccttctaatgatggtactgtaataagacttgttataccagaattaacagaagaaacaagaaaaaacatagttaaaactgtgaaaaaaactggagaggaagcaaaagtagctataagatctataagaagagattgtaatgatgatgttaagaatctaaaaaaagatgacgtttcagaagatgatattaaaaaagcagaagatgatatccaaaagaaaacagataaatatataaaagaaatagattctataataagtgcaaaagaaaaggaaatactatctata

SEQ ID NO: 16199 - DNA, 984 bp, Clostridium botulinum
atggtgaaaataatgaagtttaaaaattttcatgaagcttatataaaaaatttaaatgatgtatattataaccctgagtttataaatcaaccaagaggaaatgtaagtaaagaaagattaaattattttatgatactagaaaatccacgagaaagaatttgttatacaaaatcaaggaaaactaatattatttttaattttgcagaagcattatggtatttatcaggatctaatgatttagactatatttcttattatgcaagcaatatgaaaaaatattctatggatggtaaaactcttacaggaactgcatatggtccaaagatattttcctatggatataataaaattaatcagtggaatcgtataattaaactatttaaagaagatccagatacaaagagaggatttattgaaattttcgatgcaaatgaagatttatcattaaagaatatagatgtttcttgcactataggatttcaattctttatccgagaacataagctatatatgacaacttttatgagagcaaatgacgcttatcgaggaattataagtgatgttttttcctttacttttattcaagaatttttagcaactgaattaaacttagatataggacaatacagtcatcaggtagcaacaacacatatatatgagccagattttaaattggccgaaaaagtattatgcgaaagcaaaagtgctaaaaaagagctttcttttcctagaatgcctaaaaaggataattgggaagatttaaaaatagttcttcaatatgaaaaagagctaaggaaacagagcattcatttaacaaagaaagatattgatgaattagagatagataaatattggaaacaaattatttgtttatttgtactttaccaagaaatatattatggagataatttggattatgaaatatatgaaagcttagaaccactttatcaatatctgttttcaaataaatggaatcaatatttt

SEQ ID NO: 16200 - DNA, 831 bp, Clostridium botulinum
atggctgttaaaggttttagacctaccactcctacaagaagagaaatgactatgtgtacttttgaagaaataacaacaagcacaccggaaaaatcacttcttgtttcattaaagaaaagtggtggaagaaacgcaaatggtaaaataacagttcgtcatattggtggcggagctaaaagaaaatatagaataatagactttaagagaaataaagacaatatcccagctaaagttgttagtatagaatatgatccaaatagaacagcgtttatagcacttgtagtgtatgctgatggtgaaaagagatatataatagcaccagttggattaaaagttggggatacagtggtatcaggcccagaatcagatataaaagtaggtaactgcttacctataagaaatataccagtaggtacagttattcataatatagagttagcagctggaaaaggagcacaacttgttagatcagcaggtaactcagcgcaacttatggctaaagaaggagattattctcaagtaagattacctagtggagaagttagatatataagagttgaatgtagagcaactataggtgttgtatctaaccaaacaagcgaaattgttaacataggtaaagcaggaagaaagagacacatgggagtaagacctacagtaagaggttctgtaatgaaccctaatgaccatccacacggtggtggtgaaggtagatctcctatcggacatccaagtccacgtactccatggggtaaaccagcacttggatacaaaacaagaaagaataagaaatattctgatagatttattgttaagagaagacatgataaa

SEQ ID NO: 16201 - DNA, 1620 bp, Clostridium botulinum
atgagaaaagcaatgaagctacaaacgaaaattaccttattaattattacagtggtttttctttctatagctataattatttcttttgttgtttcatggatgactggaaacattgaaaataaagctaaaactaatattatgaatgtagcggagatggtagcgcattctacacagatcgtagatgctttagaagaaaaggatcctaacggaaagattggaccttatataaacatgcagcttaaaaatttacaacagattcagtatataattgtagcagataatgatggaattagatattctcatccaaatcctaaaatgataaagaagaaatttgaaggaggggatgagtataaggtagtcaaagaaggagaaacgtatatatctgaagctacaggtacattaggaaaatccatgagggcttttgctccaatatatgatagagaaaacaaaaaagagataggttttgtttccgtaggcacacttaatgaaaatattgaaacggctaagcatatagctattttatatataattttaattgggtttggagggcttatggcaggaacaataggggcaatattactttctaataatataaaaaatattttattaggactagagccagaagaaataacaaatctttataatgagaagatgggaattttggatactatccatgaaggattagtagcagttgattatatgggaagaattacccttataaataattcagctttaaaaatattaaatcttcaacataaagttgataaggatgaagtcataggaaaaaatatagaaaatattattgaaaatacaggaatgattaatatattacaaacgggagaatctgaatttgaaagagagcagaaaataaataatacaactataatgaccaatagaattcctataatgaaaagagaaaagatcgtgggagctattgctagttttagggataaaacagaagtgactagaatggcagaagaacttacaggtgcgaaaaaaatggcatggtctctaagagctcaaaatcatgaattcatgaacaaacttcatactatttcaggacttatacagctagaagagtatgatgaagctctacagtttatttcagatatggctaagagtagaaatagtataagtaatatattatcccataatataaaaaatccttctatatctgctttattgttgtcaaaatataataaagctgaagagtgtagagttagtttaaaaatagatgagaattgtaaacttacaaaattaccacagcatatgacctcagaagaaattgtatcaattataggtaatttaatagagaattctttagatgaagttaaaaatgatggtactggattaatatatataaaaatagtagaaaataaaaattatttaaatataatagttaaggataatggtagtggaattccagtagaatatagagaaaaaatatatcatcaaggtttttcaacaaaggaagcacagcgtggatatggaatgtatatagtaaaaaaaataattgatgagactaaaggaacaataagacttgatgtggacaacggtgttatttggaatataactataccgatgacaaggggtgataaaattgattcaggtaatgatagt

SEQ ID NO: 16202 - DNA, 234 bp, Clostridium botulinum
gtgagtgagatggccacaaataaaactacaaataatatcgcgtcagctaataacaaaggtttgagaggcttctttagggacttaaagtttgaattcaaaagaataacatgggctcctaaaaaagatgtaaaaaaagcaactgaaactgtattaatattttgctttgtttatatggttattgttggagtatttgattatggattcaacaacctattcaaactaatatttaagctg

SEQ ID NO: 16203 - DNA, 1914 bp, Clostridium botulinum
atggaaatggagaaggctttaaagttgaaaaatatagttacgaaaataattattagaaatttagatataatattatttttaatattagtaagtttaaaagtaatgttttatggaaaagaaatatctccagagttttttagctataagtatatattattaccagttgtagcatctgtgggagtactattaggtatagggtatttcctccaaaaacacaaaagaactaaatttttatatgtgttaaacataataattagttctataattatagcagatttactatactacagatattataaagacattatatctataggggctataagaaatgcctttttattagggggagttgcctctagtattacaagtttgtttaaactgaaggattgtgtatattttctagatatattattgattatacctttcctaaaggtgtatagaaatatgccttataaggaaaataaaaaaattataagaataggtgtgggatctttaatattagcaggagctattttattaaatggtataaatatatataaattatcagtagatcaaccaggattgcttaatactatgagtaataggatatatataactaaggttttagggaatgtaaactttcatgttatagatgcttatcagttcacaagaaataagataaataatagtaaaaagcttccagaagctaaagaaaaagagttagtagataactttgagggaaaatcacaaatacagggagaaaaattaaagggtgtaggagaaggaaaaaatttaatagttatacaagtagaagcacttcaacaatttgctataaatgcaaaggtggaaggtcaggaagtaacacctaatttaaataagtggataaataaaagtatgtatttcgataattatttttatcaagtagcagcagggaatacatctgatgcagagtttttgtctaataattcattatatcctgcagtttcaggagcagcttattatatgtatagtggtaatcaatttaaatcgctaccaagtacacttcaagataagggatactacacagcggctatgcacggctataaagatggattctggaatagaaatgtaatgtataaagctcaaaagttccaagattttcatggggaaagtacttataacatagatgaacaggtagggttaggtcttagtgataagtctttctttaatcaatctttggaaaaaattaagacttttaaacaacctttttatagttttttaataactttaagtagtcatttcccttacgatgatgtaaaaggatatggggaatttaatgtaggaaaatatgaaggttcatttttaggtaattatttaaagggtatacattatacagatgctcaattaggaatgtttttagaaaaccttgaaaaagagggatatttagataattcaattgtagttatttatggagatcataatgctgtatctaaaaattatatacaagagttatatgattttgtgggagaaaaatcaccgaatgatttaaaatggtatgaacttcaaaaggtacctatgcttatacacttcccacaggacgaatataaaggagtagatcatacttatggtggtcaaatagatttatatcctacaatagctaacttatataatttgcctaggaaatatatgttaggaaatgatttattaaatgtagctgaccctaaggttacttttagaaatggatcctttaccgatggaaaagctttttatatatcttggacaggagaatactatgatataaaaactggagaaaagattactgaaacagaggaactaaaggctaaaaagcaggaaagcgcaaaggatttagaaagttcagatgaactattaaatcataatttaataaaaaaattagaaagtgaatcaaagggggaaggggaaagtgagcaaagtaaa

SEQ ID NO: 16204 - DNA, 3555 bp, Clostridium botulinum
atgggaaaaaatcaatttgatgagaagaagccagagtgggtaagtttacatcaacatacagagtattcattattagactcttcggcaaaaatatcagatcttataaagagagcaaaagagtttggtatgaaaagtattgctattacagatcatggagttatgtatggatgtgtagatttttataaagaagcgataaaacaaggaataaagcctataataggctgtgaaatatatgtagcatcaaagtctatgtacataaaacaacaagacaaagaaaatgaaacccatcatttagtattgctagtaaagaatgaaatagggtacaaaaacttaatggagatagtatcaaaggcatctgtagagggattctattataagcctagagtggatcatgaatttttaaaagatcatagtgaaggattaatagcattaagtgcatgtttaggaggagaagttcaagctaacatattaaaagaaaatttagaaaaagctgaagaagtagcattaatctataaagatatttttaaagaaggattttatttagaacttcaatatcatggtatggaagagcaattaaaggttaatgaaacattagttaagatgtctaaggatttagatatacctttagtggctacaaatgatgtccattatataagaaaagaagattataaatcccatgatatattgttatgcatacaaacaggtaaaactgtagaggaagaaaatagaatgagatatccatctgatcagttttatttaaaatcaccagaggaaatgtatgaaaccttttcttatgtaccagaggctttagaaaatacggttaaaatatcagaagaatgtaattttgattataattttcatgaatcaaaattacccaagtttccactagaagaaggggtagatccctatgaatacttaagggaaatatgctttaaaggactatttttaagatatgaagtacttaaagattttatagataaaccctttagtattgatgaagttttagtatatggggatgaaaataaagaagcttttgatttaatagagagattaaattatgagttatctataatccaacaaatgggatatgtagattattttttaatagtatgggattttataagatttgctaatgaaaagggaataatgacaggcccaggaagaggatctgcagcaggatctttagtagcctatactttaggaataactaaaattgaccctattaaatataatctaatatttgaaaggtttctaaatccggatcgtatatctatgcctgatatagatagtgatttttgttatgaaagacgaggagaagttatagattatgttgtggaaaagtatggaaaagaaaatgtatcacaaataataacttttggaactatggctgcaagagcctgcataagagatgtaggaagggctatgaattatccttatgcagaagtagataggatagctaaaatgatacctactgttctaaatataactataaacaaagctttagagttgaatccagaattaaaagaggtttatgataacgaagaaagagttagagagctaatagatgtggcaagggctttggaagggcttccaagacatacatctactcatgccgcaggggtagttatagcatcacagcccttagtaaattatgtacctcttcaaagaaatgaagaaagtatagtaacacaatttacaatgggcactttggaagaactaggacttttgaaaatggatttccttggccttagaactcttactgttatgagagatgctgtaagaattataaaagaaaataaagaaataaatattgatttagataatattgattttgaagataaagaagtttacaaaatgataggacagggtaaaactgtaggagtatttcaattagagtctgctggaatgacatcctttatgaaggagttaaaaccagattccctagaagatataatagcaggaataagtttatatagaccaggccctatggctgaaataccaagatatatagctaataaaaataaccctttaaatatagaatatcaaacagaaaaactagaacctatattgtccgttacatacaattgtatagtttatcaagaacaagttatgcaaatagttagagatttggcaggatactctatgggacgtagtgacttggtaagacgtgccatgtctaagaaaaaacatgatgtaatggaacaggaaagaagaaattttatatatggtaatgaagatcaaggtgtaaaaggatgtataaataatggtatagatgaaaatgtagctaatagtttatttgattctatgatggatttcgcttcctatgcatttaacaaatcccacgcagcagcttatgcagtagtaggttttcagacagcttatttgattagatattatcccacagagtttattgcagctatgctaaatagtgtaaagggtgataatgataaggtatctttttatgttaattttgcaaaaactttaggaatagaaataatagctcctaatataaatgaaagttatagtaattttacagtaaaagataatagaataatatttggattaactgcagtaaaaaatgtgggagaaaagggtatagataatatagttttatctagagaacaaaaggacaaatttatagatttaagtgattttttcaataaagtagatacctcaattataaataaaaggttagtagaaagtttaataaaagcaggagcctttgattgtttaaaggtatatcgttctaaaatgttagctgtttttgaaaaaataatggatggtatacaaaagcagaaaagaaataatatagaaggtcaggttaatttatttatggatattatggataacaaagaaagtagtatagatataaaatatcctaatataaaggagtttgacaaaaaatatatacttcaaatggaaaaagaaatgacaggattgtatttttccggtcatccattggaagaatatgaagaaacattaaaaattcaaacaagtcatcttatatcagatattattcctaaggaatctttagaaggaaacttggtagatactataagcagtataaaagacggagataaagtagtagtaggtggtatgattactcacgtaagtaagaaattaactagaaataatgatatgatggcatttatagtattagaagatctatattccagtatagaagttatagtattccctaaaatttttaatatggctagaaacataataaatgaagatgaagtagtcttattaaaaggaagagtaagtttaagagaggatgaacaaccaaagttaatttgtgaatttatggagcctcttgtaaaaattaattctgaaaaattatatatattagtagaagaaaaaaaggatataaaactaaagttacaagaaataaagggtgtatttttgcaacataaaggtaatatacctgtatacttttgtacaaataaagaaagaaaaaagtttagaattgatagagaactttgggtaaatggaagcagggaattaatggataacttgagaaatatgtttggagaagataatgtaaaaatactt

SEQ ID NO: 16205 - DNA, 690 bp, Clostridium botulinum
atgacaataggtattataggtgcaatggatgaggaattagaattattattaaaggaattagatttggaaaaaaaacaagttaaagccaatatgacatttaattttgggaaactttggggaaataatgtggtagctgtaagatgcggtataggcaaagtaaatgcagcagtttgtgctcagatactcatagatgattttaaagtggatagaataataaatgtaggtatagctgggggaacagcagaaaatgtattaccaggagatgttgtagtagcggatagtttagttcagcatgatatggatacttctgcttttggagatccaataggacaaattccaagattagatacatttgattttaaatgtgacattgaattaatagagaaagctaaaaaggccttccagaataaaacagaacataaatgtttagtaggaagaatagttacaggagatcaattcataaatgataaaaaaagggttcaatggatgtgcaaagagtttaatgcactagcttgtgaaatggagggtggaagtatagctcaggtctcttatttaaataatattccttttgtggttataagatccatatcagataatgcaagtacaggagctcatatggaatatgaagattttatgactatagctataaaaaattctactaacatattaaaaggaatgcttacaaatata

SEQ ID NO: 16206 - DNA, 183 bp, Clostridium botulinum
atggcacgtaaagctttaatagaaaaatggaataaaacaccaaaacattcaactagagcttatacaagatgcagaatttgtggaagaccacatgcggtattaaagaaatacggtatctgtcgtatatgttttagagagcttgcttacaaaggtgaaatacctggatgcaaaaaagccagctgg

SEQ ID NO: 16207 - DNA, 705 bp, Clostridium botulinum
atggcaaaagcaaaatttgaaagaagtaaacctcatgtaaatataggaacaataggtcacgtagaccacggtaagacaacattaacagcagctattacaacagtattagcacaaaaaggaggagcttcagcaacaaaatatgacgaaatagataaagctccagaagaaaaagaaagaggaatcacaataaatacatcacacgtagagtatgaaacagcaaacagacactacgcacacgtagactgcccaggacacgcagactatgtaaagaacatgataacaggagcagcacaaatggacggagcaatcttagttgtatcagcagcagatggtccaatgccacaaacaagagaacatatactactagcatcaagagttggggtacaatatatagtagtattcttaaataaagctgaccaagtagacgatccagaactaatagaattagttgaaatggaagtaagagaattactaaatgaatatggattcccaggagatgatactccaatagtagtaggatcagcattagaagtattagaaaaccaagacaatgcagaaaaaacaaaatgcatagatgaattaatggaagcaatagatagctatataccaacaccagaaagagcaacagatcaaccattcttaatgccagtagaagacgtatttacaataacaggaagaggaacagttgcaacaggaagagttaaa

SEQ ID NO: 16208 - DNA, 451 bp, Clostridium botulinum
gggtctttccgtccaatcgcgggtagcaagcatcttcacttgcactacaatttcgccggatttgctgttgagacagtgcccaaatcattacgccattcgtgcgggtcggaacttacccgacaaggaatttcgctaccttaggaccgttatagttacggccgccgtttactggggcttaagttcacaccttcgcttacgctaagtgttccccttaaccttccagcaccgggcaggcgtcagcccctatacatcagctttcgctttagcagagacctgtgtttttgctaaacagttgcttgggcctattctctgcggcctactttcgtaggcaccccttctcccgaagttacggggtcaatttgccgagttccttaacagcaattcttccgatggccttaggattctctcctcacctacctgtgtcggtttgcggtacgggcacctattcact

SEQ ID NO: 16209 - DNA, 1479 bp, Clostridium botulinum
atggaatacagtaaaaacttcgatgtgagaaataatagaaatcttactatgttagtggatttttatgaacttactatgggaaatggatatttaaaaagtggtatgggagacaaaatagcctactatgatatgttctttagaagagttcctgatggtgggggctattgtattatggcaggagttcaacaacttattgaatatttatccggtttaaaatttacagaagatgatatagaatatttaagatctaaaaaggaattttccgaagaatttttagactatctaaaaaactttaaattttcttgtgatgtttgggcagtaccagaaggatatcctgtttttccaaatgagcctttagttacagtccgcggtccggccattcaagctcaatttgtagaaactatgatacttcttactataaatcaccaaactctaattgctaccaaagctaatagaatctgtagagccgctgaaaatcgttctgttatggaatttggatctagacgtgctcaaggttatgatggtgctatatatggtgcaagagcagctgtaattggtggatgtaatgcaactgcttgtactatagctgaagaaatgtttggaatacctgctgcaggtactatggcacatagttggatacaactatttcctacagagtatgaagcttttaaagcctgggcagaagtaaatccagaaaattgtgtgcttttagtagatacctataatgtactaaaatctggtattcctaatgctataaaagtgtttaatgaagtattaagacctaaaggtattagacctaaaggcattagaatagatagcggtgacataacttaccttactaaaatctgtagaaaaatgttagacgacgcaggctataaagacgtaggcattgtggtttcaaattctctagatgaatttataataagagatgttctaaatcaaggagctaagattgatagctttggtgtaggcgaaagacttataactgcaaaatcagaacctgtttttggtggcgtgtataaattagttgcagtagaagcttatgatggaataataacacctaaaattaaaataagtgaaaatgaagagaaaataactaatccaggcttcaaaaaactttatagaatatatgacaaaaattcacatcaagctattgcggatcttattactatgcatgatgaaaaaatagacgaaagtaagcccttagaaatatttaatcctttatttacatggaaaaagaaaaaaattaaggattactatgtagaagaattgctagttaaaatatttaataagggaaaacaagtttatgaaagccctgatgttatggatataaaagcctttgccaaaaaacaaactgaaagattttggcctgaagttttaaggtttgaaaaccctcataagtattacgtagacctttccccaaagctttggagagttaaacaagaacttttacacaagttttcagatacttatgaagaa

SEQ ID NO: 16210 - DNA, 378 bp, Clostridium botulinum
ttgatttacggtattggaacagatattactgaaattagaagaatagagaaagccataactagaaataagaatttcataaataaattatttaccaaaaatgaaatggatctttgggaaaagaaaaattttaagttagagtttatagcaggaaggtttgcagcaaaggaggctgtatctaaggctttaggtactggaattagagattttaattttaaagatatagaaataataaataatgaattaggaaaaccacaggttattttaaagccaaaagctgaagatataataagaaaaatatcccaatcctataaaattcatttgagcatatcccatgaaaaagagtatgctatagcttatgctttattggaggtatttata

SEQ ID NO: 16211 - DNA, 1140 bp, Clostridium botulinum
atgaaaatgttatatagaaaatttgggaaaaccgatgaagaggtctctatattaggatttggatgtatgagacttccaataatagataatgatccagccaaaattgatgaaaaaaaagctataaaacaaataagatatgctattgacaatggggttaattatatagatacagcttatccgtatcatgaaggtgccagtgaatttttagtaggaaaggctcttaaagatggatatagggaaagagtaaaattagctactaaacttccttcttggcttataaaaagcagagaggatatggacaaatatttaaatgagcaattagaaaaattgcaaacagatcatatagatttttatcttttacatgctctaaataaaggagattgggaaaatttaaaaaagcataatgtatttgagtttttagataaagctatagaagatggaagaataaaatatgcaggcttttcttttcatgatgaattatctttgtttaaagaaatagtagattcttatgattggagtttttgtcaaattcaatataattttatagatgaaaattatcaagcaggtacaaaagggcttagatatgcttcacaaaaaggtcttgcagttgtaataatggaacctttaagaggtggaaacttagcaagagtagttccagatgatgttaagaaaatatggaataaatctcatattaagagaagtcctgctcagtgggggttcagattcttatggaatcatccagaaataactgtagttttaagtggtatggaagaaatggatcatataaaagaaaatataaaagaatctaataacggatatgcaagttccttaacagaaaaagagctagaattaattgataaggtgaaagagatatatataagtagaataaaggttgattgtacaaactgtagatattgtatgccatgtccctttggagtaaacatacctaaaaattttaagtatttaaatatggcttcaatttatagtgatgtgaaaaaacaaaagaaaaagtacataaatcacttaaacaaaaatgaaaaagcttcaaactgcagaaaatgtggaaaatgtgaggaagcttgtcctcagaatattaaaataagaaatatgttagaggaagtagttaaaacttttgaacct

SEQ ID NO: 16212 - DNA, 1419 bp, Clostridium botulinum
atgagtggattagcaaaggatttcttgtggggcggagctacggcagctaaccaatgcgaaggtggttatttagaaggaaataggggattaggaactgtggatgttattccagcaggagtaaatcgtagagctgttatgcaaggaaagatgcattataataatttacaagaggattcttatttcccatcacatgaagcaatagatatgtatcataactacaaggaggatatagcattatttgcagaaatgggatttaaatgttatcgtttctcactttcatggtcaagaattttcccaacaggaaaggaacaagaaccaaatgaagaaggcttagcattttatgaaaaatttattgatgagctattaaaatataatattgaaccagtagttaccatatgccattttgatgtacctcttgtattggagcaggaatatggttcatggagaagtagaaaattaatagatgcatatcttagatattgtgaagcaatatttaaaagatttaatgggaaagtaaagtattggataacttttaatgaaataaatatgcttatgcatttaccctttatgggagctggaataatgtttaaggaaggggaaaatgagctagaagtaaaatatcaagcagctcataatgaattagtggcatcagccttagctacaaaattagcaaaggaaattaataaagataataaagtaggatgtatgttagcggcagggcaattctatccatatacttgtaagccagaagatgttctagaagctatggagaaagataaaaataattatttcttcatagatgtacaatctaggggagaatacccgagctatgctaaaaaattcttagagagaaacaatataaaaatagaaatgcagtcagaagatgagaagattttaagggagaatactgttgattttattgcatttagttactatacttcaagacttgcaagtagtgacccgaatgcaggagaaaaatcagctggtaatgtaataacatcattaaaaaatccacatttaaaatctagtaaatggggatggcaaatagatccaataggccttagaattacaatgaattcactttatgatcgttatcaaaaaccgctattcattgtggaaaatggcttaggtgctgttgatattttaaatgaggatgggactgtagatgatgattatagaattgcttatcttgaaactcatataaaaaatatgattgatgcagttgaattagatggtgttgaactattaggatatacaacttggggatgcattgatttagttagtgcatcaacaggggaaatgaaaaagcgatatggttttatatatgtagataaggataatgatggtcatggaactttaaagagatacaagaaaaaatctttctattggtacaaaaatgttattaaaaataatggacta

SEQ ID NO: 16213 - DNA, 591 bp, Clostridium botulinum
atgattattataataactagcgtaatttcttttttattaggttcaataccaacaggatattttattactaagaaagcatgtggaattgatataagaacaaaaggtagtggaaatataggttcaacaaatgtaaaaagaattgtaggaactaaaatatctatcattactcaaataatagatgttttaaaaggtatcattcctgtagtattaggaatatctttatcaaagattgttaaattacctgtttcaactgacacttatctttctattattgcaatagcagcaatcttagggcatgactatacgccttttcttaaatttaagggaggaaaaggtgtaaatacaacacttggtgtatttatttttattgcgcctattccaacgttaacagggcttgcagtttattttatattaggtttatttatacgtatagtgtctattagatctatttcaataggcataacaatacctattatgtgtataataacaaaactacctattcaaataataatttctaccacaatagcctgcattttaatgataattaggcataaagataatttagtaaggcttatacgaggagaagaaaaa

SEQ ID NO: 16214 - DNA, 1176 bp, Clostridium botulinum
atggagtcgaatttatcagtcgcaataccttgttataattgtaaaaaatacataaagaagactataaaaactttattaaaacaaactatattaccaaaagaaataattttagttaatgataatagttcagatgatactattaaagtactggaagaaattcaaaatagcaacaaagaaatagtaagagtttttaatttaacaaaaaataaaggaccttcgtttgccagaaattatgccgtagacaaatcaaagggagactatatattatttatggactcagatgatttagcttcaccatatttaatagaaaagtctttaacaaagcttaagagtatgaatggaaaaagccatgataaatggatattatcttatacttcttatattcaaatagatgaaaatgataatattataagtgatataataaaaggtatacaagtagaaacagaagaaatattaggatatgaatttttaaggaactatattatatctacatcaggtgttatccttaaaaaaaattatttttatgaagcaggaaagtttaatgagagattaagttattcggaggattgggatttatggatcaaggtggcagcattgggtggattttcttatctgaatgaaccattagtaaaagttagaaggagagaaaatagcctatcttccaatttaaagaatatgaaagatggagaaaaaactgttttaaaccaatatgatttagagtttatagaggaagcagttaataaaagaaaagtgccaagctatataaatacctgtgattttgtatctatgctatttagattaaattattgggaggaaggctttgaaaaattaaagtgtttatcaaaaagctttgactattacaatatttattttttgctaggattatattatattaaaaatcagaatctaaatttagctttagagaattttaataaaactataaatttaaaacaaaatcatggagcagcattaaataatttaggagctatatattgtttgttaggacaaatagatcaaggaaagcggttattaattaaagctttagaaatattcccaaactatctagatgctatgcataacttggatttagtaattaataagagtaatgtaacgtataacaatataaattttacatggagggaactaagaaatactttgataaattataaaaataag

SEQ ID NO: 16215 - DNA, 597 bp, Clostridium botulinum
atgaaaaaagaagttattgttgcaagtaataacaaagataaaataagagaaataaaagaaatattaaaaaaatttaatatagatgctttatcgatgaaagaagcaggtattgatatagatatagaagaagatggcaatacatttatggaaaatgcttataaaaaagcagctactatatatgaaattttgcctaactatatggtaatagcagatgattcagggcttatggtagatgctttaaatggagctccaggaatttattctgctagatttgcaggggagcatggaaattataaaaaaaataatgaaaagttattaaaagaactggatggtaaaaaagtagaagagagaaaagctaaatttgtttgctctatagtatttataatagataaggataatgtaataagagtgcaaggtgaaattaatggggttataggagaaaaggaaataggagaggatggatttggatatgatcctttattctatataccagagtataaaaaaacctttgcacaaatggattctcaaactaaaaattctataagtcataggggagaagcctttagaaaattaaaatgcgaattagaaaaatatata

SEQ ID NO: 16216 - DNA, 1161 bp, Clostridium botulinum
atgtcagaagaaataacaatgaaggatatgatggaagaaataaattcttcaatgaaaagaattcataaaggagaactattaaaaggaaaagtaatttcagtttcagataaagaagccgtgttaaatataggatatatatctgatggaatattacctaaaaaagaagttgtagataatgaagaggtaaatcttaaagacataataagtaaagatgatgtaatttctgtttgtgtactagaggtaaatgatggtgaaggaaatgtacttttatctaagaaaaaagcagaaattatagaagcttggtcaaagctagaaaaagcttttaaaaatgaagaaatactagaaatcaaagtagaagaaataataaagggaggagctataggccatatacaaggtataagagtatttataccagcttctcaaatagataataaatatgttaaagatttaaatgtatttaaaggtgaaatggtaaaaggaagattaatagaattagataaacaaaagagaaaaatagttttatctagcagagtagtaaaagaagaagaagaggcgaaaagaaaagaagaactattgaatagtttagaaaagggacaaaaaatagaaggtgttgtaagaagactagaaaagtttggagcttttgtggatataggtggaatggatggattagttcataattctcagctatcctggggaagggtaaatcatccttcagaagtagtatctataggagacaaagtagaggtctatgttttagattttgataaggatactaaaaaaatagctttatctttaaaggatgttaagaaggatccttggaatacagtaaaggataaatatgccgtaggtagtgtgatagaaggaacaatagttaaattattaaactttggagcctttgtagaagtggaaaatggtatagaaggattagttcatatatcagaaataactgatgaacatatagctaaaccatcagaaaagttaaatataggcgataaagttaaagtaaaagtattagaagtaaattcagatgaaaagagaatgtcattaagcataaaagaagcaacagaaaagccaaaggaagatttctcaaaatatgatgattctaaagaagaagatgtaactttaggagatttatttggagataagtttaaagatttattt

SEQ ID NO: 16217 - DNA, 903 bp, Clostridium botulinum
atgatttatactattacttttaatccagctttagactatgtagttaaggtagaggattttaaaacaggtaatttaaatagaacaagctatgaaaagattcatgcaggagggaagggaataaatgtttctatagtattaaataatttagatgtagaaaatatagctttaggttatatagctggttttacaggggatgaaatagaaagaagagttagatcctttggatgtaaaacggattttattagattaaaaaatggaatgtctagaataaatgtaaagctaaaatcaaaggaagaatcagagattaatggaacaggaccttctataagtgctgagaacttagatgaattgtttaataaactagataatctaaaagaaggagattttttgatacttgcgggaagtattcctaaaactcttccagagaatatatatgaaactataatggaaagacttaaagataaaaatataaaatttgtagtggatgccactggagaacttttactaaaggtattaaaatataaaccatttttaattaagcctaatcaccatgagttgtcagaattgtttcatgtagaaattaaaaatgaagaagaaataataggttatagtagaaaattacagacgatgggagcagaaaatgttcttatttctatggcaggagatggagcaatatttatttcatctaaaggagaaataataaaaagtagtgtacctaaaggagttttaaaaaattctgtaggagcaggagattctatggtagcaggttttatatcaggatatttaaagaataataatctggaaaatgcatttaaaatgggattagctaccggtagtgctagtgccttttcggaaagattagctaccaaagaaaaagtagaagagacattaaaacaaatatta

SEQ ID NO: 16218 - DNA, 798 bp, Clostridium botulinum
atgcatataaattatactaataaaattttattagataggagaaaagatatgaaatacactaaaattttggcccatagaggggccagtgcctatgctccagagaacactatggctgcttttaaaaaggctatagaaatgaatgcagatggaatagagttagatgttcatttatctaaggatggatatattgtaattattcatgatgaaagggtggatagaactacagatggaaaaggtgaagtaaaagatttttcgttagatgaattaaaaaagttagatgcaggctcttggtttagttatgaatataaagatgaaaaaatacctactttagaagaacttttaaagctaataaaaaatacagaaatttacttaaacatagagataaaagcaggttatagactttatcctaatatagaagaaaaagttatagctatgatagaaaaatataaaatgttagacagagttataatatcctcttttgatcattactctttagtgagggttaaagaaataaattcaaatattaaaacaggaatgctttatgaagcggctttgtatgaaccttgggaatatgctaggtctataaaagtagaagcacttcatcctaattatattactcttacaaaggaatttatagataaagcttatattaatagttttgaagtaaatccttatacaataaatgatgaaactaatatggaaagtttaatagaaaataaaataactagcattattactaattatcctgatagggcttacaatattatttcaaaattaaaactaaaaaatttacaagtt

SEQ ID NO: 16219 - DNA, 1911 bp, Clostridium botulinum
atgtcacaagaaaataaacaagtttatgatgaaagtcaaattcaagtgttggaaggtttagaagctgttagaaaaagaccaggaatgtatattggaagcactagtttaaggggacttcatcatttggtttatgaaatagttgataatagtatagatgaagcgctagctggtttttgtacacatatagaagtttttatacacaaagataattctataactgtggtagacgatggacgtggaatgccagttggcatgcattcaaaggtaaaaaaacctgctgttgaagtaataatgactatattacatgcaggtggaaaatttggtggtggaggctacaaggtttctggtggacttcatggtgttggagcttctgttgttaatgccttatcagaacaatgtgaagtagaagtaagaagagaaggccatatttggaaacaaaaattcgaaagaggtataacaaaaactggattagatatagttggagatacggaagatcatggtacaaaaatatattttaagccagatattgaaatatttgatgaattggaatttgaatatgatactttagctcacagactcagagaattagcctttttaaacaaaggtataaaaatttcattaacagatgaaagatatgataaaaaagaaatgttccactatgagggtggattaagatcttttgtactttatttaaatagaaataaggaaaaattacatcaacaacctatatatgttgatgaaaataaagatggatgtatagttgagattgctatgcaatataacgatggttatgcagaaaatattttttcctttgctaacaatatagacacaatagaaggtggaactcatttagctggatttaaatcagctctaacaagagttataaatgactatgctaggaaatttaattacttaaaggatacagataaaaatttatcaggggatgatgttagagagggattaacagcagttatttcagtaaaattaacagatcctcaatttgaaggacagacaaagacaaaattaggaaatggtgaagtaagaggaattgtagatacaatagtaggtcagagtataggttcttttttagaggaaaatcctaatgtaggtaaaataataattgaaaaaggcctatcagcttcaagagctagagaggctgcaaaaagagcaagagaacttactagaagaaaatctattttagaaagcacgtctcttccaggaaaattatcagattgttcttcaaaggatccatcattatgtgaaatttatttagtcgaaggagattccgcaggtggatctgcaaaacagggaagaaatagagaattccaagctatattacctttaaagggtaaaataatgaatgtggaaaagcaaagattggataaaatattagcttcagatgaaatacgtgctatgataactgcatttggagcaggtataggaaaagaatttgatattgataaaataagatataatagaataattataatgacagatgctgacgtagatggagcccatataagaactttacttttaacattcttttatagatacatgaaagaattaatagaggaaggtcatgtttatatagctcaaccaccactttatagaatatataaggctaaaaaagaaatttatgtttattcagatccagaattggatgctgcattattagaattgggtggaaaagataccaatactaatattcaaagatacaaaggtcttggagaaatgaatccagaacaactttgggaaactactatggacccagaacatagaactttattacaggtaacagtagaggacgctatggaggcagatgaaatatttactatacttatgggaacaaaagtagaaccaagaagagactttatagaaagtaatgctgataaagtagttaacttggatata

SEQ ID NO: 16220 - DNA, 1983 bp, Clostridium botulinum
atgagtgataataggtatgataattttattacaaataataaagtatatatgtttattatagccatactaatagttattattttttcatacaaacattcacaagtaggtatagtattaacacttatatattttttcttgttactttataattttaagaatacaagaattaagaaaaaagagctaaaaaaatttatagaggatttttctacaaaaatggatagcgcatttaaaagttctctaatgaatttaccttttcctatgatggttttatctaataagggagaggttttatggtataatcaaaatttctcactattattaaaaaaagatggaatattaggagaaaacataaatcatatattaaaaaattttaattttaaatatgctctagaaggaaaaaagaattccttcaaaaatattaattttaaggataattattataatatatatactaacacattttttgatgaggaaatcagagaaaaaatattacttctttatttttatgatgttacagatatgtttaatatattgatgaatatggaaaaaaataaagaaggaataatgcttttagaagtggataacttagatgaggtattaaaaagtatagatatagataaaaaaccattaataatagcagaaatagaaagacatataaatagtttttctgaagacatgaaagctatgataaaaaaatatgagcaaaataaatatatattatctgtccaaaattcttatatagaaaaacaaatggagaaaaaatttgatatactagatataataaggaatatagatacaggaaataagatgaatcctactttaagcataggagtaggaaagggagcagaaacccctttacaaaattatagttatgcacttgcagctaaagaattagcattaggtagagggggagaccagtctgtagtaaaaaataaggataaactctcattttatggtggaaaaactaaagaagttgaaaaacgaacaagggttagggcaagggttataggtcatgctttagttaatttaataaatgaaagtagtaatataattataatggggcatataaatgcagacatagattgtctaggttcagctataggacttcacagtataataaatcaattggataaaaaaagttatataattttggagaattataataaaagtagtgaatttttattagataagataaaaaaagaaaagggatatgagaatacatttataaatagtaaagaagctttagatgttatgaatgaagagagcttattaataatagtagattctcatagtagaggttatgttcaaaatattagcttagttgataaatttagtaaaatagttataatagatcatcatagaagagcaacggactatatagaaagatctatattaagttatatagaaccttacgcttcttctacagcagaattagtaacagaaatgattcaatatatggtagaaaaacctaatatttctccaatcatagcagaagctcttttagcaggaatatatgtggatacaaaaaatttttacttcaaaacaggtgttagaacatttgaagccgcatcttttttaaaaaaatttggagcagatactattgatgttaagaagttttttgctagtgatttagatgattatatcaaaaagttagaaataataaaatcagtccatgtaaaaaatgatattgctatagcagtatgtccagaaaatatagaagataatgtattagctgcccaggcagcggacgaactactaaatatttcaggtattcaagcttcatttgtatttgttacaatagataatgaaatatatataagtggaagatcccttggagatattaacgttcaattaatacttgaaatgctaggtggtggaggacatatgactatggctggagctaaattagaaaaaattaatttaaaagaggcagtagaaaaattagaattagccatagataaatatttaagggaaggtgaagaa

SEQ ID NO: 16221 - DNA, 954 bp, Clostridium botulinum
ttggaggatattatgtcaaagatagcttttatattctcaggtcaaggagctcaatatgtaggtatggggaaagatttatataaaaatattcccgaatgtagaaaaatatttgaaatagcagaggaagaactacaaatacctttaactaaaatatgttttcaaggtccaaaggatgaaatagataaaacagaaaatacccaaccagcaatactaactcttagtattgctgctatgaaagcattagaaaagtacggtataaaaccggatgttacggcagggctaagtttaggtgaatattcagctttggtttgtagtaaagttatagattttaaagaagcagtttctttggtaagaaaaagagggcaatatatggagcatgcagtacctaatggcgtgggtactatggcagctataataggtcttaaaaaagaaaaagttaaggaaatttgcgatgatttaaaaaaggttggaatagttgaaatagcaaatattaattgcccagggcagattgttatttctggagaaataaatgcagtggaaaaggcctgtgaaatggcaaaagaaaaaagagctttaaagtgtgtaaaccttagtgttagtgggccatttcatagtagtatgttaaaagaagctggagaaaatttatatgaagagttacaaaaaatacggtttaactctatagaagttccatttataacaaatgtaacaggagattttgttataaatactagtgaaataaaagatttattaaagaagcaggttatgagtactgtactttgggaagggtctataaaaacaatgatagattttggggtagatacctttatagaaataggtccttcaaaggttttatcaggttttgttaagaaaatagataggaaagtaaatatattaaatgtagaagatatagattcccttaataaaacaatagaaaaattaaaaacaataaatagt

SEQ ID NO: 16222 - DNA, 921 bp, Clostridium botulinum
atgatcagtgctaaaatggtaaaagatctaagagaaaaaactggcgcaggaatgatggattgtaaaaaagctttaactgaatgtgatggagatttagaaaaggctgtagaagtattaagagaaaaagggctagcagccgctgctaaaaaatcaggaagagtagctgcagaaggtattgtaagcacatacatatctgaagacatgaaaaatggatcaatagtagaattcaactgtgaaacagatttcgtttcagtaaacgaattatttgtagagttagcaaacaatttatccaaacaagcagctttttcaaacgtttcaactgcagaagaattattagaagaaaaatatatagcagatgaaagcaaattagttaaagatgtaataactgaattaatagctaaattaggtgaaaacatgaacctaagaagaatagctaaactttcagtagataaaggtgttataacaagctacatccatggtggtggaagaatcggtgttcttgtaaaattagcttgtgaaaaggaagatgcgaaattagctgaaatagctaaagatgtagcaatgcaagttgcagctacaaacccattattcttaaatagagatggtgttgatacggacactttagaaaaagaaaaagaaatatacagagttcaagctttaaacgaaggaaagccagaaaaagttgttgaaaaaatggttatgggaagaattaataaatattataaagaaaactgtttagttgaacaactttgggttaaaaacggagattacactataactaaatacttacaagaacaatcaaaagaaatcggtgcagatataactgtagaagctttcgtaagatacgaaaaaggtgaaggcatagaaaagaaagaagaagactttgctgaagaagttcaaagacaaatgaaccaaggcaaa

SEQ ID NO: 16223 - DNA, 1239 bp, Clostridium botulinum
atggactttacaaatttaaaaaacacagatccagagctattagacatgataaagaaagaagaggaaagacaagaatataatatcgaattaatagcttcagaaaattttactagtttatctgtaatggagtctatgggatctttattgacaaataaatatgcagaaggatacccacataaaagatattatggaggatgtgaatttgtagatgaggtagaggatttagcaagagaaagattaaaaaaattatttgctgcagaacatgctaatgtacaaccacattctggttcacaagccaatatggcagtttatatgtctgtgcttcagactggtgatactatattaggtatggatttatctcatggcggacatttaactcatggaagtccagtaaatttttcaggaaaattatataattttatatcctatggtgtagataaagaaacagaaactatagattatgaaaaattaaagaaaatagccttagaaaatagacctaaaatgatagtatctggagctagtgcttatcctagaattatagactttcaaaagataagagaaatttgtgatgaaatagatgcttatatgatggtagatatggctcatatagcaggattagtagctacaggattacatccatcaccagtaccttatgcagattttgttacaacaactactcataaaactttaagaggacctagaggtggggctattttatgtaaagaaaaatatgcaaaagcagtagataaagctatattcccaggcattcaagggggaccattaatgcatactatagcagcaaaagccgtttgttttggggaagctttaagagaagattataaagaatatatgcagcaagttgttaaaaatactaaagtcttaggagaagaattaaaaaattatggatttagactaatatctggtggtacagataaccatttattactaatagatttaactaataaaaatataacaggaaaagatgcagaaaaacttttagattcagtaggaattactgtgaataaaaatacaataccttttgaaactttaagcccttttataactagtggaattagaataggaactccagcggtaactacgagaggatttaaggaagaagaaatgaaaaaaatagcctatttcatgaattattctatagaacatagggaagagaatttatctcaaataaaagagcaaataaaagaaatttgtaaaaaatacccattgtatcaaaatgca

SEQ ID NO: 16224 - DNA, 1191 bp, Clostridium botulinum
atggcaaaagcaaaatttgaaagaagtaaacctcatgtaaacataggaacaataggtcacgtagaccacggtaagacaacattaacagcagctattacaacagtattagcacaaaaaggaggagcttcagcaacaaaatatgacgaaatagataaagctccagaagaaaaagaaagaggaatcacaataaatacatcacacgtagagtatgaaacagcaaacagacactacgcacacgtagactgcccaggacacgcagactatgtaaagaacatgataacaggagcagcacaaatggatggagcaatcttagttgtatcagcagcagatggtccaatgccacaaacaagagaacatatactactagcatcaagagttggggtacaatatatagtagtattcttaaataaagctgaccaagtagacgatccagaactaatagaattagttgaaatggaagtaagagaattactaaatgaatatggattcccaggagatgatactccaatagtagtaggatcagcattagaagtattagaaaaccaagacaatgcagaaaaaacaaaatgcatagatgaattaatggaagcaatagatagctatataccaacaccagaaagagcaacagatcaaccattcttaatgccagtagaagacgtatttacaataacaggaagaggaacagttgcaacaggaagagttgaaagaggagtcctacatactggagatgaagtagaattaataggaatgaaacaagaagtatcaaaaacagtatgtacaggaatagaaatgttcagaaaaatacttgatgaagcaatggcaggagacaacataggagcattattaagaggtatccaaagagacgaaatccaaagaggtcaagtattagcaaaaccaggttcagtaacaccacacaaaaaattcgtaggtcaagtatacgtattaaagaaagaagaaggtggaagacatacaccattctttaacggatacagaccacaattctacttcagaacaacagacgttacaggatcaatcaacttaccagaaggagtagaaatggtaatgcctggagaccacatagatatggcagtagaattaatcacaccagtagcaatgcacgaaaacttaagattcgctatcagagaaggtggaagaacagtaggttcaggagttgttacaacaatatctgaa

SEQ ID NO: 16225 - DNA, 1188 bp, Clostridium botulinum
atgaatgaattactaattaaaaatgttaatataatagattggtgtcaaaacttccatggagatgtttatataaaaaacgggattatagaagaattaggaaaagatttaaataaaaattgtgaaatatttgatggaagaggattaactcttcttccatctttcatagatatgcatgcccactttagagatccaggttttacatataaagaagatatattaacagggagcagagctgcagtaaagggtgggtatactatggtaaatttaatggccaatactaaacctatatgtagctctaataaagaagtagagtatgttttagaaaaaggaaaagagataggattagtagatatccaccaatgtatgtccattacaaaagatttttctggggatgatataagtcatctagattctatagataagaaagtaaaaataatatcagaagatggaaaagatgtaatgaatacaagggtattaatagaggctatgtttaaagctaaagaaaaagatcttatagtaatgtgccactcagaagagcatgatgtaacaaatttggataccaggctttcagaaaatttaatgacttggagaaacatagcactttcagaatttacagactgtaaggttcatatagcgcatgtaagcactaaagaatctatggaatatataaagaatgcgaaaaagaaaggtttaaaagtaacttgtgaagtagcaccacatcatatagcacttacaaataaaattttttatagagtaaatccacctttaagagaagaagaagatataaaggtattaatagaggcaataaaggaagatttagtagattgtatagggacggatcatgcacctcatagtaaagaagataagctaaagggaagtccggggatatcaggaatagaaacctctttttctacatgttatacaaagttagttcataataatcatattagcttaagcaaactttcaaaaataatgtctaaaaatccagcagatattttaggtgtaaacaatggagaaataaaaataggaagagaagcagatttagttttagtagatacaaaagaagagtataaagtaaaatctgaagagtttcattcaaaaggtaaaaatactcctatggatggtatgtatcttaaaggaagaattaaagttacatttaaagcaggatgtatagtatatagtgaattt

SEQ ID NO: 16226 - DNA, 1629 bp, Clostridium botulinum
atgtgcataaaatatattaattttaggagaaaggaaggcaacatgaaaaaaatgaaatcaattaaaaaagctacggctatgttgttaattgcgttatttacattgccaataatatttactggttgctcaaacaaaaaagaacaatcagaaaaagatgataaaaaaggcaagacagtagtttatggtgcagaatttgaagatgaaaaattaaatcctgtattagcgcctgcctatgctaatgatttaatttttagaggccttatgagatttgataaagataataagccgcaatgtgatattgcagaatcttataagaaatccacagatgggttaacctatgatttcaaaattaaaaaaggtgtaaaattccatgatggaaaagaacttaaagcggaggatgttgtatttacgataaagtcaatacaagatcctaaggtaaatacagaaatgaaaccagaatttgaagaagtaaaggatataaaagccgaaggggattataatgttaaagtcacattagctaagccttttccagcacttttagacaagttaacaattggaatagttccaaagcatgctctagaaggaaaagatttaaataatgcagagtttaatcaaaagccaataggagcaggaccatttaaatttgtaaaatgggaaaaaggtaacaatataacgttatcaaaatttgaagactattatggtaaagacaaaacaggaaatgtagaaaagtttatatttaaatttataccagactataatgtacgtgctatgcaacttgaaacaggagagattgatttagcttatgtagagccaagtcaagtagctaaactagaaaaattagaaaaaataaaaatatataatgaaaatacagcagactatagatgctttatgtttaatatgagaaaagaattatggaaggatgttaatgttcgtaaagcatttaactatgcagtagatagaaaaggtatggtagatggaatattaaaaggttttggagtagaagcctattctccacttcaaaagaataaatttaataatgctaatgtagaaaagtattcttataatttagaaaaagctaatgaattgttggataaagcaggttggaaaaaaggacaagatggtatacgagaaaaggatggaaagaaatttgaatttactttaactgcaccaagtactgatgaagttagagtaaaaatagctaattacttagcttctcaatttaagaaaataggagttactgttaaagttgcagcactagattggaatgctataaaaatagatgaatgtgaagcttttgtgttaggttggggcagcccatatgatgcagatgatcatacatataaattattccattcaagccaaataaagaatggtaacaattttggagcttattcaaatcctaaagtagataaattattagaagagggaagaactacagaagatgaagaaaagagaaaagaaatatatggtaaacttcaagaagaattagctaatgatccaccatataattttgaaatttatgtaaacgctatatatgctgtaaacaaaaaggttacaggaataaaggaaaagatattaggacaccatggagctggattcatatggaatgcggaggagtggaaggttcaa

SEQ ID NO: 16227 - DNA, 435 bp, Clostridium botulinum
atgaaaaaaagaaatcttttaaacaaatatatagcaatgatagatagagcgtcacaaggttatttagatgaagccttaaagaagtatgagttaagttcaggaacatatccttttattttggtactatatgacaatgaaggcataaatcaaaatgctttaagtgagtatgtaaaagtagataaggctctttctgctagagctataaaaaagcttatagaacttggatatgtagaaaaaattataaatagtaaagatgtaagagcatataaattatatcttacagaaaaggctaaggctgttgttccagaaattaggaaagcctcagatggttggttacatataataactaatggcttaacagaggaagagaaagaaaccgtagaatgtttactaaaaaatatgtatatgaatattaaggagtctaaagctaaaaac

SEQ ID NO: 16228 - DNA, 852 bp, Clostridium botulinum
atggaaaaaaatttagctcaaatgcttaagggtggagttataatggatgttgtaaatccagagcaagcaaaaattgcagaggaagctggggctgtagctgttatggcattagaaagggttccatcagacattagaaaacaagggggagtagctagaacttccgatcctaagatgataaaagaaataataaatgcagtttcaataccggttatggcaaaggttagaataggtcattttgtagaagctcaaatattagaagctataggagtagattgtatagatgagagtgaggttttaacgccagcagatgatttgttccatataaataaaaaagattttaaagttccttttgtttgtggtgcaagaaatttgggagaagctttaagaagaataggagaaggagcttctatgataagaactaaaggggaagcaggtacaggaaatgtagtagaagcggtaaggcatatgagaactataagctcagaaatgagaaaactgcaacttacaccaaaagaagagctaatgactgcagctaaagaaatgggagcaccatttaacttagtagaatatgtggcagaaaagggtaaacttccagtaataaattttgcagcaggtggcatagcaacaccagcagatgcagctttaatgatgcagttagggtgtgatggaatatttgtaggttctggaatatttaaatcagataatccagaaaaaagagcaaaagctatagttaaagcaacagctcattttaaagatccagaggttttagctaaggtttcagagaacttaggaggagcaatgtcaggtttagaaatcagtaagctagaaacagaatttgctgaaagaggctgg

SEQ ID NO: 16229 - DNA, 1182 bp, Clostridium botulinum
gtgaattattcttttatatttgcttcactttgtttattatcctttattaattttaaaaataatataaatatagcttatttttcatctaaccaatctttagatctagttcaaattttaggtatagctttaatcctcatttctatatcgctattgcaaacaaaaggtaaaagacaaaaatatcttcataaattgtggagggataaaatgttaaaaaatataaatgataaaaaattaggacttatattagtgcttttagcagctatgttttggggatatgtaggggttcctactaaacatttagctgatttaggttttgataactatactatttctttctttaaaacaagtatacctgcaatattttatttcatatattcctttaggagagatccttctttgtttaaagtagataaaaaaggtattttattttttataatttatggcatagtggttatagcaggatgctttatagcctttaatataaccataaatttactgcccctagctttagcattggcaactatgtttttatacacttctcaaatttgggtagtaactatttcttactttatgtttaaagaaaagtttacaacacaaaaagcaatatctatgctattaattttaataggttgctttatgatgtgtgaaatgcacaaattaggaagtttcaatctaagtaccaagggtatattttgggggcttatatctggatttacctttgcactacaaatacttttagctaaagtaagtaatgaaaaatatcactataatcataattctttattaacttactcctttttatttgcagctatatttttattcccttttatggatatgaaaaacaacattcatatttttaaaaactctaataatctatttttcctatttaaaaacatattctggagtgttgtgggtacccttatcgcaaacaccgcctatgtaaaatctgtagaatatatagaagcaagcatcgctagtatggtatcctctttggaactagttatagcttctgttttaggttttatagtatttaatcaatctttaaatttagttcaaatattaggaatggctttaattcttgtgtctataattttattagaaatgaaaaaatcagtttttttaaaattattcaaaaaacctaataaaaacttagaaataatctctgaaaccacctatgaaaac

SEQ ID NO: 16230 - DNA, 795 bp, Clostridium botulinum
atggctgcagataatgtatatatgcctttcaaatctgaaatattagatataaaaaaacatacagatatagaatatacttttagaatgtcttatgaaggagaagtaaaacctggacaattttttgaagtatccttgcctaaatatggagaatcccctatatccgtgtgcgaaataggagaaggatatgtagatttaacgataagaagagtaggggtagttacagatgaaatttataattataatattggacaaagtttatttttaagaggtccttatggtaacggatttaacttagataattataaaaataaagaaatagttgtagtagcaggcggtacaggagtagctccagttaaaggaatagtggattatttctcaaaaaatccaaaggaatgcaaagagtttaatcttatagtgggatttaaaactataaacaatatactatttaaagaagatatagaaaaatggaaagaaaacattaatgtaactgttacattagatgtagcagaagaaggctataaaggcaatacaggccttgtaactaaatatattccagaattaaatataaaagataaggaaaatgtacaggttgtagtagtaggaccacctataatgatgaaatttgcagtagcagagtttttaaaattaggaataaaagaagaaaatatttggatatcccaagaaagaaaaatgtgttgtggacttgggaaatgtggtcattgtaaaatagatgacacctatatttgcttggaaggtccagtttttaattatgtaaagggaaaaactcttatagat

SEQ ID NO: 16231 - DNA, 1989 bp, Clostridium botulinum
gtggtaaagataacatatccgttattttgtttgaaggagagtgtgaatatgataggaaccaaattaggtaataggtatgaacttcttgaaaaagttggagagggtggtatggctacagtttataaagctaaatgccattacctaaatagatttgtcgcaataaagatattaaaagagcaattttgcagtgacaaagaatttgtagaaaaatttaaaagagaagcaacttcagtagcgagcttatcagataacaatatagtaaatatttatgatgtaggttctgaaaataatatacattatatagttatggaatatgtagatggtaaaactttaaaggaattaatagtagaaaaagggaaaattgatcctaaggaaactgttagaatatcaaaacaaatagctagtgctttggtttgtgctcatagaaacaatattatacatagagatataaaaccacacaatatattagttacaaaagaaggaattgttaaggttacagattttggtatagcaaaggcttcaaattcagctactataacaaattctagtaaagtaatgggatcagctcattatttttcaccagaacaagctaaaggaagttttgtggactcaagaactgatatatattctttaggtatagtaatgtatgaaatgcttgtgggaaaagttccattcgatggagagagccctgtatctgtagcagtaaagcatatacaaaatgaagtagtagcaccaaaagaaatagatgataaaattccagaaagtttaaatagtttagtactaaagtgcttggaaaaaaatcctgtaaaaagatatcaaactataaaaaatttagaagaggacttagctagaatagaaaataatgaaaatatattaaatggatctagcaatatatcagaaaacgatgttactagagtaatggacacagcggttataaatgacaaaataaaagaaatggctcaaaatgatgagtatgaagatgatgatgaggaatatgaagatgatgatgaggaaatagaggataaaaagaaaagaagtaataagggtaaaacaaataaaaaattaatattaggaatagctatggcagttttatttctagttgtaggatctgtatctgcatacttggccttcaataaatcaggagggaaaaaggtagaagttcctaatgtagtaggacttactaaagaagaagcggaaaaggtattaagtgagaaaaaattaaaattagtagtagctcaaaaggttaaaaatgaaaaaaaggaaggaactataatagaatcttatccaaaatccggtgaaaaagtagcagaaaattccgaagtaagagttagtataagttctgggaatgtagtagttgtgcctaatttaaagggaatggaattagaggccgctaaaaaagcaatacaagatcttaaattaaaagtagggaatgtaaaatatgaatttaatgacaatgtagcttctggaaaagtaataagtcaaactccagatatagatgcagaattaaaagaaggagaagaaattagtttagttataagtaatggtccagaaattaaatactcaacagtacctaacttaataggaaaatctatagatggagctcaaaatgctttagctaatgcaggactatctatgggaggctcaaaggctattattacagaagatcaatccttagatggccaagtggcatcacaaagcataggtgcaggacaaagcataaaacaaggttcttccgtaagtatatcctattataaatacaaaaaaccagaaccaaaaccagacccaaaaccagatacagatacaggtaaggatccaggaacagacacaggtaagaatccaggaacagacacaggtaaggacccaggaacagatacaggcaaggatccaggaacagatacaggtaaggatccaggaacagatccaggaacagatacaggcaaggatccaggaacagacacaggtaaggattcaggaactactcctaaaaaa

SEQ ID NO: 16232 - DNA, 1200 bp, Clostridium botulinum
atgtcaatgaattataacaaaaaaagtatagaagatatagatgtaaaaggtaaaaaagtattagtaagatgcgattttaatgtaccattaaacgaaggaaaaataacagatgaaaatagattagtaggagcacttccaacaattaaatatttaatggaaaaaggtgctaaaattatactttgttcccatatgggaaaaccaaaaggagaacctaaaaaagaactttcattattaccagtagccaaaagattatcagaaatgttaaataaagaagtaatatttgcagatgatgataatgtagttggtgaaaatgctaaaaaagcagtagaagatatgaaagatggagatgtggtattactacaaaatactagatatagaaaagaagaaactaaaaatgaagaagttttttcaaaggaattagcttctcttgcagatgtatttgtaaatgatgcatttggaacagctcacagagctcattgttcaacagtaggggttacaaattatctaaaagaagctgcttgtggatacttaatacaaaaagaattaaaattcttaggaaatgcagtagaaaaaccagaaagaccattcgtagcaatattaggtggagctaaagtttcagataaaataaatgttataaacaatttactagataaagtagacacattaataataggtggaggaatgggatatacattcctaaaagctcaaggatatactataggaaattctttagtagaagaagataaagtagaatattcaaaggaaatgatagataaagctaaagaaaaaggagtaaatctattattaccaatagataatgtagtagctgataaatttgataaagatgcaagtcctgttataactgaagatcaaaatattggcgaaggatatatgggattagacataggacctaaaacagcaaaaatatactcagatgctataaaatcagcaaaaacagtagtatggaatggacctatgggagtttttgaatttaaaagttttgcaaatggaactatagaagtagctaaggctatggcagattctgatgctgtaacaataataggcggaggagatagtgcagcggcagtaaatattcttggatttggagataagatgactcatatttctacaggtggtggagcttctctagaattcttagaaggaaaagaactaccaggaatagcagctcttaacgataaa

SEQ ID NO: 16233 - DNA, 174 bp, Clostridium botulinum
atgttaattatttataagatctcaaaaggaggtgctgtgaaaatgtttatgacatatcaaccaaaaaagagacaaagaaaaaaagaacatggttttagaaaaagaatgaagacttcatcaggaagaaatattcttagaaaaagaagacaaaaaggaagaaaaagattgacagca

SEQ ID NO: 16234 - DNA, 1512 bp, Clostridium botulinum
gtgtcaaaggaagataacgtgatgaacagttttgaagaacaagcaaatgaattaatgaaggaaagatttcaaaagttaaaggaacttcaatctaatggcaaagatccgtttgatgtttataaggttgaaagaacccatacttcaaaagaagtaaaggaaaactatgaagatctagaaggaaaaactgttacagtagcaggaagacttatgtcaaaaagagttcatggaaaagctggattttcagatatacatgatagatatggaaaaattcaattatacataaagataaatgatgtaggagaagaaaaacttaaagaatataagacttttgatataggtgatataataagtgtaacaggaacagtttttaaaacaaaaacaggagaaacatcaatacacataacagattttcagttagtttgtaaatctttaagaccattaccagaaaagtggcatggattaaaagatccagatttaagatatagacaaagatatgtagatttaataataaaccaagatgttagagatacttttatgaagagaacagccataattaaaaccatgagggagtatttggataataagggatttttagaagtagaaacaccaatattatcaccaatagcagggggagcagcagctaaaccatttattactcatcataatgctttaaatatagatatgtatcttagaatagctactgaattatatttaaaaagattaatagtaggtggatttgaaaaagtatatgaaattggtagaaactttagaaacgaaggaatggatataagacataatccagaatttacagttatagaattatatgaagcttatgcagattacaatgatatgatggaaataacagaaaatatgatagcatatatatgtgaaaaagttctaggtacaactaaagttcaatatgaaggaacagaaatagattttacaccaccatggagaagattaactatggtagatgctgtaagggaatatgcaggagtagattttaacactataaaagatgacatcgaggcaagaacaatcgcaaaagaaaaacatatagagtttaaaaaagaattaaaggattgcacaaaaggtgatgtacttataggattatttgaggaattctgtgaagataagttaatgcaacctacttttatttgtgattatccagtagagaattcacctcttacaaagaagaaaagaggaaatgaagcatttactgaaagatttgaaggttttgtatttggaagagaggtatgtaacgcatattctgaattaaatgattctatagttcaaaaagaaagattcatgcaacaattaaaggaaagagaattaggtgatgatgaagcctatatgatggatgacgactttataacttcattagaagtaggtatgccaccaacaggaggattaggaataggtattgatagattaataatgttcttaacagatacacattctataagagatgttatactattcccaactatgaaaccacaacctaataatcaa

SEQ ID NO: 16235 - DNA, 366 bp, Clostridium botulinum; identical to SEQ ID NO: 16007

SEQ ID NO: 16236 - DNA, 762 bp, Clostridium botulinum
gtggaaagtaaggtttattttataggagcaggtcctgggaacccggatttaataacagtaaagggaagagatattttaactaaagcagatgtagttatatatgcaggttccttagtaagcaaagaacatttagattattgcaaggaaggtgtagaggtttataattcagcttccatgacgttaaaagaagttataaacgttatacaaaaagcccataatgaaaataaatccatagtaagacttcatacgggagatccatctatatatggagctataaaggaacaaatggatgaattagataagctagatatatgctatgaggttgtaccaggagtaagctcctttgcagcagctgcagcggctatcaaaaaagaatttacactaccaggggtaagtcagactgtaatacttacaagagtagaaggaagaacaccagtaccagaaaaagaagatttagaggtattagcaagtagaggagcatctatggcattatttttatcagtaggtatgattgataaagtagttacaaaattaagaaagggatacggaagaaatgttccaatagcagtaattcaaagagccacttggcaggatgaaaaagtagttataggaactttagatgacatagcaaaaagggttaaagatgctaatataacaaaaacagctcaaatattagtaggggactttatagattgtaaatatgacaaaagcctactatacgatgaaaaatttactcatgaattcagaaaaggaattaatgaa

SEQ ID NO: 16237 - DNA, 714 bp, Clostridium botulinum
atgaaaacagaaatgttaggatatagtgtatttaatggtagtaaagaagagcttttaaatataatagataaatatgaaaaagttaacataatttctggtaatccagaagttttatacaatggactaaataatgaagagttattcaaaaattttacagataaagattctataattataccagatggagtaggtgtggttctggcttcaaaaattataaaaagtcctgtaaaagaaaaaattgcagggattgaagtaatggactctatattgaaaaagtgtaatgaaaatggtaaagccgtgtatttgttgggaactacggaagatgtattaaaagaatgtgagagaaagctattaataaaatacaagaacttaaatattgtaggtaagcacaatggtttttttgatatggatagttgtaaagatatattagaagctattagagagtcaaggccttatgctttatttatagcaatgggatgtccaaggcaagaaaaatttataagtaaatatatgaatgaacttccttgtaagatttatatgggtgtaggaggaagctttgatgtgtttgctggaaaagtaaaaagagcacctagatggatgataaattgtaatttagagtggttatatagggtggctaaggagccttatagaataaaaagattagcatctatacctaagtttttattaaaagtagcattaaataaaagaagctat

SEQ ID NO: 16238 - DNA, 1005 bp, Clostridium botulinum
ttgcaatataataatttctatataaactggaggtacaaaatgaattttatagatatgcattgtgacactatatacgctcttataaataaaaaaccctgctctaataaaaacattgcaataagtgaaaatgaaactttatataaaaactcattaagtgtagatatagaaaaactggaagcttccaattctctagctcaattttttgctttgtttatagatataaatgaaactaactctcctttaaaaactacacttaatatgttagatttttttcataatgaattggcaaaacactcaaagtatattgcacttgctaaaaactatgaagatataaataaaaacctatcaaataataaaatctctgcttttttaactatagaagaaggagctgctttggaaggcactttatataatcttagaaatttttatagattaggtgttagacttataaccctaacctggaactttcctaatgaaataggatttccaaactgcaaaaaagaattcatgaataagggcttgactccctttggattagaagtagtagaagaaatgaacaaattaaaaatgataatagatgtatctcatctatccgatggaggtttttatgatgtagtaagatactcaaaatctccttttgtggcctctcattcaaatgcaagaactataacaaatcatcctagaaacttaacagatgatatgataaaaattttatctaataaaggtggtgttatgggaataaattttgaaaaaacttttttaggtcaaagtgaagaaggaaaaataccagaaatgatagatcatataaaacatataaaaaatgtaggcggaattgatgtaatgtgcataggctcagattttgatggcatcgaaactcctagtgaaataaaatctagtgatgaaatagaaaaactaataaatgcactaaaaaaggaaagctttcatgaaagtgaaatagaaaaaatactatacgaaaatgctcttagagttataaaagaaatttta

SEQ ID NO: 16239 - DNA, 2295 bp, Clostridium botulinum
atggaagattcttatgatttaattggaaaaagcataaatagagtagatgcagtagctaaagttacaggtagagctaagtattgctcagatcattttgaagctaattcacttgtaggaatggttttaagaagtccctatgctcatgcaaaagtaaaaaatatagatactaaagaagctgaaagcttagatggtgttgaagctgtattaacgtataaaaatgtaccaaatacgaaatttcctacggcaggacatccatattcattagatccaagtcatagagacatagaagattatgtattacttacagacaaagcacgctttgtaggagatgcagttgcagcagttattgcgactgatgaacttatagccaaaaaagccttaaaattaataaaagtagaatatgaagttttgccttttgtaatcgatcaagaagaagcaataaaagagggagctcctgttattcatgatgaaaggcccaataatatagttagtgattttggtataacagtaggagatccagatgaagtatttaaaaatgcagataaaatttataaaggtcaatatgaaactcaaatagtgcaacattgtcaaatggaaacgcacaatgctatggcaaagcttgatgagaaaggtagaatgcttattataacatcaacacaaataccacatattgtacgaagaatagtttcaaaagcttgtaatttacctattggtaaaataagagtaataaagccttatgttggtggaggctttggaggaaagcaagatgttataatagaaccacttacagctataatgtctcttgcagttaatggaagatgtgtaaggttacaattaagtagagaagaggcaattgttgcaactagaacaagacatgcaatgagagtaaatatcaaaatagctttatcaaaagataataaaatagaaggttatgatatagagaactttgtaaataatggagcttatgcatcccatggacattcaattgctatgagtgcaggaagtaaaattagacctctttatgatataaaggcagaaaaatatcgtcccaaaactatatatactaatcttccagttgcaggtgcaatgagagcatatggtataccacaaatgtgttttgttatagaatctatgattgatgatatatgtaatgatctaaatatagaccctgtagattttagacttaatagttttataaagaaaggtcatatagataaggaatcagatcttgtagttagaacctttggattaccagaatgtttaaaaagaggtagaaaattaatagattgggagggaaaaagagaattatataaaaatcaaaatggtcctataagaaaaggtgttggaatggcctgttttagttatttttcaggaacttggccagtatcacttgaggcagcgggaacaagaatagtaatgaatcaagatggttcagtccaagttcaagtaggagctacagaaataggacagggtagtgatacagtatttagtcaaatggcagcagaaactattggaataccatttgatatggtaacaatagtctcccagcaagatacagatattactccttttgatacaggatcctatgcatcaagacaatcttttatagcaggccaagctataaaaaaagcagcaacagaagtaaaaagaaaagctctaaaaattgccagtgataaatgtggattagatgcagagcttttggatattgtagatgcaaaggtgatagaaaaaggattaagaagagaactttatactttagaagaaattgcgatggaggcatattacaatagagaaaaatatgcacctataacaagtgatttaaccgtaaaggttaaaaataatgctatagcctatggggcaacctttgtagaagtagaagttgatataagaacaggaaaaataaaagttttagatatttataacatacatgattcaggaaaaattttaaataaaaagttagcagaaggacaagtacacggtggtgttagtatggctttaggatttgccttatcagaaaaattcataatagatgagaaaacaggatctataataaacaataatcttttacattataaacttccaactattatggatactccaaacataaaatgtgaatttgtaaatacctatgatccaacatctagttatggacaaaaatctttaggtgaaaatacaacaatctctccagctccagctatacgtaatgccgtattaaatgcaacaggagtagcatttaataaattgccaatggatgctcaatctgtttttgagaaatttaaagaggttggacttata

SEQ ID NO: 16240 - DNA, 669 bp, Clostridium botulinum
atgaagacatataaagttctagaaattaaacaaagtgttttcgaaaataatgatcgccaagcagagttacttagagaagaattgaaaaaaaaggggatatttttattaaatcttatgtcatcacctggttcaggaaaaacaacaactcttttaagaacagttaaggctttgaaaaatgaaatgaatattggggttctggaagcagatattgattcagaggtagatgcaaataaggtttcacagtctggtgttaaagtaattcagctacacactggaggaatgtgccatcttgatgctgatatgacaaaacaaagcttaaatggtcttgggactgagaatattgatttggcagtactagagaatattgggaatttagtatgtcccgcagagtttgatactggtgcatcaagaaatgctatgattttaagcataccagaaggggatgataaacccttaaaatatcctttaatgttttcaatagttgatgttctactgattaataaaatagatgcaaaggactattttgaatttgatttggaagcagtaaaagaaagggtaagaaaattaaatccaaatattaaggttattccaatttcagcaaagactggagagggaattgaagaatggattgattggatacgtaaagaagtaaagatttggaaagaaagt

SEQ ID NO: 16241 - DNA, 993 bp, Clostridium botulinum
atgaagtttattggttatagaacattaaaaacagcaattggagctacaattgctatgagtattgcaggcgctttaggattgaaatattcagtatctgcaggaataattactattttaagtattcaaaatacaaaaagaaaatcattaagtgtagctattcaaaggatgatagcttgtttattagctttaactatatcctcagttttatttactatgctaggtcataatgctatagtttttggattgtttttacttgtgtttatacctttagcagttaaatttaatttacaggaaggaattgtagtaaattctgtattagcaacccacatattagcagaaaaacatataagtataaacttatttataaatgaaattttattaatgtttataggagcaggcattgcgctattacttaatttgtatatgccaagtatagaaaaagaaatatgggaagatcaattttatatagaagaaaagatgaaagaaatacttattcaaatgtcaatagcattaagagagctttctgtttcacttaaggaggataaattatttaatgacttagaagaaaggctttttaaggcaaaaaaaagagcctatattaatttaaataattatttccttttagatgtaagttattatgcagattatatggaaatgagaatacaacagtttgaaactttaaagaaaatgaggcaacactttcacaaattctttatgacctatgaacaaacagaaatgatagcagattttacaaaaaaagtagcagactctctgcatgaagaaaatacgggagatgatttacttttagatttagaagatttaagaggaagttttaaaaagatgaatttgccaagcactagagaagaatttgaaaatagagctttgctttttcaatttttaaatgatatggaacaatttttaattattaaaaatgaatttaaaaagaccatagacaaattagattacgaaaggaaggattataaaatcaaaaat

SEQ ID NO: 16242 - DNA, 1230 bp, Clostridium botulinum
atgaggatgcttaatatgaaaaaaccagaacttttagctccagcagggaatttagaaaaattaaagacggctataaactttggagcagatgcggtttatttaggtggtagcaaattgaatctaagagcatttgcggacaatttcacagatgatgagcttcaagagggtataaaatatgctcatgatagaggtagaaaggttcatgttacaataaatgtttttccacgtaatgaagattttaatggattagaagagtatttgaaaaaattatatgaatttaatgtagatgccataatagtttcagatccaggaattattatgactgcaagggaaacagtacctaatttggagatacatttaagcactcaagcaaatacagttaattttaaaactataaacttttggtataaacaaggtgttaaaagaactgtattagcaagagaattaactttagaagaaataaaaaccataagagaaaaaatagaaaaagattgtcaattagaagcctttgttcatggttctatgtgcatgtcttattccggtagatgtcttctatctaactatatgacaggaagagattctaatagaggagcttgtgcacaaccttgtagatataaatattatttaatggaagaaaaaagagaaggggagtatttcccgattttagaagatgataaaggaacatacataatgaattcaaaggatatgtgtatgatagagcacataccagagttagttcaaagtggcatagattcctttaaaatagaaggaagaatgaaaagttctttctatgtggctacagtagttaaagcctatagagaagctatagacgcttattttgaggactcagaaaattatacttttaaagaaagatggatggattatttaaaaaaggctagtcatagagcatattttacaggtttttattttaatgatcctaataagcaattacatgaatcttcttcatatattagaacttgtgatattgtaggtattgtaaaagaatttaacgaagaaactatggaagctatagtagagcaaagaaataaattactagatggagatgaattagaagttttaaggcctgaaggtcctatatttaaaataaatataaccaacatgagagataaaaatgataaaaaaatagattccgctccttcagctcaaatggtatttaaagttaacacggataaaagcttaaaagaaaatgatatacttataaaaaataaa

SEQ ID NO: 16243 - DNA, 297 bp, Clostridium botulinum
atgccatttacaagcaataattcttggaaaataagtggagttttgttgtttatattaatcctatttttagctaattttttaattttttctgtacttcctgttgttatagtagcaggtttagtattattcggagtgtataagttagttaattatataaaatcatggaaaataaataaaaaaggctttaataatagaaaaaataaagaaaaaaactttgagaaattcgataatttaggtcctaatgatatacctgatatttctgaagaaaatataattgatgtagattataaagaagtt

SEQ ID NO: 16244 - DNA, 2037 bp, Clostridium botulinum
ttgtatatatcaaagttagaaattaataattttagatgttatgaagatgtagatatagaatttaatgaggggttaaatataattattggagagaataattgcggaaagacaactataatgagggcgctggaatatatatttaatcgttcaagagttagtacacctgatactaatgatttcaataaagaactagttaataaagctctagaaataggtgaacaaccaccagagataacaataattgcaactctcaagtcgtcaagcagtgataaactagaagataaagcagttgtagctagctggcttacaaagttagaaacaccgtgggaagctacgcttacatataaattttttctaccagaaagcgatattaaggaatacaaagaggaaataaaaagtattaagaaatctcaaaagaattatattcagaaaagatggaatatctttgaaaaatatttaaaaaagtatgtttcaaggatatatggagggaatagtgaaagtaaaaataaggtggaaagtgaatacttaaataaatttcattgcgagttacttgatgcattacgagatgtagaaagtaaaatgtttacgggaaaaaatgctttgttaaaagaagttttaggatattttaaggattcacatatagaaattgaagatggagatgaattttcagaagaagataaaaagaaactaattgagaaagaaaaaaaggatagaaaaaaagagtttgatgaatatgctgataagattgtaaaaaacattagtaagagagtagggaataacgatgttttagacttcgcagagaaaacaggtgcttccatagggggtattccaactttaggaggaaatctagaagaaaatgatgtattatctgtattgaaattaatgattaaaaataagacaggaattgaagtacctattattaataatgggatggggtataataatttaatttatatatcactattactatcaaagttcaaaatgattacttcggatgaatatggtgagaatgctaaagtattcccaatattattggttgaagaaccagaggcacatctccatcctgcgttgcaatacaactttttaaaattcttaaaagatgaagttagtaatcaaaaaataagtagacaaatatttataacaactcactcaacacatataacagcagcagtaggattagaccaaataatatgtatggagagagatgaatcaggtaatacaactgctagatatccaggtaaggttttttctgattctgataaagaagatataaaatcaaaaaaatatgttgaacgctatttagatgctacaaaatccacaatgttatttgctaaatcagttctttttggggaaggacttgcagaacaaatattattgccagtgttagcagagcaagttgatagaagttttgataaaaaccatgttgctatggtaagagttgatggtgtaacattcaaacactttattaaattatttggagctggaataaaaaaacataatttgaaatatgcattaacaaaaagagtagcctgtataaatgattcagacccacaaaaaattattaaggaaaaagaagagggcaagacaagacgttggaaaaaatgttggccttttgaaattgatttagatacagagcattacgattataaggcattttcgggaacaattaagaatttgttggaggatgtaaaggaatgcaaaaatgtaaatgttttttataacatcacggaaaaaggaaagacgttagaatatgatattgcacttgaaaattatgatagtgatgatttttttaatgataagattgaaattatggactttcaagaattgaataaaagttcttggaaaaaagaagagaaagtaaaagctaagaaagcagcatcatatttaaactatgcacaagatactaaaggggaagctgcatttgaattagccgagaaaattagaagtgaggaaataaatattaaattaccgaatcatatccaaaaagcatttaactgggtgtgctacatggatgatgaggaggtaaaagaggatgag

SEQ ID NO: 16245 - DNA, 675 bp, Clostridium botulinum
atgtataaaatgtatttaggaattaatgatggtgaagaaggatttatactcccagtgttaccagagaaaattgaatttgatgaagatggaaataataagacatacgatataattaatttaggtgaaattaacacaataaataaacctaagttgatggaaataagctttgaaagtttctttcccaaacataaaggtccttatgtaagctcggagcaattatttgaaccgagcttttatattgcaaagattagagaatggagagataaaaagcaaaagataagatttatatttacaggcagtcctttagaaattaatgatttatttactatagagaattttaaaccaagtgaagaaggcggagaagttggagacgtacattattctatagaacttaaaagatataaaaactattctgctaaaaaggtagttatagtaacacccaaaactgcagcagctaatcaatctgtgaaaaaagtaatagcgaattccaaggctacaagaccaagcaatactaataaacctaaaacacatacagttagtggtaatgatacgttgtggcatatagctaaaagatacttaggtgatggtaataagtggccacaaatttataatttgaataaagataagattaagaatcctaatttaatatatacaggacaagttttaaaacttcca

SEQ ID NO: 16246 - DNA, 651 bp, Clostridium botulinum
ttgcgatatttaaatgatgcttttgtacagttttttaaatttatacatggagctgtatcaaatgtaattagtaatcctaacttttcttatggtatagccataattttagttacattaataataagactattaatacttcctttaaacataaagcaaacaaaatcttcacttagaatgaatgagttacaaccagaaataaagaaactacaggcaaaatataaaaatgatcctcaaaaattaaatcaaaaaactatggaactttataaagaaaaaggggtaaatcctttaggaggatgcttacctttattaatacaatggccaatatttatagcattgtattatgtatttaatactttaactggcataaatggtataagttttttatgggtaaaagatttagctaaaccagatgtagttttagcggttctttcaggtgcaactacatatttttccggaacattaatgacaactgcagatagttctcaggctggacagatgaagtcaatgaatataggtatgtctatctttatgatagtaataagttggaagttaaaatcagctttagtattatactgggttataaataatttaattcaaataatacaaacagttataatgaaaaaaatggagttaagaggtaaagttgaagcc

SEQ ID NO: 16247 - DNA, 876 bp, Clostridium botulinum
atgaacataaattggttcccaggtcatatggcaaagactcgtagacaaataaaggaaagcttaaaaatggtagatgccataatagaaataagagatgctagaatagtaagctctagtaaaaatccagatatagaagatatatgtggcaataaaccacgaataattcttttaaataaaaaggatttagcagaggataaagtaactaagaaatggatcgattccttatcacaggataacataaaagttttagcagtaaattctgtaacaggagagggattaaataaaataaaacctacattaaatgaattgttaaaagaaaaacatgaaagaatgaagaataaaggcttagttaaaatagtagatagagttatggtggtaggtatacctaatgtaggaaaatcctcttttataaataaaatggctaaaaactctatagctaaagtaggagataggccaggagttacaaagagcaaacaatggataaaaactaagatagatatagagcttatggatactccgggagttttgtggccaaaactagatagtgagattgtacaattaaatttagcctttacaggagctattaaagatgaaattatggatatagaaactctagctttaaggttagtagaaaggcttcaggttaaatatccagagagattgatgaaaagatataaattagaagcattagaagaaaatcctttaaataatttggataatataggcagaaaaagaggggctttaatttctaagggagagatagactataatagaatatctgtaattattttggatgaatttagaggtggaaaattaggtgccatttctttagaagacccagaggatattacaaaagataacatacaaatagaggaa

SEQ ID NO: 16248 - DNA, 918 bp, Clostridium botulinum
atgaaccaatataaaaattttatcatgcagtttgaagatatagttggaaataataatgttttaatagatgagccaatgaaaaaacatacttcatttaaagttggaggaccagcagatttattaattacacctacaactttagaacaagtaaaggatagtattatattatgtagaaataatagtatcccttattatataataggaaatggatcaaatttattagtaagagatggtggaataagaggagtagtaattaagtttttaaaattaggtgatataaaagtagaaggagatagagtaatagctcaaagtggagctcctttaactaatatttgtaatgaagccttaaaaagtaatttaggtggactagagtttgcttgtggtataccaggtagcgtaggcggagcagttacaatgaatgctggtgcttataatggagaaatatctcaagttatagaaagtgctaaagttatagacaaggatggaaatgtatttttattaaacaaagaacaattagatttgggatatagaatgagtgctattcaaaagtatcactatattgttttagaagtaacctttaaattacataatagtgaatatgatactataaaaaatagaataatggatttaaatagaagaagaacggaaaaacagcctttagaatatccatcagcaggtagtacttttaaaagaccagaaggacatttcgcagcaaaacttatagaagatacaggtttaaaaggtgaatctataggaggggctcaagtttcagaaaaacattctggctttataataaataagggaggagctactgcaggagatatattaaatcttatagaatttgtacaaaataaggttatggaaaagtttgaagtagatcttcatacagaagttagaataattggagaggaaaacaat

SEQ ID NO: 16249 - DNA, 768 bp, Clostridium botulinum
atgagtaaagatttaataagcacagacgaatacataaaaataaaaaaaaagagaaaaagaataaaaaaaatagtagtattatttatatttttaatatctattttggtaacattatgccttaagataccttattttaatatagaatcaattgagataaaaggtaacgtaaatatacccaaagaggtaataaaagatagctctactattaaaactggcaataatatattttatactaacaaaaaggatgcaatagaaaatatatcattgaatccatatattgaagaagtaaaaattacaaaaaaacttcctaataaattacaaatatatgttaaggaaagggaagctttattttataataaagtggataatgacttttttattatatctaaaaatggatgtgtattagaaaaaagaaaagagattaagaatatgaagctcattaatttacagggatttgaatttaatgaatctaaaatagggagcgctttaaaagctaaagatgaaagagcagtaaaaattttaaatgattttggagttctattaaaaaataatacttctgatgtaatttttactcagttagatttaagaaatttattagatattaaaatttactataatggtatatgcgtaaaaataggtacatcagaccaaatagaaaaaaaattaaatacagctataaatattttaaaaagggatgaacttaaaaaagcaaaaaaaggatatgtagatgtgagttatgaaggaaatcctgtattttatatagaaaaa

SEQ ID NO: 16250 - DNA, 3534 bp, Clostridium botulinum
atgaatatgaaaccgaagaaacttgtgattaaaggactaaacagttttatagaaaaacaggaaatagactttgaaactttagtcaatagaggtttgtttggcatatttggccctacaggcagtggaaaatccagtatattagatgctataactatggctttatatggagatatagcaagagatagtactcagtttataaatttagatacggattctttatttgtaagctatgagtttcagatagcctcagtagatgaaagagatgattatattgtttctagaactgtaaaaagagataaaaaaggtggttataagactaccgcagctaggttagttaaaaatacttacgaggaagaagaaataatagcagataagccgagagatatacaaaaaaatatagaatctataataggattaaccgcagaagattttactcgttcagtagtgttgccacaaggtaaatttagtgagttcttgaagttaagtggaaaaagtagaagagatatgttagagagaatatttggattagagaagtatggcaaaaaacttttagaaaggataagaaaagcaagaaataaggaaatatcctctttaacattaatagaaggaagattagaacagtataaagatatatccaaggaaaaattacaggaactaaaaatacaatatgaaaatttgttaaaagaaaaatctaaaatagcgaaagaaaaagaagaaagcaataagctttatgaaaagtataaaaatatatgggaacttcaagaggaattaaatatttatttaaataaattagaaaatcttaaaaaagggttgctaaatattgaagagaaaagaataaaagtagaaaagggaaagaatgcattaagtgttaaaccctatatagatgaacttagcaaaattgaatcagatagaaatataaatgaagaggaattacaaactgcaatggagcagttaagaaatatagatttaaatttaaaaaatatagaagaagaatacaagaaagcatcagaggataaagaagaaaaaatacctttattaatgcagaaagaaaataatttactacaggctatagaaataaagaagaaggttgaagttataaaaagggaaagagcagatttagtacaaaaatataaggaaaaggaaagcttaataagaaacaaaaatatagataaaaagcatatagaggaaaatataaataagatttctaaggaagtaaaattaaaagaagaagaaataaattcattaaaaatagatggagacagaagagaaaagatacaaaaactatatgaaatagataaagaatataaaagattaaatttagaagtttgcaatataacagaaagaataaatataaaaataaagagcttaaaagagtatgaattaaagtataaagatacattagaaacacaaagagatataaataaaaaattagaatatgtttcaggcaaaagagaagatttaataaaaaactctcctggtaacaatgatattttgcttgataaaaaagattatataaataaattaatggaaatttttaatgatttaaataaaataaatgatagaaaacaggaattagaaaaaaatttaaaagaaaaacaagtagtaaaattaaatttagaaaaacagcataaagaaatattagaaatattaaagcttaaagaagaaacaattgtaagtctagaggaaaaaataaaagatatagaaaaaatggatatggcctccatattagctactaatttaaaggatcaagaaccttgtcctgtatgtggatctatgcatcatattaaattagctaaaaaggttgatataaaagaattagaaattctaaaagaagatcatagaaatgcatttaaaaaattagaaaatataaaaatagaagaaaaagaaaaaaatatacttttaatttctgtggaaaaagaagaagaattaatattagaggaattagaaaatttaaaagagcaattaaaaggtagaaacttagaggatttaaggggagaactacaaaaagaaaaaaatgattttgaaaaattaaatgaaaatataaaagactgggaaaaagaaaaattaatattagaagaaaatataaacaagctacaaaaagaaaaaaacgatatagataaagaggaagctaaaaatcatgaagctatatcaaaggaaaaagaattaatagcttctataaaaaaggacatggaagaaagagaaatattatttaaggaaaaagaaaaagaatatttaaatttaaaagaagaaattaaagtttctaatgtggaagaagaaataagtagagttagagcttctgataaaaaaatagaggaatataataaggttataaaaaatgaaagagaaattttagagagtgaaaataataaaagagaagaaacaattaaacagataaatattatggaaatagagctaggcaaaataatagaagcgggaaaagaaaagaaaaattttatagacaaagaagaggaggaaataaaaaaattaaatgtgggagagatttctatagaacatttagaccaagtaaaaaaatccataggaaatataaaggaaaaagaagaaatcttaaaatctaagttagagttggaaggtaaaaacagagaaatattatggaaaaataaaataagtaaagaacaaataaaaattaacttagaaaaacttcataatgaaaaatatattcagttaaataaggtcttagaggaaaataaattccatactttagaagatgcaaaattaatgttaatatgtaaagaagaaataaaagagctagaaaaagagatagaagaatttgaaaaagagtataatagtttgaatataaatatagaaagagtaaataaaaaattgaagggggaaaggatagaggaaggaagttggaaagatataaggcttaaaaaagaaaataaggaaaaagagctagaagatataattaagaatattgtaatagaagaaaagcttataagtgatatggaaaataatataaagtcattaaagaacttattagatgaaaaagaaaaggtagctcataaaaaggctttattagaagatatagataaattagttcagggaaataaatttgtagagtttgtggctatgaatcagttagagtatatagtttttgaagcttctaaaagacttaaggatataacgagaggaagatatgcattagaattagattgtaatggaaactttactatgagggatgactttaatggagggggtataagacctacaaatactttgtctggaggggaaaccttcttaacatcattggcactagctttggcgctatcttcacagatacaactaaaaggaagctcccctttagaatttttctttttagatgagggatttggaactttagatagtgagcttttagatacagttatgacttccttagaaaatttaagaagtgatagattaagtgtaggaataataagtcatgtagaggaacttaaaaatagagtaccaataaagcttatagtagatcctgcggtaccaggagagggtggaagtaaaataaaaatagagtatagc

SEQ ID NO: 16251 - DNA, 1788 bp, Clostridium botulinum
gtgtgtagcttgaataaaaagtggatgttaagaagaaataaattgaatataagagatatagctaataaatcaggaataagtgagaccttatgtactgtattagttaatagagaaatatataacttagaagatataaaggattttttagagccttctttagaaaaactttataatcctttattgatgaaagatatggacaaaggtacagaaataataaaaaggtcaataatagataaaaagaaaatagctatttatggagattatgatgcagatggggttactagcaccgtaatattatatatagctttaaaagaatgcgaagctaatgtgatttattatataccagatagagaaacagaagggtacggtatgtgtacagaaagagttgaaagattaaaagcagagggcgtagaggttataattacttgtgataatggtatagctgcgttagagcaagtagaacgagcaaaagaattaggtatgacggtggtaattacagaccatcatgaattaccttttatagaaaatgaaaaggaagaaagagaatatgtagtaccaaaagcagatgctataataaatccaaaacaaaaggattgttattatccctttaaaatgctttgtggagcaggtatagcttttaagttttcaaaacttttatatgaaaaattaaatatgaatcctaataaatataaagaattattacaatttgcagctataggaacaatatgtgatgtagtagatttaaagggtgaaaatagaataatagctaaattgggattagaaagtataaataacacaaataatctaggcttgagagcacttataaaagagacttcattaaatgagaaaaatataacttcttataatgtaggatttataataggaccttgcataaatgctacaggaagattagatacagcggctctttctgtggaactgtttttggctaaagatataaaaagggcagaaaaactagcaaaagaattaagaaacttaaatactgagagacaagaaataacgatggtaggtgtagaagaaataacatatgccatagagaattcatcattaaaaaatgataaagtgttagtcatttataaagaaaatatacatgaaagtatagcgggtatagtatcaggaagaataaaggatgcatataatcgaccaacaatagttttaactaaaggcaaagaaatgcctaaaggatctggaagatctatagatggatataatctttttgaagaacttatgaaatgcaaggaatacatatataaatttgggggtcatccaatggctgctggtcttactatagaagaaaaaaacataaataaactaagagaagaattaaataaaaattgcaatttaaaagatgaagactttatacctaaaataagaatagataagagattagctctaaaagaagtgaacttagagctaatagatagcctacagtgtttagaaccttttggtaaaggaaatagttcaccaatactagcagaaaaaaatataaaaatagaaggaataagaatattaggtaaagatcaaaacacattaaaattaacttgtagagtagaagatacaaataaaagaatacatgcaatagcctttggaaaagtggatgaatttaaaagagatttagaaaatatatatgaagatgaaaatgtggaaaatattataactaacccacttatggcaggtttaaaattagatttaatatattatccaatgattaatgagtataatggaaacgtgtatactcaattaagaataatagattacagaataaataga

SEQ ID NO: 16252 - DNA, 618 bp, Clostridium botulinum
atggctagatatactggagcaacttgcagactttgcagaagagaaggattaaaactattccttaagggagatagatgttatacagataaatgcgcattcgctagaagaggatacgcaccaggacaacatggtcaaagtagaaaaaaagtatctaactatggattacaattaagagaaaaacaaaaagctaagagaatttatggtatcttagaacgtcaatttagaggatattatgaagaagctgatagaagaagaggaataacaggtgagaacttgttaagacttttagaaatgagattagacaatgtagtatatagattaggatatggtaactcaagaacagaagctagacaattagttactcacggacatttcttagttaatggtaaaaaggtagatataccatcataccaagtttcagctaatgatgttataacagtatgtgataagagtaaagcaacagaaaaatttaagacttttgcagaaaacccaaaaacattacctgcatggttatcaggaaatgttgaaggatttgaaggaaaagtagaaagacaaccagcaagagaagatatagatgtacctgttaacgaaacattaatcgttgagttatacagcaaa

SEQ ID NO: 16253 - DNA, 1476 bp, Clostridium botulinum
atgaaaaattttacaataggggtgattattaaaatgaaaaagtccttgacattcaaagacatggttttaatgaccatgacagctattttaggattaagatgggtagctgtttcagccaagtatggcgcctcctgtgcagtattatggggtatagcagcattactattctttattcctagtgcattagtagctgcagaattaggaggtaaatatcctgaacaaggcggcttaagcgtatgggttacaaaagcctatggtgaaaaaatgggttttttagtatcttggcttaactgggttagtaaactattcttttatcctggatttgtaacatatgcagcagttacatttgcatacgttatagatccaagtcttgcaaacaataaactttacaatttatttatggttttaggaatcttctggtttataactatatggagttttaggggcactggaaatagtaaaatatttgcagttataggtggacttgtaggcagtgtacttcctgctttattaattataatattaggttatgcatctgcttttgttcttaaaagacctcttgcaacaacttatacccttcaaggcatgataccagacttcactaatatagctaatttagcattactatcttctgtaatgtttggattaacaggcgctgaagtaacagcagcctttgctggagaagttgaagacgcaaaaaaaacaattcccaaagcaattatattctgtgctatctttataactattttatatatactatgttcatctgccattacttttgtagtatcgccagaaaaaatcggtgctgcaaatggacttatagaagcatttagattaataacagaacagtttggtataggacaatggttcctaactttaatggcagtacttatgactatagaagctttgggcggtgttagtttatatataatgtctcctataactatgttatttgaaactagtaaaaatggtgttttaccaccattcttaacaaaaacaaataaaaatggcgtaccaattaatgcattattggtacaaggtataggtatttcaatagtaataataattacaactcttttaccaacagttaatgctatatattcaatacttataataatgacggctataacaggcttaatcccttacttattaatgtttgcatcttacattagattaaagaaaatggagaaattacaagctaagggagaatccacagaggaattttacgaaatatcaaaatcaaagcaattttcaacctttgtatccattgtaggattaataagtgtaatatttggaattgtaacttcattcttcccaccatcagattatacaaccacaggacaaattgtattctttgaattattaagtatcggtggaccaattcttctaagctggattggttggagaatgtttagcaaatatgaacaaaaaagagatacaggtgaaattcaatccacaaataattctttatcagaa

SEQ ID NO: 16254 - DNA, 1095 bp, Clostridium botulinum
atgaaattaggaatagttggtttacctaacgtaggtaaaagtacattatttaatgcaataacaaaagcaggagctgaatctgctaactatccattctgtaccatagaaccaaacgtaggggtagttagtgtaccagataaaagattagatgttttagaaaaaatgtataactctaaaaagaaggttcctactgctattgagttttatgatattgctggattagttaaaggagcaagtaaaggagaaggattaggaaataaatttttatctcatataagggaagttgaagctattgttcatgtagtaagatgttttgaagattcaaatatagtacacgtagatggctctgtagatcctattcgtgatatagaaactattagtttagagcttatattttctgatatagaattaatgcaaagaagaattgaaaaaaatagtaaactagctaaaagtggtaataaagaagccaaaacagaagaagctctcatgaagagaatagttgctcatttagaaaaaggtaagcctgttagaacgttggaacttgaagaagatgaagagaaattagttaaaagttatttccttttgacctcaaaacctgttttatatgcagctaatgtatctgaagatgatttaatgtctggaaatcctgaaaatgagtttgttaaaaaagttaaagaatttgcaaaagctgaaaattctgaagtgataactttatgtgcaagacttgaagaagaattgtcaactttagaagatgatgaaaaagctgaaatgctttcagaatatgggttaaaagaatctggccttgataaactagttcaatctagttataaattattaggccttataagctttttaactgcaggtcaagttgaggttagagcttggactatagttaaaggtacaaaagcacctaaagctgctggtaaaattcatactgatattgaaaaaggttttataagagcagaagttatatcctacgataaacttatagaatgtggttctgaagcccatgctaaagaaaaaggattctttagacttgaaggaaaagaatatgtaatgcaagatggagatattgtaaactttagatttaacgtt

SEQ ID NO: 16255 - DNA, 1011 bp, Clostridium botulinum
atgacaatggatataaaacttttcccgataaaatcaaagggcaaatatggatatgttaatgttaaaggtgaaacttgtatagaaattaagtatggttatgctgaagaatttatagaagatttagcagtagtagctatagatgattattttggatttatagataaaaaaggaaatgagatagttaaaattgaatatgatgatgtttatgattttgtggaaggcttagcggcagtagacaaagaaggtaaactagggtatgtagatgctgaaggcaatgtagttgtaactcctcaatttaaagaagctaatgattttagtgaaggtttagctgcggtacaattagggtataaatggggatatatagacaaggaaggtaagtttgtagttaagcctgagttttttgatgctggggactttagagaaggcttagctatggtccagccaggaggaaaagtaggatatatagacaaactaggaaatatgcttatagaacctaactatgattatggcaaaaaatttagtgaaggtctagctccagttaagctaaaaaataagtatggatttatagataaatcagggaatatggttataaaacctaaatattatgaggctagtatttttaaagagggcttagcagcagtggagattatggagaagtatggatttatagataaaaatggtgaaatgataatacattctaaatatgattgggcagatgatttttgtgaaggtattgcagctgtaagtattgaagagaaatatggttttatagataaagaaggtagagatataataccattaaagtttgattctgtaggtgttgttagtgaaggtttaatagctgtagaaatggaaggaagatggggttatataaataataagggtgaatttatcataaaacctatttatgatagagcagaaaaatttgtagatggggtagcaaaggttatatttgaaaatagagtaaaatatatagatgagaacggagcttatttaggtgtgaaaagtatt

SEQ ID NO: 16256 - DNA, 525 bp, Clostridium botulinum
atgttatgtgataaatgtaataaaagtaatgcaacagttcatataacgaaggttataaatggacataaagaagaggttaatttatgcgaaagttgtgcaaaacaggagcaaggaatagggataacagataacttagatcttatgtcatctttttcggttcaaaatatattagctaatatattagactatatgaataaacctcaagaaaaaaatataagttatgaaattacttgtcctcattgtggaacgacttataatgaatttaaaacgaaaggtttgctaggttgtagtgagtgttataaggtttttaatgacagtataattccaataataaaaaggattcatgggaatgtagagcatacgggaaaaattcctgagaaatcaggacaatatataataaaacaaaggaatttacaacaattaagagacaaattacaaaaatgcattaaagaagaagaatatgaaaaagctgcagaaataagagatgaaataaagttattagaaaatgaaaaagaggaggaggcg

SEQ ID NO: 16257 - DNA, 306 bp, Clostridium botulinum
atggcaaaacaaaaaataagaataagattaaaagcctttgatcatagtttattagatcaatcagctttaaaaatcgtagaaactgctaaaacaacaggagctaaggttgcaggtccagtacctctaccaacagaaaaagatattgttactattttaagagctccacataaatacaaggacgctagagaacagttcgaaataagaactcataaaagactaatcgatataattagtccatcaccaaaaactgttgatgcattaatgagattagatttaccagctggagtagatatagaaatcaaacta

SEQ ID NO: 16258 - DNA, 717 bp, Clostridium botulinum
atggaatttttcaacatactacaatcagcatgcaatgatgttaatttagattttaatgataaaaaatataatcagcttataagttataaaaatttaatacaggaatggaataagaaaataaatctaacagctattgttgaagatgatgaaataataaaaaaacattttatagattgtataaaaatatttaaatcttcacctataggagaagctaaaagtttaatagatataggtacaggtgcaggatttccaggcatccccataaaaatattaaaagaagacatagaaataactttattggattccctacaaaagagaataaattttttaaatactgtaataggagagctacaattaaaaaatatacaatgtttacatggaagagcagaagattatgcacaggaaattcagcataggcaaaaatatgatatagcagtttctcgagcagtagcgaatttagcagttttaagtgaattttgtattccttttgtagaaaaaggtggatattttatagccatgaaaggtccgtctgtagaagaagaaataacagcagctacaaaatctatagaaattttaggtggaaaaatagaggatataataaaaatagatattgaagatacagatctaaaacataatctagtaatcataaaaaaagtaaaagaaacgggaaaaaggtatcctaggaagccaggtattattaaaaaaaatcctctaaaa

SEQ ID NO: 16259 - DNA, 696 bp, Clostridium botulinum
atggctatggaaaaaatacttatagtagacgatgaagaacatatatgtgaattaataaaatttaatttggaaaataatagttataactgtatttgtgctttgaatgggatagaggcattaaatatagctaaagaagaaaaaccagatttaatacttttagatctaatgttaccgggaatggatggatatgaggtttgtaaggaaataaggaaagataataatatagctactacccctataataatgattacagctaaaggagaggaattggataaagttttgggcttagaactaggagcggatgattatataaccaaacctttttcagttagagaaatggtagctagagtaaaagcggtacttagaagaagaacaaccataaatatagaatctaaatcctatattttagggaatattgttgtggattttgaaaaacattctcttacaaaggcaggagaaaaaatagaacttactctaaaagagtttgaacttttagaggtgttaataaagaataaagggaaggttatgacaagagattttttgctagatagaatatggggatatgaatacattggagaaactaggactgtagatgtgcatataaggcatttaagaaaaaaaatagaggatgatgataaaaatcctaagtttattgaaactataaggggaataggatatagattcaatagtgaattt

SEQ ID NO: 16260 - DNA, 1335 bp, Clostridium botulinum
ttggaggaacatactatgaaactttggggaggacgttttaaggaagaagaaagcaaacttatggaggactttaatagttctctaagttttgataaaaaactttattatgaagatataaaaggaagcatagctcatgttaaaatgcttacgaatcaaaatataataaaggaagaagaaaaagaaaaaatattgcttgggttagaggaaatattaaaagaaatagatgaagggattttaaaaatagagggagactatgaggatattcatagctttgtggaaataaatttaataaacaaaataggaaatgtgggaaaaaagcttcatacgggaagaagtagaaatgaccaagtagccttagatatgaaattatatgctaaaaaatccacggaagaagtaatagaatgcttaaaggaacttatggattctttaattaaagttggaaatgaaaataattatattatgccaggatatactcatcttcaaagagctcaagtggtaacttttaggtatcatttgttagcttattttgaaatgtttaaaagagatgagaaaagattagaaaatgccttagagattttaaatgaaagtcctttaggatcaggagccttagcgggaagtacttataacatagataaagaatatactgctaagttattgggttttagaaaaccggtagataattttttagatggagttagtgatagggattatataatagaacttataagtaagttttctataataatgatgcatttaagtagattatctgaagaacttatactttggagtagtagtgaatttaggtttatacaaataggagatgcttattccacaggcagtagtataatgcctcaaaagaaaaacccagatggggcggaacttatacgcgggaaaattggaagagtatatggggacttaataagtatattaacagttatgaaatcattaccattagcttataataaagatatgcaagaggataaagaacctttctttgatgcaaaagatactgtaataagctgtttaaaagtaatggaaggtataatatctactctaaaagtaaataaagaaaatttaatgaaatctgtgaagaaaggatttttaaatgccacagaagcagcagattatttagtaaataaaggaatggcttttagagatgcacataaagttataggtgaagttgtaatatactgtgaggataaaaattcagctatagaggatttatccttagaagaattaaaacaattttcagatctattttgtgaggatatttatgaatttatagattataagaattctataaacaaagggataaaaaaagaaatgggatacttt

SEQ ID NO: 16261 - DNA, 594 bp, Clostridium botulinum
ttgtttttaaaaggaggtattatggtaaatattatatggggaattatatttttagtaggagtaatgtttggagtgttttcaggtaacggagaacaactatcaaaatctataatagaatctacaaattcaactgtaaagttggttataggattggtaggggttatgagtttatggtgcggaattatgaaaatagcagaagaaagtggtttaacagataaaatagctaagtgcataaaacctattttaaaagttatatttaaagatagcaaaaatgataataaagctttaggtgctataacaatgaatttaacagctaatatgatgggactttctaatgctgcaactccttttggaataaaagctatgaaggaactcaaaagattaaatgtaaaggaagaagaagctagtaatgatatggcattatttttagttttaaatgctgcttgcatacagctagtacctactactgttatatctataagagcagctatggggtcaaaaaacccaggtgaaataataataccagctataatagttacatccacagcagccttttgtggagtgattttttgtaaaatattacagaaatatttt

SEQ ID NO: 16262 - DNA, 1158 bp, Clostridium botulinum
ttgattagaagaaagaatgtcaatttaaataaatcttttaatttaaaaaggcacataaaatattttgatgtttttttgtttattgtgataattctcatatcaattttagggattgttatgattagcagcgcaacatctaattttgaaaatagtagaaagtatattattactcaaattttatcccttgtaattggattggttttcatgtttataacaatttatatagattaccgaaatattggacgtgcctataagattatttatatatttaattttctattactggcaggtgtaattcttcttggtacgggtaaagaccaatggggggcacaaaggtggatacgaataggggggataggaatacaaccatcagaaattgcaaaaataggatttattattacttttgcaaaatttctggaattaataaaagacgatttaaataaaataaaatatttattggcggccttttgttatattggagtgcctattatacttgtaatgatccaaccggatttaggaactgctctatcctttgtttttatttctattgcaatgatatatatttgtggtatagattataaatatattttagggggatttttagcctgcattgttattatacctattgcttggcaatatgtgcttaaagcatatcaaaagaatagaattttaatttttattaatcctgattcagatcctatgggaggaggataccatgttcttcagtctaaaatagcagtaggttctggcgaattttttggtacaggattatttaagggttctcatgcacaaaattttctgcctgaaaagcatacagactttatatttgctcttattggggaagaattgggttttataggaagtataattgtggtattacttcttttaataatagtcttaagatgtatttcaatagccaaatctgctaaagacaatttgggatgttatatttgtgttggagttgctagtatgatcatattccagacttttataaatattggaatgtgtattggtattatgcctgttacaggtattcctttaccatttattagttatggaggttcatctcttattactaattttgtagcaatgggattagttttaaatgtaggattaaggcataaacctattaattttttcaaaggtagcataaataat

SEQ ID NO: 16263 - DNA, 1389 bp, Clostridium botulinum
atggatataactttagtaaaatcactttatagagaaacagaaaaacacatggacaaagaagttaaaattaatggatgggtaagaactgtaagagattctaaaaactttgcctttgtagaagtaaatgacggaagtttctttaaaaatgttcaagtaatacttgagtcttctttagaaaactttaaagaactatgcaaaatgccaataagtacatcagtagaagtagaaggaatagttcaacctacaccaaatgcaaagcaacctttcgaaataaaggctacaagaatttcaatagaaggtaaatcaagcacagattatcccttacaaaagaaaagacatacttttgaatatttaagaactatagctcatttaagaccaagaagcaatgctttttcagcagtatttagagtacgttctttagcagcttatgcagtgcataaatttttccaagaaagaggatttgtttatacaaacaccccaataataacaggtagtgactgcgaaggggcaggagaaatgttccaattaactactatggatttaaacaatataccaaaaactgaagaaggaaaaatagatttttcaaaggatttctttggatcacctgcaaaccttacagtaagtggtcagctttcagcagaaacttttgctttagcttttagaaacgtatatacttttggaccaacttttagagctgaaaattcaaacactgcaagacacgcatcagaattttggatgatagaacctgaaatggcatttgcagaacttacagattatttagataatgcagaggatatggttaaatttgtaataaactatgtaatggaaaatgctccagaagaaatggcatttttcaatagtttcgtagataaaggtttatttgatagattagataatgttgtgaattctgacttcaagagaataacttatacagaagcagtagaattacttcaaaaatcaggagtaaaatttgattatgaagtagaatggggaatagaccttcaaactgaacatgaaagatatttaacagaacaaatatttaaaaaaccagtatttgtaacagattatccaaaggacataaaagccttctatatgagattaaatgatgatggaaaaactgttgcagcagcagacttacttgtaccaggagtaggagaaattataggtggaagccaaagggaagaaagattagatgtattagaaaaaagaatggaagaattaaatctaaataaagaagattactggtggtatttagaattaagaaaatatggagaaactaaacactcaggatatggtttaggttttgaaagaatattaatgtacatcacaggaatgactaatataagagacgtaataccattcccaagaactccaggctcagctgaattc

SEQ ID NO: 16264 - DNA, 1008 bp, Clostridium botulinum
atgagattgtttggtataactaaagatatgggaatagatttaggtacagcaaatacattagtatatattaaaggaaagggggttgttttaagcgaaccctctgttgtggctataaataaagatgtaaataaggttcttgccgtaggtgatgaagcaaaacaaatgataggtagaaccccaggaaatatagtggctattagaccattaaaagatggagtaatagcagatttcgacgttactcaaataatgcttaaaaaatttatagaaaaagtaagcccaaagggaggatttactaatccaagaatagtagtctgtttcccatcaggagttacagaagtagaaaaaagagctattgatgaagcaacgaagtcagctggagcaagagaagtggttcttatggaagaaccaatggcagcagctatcggagcgggacttccagttaatgaacctacaggaagtatgatagtagatataggtggaggaactacagaggttgctattatatcattaggaggtatagtaacaagtaaatccttaagagtggctggagacgaattagatcagtctataataaactacataaagaaagaatatagcttgatgattggtgaaagaacagctgaaaatataaaagtagaattaggttcagcttatgaaactgatgaagataaaacaatggaaataagaggtagagatttgattacaggcttaccaaaagttataactatttctcaaaaagaagttagagaagctttaagtgaaccagttatttcaataatagaagctataaaaactacattagaaaaaactccaccagaacttgcagctgatataatggacaaaggaataatgttagcaggaggcggtgctctgcttagaggattagaccaacttataaacgaagaaactcatatgcctgttcatattgctgaatctccacttgattgtgtagctgtcggtgctggtaaagcactagatactatagataaaatattagatagtaaaaaa

SEQ ID NO: 16265 - DNA, 1662 bp, Clostridium botulinum
gtgagcaataaagatagtgtaaaggttattcctttgggtggacttggagaaattggtaaaaatataactgcttttgaatatggaaatgaaatagtaatcatagattgtggtatatcctttccagatgaggagatgtatggtgtagatttggttattccggatataacctaccttctaaataataaagataaagtaaaagctatttttctaactcatggacatgaagaccatataggatctttaccttatattctgcaacaattaaataggcctgtttatggtactgcattaaccttaggtatagtagagaataaactaaaagaacataatatgctttcagattgtgaacttaataaggtggaagcaggagatatagtagaacttaaaaatttaaagatagaatttataagaaatactcatagtatagcagattcttgttccatagctattcatacgccggtgggagttatattacatactggcgattttaaaatagactatacacctattgatggattagtaatggattttcatcgtattgctgaattaggcaaaaaaggagtattacttcttatggctgatagtacaaacgtacagcgtaaggggcacacaatttccgagaaatctataggagaaaccttaactaaaattttttcaaatgctaaaggaagggttattgtagcaacttttgcttcaaacatacataggatgcagcaaataatagatgcatctatagagtatggtagaaaagtagccttcagtggaagaagcatggaaaatatatctaaggtagccatggacttgggatatcttcatataccagaaacttatttaataactgtagatgaaatgaaaaattatcctaatgaacaaataaccataataactactggaagtcaaggagaacccatggcagctcttgcaagaatagcttattctaatcatagaaaaatagctatagagccaaaggatttatttattatttctgcatcaccaattccaggaaatgaaaaacttatatctagagtaataaatgagttatttaaaaagggtgcagatgtaatatatgaagcattagaagaggtacatgtatctggtcatgcttatgaggaagaattaaaattaattcatacattggtgcatcccaaatattttatgccagtacatggagaatacaggcacctaaaacgacatgtggatttagccatggagttaggcatggaaagagagaacatattctctttagaaacagggcaagttttagaaatatcacatgaagaagcaaaagtatcagggaaggtacgcacaggatctatatttgtagatggtataggtgtaggtgatgtagggaatatagtgctcagagatagaaggtatttagcgcaggacggtatgttaaccatagtagtaactctagaaaaagaatcctacagcgtaatagcgggacccgatataataacaaggggattcatatatgtaaaagagtcagaggatttaataaatgaagtaaaaggaatagtaaaaaaagaactagaaaattgtttagaaaataaaataattgaatggtatgtattaaaatcaaatattaaaaaatctgtagaaaaatatttatatgaaaaaacaaagagaaggccaatagttttacctataattatggaaatt

SEQ ID NO: 16266 - DNA, 1224 bp, Clostridium botulinum
atgaaatatgtgataataggggctagtgcagcaggaatttcagcagttaaaactttgagaaccttagataaagattctcaaatagttatgatttctaaagatgataaagtatattcaagatgtttgttgcatcattttataggtggaaatagagagatagaaggattatcttttatagaaaaggattttttcgctaaatataatgtaaaatggataaaaaataaaaaagtagaaactgtagatatagataaaaaggtagtaaaagtgcaaggaaaaatttcagaacattatgataaattgctcatagcatcaggttcttatgcgtctataccgccgattaaaaatttaagagaagctaaaagagtatacactttaaggaatttagatgatgcaatagctataaaagaagaggctaaaaaaattaaaaaagcagcagtaataggggcaggacttgttgggatagatgctactatgggattattagaaaacgacgtagaggtaactgttatagaaatgggaaatagaatgcttccactgcaattagaccaaagagcatcaaaaacttacgaagaattatttagaaaacacaatgttaatataaaaaccagtgtaggagctgaagaagctttaatagatgggaatagaaatgtttgtggaataaaattaagtaatggtgaaaagatagattgtgatattataattgtagcagcaggagttagacctaatatagattttataaaggatgaaagaataaagatagaaagaggcatagttataaatgataattgtgaaactacagttaaagatatatatgctgcaggagacgtaacctttagagcacctatatggccaatagctatgaaacaaggaagaatagctgcttgtaatatggcaggagaaaagaagctattagatgataatttcggagcaagaaattctatgaattttctaggtgtatatactatatctttaggaatagtggaaccacaggatgaaagttataaagtagatataatagataaaaatggagtttataaaaaaataatacacaaagatggaatcatatatggagccatacttcagggagatatagcttatgcaggagtattaacagagcttataaaaaataaaatagatatatctaaaatagataaggatatatttgatataagttttgcagacttttttaatataaaagaaaatggagaatttagttacaaaaaa

SEQ ID NO: 16267 - DNA, 828 bp, Clostridium botulinum
atgaaaagtattgaaactaaaaatttagatatagcttatgaggatactcttattgtaaaagaattaaatatgcagataccaaaggggaagataacttctattataggagcaaatggttgtggtaaatcaaccattttgaaatccgttggacgtatattaaagcctaagaagggtgtagtacatctaagcggacaagatataagtaaattgtctacaaaagaaatagctaaaaagatggctatacttcctcaaaatcctaccgcaccaagtggacttactgtaagtgagttagttgcatatggacggttccctcatcaaaaaggttttggaaatcttacggaggaagataaaagaattgttaagtgggctttagctgcaactaagctaagtgaatttgagaggagagaggttgatactttatcaggagggcaaagacagagggtttggatcgccatggctttagcacagcagactgatttgattttattagatgaacctactacttatcttgaccttgctcaccaattagagattttaaagcttttatatgagcttaatcgtaatcaaaagtgtactattgttatggtacttcatgatttaaatcttgctgcaagattctctgactatattattgctattcaaaaaggagatatcataaaatatggacctcctgaggaagttatgactccagaggtcctcaggaaaaccttcaatattaatgctgatattgttattgagcctaagagtaatcgtccagtatgtattacctatgatattatagatgaaaatgagtgtgtgcaattgaaggaaagggaggcagtaggtata

SEQ ID NO: 16268 - DNA, 981 bp, Clostridium botulinum
gtggtcgtaggaggtatttatcatatgagaactatagctgtattaacaagtggtggagatgcaccaggaatgaatgctgctatcagagcagtagttagaacaggtttagaaaaaggtttaaaagtaatgggaattcaaagaggatataacggacttataaatggagaaatatttgaaatggatactcatagcgtatctgatataatacaaagaggcggaactatattaagaacagctcgttgtgaagaatttagaacagagcagggaagagaaaaagctgctaaaatattaaaagcctttggtattgatggattagttgtaattggtggagacggttcttttcatggggcccaattattatctaagttaggaataaatactgttggactaccaggtactatagataatgatttagcttatacagattatacaattggctttgatacatctataaatacagttttagatgctataaataagcttagagatacatccacttctcatgaaagagtaagtgtagtagaagttatgggaagaaattgtggagatatagcattatatacaggagtagctggtggagcagaaagtattataataccagaaaaagagtataatgcagataaattatgcaaacaaatactacaaggaaaattaaaagggaaaatgcataacttagttttattagcagaaggtgttggaggagctaatgaactagcaaaatatatagaagaggttacagggatagaaacaagatctacaatattaggacatatacaaagaggtggaagcccaacttgtatggatagaatattagcttcaagaatggcttataaggcagtagaattattgattagtggtaaatcttcaagagtagttggtataaaaaatggaaaaataattgatatggatatagatgaagctttagcagtagaaagaagttttgaccaagaattatatgacatagcaactattttatccaaa

SEQ ID NO: 16269 - DNA, 921 bp, Clostridium botulinum
atgttagaaaaatatttagaaattagtaaagaagtatcagaagccttaaaggaaaataaacctgtagtagctttagaatctactataatatctcatgggatgccatatcctaaaaatgcagaaaccgcattaaatgtagaaaaaataataagagataaaggggcaatacctgctactatagccatattaaatggtaaattaaaagttggtttaacaaaggacgaaatagaatacttaggtaaaaaaggaaaagaagtagttaaaactagtagaagggacataccatttatattagctaaaaaactcgatggagcaactacggtagcatctactatgattgtagctaacttggcaggaataaaagtctttggaactggtggaataggtggagttcatagaggagcacaagaaagctttgatatatcagcagaccttcaagaattagccaatactgatgtggcagtagtttgtgcgggagctaaatctatattagatataggcttaacattagaatatttagaaactcaaggggtaccagtagtaggttttggtacagaagagctaccagcgttttatacaagaaaaagcgggtttaaagtagattataaagtagatacagcaaaagagctagcagaagctttaaaggctaagtgggatttaggattaaaaggtggaatggtagtaggaaatccaataccggaagaataccaaatgaattacgataccataacaaaggctataaatgatgcagttaaagaggcagaagaaaaaggtataaaaggaaaagaaagcacaccatttttattagctaaggtaaaggatataactaaaggtaaaagtttagaagctaatatacaattagtctataataatgtagctgtagcttcagatttagctatagaactaagtaagcttaataaa

SEQ ID NO: 16270 - DNA, 648 bp, Clostridium botulinum
atgggatttaaaaatgataaaggtgaaatagtcggatttgatatcgatttagcaaaagaagttgctaaaaaaatgggaattaaagttgtatttaaaccagttcagtgggatggtgtagttcttagtttaaataacaaggacatagatgttatttggaatggacttacaataactgaaaaaagaaaagaacaaataaatttttcaaaaccttatgtagaaaacaaacaaataatagtggttaataacgactctaatataaaatccaaaaaagatttaaataaaaaaactgtagctatacaattaggtagtagtagtgaagttgctttagattcagataaagactttgtgaaatcattaaaggaattaaaaaaatactcaaataacactgaagcactcatggatttacaggcaaaaagagttgatgccgttgtagtagacgaagtagttggtagatattatattagcaaaaaacctaatgtattcaaagtattagatgaagactttggaggagaatcttatggagtaggctttagaaaaactgataatagctttagagaagcagtggataaagctttagatgaggttataaaagatggaaccgcagataaaatatctgaaaaatggtttggtaaaggaatttttaaaaaa

SEQ ID NO: 16271 - DNA, 3837 bp, Clostridium botulinum
atgagtggcactaagtggacagatgagcaaaggcaggctatttttactaaggattgcaacttgcttgtggcagcaggggctggggctggtaagactgctgttttggttcagagaataattgaaaaaatattggataaaggggaacctatagatatagataaattattggtagttacttttactaatgcagctgcggcagaaatgagagagagaataggggatgctatttctaaaggcttagatgaagacccagagtcaaaggtactaagaaaacagcttactttattaaataagtcaaatataatgactattcactccttttgtcttcaagttataaaaaataattttcatactatggaaatagaccctaattttagaatatgtgatgaaacagaaggaatacttatgaaacaagaagctatagatgagctttttgatgagttatatgaaatagagaatgaagattttattaatctagtagaaagctatgccagtagaaaggatactagattacaagaagtggttttagaattacataggtttgctaaaagcgcaccattctcttatgattggcttttaaatatggcagaggaatttaatgtgggggaagagtttaattttgaagaaacaccatgggcagatatgattatggaggatatgaaggtattattacatggatttaaaaatatgctacaacaatctatagatgtaatattaaattcagagggtatagactattattatgaaccctttaaaatggatttgagttttataaatagtttacttgaaaaatcaagttttaaagaatttagaggtgaaataatagcttatgattttcctaaattacctttaaagagaaataaggatgcggataaagaggctaaggaaagggttaaaaaattaagggataaggtaaagaaaaagatagtagagcttaaaaatatattagattcctatgaaaatgaatttataaagaaggaatttatatttttatatccttcaatgaaagcactatccaatttagtaatactatttgataaaaaatatgaagccaaaaaaagagaacgagatttgattgattttaatgatatagagcatttatgtttatccatattaacagataagaatagtgaggggcatataattccctcagatattgctttagattatagaaaaaaatttgcagaagtactcatagatgaatatcaagatagtaatttggtacaggaagttattatgagtatggtatctagagtaaaaggatattggagtttttataatggacaattaatgtttaatgaagaagaaataaatttagaagaacctcagatatgcttagatattcctaatcgatttatggtaggagatgtaaaacaaagcatatatagatttagacaggcaaaacctgagatatttttagataaatataatgagtatagtgaagaagaaggtacaaagaatagaaaagttaagctttttaagaactttagaagcaggaaagaagtaattaatggtgtaaattatttatttaaacaaataatgtctaaaactataggggaattagattatacagaggaagaggccttaaaggttggagctagctatggagaagaggtaaaaggtgaacctatagaattatgtttgatggataaaaagtatgaaataagtgaagaagtattaaaagaatataatgtggatgaagaagaagctttagataatatacaattagagggaagattagtagctaaaaaaatacaaaaattagtgggaaataatttagaaggtggattaaaggtatttgataaaaagttaggagagtatagaaaccttcaatatagagatatagtgattcttatgagagctacatctaactgggcaccaatatttgtagaggaacttgcaaaggaaggcataccagtttttgcagatacaaattcaggctattttgatacagcagaaataaaaactatgatatctttattacaaataatagataatcctctgcaagacataccattgctttcagtattaagatcccctatagcttcttttacagatgatgaacttattgacataagaatggtaaacaaaaatataaccttttatgaatgtatggaaataatatatagattatataaaaatgaaaagttagattcttattatagtttttatattgaagatgaaaataagataaataaaataataaaagatatgaatgagaaattaaaaaataaaatatgtagttttatagaaaaattaaagctatggagagagaaatctattcatatagatatagatgaatttatatggtttttatatgtggaaactggatactatgggtatgcaggagcgcttcaagcaggagagcaaagacaggctaatttaaggatacttttccaaagggcaaagcaatatgcaaaaactagttacaaaggattgtttaactttataaattttataaataaattaaaattcagtagtggagatatgggcagtgcaaaaatactcggagaaaatgaaaatgtagtaagaataatgagtattcataagagtaaaggattagaatttccagtagttatactaagtggtactggaaagaattttaacatgacagatcttaataaaaatatattatttcatagagatttaggatatggaccagattatgtagatacagaaagaagaatagcttatccatcgttagttaaaaacattataaaaaataaaataagattagaaactctatcagaagaaatgcgaatattatatgtagctttaacaagggcaagagaaaaacttataataacaggattgataaataatatggataaaactgtagaagactggttgaatttatcagaggacaaaaataaagtaccagaatatgctgttatgagtggaaaaacttatttagactggataggtccagctcttataaaacataaggatgctgtaagttttagagaagagttaaaaatgacatcagagctttctaatatagtagatgataagtcaaaatggaaaatagaattatggaataaaagagaattattaaaggaaaaggttgaagaggatgaagtggaaattagtgaaaaaataaaagaaacattaatgaatttagaagaaagtaattataaagaagaaatatataaaagactttcctttaagtacaaatatgacaatgcttcaagcataccaacaaaattgtcagtttcagatgtgaaaaaacaatttatattagatgagaaggaaaatacagaggagttatttaaaaaactagaacttagaaaacctatgtttatggaagaaaaaaagaaaatatctccttcagagagaggtactattatacatttatttatgcaacatttagatttgaaaaaggcagaaaatgaagaggatataaaagaacaaataaataggttaatagaaagagagttcataacctatgagcaatcaaaggttataaatccatataaaatattaaaattttgtagaggtgaactaggcaaaagaatacttaattctaataatgtaaataaagaaatgcctttttctatagaaatacctgcattagaaatttataaagagttagataaagaaatatataaagatgaaaaattaataattcaaggggtaatagactgttattttgaggaagaggatggattagtattattggattataaaacagattatgttaatgacatagaagaaataaagaatagatatgaaatacagattaaatattatgaagaagccttaaatagaataacaggaaaaaatgtaaaagataaatatttatatttattttctgtagacaattatataaaaattgat

SEQ ID NO: 16272 - DNA, 696 bp, Clostridium botulinum
atgaaggtaaataaacttttggatagttttaattatgctatagatggaataatacatgcagttaggacccaaaggaatatgagaatacatatgctctctgctcttttggttttaactgcctgttttttctatgatttatcaaagatagaattagtagttgtatgtataacaataactttagttatttttgcagaacttatgaatactgctatagaatttgctatagatgccactacaaattattaccatcccttagctaaggtttctaaaaatgtagcagcaggagcagttttattaacagctataaatgcagtagtggttggttatattatattttgggataaactaaaatatataaatttcgttttaataactaaaataaaaaattcaaatccttatgctatatttattatattagctatagtttgtatagttaccgtagtggtaaaagctatatatggagaaggaactcctttaaagggaggaatgccaagtggacatagtaccatggcattttctatagccacaataatagctcttataactaaggaatttcccgtagttacgttaagctattttttagcctttatagtagctcaaagtagagttgattcagaagtacattctatattagaggtaatagtgggggctttatttggaactttatttactacgtttttatataaaatatttgga

SEQ ID NO: 16273 - DNA, 1326 bp, Clostridium botulinum
atgttgctgattggaaatggaaaggttataactagagataatactagaccaatcatagacaatggatgtattgctgttgatgagaataaaataattgagattggatcaacagaaactttaaaaaataagtataaggaatcccaatttatagatgcaaaaggaaagcttataatgccaggatttataaatactcatatgcattattatagtacttttgctaggggcatggctaatgatagtccgccagcaaagtcattatgtgacatacttacaggtctttggtggagattggataaggtattaaccttagaagatgtttactatagtgctgcggtacctatgattgatcaaataaaaaatggtgtaacaactgtatttgatcaccatgctagtactcatgctgttaaaggaagcttatttaaaattgcagaagcagcagagacaatgggaattcgtagtaatttgtgttacgaaacttctgatagagatggggaaaaaattgcacaagaaggtattaatgaaaatgtagaatttattaagcactgtaatgctaaaaatgatgacatgatcaaaggtatgtttggacttcatgcatctatgacaatatctgataaaactctagaaaaatgtgtagatgcagttaaaggtttaaatacaggattccatgttcattgtggagaaggcattgaagatttagaggattcaaagaaaaaatacggcaagggaattatagaaagatggaataatgcaggagttctttgtgataaaactatagcagtacattgtatttatgtttcagatgaagagatggatatgcttaaagaaaagaatacaatagtagttcataatccagaatcaaatatgggtaatgcagtaggtgtttctcctgtacttaagatgtacaaaaaaggcattttattaggattaggaactgatggatatactccagatattattgaatcttataaagtagcaaacattattcataaacatgctacttccgattcaactgtggcatggaccgaaattcctgaaatgttatttgaaaacaatggaaaaattactgaaagatttattgatggtaagattggagttttaaaagagggtgctctagcagatataatcgtagtagattataatccaccaacaccaattaatgaaaataatataaacagtcatatattatttggtatcaatggaagacatgtagatacaactattatcaatggtaaagttttaatggaagacagaaaacttcttcatgttgatgaagaaagagttatggctagaagtagagaattagcaaaagaagtttggaaacgattc

SEQ ID NO: 16274 - DNA, 1050 bp, Clostridium botulinum
ttggttattggtccgttgtttgctattcctagaacagcggctactgtatatgaaatagcagtaaaaccagtagcacctggtgtgccgatcatagttatatcactaatattttttgtgttaacctatatatttgtaagtaatcaggggcatgtaatagataatatcggtaaaattttaacaccattgttattaattatactagctgccatagtaattgcaagtatagtaacacctgtagggccaatagtagcaacaaaacctaatagatactttttaataggttttcaggaagggtatcaaacaatggatgcgttgggagcatcattaatggctggaatagtattaacagatttaattttaaaaggatataaagatagaaaagaacaagaatatatgacaattagggtaggcttagtttcaggagttctattattattggtatatggaggtcttacatttgtaggagctactggaagtggaatttttaccggagatattagtagagttgatctattattaaaattagtatatggacttttcggaaatgctggtgctgtagctatatccatagcagtagctttagcctgtttaactacagcagtaggacttacttctacagcagctaatttttttaatagtgtaagtaatgggaagctttcttacaaagctgttagtattgctgtagtattatgtagtttatttttatctgtaataggggtagaaggattaatcaatatagctgtaccaattttatctactgtatacccagttatgattgttttaatattaatgacattatttgatagacacattcctaataatttaacttatactggtgctgtaataggagcatttttagttagtttaattataaatataaatagtgcatttggaattttaaatggtccaatggcgcttgtgaaaaaattacctctttttgaagcgggatttccatggattgtaccagctatagtattggctattttattcactatatttgggaaaaaaaataaatcccaaagcttagaacatgaaaactcttttgataat

SEQ ID NO: 16275 - DNA, 804 bp, Clostridium botulinum
atgtataaattaatagcattagacatggatggaactcttcttaataataaaaaaactatctctagagaaaataaagaagctataaaggctgctatatccaaaggatctaaagtagttttagctacaggaaggcctcttaaaggtattgaaaagtatttaaaagaattagatttaatcaacaatggtgattatgctattgcttttaatggtgctttagttcaggaaacaaaaacaggtaaagttttatatgaaaacaatatgactaaagaagatctaaaaatattatataaattaagcaaagaattagatgtagatattcacttcttaactattgatgaatgctatacacctaaacttaatgtatatagtcaaatagaaactactcttaataatatacctttaaatataatagattttgataatgtacctgatcatttaaaaataataaaaataatgtttgtcggtagcgaagaaaaaataactgagataattaagctagtaccaaaggaatttcaagaaaagtacaatgtggtaagaactgcatctatttatctagaatttttaaataaggatacaagtaagggttatggtatagaaagattatgtaatattttaaatatagataaaaaggaagtaatatgtgctggtgatgcagaaaatgacatacatatgatagaatatgctggtctaggagtagccatggaaaatgcttatccacaagtaaaaaaagtagctaactatattactaaaaataacgaagatcatggtgttgcacaggtaataaataaatttatattaaataaa

SEQ ID NO: 16276 - DNA, 999 bp, Clostridium botulinum
atgaaggttactataaaagatgtagctaaagaagcaaaagtttcaccatctacagtttcaagagtactatcagataatcctagaataagtgatgaaacgaaagaaaaagtatacaaagttatagaaaaacttaaatacaaacccaatgcaatagctagaggattagttaataataaaacaagaatattaggggttgtgcttccagaggaagcggaaaatttgctatctaatcctttttttatacaagctatgaaaggaataagttcttatgctgaaaaaagagaatactatataacttacgcctttagtagtaataaagaaaacgagaaaaaacatataaaagatttaacaactagtggattaatagaaggtttgcttattttaagaccaaaagaaaatgatgaaaatataaaatatctaaaggatataaactttccctttgttattatgggacgcttaaaagatacagaagatgtgttatgggttgataatgataatttccaagctatgtataatatagttaataaattaatagataaaggtcatacaaaaatagctctaataggagctaaaaaggagctaaatgtatgtaaggatagagaaaagggatataaagtagcactagagatgaacggaattagttttagtgaaaaattagttagttatggagaggaatttaaagaaaaagaaggatatatacaaatgaataaattattagaaaaagtaaagccaacagcagtggtggcaatggatgacttgttagcaataggtgctatgaaagcgctaaaagaaaaatatttaactgacctttctatagtgggatttaataatatacctttaggcgaatttcagaaacctcaattagcttctgtagatataaatggagtaaagcttggatattatgctacaaaattgttaatagacaagatagaagaagtagaagatactagagatcactacattgtagaaactacttttgtaaagagagaatcttttaaa

SEQ ID NO: 16277 - DNA, 480 bp, Clostridium botulinum
atgggaggaaatattttgagtttaaatatagtattatttcaaccagagataccacaaaatactggtaatatagcaagaacatgtgtgcttacaaattctagattgcatctaataaaacctttaggatttagtttagatgaaaagcacttaaggagagcaggattagattattggcaatatttagatttatccatatatgaatcctatgaggagttaagagagaaatacaaagattcaaatttttatttttcaactactcatggtaataatttttatacagatgttaaatatagcgatggagatttcattgtttttggaagagaatcttcaggactaccagatgaaataagagatagtgatcctagtaagtgtataagagttccaatgattaatacaactactaggtctttaaatttgtctaatactgtagctgtagttacctatgaagctttaagacaagttggtttcccagatatgaaa

SEQ ID NO: 16278 - DNA, 2442 bp, Clostridium botulinum
gtgattaatatgatgtttggaagatttacggaaagagctcagaaagtacttatgaatgctcaggaagaagcagaaaaatttaaacatggatatgtaggtacagaacatattcttttaggaattttaatagaagatggagtagccaaagaattattaaataattttagtataacagaagataaggttagacagttaatagaaagatatgaaggaaaaggggaaatggatctttataaaaatgagattccacttacaccaagaacaaaaaggttacttgaaatgagtttattagaagctagaaatttaaatcataattatataactccagaacatatattattgggattaataagagaagctgaaggagtagcctttaccattctttctaatttaggcttagatgctgaaagattaagaaaagagttaataaagaatttatctgggcaagaaactcctaaagatgaaggcagtaaaaaaagttctaaaagctctacccctacattagaccaatttggaagagatttaactgaaatggcagaagaggggaaggttgaccctgttattggaagagataaagaaacccaaagagttttagaaatattatgtagaagaactaagaacaatccttgcttaataggtgaaccaggagttgggaaaacagcaatagccgaaggcttagctcaaaatataattgatggaaatataccagaaatattaaaaaacaaaagagtagttacattagacttaacatctatgatagcaggggccaagtataggggtgaatttgaggatagattaaagaaaataatggaggaagtaagaagttctaaggatacaatattgtttatagatgaaattcatacaatagttggagctggggcagcagaaggtgctatagatgcggcaaacatattaaaaccagcattagcgagaggagaaattcaatgtataggtgcaactacactagatgaatatagaaagtatatagaaaaagattctgctttagagagaagattccagcctataaacgtaggagaacctacaaaagaagaaacaatagaaattttaaagggattaagagataagtatgaagcacatcatagagttaaatttacagatgatgctatatatgcagcagttaatttatctgatagatatataagagatagatttttgccagataaagcgatagatctgatggatgaagctggttccaaggttagaatacaaaatttaattgcaccaccagatctgaagaatatagaagaacaattagataaagttgttaaagaaaaagaagatgcaataagagtgcaggattttgaaaaagccgctaatttaagagataaagaaaaagaattaaaagaaaagttagaagggttgaaaaaggattggaatgcagaaaaagaaggttctaatttaattgtatcagaacaacaaatagcagcagtagtttcaaattggactaatataccagttaataagcttactgaaaaggaatctgaaagactcttgaaattagaaaatattcttcataatagggtaattggccaagaagaagctattaaatcagtatcaagatctgtaagaagagcaagagtaggcttgaaagatccaaagagaccaataggttcatttatatttttgggaccaacaggtgtagggaaaactgaattgactaaagccttagcagaagctatgtttggaaatgaaaataatatgattagggttgacatgtcagaatatatggaaaaacattcagtatctagattaataggatcacccccaggatatgtagggcacgatgaaggtggtcaattaacagacaaggtaaggacaaatccatattcagttgttttatttgatgaaatagaaaaagctcatccagaagtgtttaatatattacttcaaatattagaagatggaaggcttacagatggaaaaggaaaaacagtagatttcagaaatactataatcataatgacatctaatgtgggagcatcaactataagtaggcaaaagacattaggttttaatacctccatagaagaagaaagagaaacagaatatgaaaaaatgaaagataacattatgaatgaattaaaacattcatttagaccagaattcttaaatagaatagatgatataatagttttccatcaattaagagaagagcatattagagaaatagttaaacttatgctaaaaactgtatcaaatagagttaaagatcaaggaataaaattagagtttacagaagaagcagaaaaaatattggcaaaagaaggatacgatactaattatggagcgagacctttaagaagagctataactaaaattgtagaagataaattgtcagaagaaatattaaagggaaatattaaaaaaggtgattcagttaaagttaatacaattgaagataaattaaatttttgtaagatg

SEQ ID NO: 16279 - DNA, 660 bp, Clostridium botulinum
gtgaaatttattttcaatattaatataatgtggaaggtggagacaattatgaatcagaaagatagaatgttagcagggcttccatataaagcgtgcttagatggattaccagaagaacgaatggcaaataaaaagaaaatttatgagtataaccattgcttcccagatgaacatgaaaaaatccataaattaataagagatattcttggaaaagcaggtgcagatatacatatagaggcacccttttattgtgattatggaaagaatattcaggttggagataacttttttgcaaattacaactgtacaattctagatgtgggaaaagtaattataggtaataatgtacaatttgctccaaatgtttctttgtacacagcaggtcatcccatacatcctgattcacgaaattctggatatgaatatggaatgggtataacaataggagataatgtgtggttgggaggaaatgttgttgtaaatcctggagttcatattggaaataacgttgttattggttcgggaagtgttgttacaaaagacattccagacaatgtgatagcaatgggaaatccatgtaaagttattcgtgaaattacagaagaagatcgtaagtattattataaaaattatgaatttgatgttgatgattataaggaa

SEQ ID NO: 16280 - DNA, 1002 bp, Clostridium botulinum
atgaagatgctgaaagatatgttgattaaagaaataagagaatatgtttatcataaaaatttgtttaaaataataaatttaagtaaaagttttaatgttagatttttagcacagggtgaatataatataaattttatattagaagatgaaataaataagtatgtttttagggtaaatacgggaagtcaattgtcattagaaaatcaaatagaatatgaatatagcgtattaaaaaggctagaaaatagtaaggttactccaaaggtttattatgtagatggtagtagggaatatataaaatatggtgtgttaataatggaatttttggatggtagaccattaaattatgaaaaagacttaaataaagctgctaaaatatttggcaaaatacattccatagaacttaataaagaggatttttcttcttttataatagaaaataatatattttctgacagaataaaagaagctaataatcttttaaaggatttttgggatagttcattaataaaagaagatattaaaaaattcttttataaatttataaattgggctacagaaaattcttataaggaaaaatattttatagatgatcccatacaagtaataaataacacagaggttaattctcataatttcataataggatctaagaatttttatttaatagattgggagaaaccagtgataagcgatccttgtcaggatttaacacagtttttagcaccaacaactactctttggaaagctaattatatactaaaagactgcgagataaatgagtttttttataattatgaaataatttttaaagggaaaaatataagagaaagagtagatatgtatacaccttatctttatttgagagccttaagctggtgtgctcatgcttatttagaatatcaaaatccagatagagatataaaaaatatggatacctatgaaaagataaaagagtatttagaattggattttatgagcaatctattaagtaggtggttt

SEQ ID NO: 16281 - DNA, 1314 bp, Clostridium botulinum
ttgtttatgggtaagctagaggttatgccaaagctgggattaactatgacagagggtgaactagttaaatggcataaaaaagaaggagatactataaaggtaggagagaccttatttgatgtaacaacggataaattgactaataatgtggaagcaaaggctgatggaattgtaagaaagattttagtagatgaaggtacagtagttgaatgtttgaaaccagtagccataattggagataaagatgaggatatatcaaatctattaagggaatctttgcaagatagtaagggaaatgaggtagaaaaagaagttaaagaatctaaggaggagataaaagataataggaaaataaaaaaaggagaaagaacaaagatatccccaatagcaaaaagacttgcaaaggaaaatgatgtggatattcaactattagatggaacagggcctgaaggaagaatagttttaaaagatgtagaatcatatatagaaaataataagaataatattaaaacttctccagtagcagagaagatagctaaagatttaggcgttaatttagaaggtataaagaaagacggaagaataatgaaagatgatatattagaatttatccaaaaatctattccttctgtaggagaagatttaatggatagaagagtaaaaatgagcactatgagaaaagtaattgcctcaagaatgagcgaaagttcaaagatttctcctacagtgacctatgacattgaagtggatatgactaatttaaaaaggttaaaggaacaaattaaaaatgaatggaaagttacttatacagatttattagtaaaaatagtttctaaagtactcattcaatatcctttagttaattgctcaatagaaggagatgaaatgatttttagaaattattcaaatattggagtagcagtggctttagaggaaggccttgtggtaccagtggttaaatatgcaaaccaaaagggactaaaggatatttctatagaagtgaaagaattagcccacaaagctaaaaataatggacttactgaagaaaatagtactggaggaacttttactataactaatcttggtatgtttggtataaagtctttttctccaattataaatcagcctgaagtagctatattaggtgtgaatatgataactaatactccagtggtagagaatggagaaatagtgataaaacctcttatgagtttatctcttactgcagaccatagggcggtagatggtgctgtagcggctcaattcttaaaagcagttaaaaaatatatggaaaagccagagttgcttatattg

SEQ ID NO: 16282 - DNA, 1530 bp, Clostridium botulinum
atgaataaagaattagtattagtagttgactttggaggtcaatataatcagttaatagcaagacgtgtaagagagaatagagtgtattgtgaaatagtaccttatactacttctatagaagatataaaagaaaaagcaccaaagggaataatatttacaggtggtcctaatagtgtatatggagaaaatgcaccaagagttcaaaaagaattatttgatttaggtattccagtcttaggtatatgttatggagatcaacttatggcacatagcttagaaggtgaagtaacaagtcctgaaaaaagagaatatggtaaaacagatgtaaatttagataatagtagtttattgtttaaggatatgaaagagaaagatcaatgctggatgagtcatacagattatatttcaaaggttccaaagggatttaaaattatagcaacaacagatgagtgcccttgtgcagctatggaaaatgcagaaaaaaaattatatggagttcaatttcatccagaggtagagcatactttatttggcaaaaaaatgcttaagaactttttgtttaacgtatgtaatttaaaaggtgattggagtatgagttcttttgcagagcagcaaataaaagctataaaggaaaaagtaggagataaaaaagtaatatgcgctctatcaggtggagtagattcatcagtagcagcagtaattgttcataaagctataggaaaacaattaacttgtgtatttgttgatcatggtttacttagaaaagatgaaggagaccaagtagaaagaatatttaaagatcaatttgatatgaatttaataagagttaatgctcaagatagatttttaggaaaattaaagggagtttcagatccagaaagaaagagaaaaataattggagaagaatttataagagtatttgaagaagaagctaaaaaattaggtgatataagtttcttagttcaaggtactatatatcctgatatagtagaaagtggaacaaacacatcagctactataaaaagtcatcataacgtaggtggattacctgaagatatggaattcaaattaatagaacctttaagagaattgtttaaagatgaagtaagagctgtaggagaagaattaggtataccacataaattagtatggagacagccattcccaggaccaggcttagctataagagtattaggtgaggttacagaggaaaaattagctattacaagagaagcagatgctatattcagagaagagatagctaaagcaggcctagaagaaaagatatggcaatattttgcctgccttccaaatatacagtcagtaggagtaatgggagatgaaagaacatattgccatacaatagcattaagagctgttacatcttcagatgcaatgacttcagattgggcaagaataccttatgaagtattagataaagtatcaagaagaatagtaaatgaggttaaagaagtaaacagaattgtttatgatgtaacttcaaaaccaccagcaactattgaatgggaa

SEQ ID NO: 16283 - DNA, 552 bp, Clostridium botulinum
atgaataataaagctattttaagaaaagaaattataaatgtaaggaaatctttaactttagaagaaaaaataaaaagagatataataataaaagataagctccagaaaaattctttgtataaggaatctaatttcatatttatatacgtaagtttaaaagatgaagtggacacacatgctattataaaagagggattaaagcatgggaaaaaaatatgtgtgcctaaggttatatctatacaagaaggtatggtggctatagaaataaaggatttttcagaacttatagaatgtggaccttataaaatattagaacctaaaaattttaaaaatatagtagattcaaaagaaatagatctagctattttaccaggtttagcttttgataacaaaggggggagattaggttatggtggaggcttttatgataggtttattcctaaactaaaaaaagaagtttcaaaaatagccttagcctatgattttcaaatattaaaagaggttcctaaagatgcacatgatgtgctagtagatgacattataatagatatt

SEQ ID NO: 16284 - DNA, 1228 bp, Clostridium botulinum
atgttaggattacttcaatttttaagagacgttttaaaacaaccggcattattaatgggtattatggcattagtaggacttgtagccttaaagaaacctggacataaggttcttacaggaacgttaaaaccaatattaggttacttgatgcttggtgccggtgcagattttatagtagcaaacttagaacccttaggaggaatgatccaaactggttttaacataactggagtagtaccaaataatgaagcaattgttgctgttgcccaaaaggtactaggagtagaaaccatgtcaattttagtagttggacttttgataaatcttgttatagcaaggtttactaaatacaaatatgtatttttgactggtcatcatagtttctttatggcatgtcttttatcagcagttttaggaacttccggtatgaagggaactgaacttatattatttggtggatttttacttggagcatggagtgcaatatcaccagcaattggccaaaaatacacactaaaagttactgatggcgatgagattgctatgggtcactttggaagcttagcatactatgtttcagcttgggttggttcaaaagtaggcaagcctgaagaaagcactgaaaatattgaaattcctgaaaagtggggattcttaagagataccactatttctacagcaattacaatgatggtattttatatagtagcagcagtagccgctggtcctgaatatgtatctaaattatcagatggaatgtcacctatattatttgctataatgtcatcattaaaatttgcagttggtgttactattgtttataacggtgtaagaatgattcttggagatcttataccagcattccaaggtattgcaacaaaaattataccagatgctataccagcagttgattgtgccgtatttttcccttatgcacctacagcagttataatcggttttgtaagctcattcataggtggaattataggtatggttttacttggagtagctggaggagtacttataataccgggacttgtacctcacttcttctgtggttctacagcaggtatatttggaaatgcaacaggaggaaaaaagggagctgtaattggaagttttgtaaacggacttttgataacctttgccccagcattacttcttccagtacttagtacccttggattcaaaaacacaacttttggtgattttgatttcggtgttcttg

SEQ ID NO: 16285 - DNA, 324 bp, Clostridium botulinum
atggttaatgtagtatttaaaaaagaaaataatgatatagtatttgttaaaatgagtggtcatgcggggtctacagaccaggggtatgacatggtatgttctgctatatctgctgtatcaattacaatagttaatggtataacagaagtattaaagattaatcctttaataaaagaggaagatggctttttaagtatagatttaagatcttgtattaaagaagacatacataaatgccaagtgcttatgagtactatgttgttaggattaaaaagtatagaatttaattacagtgaatatataaaacttacaatggaggaggtg

SEQ ID NO: 16286 - DNA, 858 bp, Clostridium botulinum
atgagaagaattttatctactagagaaatgttaaaaaaggctcaagcagggtcatatgctataccagcatttaatattcataatttagaaacattacaggttgtggtagaaactgcagcagaattaaaatctccagttatcatagcaggaacaccatcaacaattactgattatgcaggagcagattatatagttgctatggcagaagttgcggcagaaaaatatgatattccaatagcaatacacttagatcattttgaagatgtaaaggaaattaaaaaggatatagatattggatttaaatcttgtatgattgatgcatctaaaaaatcctttgaagaaaatataaaaactgttaaagaagtagtagaatatgctcataaatatgatgtaactgtagaagcagagcttggtaaactaggtggaaaagaagatgatttagtagtaagtgaaaaggatgccatgtatacaaatccagatgatgctgtagaatttgtaaatagaacaggtgtggattctttagcagtggctataggaacagctcatggattatataaaggagaggcaaaacttgattttgatagattaagagaaattagagaaaaggttagtgtacctttagtattgcatggagcttcagatgtaccagatgaattagttaagaaagctatatctcttggaatttgtaaagtaaatgtggctacagatttaaagataccattttcagatgctgtaaaaaaatactttaatgaaaatccaaaggctaatgatccaagaaaatatatgacaccaggaaaagaagttatgagagaagtagtaaggcataaaataatggtttgtggaagtaatggacaagct

SEQ ID NO: 16287 - DNA, 1098 bp, Clostridium botulinum
atgaaaaaaagaaaaataataggcttattatgtacattagttttaggaacagcattaattgctacaggttgttctaaaggaagtaaagaaacttcagctgaaaaggataaggattatacagtaaacctaggctattataattgtgatcatatgacctctgcttgtgttgctaaagatgcgggtatatttgataaaatgggattaaaagttaatgtatcaggaaatggaaaagttcctcaggccatggcagcaggaaaaatggatgtaggatatataggatatgcaggattaataagaggattagcaaagggatcacctataactgttgcagctaataatcatttaggtggatcaatgtatttagttgtttctaataaaataaaagatcctaaagatttaaaaggtaaaaaattaggaataggaacaaagcctgaagaaagtgaaacctggttaatgtgtgctaagaagttaggaattcctacggaaggcaaaaattatgattgtgttgaatttggatcagacaaagatgcatatttagcattaaaagcaggtaaaatagatggatttacttgttgcgatccatggggatcaatggcggaatatgaaaagacaggtcacattattgcaacagcagataaaattgttggagaagataaatggggtgaatgttgtgtttattctatgaatacaaaatttcaaaaagaacatccagagctagctaaaaaaatgatacaagctcatgtagaagctatgaaatattgttatgaacatccaataaaagcagcaaaaatatttgctaaaaattatcaagtcccagaagaagtagctattatgacaatttacaaaaaaactgtaggtgagggaagaactataacttggaaaatgaatgatgattattttaaaacagaaatagatactttaatgaaatataaattaatagaagaagaacctgactatgataaattaatatctaaaaaaatatatgaagaagctaaagtagctgattttgataaatttataaaagaaaatgtagattcagttttcccagtaggaatgaaatatgaagagtggaaagttaaagctatggaaatagataaa

SEQ ID NO: 16288 - DNA, 279 bp, Clostridium botulinum
ttggtagagggattaaaggatttggataaaaattcacatataataattcttttttattttaataaatctaaagattttaatcttataacaaaaactccttggagcgatgaaaagaaaggtgtgttttctactagatcacctagaagacctaatcctatagacttatctatagtaaaattaatagaaatagatcataataaaataataattaaagggatagatatgttagatggtactcctgttctagatataaaaccctattcagaagaattaaaccct

SEQ ID NO: 16289 - DNA, 351 bp, Clostridium botulinum
atgatacttattaaaaaattcaaatttgatgcagcacataatctaatacattaccatggaaaatgtgaaagacttcatggccatacttatggactagtaataaagatctcaggtgaaagagacaaggaagatatggtaatagattttacagaacttaaagctatagtaaaagaaaatgtattagatatattagatcatgcttatataaatgacataatagaacaaccaacagcagaaaatatagcagtatggatatgggataaactttatacaaaactaaaaagagataattgtagcttatatgaaatagaagtttgggaaacagaaactagtggcgtggtttacaacgga

SEQ ID NO: 16290 - DNA, 1863 bp, Clostridium botulinum
gtgagttatataaaaataattaggagaaaaaaaaggatgagctataactattttgaaaaacaacaaagagaagattctatattggttggacaggatattttaagttttagatataataatagcagaatagatactacaataatttcttgcttaagaaaaatcgttaacttaagtaaagaaaaagtagctattatagataatgaaacaaagataacttatggacatttcatgaagcgaattaatgctctatcaaattttttgctgaatcaaaaggagtttgaaagaacatcaccaattactttaattttaaatgggaattatttaagatatgtttgcgtatatggtgttttagcttcaggtgggtattatttgcctatagaaccagaagtaaacaatattaatagaataatttctttagtagaacgttctaaaagtaaagttgtaattacaaatagagagtatgtaaatatattaaaagaaaaaatatcagaaagtgtaagttttataattatagaagatttagattttagtagcctagatagcaaagaaaacgttattgatataaaagctgatgatccagcatatatgatatatacatctggatctacgggagtacctaaaggtgttattatacctcatagagctgttgtgaatttagttaatgcattgtacgttaatttcagattaacaaaaaaggataggggtgtggcatttacatcattttcttttgattcatgtggttgtgatatatatccatatttattgaatgaagtccctttagtatgcattgagaggagaaaagaatatgtttacgatattgaaaaattaaataaattttgtattgataatatgatatcaataatgtttttacctacggttttagctgaaaaatttattacagttgataataatgtgctaagagttctttattttggaggggaaaaattttgtaagaataaagttactaattatgagttatttaattcttatggattgacagaaacaggaatacttaatacagtctataagattaaaggagatgagcgagaaattcctttgggagatccaataataaattcaggaatattaattttagatgatcaagataaaattatacctaaagggaaattaggagaaattgcaatttttggttctggtatagcaatagaatatgataataatacagagttgactaataaaaaatttattaagttaaaagaaatgggtaatttgagatgttgtaaaactggagatttgggatatataaatgagaatgataatctatattttaagggtagaaaagataaacaagtaaaaataagtggttacaggatagagttagatgagatacgattttatttgcagaaatatgcttgcatagaattaagtattcctatggtaataaaaaaaggtaaattatctttattagttaatttttatgttgcaaaagaagtacttgatgaagaattaattaataaatttttaagtaaatatttacctttttatatggtgccattatgtcacattaacataaaagatgttccatatactacaaatggaaaagttgattatagggggttgcagaaaatttttgagaataaaaaagaaaaagtatatctaaaaagtaatttactgtatagcaaattagaattaaaagagttcctaattgatacttatgccaatatacttaaaatggataaagatgaaataatggaagatggtagtttctttgaaatgggtggagactcacttaaagctatgaaattacaatggtatatacaagatgaattaggtgtagaagtggacatatctaaaatttatgaagaattcagtataaaaaaactcctaaatttaatactaata

SEQ ID NO: 16291 - DNA, 252 bp, Clostridium botulinum
atggataataatgtagatacaataactttaacggatgaagaaggaaaagaaactgaatttgaggtaataacaaagcttgatatagaagataaagaatatgtagttgtagttccaaagaatgaagaagtagatgaggctatagcccttagaatagataataatgataatggtgaagaagtgttagtaccagtagaagaagatgaggaatttaatatggtagcagaggcttatgaattgctattttcagaagaa

SEQ ID NO: 16292 - DNA, 1926 bp, Clostridium botulinum
atgattttaatgattatagtaactgttgaaaatatatgtaaaagttatggtgaaaaaactttatttaaagatgtttcttttaccataagtgatgaatataaaataggtttaataggagttaacggtacaggaaagtcttctcttttaaaaattgttaccggtgaagatagccctgatggtggtaccattactattcctaagggagctaccattgaatatttagatcaaaatccagatttagatcctaatgctacaatattagaacaagtatttaaaggtaattctaaaataatgtctgtaataggtgaatatgaaaaagctttagacctaatttctaaaaatcctgaggatgaaaaactgcaaaatcatttattaacattaactagtgaaatggattccttagatgcctgggatcttgaaagcaaaattaaaaccgttcttactaaacttaatgtaacagactttgataaaaaaataaaagagctttctggtggacaaaagaaaagagtcgccttgtgcagcgctttaatatctccttgcgatttgcttgtattagatgaaccaacaaaccacatggataatgacactatagattggcttgaaaattatctgcaaactagaaaaggtgcccttttaatggtaacccatgacagatattttctagatagagttgttaataaaactttagaattagactacggaactatgtacacttacaattgtaattattcacaatttgtagaaaagaaagcagaaagaaaaacattagaaaattccttagaagaaaaaaggcaaagtctttataaaaaagaattagaatggattagagctggcgttcaagcaagaggcactaaacaaaaagcaagaataaaaagatttgaagaattaggagaaagcagttttaaccataatagtaatgatatagatatatctgtagctcattcaagattaggtaaaaaaataattaatatagaaaacctaactaaaaaatttgaagaaaaaactttaataaaagactttaattacattttacttaggaatgatcgcattggtatagtgggaaacaatggaatgggtaagtctacccttttaaatattattacaaataaaataaattcagatagtggttctattgatataggtactacagtaaatattgcatatttctcgcagcattcagaggatatggatccaaatttaagagctatagaatatataagagaaacagcagaatttataaccacagcagatggaactaaaataagtgcatctcaaatgatggaaagatttcttttcacagatgatatgcaatggtgctatatttcaaaactatccggtggagaaaaaagaagactatatcttttaaaaatcttaatgactgcacctaatgtacttatattggatgaaccaactaatgatctagatattgatacattaaaagttttagaaaactatattgatgaatttaatggtccagttatatccgtatcccatgatagatactttttagatagaacctgtaataaaatccttcactttgaaggcaacggaaaaatttctgagtacataggaaactattcagactttatatataggaaaaaagagatctcaaatataacttcaaaagaagaaaaaacaaataaagctttaaaagaaaataatagtcaaaaggaaaaaacatcaaaattaaaattctcttataaagaaaaacttgaatatgaaaatatagataaagaaatagaaaaactagaagaaaaattatctaaactagaagaagaagtagaaataaatgcctctgactttatgagacttgaagatcttttaaaggagaaggataaagttgaggaagaactattatttaaaatggaaagacaagaatacttagaaaatctagcaaaagaaatagaggaaaataaaaaaactgtg

SEQ ID NO: 16293 - DNA, 873 bp, Clostridium botulinum
atgaaaatttcagttgaaaatttaaatatgatatataaagctggtaaaaaggctggtaaaaaagcattaaatgatgtttcattgcaaatagaaagtccaagtcttattggccttttaggacctaatggagcaggaaagtcaacacttatgaaactacttgtagcagaattgataccaactagtggagaaattcttatagatggtgtgcccttacttaaaaatgaaagaaagctaaaagcaagtctaggatatctaccacaatcttttgggctttatgatgagcttactgtctggcagttcttagattatatggcagcactaaaaggaattaaaaatagtaagaaggttattaaagaggttattgagaagacaaatttaatagaaaaacgtaaagcgcgtatttccactttatctggtggtcaaaggcagcgtgtaggcattgcccaagctcttatgggtaatccggaattattaatttttgatgagccaactgttggacttgatcctgaggaacgtattaatttccgtaacttgttttctaagactgcacaggataagattgtgttattatctacccatataattgaagatgtacaatcggtatgtgataaactgattgttattaatcatgggcaaattttatttacaggtacgccagagaaattgattgatttagcacacaatcatgttggagtgtttgaagaaagaataggagaaagcggaagggaagattataagataacatcaagagttaacacagcacgtggcattgcctgccgtattgtagcggaaacacttccagcctttgcagaagctgtggagcctactcttgaggatgcctatatgtatcttattatggagaaagaggtgaaa

SEQ ID NO: 16294 - DNA, 1011 bp, Clostridium botulinum
atgaattataaagatatattaaaaaatgcccgcgaaaatttaaatggaagttgtagagtttgcagagtatgtaatggaaaagcctgtagtggtgaagtacctggtatgggcggtaaaggcacaggagatgcatttactataaatatagatgcattagattcttataaattaaatatgagattgattcatgatgtcaagaatccagatataagcgtagaattatttggaaagaaaatggacatgcctgtttttgcagctccagtatcaggaactactctaaatatgggtggtaagtttacagaagaagaatatatatcttgggtaattggtggatgtagagatgcaggtatatatccaatggtaggagatactgcagtagattctttcttaattacaaatttggatgagttaaaaaaatttaatggggaaggtattgcaataataaaaccttgggaaaatgataatgtgataaataaaataaaattagcagaagaagcaggagcttatgctgttggcatggatatagatgcagcaggacttataactttagctcttcatgggaaaccagtgggccctaaaactgtagaagaaataaaagaaatagtgaaaagtactaaattaccttttatattaaaaggaataatgactgttgaagatgctaaattagccgtagaagctggggtagatgccattgtagtatcaaatcatggtggtagagttttagaccaaactccaggtgtagcagatgtattacctgaaatcgcagaagcggttaaaggaaaagtaaccatattagcagatggtggtgtaagaactggtgtagatgtattaaaaatgatagctttaggggcagatgcagtattaataggaagaccctttgtaacagcttcctttggaggagaaagagaaggggtaaaaatttatgtcgaaaatttaaaaagtgaattaaaatcagctatggttttaacaggatgtaacagtataaaggatatagatgaaaagataatatat

SEQ ID NO: 16295 - DNA, 963 bp, Clostridium botulinum
gtggaagtaatggacaagcttagacctagaggagatgaggctatgatttatacattaactactaatccagctattgatatgaactgttcttccagtagtaatgaagtttttaaggtaaatagaactaataatttatcttattcgcctaatggaaaaggagtaaacgtatcgctagttttaaatcattattctatagaaagcaaagctcttggatttttcggaggatttacaggaaagtatattgtagaggaattaaataagaaaaatatacttacagaagccttttggatagaagaaaatacaaggataaatgtatttataaatacggaagataataaagaatttaagtatgtaaacaagggaccttttgtttcaagggaaacccaaaaggatttattaaaatacttatcatcaaatttaaaaaaaggtgattatttaataataagtggaagtcttccccaaagtattcaagaggattactacaatgaaattttagatatatgtatggagaataatgttcaagttatattagatataagctctaaaaaattaaaagaattattgaaatataaacctttattaattaaacctaatgatgaagaagttgaggcaatatttggtctaagtttaaaagatgaagaggatataaaagaggcattaaaatatatttataagttaggtgctaaaaatatacttctgaccttaggggagaaaggaatgtatttttacaatggagacaagatttattattgcaatgcacctaaaattaaacttttaagctctgcttgtgcaggggactcggccttagcagcatttttaagtgaatggttatatgaagctaatatagaaaaggcacttaaaaaggcatcagccactggtgcaaatgttgctgaatctagtgcattaggaacttttggtaaagtatcagagtatataaaaaaaatacatgttaaggaggtagcg

SEQ ID NO: 16296 - DNA, 1014 bp, Clostridium botulinum
atgggtataaaagttggactaaatggttttggaagaataggaagagcagtattaagaatagcacaggacaagttcccagaagatgtagaaatagtagcattaaatgcgagagccactactgaaacattagtacatctatttaaatacgactcctgctacggaagatttaatggacaagtggaaataatctctaatgataatatgaaagtaaatggaaaagaaataaaaatatttagagaaaatgatcctcaaaatttaccgtggaaagaacttggagtagatatagttatagaatctacagggatatttaaagatagagaaaaagctatgaagcatatagaagctggagctaaaaaagttataataacagcaccaggaaaaaatgaagatataactatagttttaggagtaaatgaaaatgaatataatccagaagagcataatataatttcaaatgcatcttgtactacaaattgtttagctccttttgctaaagtacttgacgataattttggtatagttagaggtttaatgacaacagtacattcttatacaaatgaccaaagaatattagataaaactcataaagatttaagaagggcaagagctgcaggagagtcaataataccaactactacaggagctgcaaaggcagtagctaaagtattacctagtcttaaaggtaaattaaatggatttgctttaagagttccgaccccaacagtatctttaacagatttagtttgtgaattaaaaactaaagtaactgctgaagaaattaatgcagcgtttaaaaaagcagcagatggcgaaatgaagggtgttttaggatattcagaagaaccactagtttcagtagattacaagggagatccaagatcctctatagtggatggattatctactatggttttagaagacgatatggttaaagttgtgtcttggtatgataatgaatggggatactcatgtagaactgtagatttagttaattatgtagctaaatttatgaaa

SEQ ID NO: 16297 - DNA, 1347 bp, Clostridium botulinum
atggcctttgatggattagcttctaaacttcaggatgctttaaagaagcttagaggtaaaggtaagctttcagaaaaagatataaaagaagccatgagagaagtaaaacttgcattattagaagcagatgttaactataaagttgttaagaactttataaaaagtgttactgaaaaatgcatgggtaacgaagtacttgaaagtttaacaccaggtcaacaggttataaagatagtaaacgaagagttaacagagcttatgggaagtacagaaagtactttgaattcttccacttcaggactaacagttataatgctggtaggtcttcaaggggcaggaaaaactactatggcaggaaaacttgctcttcaccttagaaagagaaataaaagacctttacttgtagcctgtgacgtatatagaccagcagctataaaacaacttcaagtagttggtaaacaaattgatattccagtttttactatgggggataaattaaatcctgtggatatatctaaagctgctatagagcatgctaaaaataacaagaataatgtagttataatagatacagcaggaaggcttcatatagatgaagaacttatggatgagcttcataatataaaggaagaagtaaatccaagtgaaatactattagtagtagatgctatgactgggcaagatgctgtaaatgtagctaataattttaatgataaactagatataagtggtgtaatacttacaaaattagatggggacacaagaggtggagctgccctttctattaaatctatgacaggtaagcctataaaatttgtaggtttaggggaaaagatgaatgatttagaagtattttacccagatagaatggcttcaagaatacttggcatgggagatgtactttctttaattgaaaaagcacaacaatctatagatgaggagaaagctaaagaaattggagagaggatgttaaatcaagaatttaactttgaagatttcttagagtccatgcaacagatgaagaaattaggtccgattaacaagttattagaaatgattccaggaatgaattccaaagaattaaaaaacatagatctaagttctagtgaaaaagaaatgaaaaaaacagaagctataattagttcaatgactataaaagagagaagaaacccttcattaatatcttcctcaccttctagaaaaagaaggatagcaaaggggtcagggacaaatgttcagcatgtaaataagcttcttaaggattttcaagcttctaaaaaaatgatgaagcaaatgaaaggcatggaaaaaggatttaaaaaaggtttatttggtaaattaccattt

SEQ ID NO: 16298 - DNA, 1344 bp, Clostridium botulinum
atgaatacccaccttacagaaacctgggaaaaggcaataaatattataaaaggtgaacttacagaagtaagttttaatacatggattaaaagtattaaccctatttctcttgaaaataattcattgaaactagctgtaccaaatgattttacaaaaggaattcttgaaagtaggtacaaagatcttatagttaatgcgctaaaattacttacctcaaaaaaatataatatagattttattgtaactactgaagaaaaaatagaagaaaatcaaaaaaatcataataacgaaaaatctaatatagttgtaaatgatgaaatgtctactatgttaaatcctaaatatacttttgattcgtttgtaataggaaatagtaatagattcgctcatgcagcatctttagcagtagcagaatcacctgctaaagcatataatcctttatttatatatggtggagttggtcttggtaaaactcacttaatgcatgctatcggtcattatatattacataacaatcctaaatctcaagtagtttatgtatcttctgagaaatttacaaatgaattaattaattctataaaagatgataaaaatgtagaatttagaaataaatatagaaatatagatattttattagttgatgatattcaatttattgctggaaaagaaagaactcaagaggaatttttccatacttttaatgcactgtatgaagctaacaaacaaataattatatcaagtgaccgtcccccaaaagaaatacctactttagaagatagattaagatctagatttgaatggggacttatagctgatattcaagcacctgattttgaaaccaggatggccattttaaagaaaaaagctgatgtagaaaatttaaatattcctaatgaagtaatggtatatatagctacaaaaattaaatcaaatattcgtgaattagaaggagctttaataagaatagtagccttttcatcacttactaataaagaaataagtatagatttagcttctgaagcactgaaagatataatctcaagtaaacagacaaggcaagtcactatagatattattcaagaagttgtagcaaactattataatctaaaaatagaagatctaaaatcagctagaagaacaagaaatattgctttcccccgccaaatagccatgtacctttctagaaaactaacggacatgtcattacctaaaattggtgaagaatttggcggacgtgatcatactacagttattcatgcctatgaaaagatatctaataacttaaaaaaagatgaaagtcttcaaaatgcaataaaggaattaaataaacgaattaatcaaaaa

SEQ ID NO: 16299 - DNA, 1395 bp, Clostridium botulinum
atgaaggtttacaatactttaactaataaaaaagaagagtttcttacgttagtaccaggagaagttaaaatgtatgtttgtggtcctacggtatataattttttccatatagggaatgctagaacttttgtagtttttgatactataagaaggtatttagaatataggggttataaagtgaaatttattcaaaattttactgacatagatgataagatgataaaaagagctaatgaagaaggatcgacggtaaaagaattaggagatagatttataaaagaatattataaagatgcagatgatttaaatattgaaagggcaactaaaaatccaagagcaactgaattcatggaggaaataataaaatttgtgagtgacctaatagaaaaagggtatgcttatgaaatagatggtgacgtatattttagtactaaaaaatttaatagttatggtaaattatcaggacaaaatttagaagaattacaattaggagcaagaataaatgtagatgaaagaaaaaaagatcctatggacttcgctatatggaaaagccaaaagccgggagaacctgcttgggaaagtccttggggaatgggaagaccaggttggcatatagaatgctcatgcatggcttataatttgttaggagagacaatagatatacatgcaggaggatcagatttatcatttccacatcatgaaaatgaaatagctcaaagtgaggcaagaacaggaaagcaatttgcaaagtattggttacattcagcttttgttaatgtaaataatcaaaagatgtctaaatcattaaataatttctttacagcaagagaaatattagaaaaatatgatgcagatgttttaagaatgtttatgttatcaggacattatagaactcaaataaactttagtatggagttattagattcaactaaagcagctttagatagattgtataattctataaataatttagaaaatttattagatgaagtaaagaatgaagaattaagagatgaagaattagaatacaaaaatgaattacaaaaatataaagaaaaatatatagaaaaaatggatgatgattttaatacagcagatgctatatctataatatttgatttaataagagatgttaatacaaatgttactatagaatcatcaaaagaactagttaaatatacattagatttaataagagaattaggaagccctttaggaatattacaggaatcaactaaagctagtttagaagaagagattgaaaaacttatagaagaaagacaaaaagctagaaaagaaaaaaattgggcattagcagataaaattagagataatttgaaggaaagaggcattgttttggaagatacaccacagggaataagatggaagcaaata

SEQ ID NO: 16300 - DNA, 1374 bp, Clostridium botulinum
atgaaaagcaatttttctaagtttaaggattttataaagtataaaaaagtagcagtggtaggtataggggtaagcaatagacctttaataaaatttttagttaagttaggtgcaaaagtaactgcttttgacaaaaaacatagagaaaaattaggaagtataagtcttgaattagaagagataggtgtagatttagtattaggtgaaaattatttagataaattagatggatatgatgttatttttaaaactccatctatgagaatagatagaccggaatttgttaaggcaaaagaatctggagcttatattacatcagaaatggaagagtttataaaatattgtccagctaaagtttttggtataacaggaagtgatggtaaaacaactactacaacattagtgtatgaaatgttaaaaaaagaaggctatagaacttgggtagggggaaatataggaacacctttatttgctaatattgaagaaatgaaggaagaccatatggttgtattagaactatcaagttttcagcttatgacaatggatgtatcaccagagatttctttaatcactaatttaagtcctaatcatttagatgtgcataaagattttgaggaatatgtatgggctaaaaaaaatatatttaagtatcaatcaagtaataacttgttagtattaaataaagatgatgatttaacaaatgggatggagaatgaagctttaggagatgttttaaagtttagtcttgtagaaaaagtatataatggggcttgcttatcaaataataagcttactatacaaggaaaagaagtatgtgattctaaagatataaagcttaagggtaggcataatatagctaatttattagcagctttttgtatggtaaataaatatgtatcaatagatagtatgaaatatgtagctacaaatttttcaggtgtagaacatagatgcgaatttataagagaagttaatgggattaaatactataatgattcaatagcatcaagccctagtagaactttagcaggattaaattcttttgaaaagccagtaatattaatagctggtggatatgataaaaagataccttttgaacccttggcagaaggtggatatgataaaattaaaatattgatattaatgggggatacgaaaaataaaataaaatcagcttttgaaaaagtaatctcctataaaaaatgtgagatggaaatagttatagtaaatagcatggaggaagctgtgaaagtagctgataatatggcagaaaagggagatataataactttatcaccagcttgtgctagctttgatatgtatcctaactttgaaataaggggaaatgaatttaagaatatagtaaatagttta

SEQ ID NO: 16301 - DNA, 1452 bp, Clostridium botulinum
gtgtattttataaccttattttttatttttttatatatttttatatgtaatatatatctagttagtgaaaggacaggtaaaggaaaaatgcatgttataattgtaggaaatgggaaggtaggttacactttagcaaagcacttatctcaagaaaataatgatgtgattgttattgataaaaatgctgaagcacttcagaaggctatggataatcttgatgtaatgtgtattaaaggtaatggtacaagagtaagtgtgcttaaggaggccgaaattagtagagcagatgtagtaattgcagttactaatagtgatgaaagaaatatgctttgctgcttagcagctaagagatttggagcaaaacataccatagcaagaattagagatccagaatatgcagaggagcttacaatgctaaaaagagagctagaaattgatatgattattaatccagaaaaggaagcagctcttgaaattgcacaacttataaaatttccaacggtatctagtgtagaaaattttgctcagggcaaagtagatttagttagttttagattagggaaagaagactttatagcaggaaaatctatttctgatattgatttaaaaaaatgctctgtattattttgtgctgttgaaagagatggcagagtatttatgcccacaggtgattttatacttaaaagtaatgacaaggtatatgttataggagatcacgagaatataacattgtttttgaaatatttaggtaaacatcaaaataaaattaaaagtgtaatggtaataggaggaggaagaataacccattatcttactaaattaattaataaagttggtgctaatataaaaatagtagaaaaaaattatattaaatgtaaagatttgaatgaaacattgccagaagctattattataaatggagatggtacagaacaagaacttttagagtcagaaaatttagaagatgtggatgcttttatagccctaacagatcgtgatgaagaaaatattgtagcgtccctatttgcattaaatgctaatatacataatgttataacgaagataacaagagtaaattataatcatatagttaaaaatatcggagttgaaagtgttataagtcctaaaactttaacagccaataaaataattacatatgtaagaggattgaagaataaaaaaggaagttttattgaaaacttatataaaatagttggagaacaggcagaagcagtagaatttgcagctaatagtaccacaaaatgtttaaatgtagctttaaaagatataaagataaaaaaaggagtattaattgccgctatagttagaaataaagatataataattcctaatggtgaggattccataaaagatggtgataatgtcattatagtaacggaagaaaataatataatggatattaataatatactagagggaggaaacttaata

SEQ ID NO: 16302 - DNA, 621 bp, Clostridium botulinum
atggataaaaattctttagaatattttaaaaataaacttataagagaaaaagaaagcgtaaattctttgctagaggaaatgaaagataatgaaaccatagattctaactctgccatgagcatggaattatctaattatgataaccatcctgcggatacaggatcagaactttttgaaaaagaaaaaggtttggctcttaaggaaaatgaaatatctataatgaaaaaaataaatgatgcattgaaaaatatagaggatggaaattatgggatttgtaagagttgcggtaaacatataccaaaggaaagattagaatttgttccttatgcagagttttgcgttaaatgccaaaatgaagttagtgggaaaaatgttagaaaagttcaaagacctattgaagaagatgtattgggttatccttttggatatggatacaatgataaaacttcaaaagtagaatttgatgcagaagattcttatcaaagcgtagaattttttaataagatgaaaaatatggatgaatattacaatgtaggagaagaagaggatttagaagaagaaggttatgtagagccagtagaaagaataagtaatgaatattataaaagtacattatatgat

SEQ ID NO: 16303 - DNA, 1323 bp, Clostridium botulinum
atgaataatattggtatgcaattatttttaatattaattttaataattataaatgcatttttttcctctgcagagatggcaataatttctttaaataaaaacaaattaaatactataatagataatgctgaggaagaaaactcctcatctcgcaagacaaaaaaagcaaaaattttattaaatcttttgaaagaacctagtaaatttttagctaccatccaagttggaataaccttagcaggatttttggctagtgcttctgctgctacaagtatatcaaaatatattgagatattttttaagcacttaaatattcccaaaagtagtagtatagctttgtttttaactactcttttattatcttatttaacactagtttttggagagttactaccaaagagaatagctctaaacaattcagaaaaaatagcattattctcaattaaaccaataattatttttatgaaaatatctctcccttttgtaaatatattaacctactctactaattttttattaaaagttttaggaattgactatgagaacatagaagaaaaaatatcagaagaagaaataaaaaaaatgatcgatttaggtgaagaaacgggtgttttcaattctacagaaaaagaaatgataaatagcatttttgactttgacaatactctagctaaagaaataatgacacctagaactagtgtatttacaatggatataaatgattcacctgaaaatattattaataatatgttagaagaacggtattctagagttcctatatatgatgatgatattgataatattataggaattctacatataaaagatatactttctattataaataaagaaaatataaaaaaagaggatttaataaatatattaagaataccttattttataccagaaacaaaagctattgattttttatttaaagaaatgcaaacaaataaaaattatattgccatacttatcgatgaatatggaggattttctggtatagttactatggaagatttaatagaagaagttatgggaaacatattcgatgagtatgatgaagatcatactgaagaaataataaaaatagatgctaatactttcttattagatgcttctataactatagatgacttaaatgaaaaacttaatttagagctaccctcagaaaattttgatactctaggtggttttatattagacataactggaactatcccaaaatgtaatgtaaattctgagatacagtataataatttaatatttaaaatagaaaaggtatataataatagaatagaaaaaataaaattatatataagtgag

SEQ ID NO: 16304 - DNA, 867 bp, Clostridium botulinum
atgctaatgcataggattatttatgactgtgataacaccatggggcttaaagataaagacgtggatgatggtctaactttaatgtatcttataggtaatgaaaatgtagagctaattggtttaacatcaactcatggtaatggtactgtagaggaagttcatgaaaataatcttagaattatgaatcttttagacaaagaatataaacccatttttaaaggtggagatttaaacacaggaagaattagtgaagctgctaaatttttagctataagtgctagcagatataaaggagaaataactatacttgctacaggatccatgtctaacttatatggtgcatatttatatgatgaaaatttttataagaatgtaaaaaacattgtattaatgggtggtatcacaaaacctctgattatttcaggggtagaggttaaagaattaaatttatcctgtgattatgaagcgtcctatagtgttttaacttcaggagcagatataactatattagatggacatgttactcttcaagctttgtttagagagaaagagttgaatgcacttaagaatagttcaaatgaaatattgagatatgtgtatacagaaatagagccttggtttaattctatggaaaaaacttttaatataaaagccttttgcaattgggatgtagcggcggctatgtatataacaaataaggagatttttaatgaaaattttgtttatataaatcctcatatagaagaactaaaatctggaatcataactttaagtgaagaacataaagtatttaaagtaaatatgccaaataagataatagatctagataaatttaatagtattcttattgaaaagtggggaaaatta

SEQ ID NO: 16305 - DNA, 2214 bp, Clostridium botulinum
atggatttaaaaaataaattaaataaagaacaatatgaagctgctattactatagatgggcctttactaatactcgcaggagcaggttcaggcaagacaagggttttgacttatagaatagcccacatgatagaaaatttaaatatatatccttctaaaattttggccataacttttacaaataaggctgctggagaaatgaaagaaagaataaaggctttagtaggggatgtggtagaaggaatgtgggtttctacatttcactctagctgtgtaaggattttaagaagagaaatagataagttaggttatgataaaaattttactatatatgatacttatgatcaaaaaactttagttaagcaatgtatggaagaattgaatataaatgataaagaaatcacagacagagaaataataaataccataggcaatcaaaaggataatttaatatcacctaaggaatttaaaaaaatttctaatggaaattatagaaaagatagaattgcagatgcatatattttataccaaaaaaaattaaagactaataatgcattagattttgatgatttgatatataaaactgtggagttatttaaaacaaataaagatgtattagaattttaccaaagaaaatttaaatatataatggtggatgaatatcaagatactaataaatctcaatatgaattagttaaattattagctttagttcatagaaatatgtgtgtagttggtgatgatgatcaatgtatatatgaatggagaggggcagatataagcaatatattaaattttgagaaggattataaagaagctaaggttataaaattagagcaaaattataggtcaaagggtaatatattaaatgctgctaatgaggttataaaaaataattctcaaagaaaaaataaagttttaagaactgaaaatgaaaatggaaacaagataaaagtatttagagcatattctgatatagatgaagcaaaatttgtagcttccgaaatcaaaaaaataataaaggatagtgaaagatcttttaatgattttgcagttttatatagaactaacgcccaatcccgtatttttgaagatgtgtttatgaaaagagatatcccttatagattaataggtggattaaagttttatgatagaaaagaaataaaggatttaatggcttatttaaagcttataaacaatccattagatgatataagtttaaggagaataataaatgttcctaaaaggagtataggtgatgctacagtaaaaaaagttcaagaatttgcaaatgaaatggatgaatgtatgtatagcgtgcttttagatgcggatcaaatattaacattgtctcaaagaagtataacatctatcaaaaagttcgtaagtataatgaatagctttataagaaaaaaagatgagataagcgtatctgctcttataaaagaaatattagaagaaacaggatacttaaaagaattaaaaaattctaagaatccagatgatgtaagtagagtagaaaatctgaaagaattagtttccgcagcagcagattttgaaagagaatcagaagataaatctttaggagcgtttttagaaaaagtagcattggttacagatatagataattatgatgaaaattcagatagtgttgctatgatgacagtacatagtgctaagggattagaatttcctgtagtatttatggtaggtatggaaaatggaatatttccaggaacacaatcattgtcagatccaaaagaaatggaagagtctagaagactgtgttatgttgctataacaagagcaaaagaacagttatatataacttcagcagaaattagaaaagtatttggaagaaccgtagcctatgctttatcagattttgtaagtgagatatccaaagatttaaaagataacgtaaatattactggagaagtagcaactgataaagtattgcataaaaattttggtataagatcacaaaaaacaaatagtattaattcttataaatcacctagcttaaataatatacctaaaaataatgtggattctaataagcttaatgtaggtttaaaggttaagcataaagattttggaataggaactatagttagtatgagtaaggtttcggatgacataaagttaactattgcttttgaccgtagaggtgttaaaatattaatgcttagtatggcgccaattgaagcggtt

SEQ ID NO: 16306 - DNA, 300 bp, Clostridium botulinum
atgggaaaagagccttcagttaaaagttctgctaatctacttgcaattgtttctttaattatgtctataattgttattttaccaatattaaattggctttttaaaataacgccatggcaaaaattagagggacttcccttgtttttcggactattaataagtccttttggttttcttttgggaatattatcaataaagattcaatctaataaattaggcaaaataggtgttattattaatactttactattcttactaccttttatctatatgactttaggggttttaattttcggacct

SEQ ID NO: 16307 - DNA, 723 bp, Clostridium botulinum
atgattaattatattgcattagaaaataaaggggaaaaaggtgttttaaaaattgatcctcgaacaaagattattttaatgatattaggaaatgtggcaatatttcttgcatttagtattcaaataaaaataagtcttataattttttatttaatttttggttttttatgtggtgcatataagtctccaataaagatatcacttggatattttggtcttattttagtagaatatttgggtggaaaatatttaagtggaacattggcccttatgatagtgacattttcacaatttgtaaagatgatattaccatgtgcattattagcaagcattatgatttctacaacaaaagttagtgaatttatgggagctctaaataagatgagggtatccaaaaaagtcattattccactaacagttatgattaggtattttccagtagtatttgaggattggaagaatataaaagattcaatgagaatgagagatgtgagtcctacatttttgggatttttaaaaaatccatcagatactattgaatgtatatatgttccgatgcttatgtcagcttctaaagtatcagatgaactatcagcagcagctataacaagaggaattgaaaatccaaatccaagaacatgtatggtaaaaatgaaaatgaaattttgtgattatttatctattagtttaatggttacagttattgttttagaagtattaatg

SEQ ID NO: 16308 - DNA, 1278 bp, Clostridium botulinum
atgggcaaaaaaagtaaaacaaaaaatataatagtcaaaatttgttgtataatagcttcttttgctttgtggttatatatatttaacatagagaatccaataaaagagcaaaaaataacggttcccgttaacatagtaaataaggaaagtatgaatgaaatggaattagctttagtgccaaaagaggctagtactgttacattgataataaaaggtaatgtaaaggatatttattctgtaaaagcagaggattttaaagtagaggcagacttgaattcttttggcttaaaaaaaggcgaaaataaaatacctgttaaagtcaagaaaagccctagtaacattaaaatagtaaatgaagaaaatttatggactaaaattactttggataagctaaagtctaagacagtaccagttaaaataaaagtaacaggtactcctaaagaaggatatgcagctttaaatccaattttaaaacaagaaacggctaccatttatggtacagaaacttatattaacaaagtaaaagaagtagtaggaaattgtaacatagaaggtaaatcttcagagataaaaactaatatatctcttcagcccaaaacatatgatggagatataataaatgagatttcagtagagccatccaaagtatatgtagagatacatttaagaagaattaaaaaagtaccgataaatatgaaacttagtgaagacatatcaaacaataaaaatatagaatctataacaccattacaaaatgaagttgagatttctggtgaagaaggggctctacaaaatataaaatatataaatacagaaactataaatgttaactctataaaaatagggcaggaaaatatagaaagtaatttggtattaccaaaaggagttatattagtaaacgataataatactgtaaaatttaaagttaaatttaaagttatagaagacaaaaaggaagaagaaaaaaataaagataaagaggaaaataaagaagataaaataattgagaagaaagttacaaaagatattaatattatgaatgaacctaaagataaagaagtttcattaagtgagcctagtgtaactataaatatgaaaggcaataaagatgttatagacaagataaatgtgaataatataaattgttatgtggatttaaaaaatgttaatttaggagaaaatgtagtaaaagttattgtagatatggaagataataaaatagattatagttctaatttagacagtataaaagtaacagtaaaggaaaaacaggaggaa

SEQ ID NO: 16309 - DNA, 1221 bp, Clostridium botulinum
gtgtcaaaaattatagtaataggcggtggccctgctggtatgatggcagcaattaaagcagcagaaaaacatgatgttatattaatagaaagaaatgaaaagctaggcaaaaaattatatataactggaaaaggtagatgtaacgtaacaagttctaaagatataagtgaattttttgattatattccaactaatccttattttttatatagtcctttatatactttcaccaatgaagatgctattaaattttttaatgatagaaatattaaattaaaagtagaaagaggagatagagtatttccttcttcagataaatcttcagatataatatatgctttagaaaaagaacttatagaaagaaatgtaaagatattacttaataaaagaataacaagaatttataaagaagattcaaacataaagtatgtggaaacagaaaaaggagaaaagataaagggagattattttatattatgtaccggaggagtatcctatcctcaaacaggctccgaaggtgatggacataaaatagcaaaaaaattaggccataatataaaagaattaaaaccatctttagttcccctagaaacaaaagaagaatgggtaaaagacttacaaggactggcattaaaaaatgtagaaataaaaattatagactctaaaaataaaacattatataaaaattttggagaaatgctatttactcattttggcatatctggtcctattgtgctcacagctagtagtgtaatagatagagataatttaaaagtcttcataaatttaaaacctgctctttcatctaatgatttagatgaaagaatacaaaaagattttaaaaaatattgcaatagggattttagtaactctataaatgatttattacctaaaaaacttatagatattataataaacttaagtaaaatagatccaaataaaaaagtaaactccattacaaaagaagaaagaaaaagtttagtgtatctattacaaaatttaccgttaaccgtaaaaggtaaaaggcctataaaagaagctatagtaacctctggaggtgttgatgtgctaaatatagacccatctactatgaaatctaaaatagtaaataatttatattttgcaggagagttaatagacgtagatgcttttactggtggatttaatatacaaatagctctatctacaggttatttggctggtttaaaggtaggtgaaaat

SEQ ID NO: 16310 - DNA, 435 bp, Clostridium botulinum
atgcttaaaaattatataaacgatcaggttgtagaagtaaacgtggaagtgaaaaattgggaagaggcagtaagattaggtggaaagctattagaggaagatggagctgtagaacatagctacattgatgctatggtagatacggtaaaaaacatgggaccttacattgtaatagcacctggaatagcaatgcctcatgcaagacctgaagctggagctaaaaatataagaattggacttttgaagcttaaaaatccagttaattttggcaacgaagaacatgatcctgtagatatggttatattcttatgtgctgtagataataaggcacacattgaggtcttaggggaacttgttcagcttatagaagatgatgactttttaaagattgtacgaaatgcatcaacaaagaaagaaatactagattatataaaa

SEQ ID NO: 16311 - DNA, 396 bp, Clostridium botulinum
atggcagcaggaatgaaaggtaaaagaagtagaagaagaaaagaaagaaaaaatgttgaacatggttgtgcacatataaaatcaactttcaacaattcaatagttacaattactgacagtgttggtaatactttatcttgggcaagtgcaggtggattaggttttagaggttcaagaaaaagcacaccatttgcagcacaaatggctgcagaaacagcagctaaagcggctatggaacatggattaaaaagcatagaagtttatgtaaaaggaccgggctcaggaagagaagctgctataagatctttacaagcagcaggtctagaagttactttaataaaggatgtaactccaataccacataatggttgtagaccaccaaagagaagaagagta

SEQ ID NO: 16312 - DNA, 810 bp, Clostridium botulinum
atgaaaaagaaaatattatctattgctatagcaacaactttaattttaggattagtagcattaacagggtgtggaagtagtaaagaagaggcaaaagaaaagaaaacaattgtagttggagcaacgccggaacctcatgcagaaattttaaaaaaagttaaacctattttagagaaaaaaggatacactttagaaataaaagagtttacggattatgttactccaaacactgcattgcaagatggtgaaatagatgctaacttttatcaacacataccatatttagaagagtttaataaagagaagaaaactgatttatcatacacagttaaagttcatttagaacctatgggtgtatattctaagactataaaggatttaaaagagctaaaaaatggagcaactatatcaataccaagtgatccaactaacggatcaagggcattaaaattattagaaaaagaaggcattattaaactaaaagaaggagaacttgtatcaaagatggatattacaaaaaaccctaaaaatataaaaatagaagaattagatgcagctcaacttccaagaactttaggtgatgtggatgcagcagttataaatactaattatgctgttccagcaaatttaaatccattaaaagacgctcttgccattgaatcaaaggattcaccatatgccaatgttattgtagttaagactgaaaataaaaatgcagagtatataaaagctttagacgaggctattaattcagaagaaataaaaaaatatattgaagaacaatataaaggagctatacttccagctttt

SEQ ID NO: 16313 - DNA, 1770 bp, Clostridium botulinum
ttgatatcggaagatgtcgtccaaaaggtaatagagctaaacgatattgtagatgttatatcaggggacataaagcttaaaaacagtggaagaaactattttgggttatgtccttttcatcatgaaaaaacaccttcctttagtgtgtcgcaggataagcagatatataaatgttttggatgcggagaagcaggaaacgttgtgacttatgtaatgaagactaaaaacgttgcttttccagaggccataaaaattttagcagaaagagtaaatatagatatagaggaagataaaaaagaaaatacaaataatcctaaagataaaatctataaaataaatgtagacgcagctagatatttttttaataatcttataataaataaaaatgctataaattactttttaaataggggtgttacaaagtcaataattaaaaggtttggattaggatattcaaaggatagctgggatgggcttttaaggcatttaaaaacaaaaggatatacggaactagatatgctatctgcaggtcttattataaggagtaaaaatggatcttattatgatagatttagaaacagagttatgtttccagtctttgattatagaggaaaggtaataggatttggaggaagggtactaaataacgctaaacctaaatatttaaactcaccagaaactatggtgtttaaaaagggtataaatttatatggattaaattatgcagtaaaagaaaataaagatagagtattaataatagtagaaggatatatggattgcattacattacatcaatatggcataaaaaattctgtagcatctctaggaacagctctaactacaaatcaagctagacttttaaaacgatatgcagataaagtcataatatcttatgactcagatacagcaggacaattagcgactcaaaggggcttagaaatattaaaagatgtaggattaggtgtagaaatattaactgtaccagatgggaaagatccagatcaatttgtaaaggctcatggaaaagaagcttacctaaagttagtaaaagaagctttacctcttatagagtataaaataaaaattagtaagcaggatttaaatattgggaataaaaggcaagttatacaatatatagatagatatattaaaattatagaaaatttagatcctgtagaaaaagatatgtacataagaagactttcagaggaaactaatatagaaattcagactttatatgaccaattaaacaaaaaaaaccaaaattctaggaaaaatggaaaagaagtgaatatgttagaagcttttggacaaaaattgtatctagagccagcttatataagagctgagagatttatcctgcaattaatgtttaattataataatatttatgaatatataaaaaatagtataaatgagcaggatataatagaggaaacacataaggcaatatataaatatataaaagatactttagaagactcaaatatacaaaataaaaaattacacatagaaactctatgtaataagaatgtagaaacatctaaagaatgggtaaatatattaaataccaattttatttacaaagaagatgaaagtaaaaaatttatagatgatgctattttaaatattaaaaaatataaattagaaaaatataaggaaaatttacttaaaaagattaaagagtatgaagcacaaggaaaattagatgaaactataaaaatgagccaggaactcatcaaagtaaagaaaaccttaggggccatgaaa

SEQ ID NO: 16314 - DNA, 999 bp, Clostridium botulinum
atgtttaacttaaaaaacagaaactttttaacactaatggatttcacaccaaaggaaataaactatttcttagatttagctagagatttaaaaagagctaaatatacaggaactgaagtacaaagattgaaaggcaaaaacattgctttaatatttgaaaaagcttcaactagaacaagatgcgcatttgaagttggagcaaaagaccaaggagctcatgtaacttacttaggaccaacaggaagccatattggtaaaaaagaatcagctgcagatactgcaagagttttaggaagaatgtatgatggtatagaatatagaggatttggtcaagaaatcgttgaaactttagctgaatacgctggagtaccagtttggaacggattaacagatgaagatcacccaactcaaatattagctgacttcttaacaataagagaacatttcaataaaccattaaatgaaatcaaatttgcttatgttggagatggtgctaataatatggcaaatgctcttatgataggtgctgttaaaatgggaatggactttagaatagtttctccaaaagaaataccaactgatgctgcattagttgctaaatgcaaggaaatagcagctgaaactggcgctaaagttacaataactgataatatcgaagaaggtgttaaaggttgtgacgttctatatacagatgtttgggtatcaatgggagaaccagattcagtatgggaaagcaaaataaaattattaactccatacagagttgacatgaacatgataaaaatgactggaaatcctgatgctaaattcatgcactgcttaccagcattccatgatgaagaaacagcagtaggtaaagaaataaaagaaaaatatggtttatcagaaatggaagtttctcacgaattattcgaaagcaaatactcaattgtatttgatgaagctgaaaacagaatgcacactataaaagctgttatggttgcaacattaggagatcaa

SEQ ID NO: 16315 - DNA, 972 bp, Clostridium botulinum
atgtttagaagacacagaagattaagagagaatgaagcaataagagctatggtaagagaaacagtgactagagaagaggattttatatatccaatgtttgtggtagaaggagaaaatattaaagaagaaatatcttcactaccaggaaattatcattattctatagatagattagaagaattagtagaggaagtaaaaaaatcaggaataaaaggtataatgatatttggagtaccagatcataaagatgaatgtggttccgcagcctttgatgataatggaatagttcaaaagggtataagaagattaagagaattaatgccagaactatatatagttgcagatgtatgcatgtgccaatatacaagtcatggacattgtggaataatccatggtcataatgtggacaatgatgaatcattgaaatatttagcaaaaatatctttatcttatgcaaaagccggcgcagatatgatagcaccttcagatatgatggatggaagagtttatgctataagaaaaatattagatgaaaataatcttaaacatgtaggcataatggcatatagtgcaaaatattgttcagctttctatggtcctttcagagaagcagctaattcagcaccacaatttggagacagaaaaacttatcaaatggatccagcaaacggaagagaagcaatgcttgaaatagaagacgatataaatgaaggtgcagatatagtaatggtaaaaccagctctgccatatttagatgttataagaatggcaaaggatagatttgaattcccgttagcagcttacaatgtaagtggagaatatgctatggtaaaagcagcagctaaacaaggattaatagatgaaagaagagtagccctagaaatgctaacatcaataaaaagagcaggagcagatataataataacttattatgcatttgaagcaagtgcttggctaaaagaagacagaaaa

SEQ ID NO: 16316 - DNA, 2232 bp, Clostridium botulinum
atgcaggaaatacagggatttatagaggatatactttttaaaaatgatgaaaatgggtatgtagtggcaaaaataaggaagaagaaagagcttataaccatagtcggatgtatgccctacataacagaaggacaaaacttaaaattaaaaggtgaatgggtaattcatccacaatttggtaatcaattcaaagtagaaatatgtgaagaaatagtacccgatactgtagctggcatagaaagatatttatcctcaggaatcatatcaggtataggcccagtgactgcaaaaaaaattgtaaaaaaatttggagaagaaacattaaatatattagacaataatatagaaagattaacagagatagagggaataggaaagaagaagatagaagtaatatatgattcctatataaaacaaaatgaagtgcgaaatataatgatgttttttcaaaattacggagttacacctaaccaatgcatgaaagtttataaaagatttggagaaaattctatatcaatagttaaagagaatccatatatacttacggaagaaataagaggaataggtttcaagacagcagataaaatagctaggagcttaggaatagcctctaattcaccttttagaattcagagtggaataaattatataataaatggattctgtagtttaggaaatacttatatgcctttagagaagcttataagtgaggctatggacatattaggagtaaaagaagaagaaatacatgaaaatatatataataatgtagcagaaaataaattaaagatagaaaaagtaaaagaacgaagttgtgtttttactctaccgtattattattgcgaattaggagttacaaaaaaaatacttagtttatctttgtcacaatatgataatttaaatataaatatagaagacgagatagtgaggtttgaaaaaaataataatataaaatttcatgattctcaaagagaggctataaaaggtgccttagaaaatggagtagaaataataacaggaggccctggtacaggaaaaacaactattattaattgtataacagagatatttgaaaaagctaatatgaaagtttatatggcagcacctacaggaagagcggctaaaagaatgtctgaaactacaggtagagaagctaaaacaatacataggatgttagaaatgggtgtatctgaggatgacacagaagaagttttttctaaaggtgaagaaactcctttagaatgtgatgtagtaataatagatgaagcttccatgatagatataatattaatgaatacactgttaaaggccatagctttaggtacaagaataataatagttggggatgtagatcaacttccctcagtaggtccagggaatgtattaagagatttaatagaaagtaagtgtgtaaaggtagttagattaaaggagatattcagacaatctaaagaaagtatgattatagtaaatgcccatagaataaatgatggagagatgccaattataaataaaaaagataaagatttttattttatagaatgtagtgaacctaaaaaaatagttaatacattattagaactttcaaatagaagattgcctaaatttaataaaagttggcataaaattcatgatatacaaatactatctccaatgagaaagggaattctaggagtttctagtttaaataaggaattacaatctgttttaaaccctaaaaatgattcaaaaaaagaaatggaatttaaggactatatatttagagtaggagataaagttatgcaaaccaaaaataactactctttaaagtggaccagagcaagtggtgagggggaagcagaggggttaggaatatttaatggagatgtaggatatatagaggatatagatgaggaaaaagaaacaattcaggtcttatttgataatgaaagaagagtagtatatgaaaatttatatctagatgaaatagatttagcttatgctgtaactattcataaaagtcaaggtagcgaatttccagtagtaattatgccagcttttaaaggtcccccacttttaatgaatagaaatttattgtatacaggaataacaagagcaaaaaggcttgttgtcttggtaggatctttaaaagctattaattttatggtacagaatgataaaatttttgaaagatactctcttttgaagtggcgtataagtaatattttagatactgaaattataaatggagaa

SEQ ID NO: 16317 - DNA, 249 bp, Clostridium botulinum
atgagtggagataaaacaatacaatttgatcctgtagaaaataaaaaaacattaacgaaagaaatactcactaaagtttataattctttgctagagaaaggttataatccagtaaatcaactagtaggatatttaatctctggtgatccaacttatataactaattataatggagctagatctttagttataaagctagaaagagatgaaatactagaggaagtaataaaatcatatttagggataaat

SEQ ID NO: 16318 - DNA, 426 bp, Clostridium botulinum
atgtatacagaaaaggtaatggatcattttagaaatcctagaaatgtaggggaaatagaagatgctaatggtataggtgaagtaggaaacgctaaatgtggcgatataatgaagatatatttaaaagttgaagataacataattaaagatgtaaaatttaagacttttggatgtgcatcagctatagcatcatcaagtatggctacagaacttataaaaggaaaaactttagaagatgcatggcagcttacaaataaagctgtagcagaagctttagaaggattaccaccagtaaaaatgcattgttctgtacttgcagaagaagctatacacaaagcaataaatgaatatagagtatctcaaggtttagaagcatggaaaatgaagactcattctgaacatattcacgaacatgtacacggccat

SEQ ID NO: 16319 - DNA, 1662 bp, Clostridium botulinum
atgaataagacatggtggaaagaagctgttgcatatcaaatatatccaagaagttttaaggattcaaatgatgatggtataggagatatagagggtataatttcaaaattagattatttaaaagatttaggtatagatataatttggatttgtcctatgtataagtctccaaatgatgacaacggttacgatataagcgattataaagctataatggacgaatttggaactatggaggattttgataagttactacaaaaggcccatgaaaaaggtatgaagcttataatagatttagttataaatcataccagtgatgagcataaatggttcattgaatcaagatcttctaaagataatccaaaacgtgatttttatatatggcgtgatggtaaagatggaaaggaacctaacaattgggaaagtatatttaaaggttctgcctgggaatatgactataatacagaacaatattttcttcacttatttagtaaaaagcaaccagatttaaattgggaaaatgaaaatgttagaaatgaattatataaaatgattaactggtggttagataagggaattgatggatttagagtagatgctataagtcatataaaaaaagaaaagggattaaaagacatacataatccaaaaaatttagattatgttccttcttttgaaaaacatatgaatgtagagggaattcaaaaatatcttaaagaattaaaggaaaatacctttgataaatatgacataataactgtgggagaagccaatggagtaaatataagtcaagctcctcaatgggtaggagaaaaagatggcaaatttaatatgatatttcagtttgaacatctagatctttgggatgtagatcataaagaacagtctacaataaaaaaattaaaagaagtattaagcaaatggcaggaaggtttagaaggagttggatggaatgctttgtttatagaaaatcatgatattcaaagggtagtctcaactttaggagatgataaaaacttttgggaagaaagttcaaaagccttagctcttatgtattttatgcaaaaggggactccatttatatatcaaggacaagaaataggaatgactaatgttaaatttgaaggtattgaagattataatgatataaaaactataaatatttataaagaaaaaataagaaaaggtataccaaaagatcaagccctcaaatatgtatgggaaacttcaagagataactcaagaacaccaatgcaatgggataccacagaaaatgctggattttcaaaagaaaaaccttggatgaaagttaatccgaactatgtagatataaacgctagggaacaagaaaataacctaaattctattttgaacttttataaaaaaattataagagtaaagaaagaaaatgaggcacttatatatggaaaatataatttgattttagcgcatcatgaacaaatatatgcttacacaagaactttacgaaatgaaaaatttatagtaattgctaatttaacaaataaggaagctaaatatacttataaaagagaaaaactaaattataaaggattgataatttcaaactattcaatagagaaacatgaggatataacagaaatattattaaagccttttgaagcgagactttataaaatagtt

SEQ ID NO: 16320 - DNA, 1356 bp, Clostridium botulinum
atggctaaaaataaaattgtttatatatgtcaacaatgtggatatgaatcgataaaatggttaggaaaatgtccaggatgcaattcatggaatagtatggtagaggaagaaaaacaatcaactaataagactataaaaaatataaatattaaatcagagcctaaaataatatctacaataaaatcaagtgaatatgagagattagatactggaataaatgaactgaatagagtcttaggcggtggtatagttaagggctctttaactcttatatctgggtctcctggcataggaaagtctacaatacttttacaagctgctaataatattgctactaagtatggtaagattttatatgtgtctggagaagaatcagaagagcagataaaaatgagagcagataggcttaaggtgatatcaaaagatatatacatactttcagagacaaatgtggatataataaaagagcatattactacaattaatcctaaatttgttataatagattctatacagaccctttttaaaagtgaactatcttcagctccaggtactgtgtctcaagttaggcaatgttctaacgatattatgcttataagtaaaagtaataacatacctttttttatagtagcgcatgttacaaaacaaggagaattagcaggacctagagttttagaacatatggtagatacggttttatcttttgaaggagaaagaacccaggaatttaggattttaagaacagtaaaaaatcgttttggaactacaagtgaaattggagtttttgaaatggcaggagaagggttattagaaataagcaatccctctgctgtatttttagaagaaactgaatttcaaagggaaggttctgtaataataggtataatggaagggactagaccaatacttatagaaatacaagcattagtaagtgaaacgaaagcttatatgccaagaaggacggcagtgggagtagacacagctagattgaatctaatattagctgtgttagaaaaaaaattaaatatacctttctataattgtgatgtatatgttaatgtagtaggaggattagatttaacaggaacttttgctgatttgggattagcattagctttattatctagtgctaaatcaaaagatataaagttacctaaagttttagtggttggagaaataggacttacaggagaggttcgccccgtaagtttttgtgatagaatagtaaatgaaggtataaaaatgggatttaccaatataattatacctgatagaaataaagacaaaatttctgttaaaaataatgttaacctaattggtatatcttctttaagagaaggtattaataaagtattt

SEQ ID NO: 16321 - DNA, 2625 bp, Clostridium botulinum
atgaataaagaaagattattaatattagatagtaatagtttattaaatagagctttttatgcattacctgatcttatgactggagagggaattcatactaatgctatatatggttttgttaatatgcttttaaaaatgaaagaagagataaacccagattatatagttgcagcttttgatagaaaggcacctacctttagacatgaagaatataaggactacaaagcaggtagaaaaaagatgccagaggaacttgcacagcagtttcctatagtaaaagagcttttgtccgcattagccataaatatattcgaaattgatgggtttgaagcagacgatctaataggaactttatctgtatttgcagaggaaaaaggaatagaagtttacatagttacaggagataaagatgccctacaattggctacagataatgtaaaagtagttataactaaaaagggtattacagaaaaagaaatttatgataaaaatagaatggtagaggagtttggagttactcctaaagaatttatagatgtaaaaggtcttatgggagacacatctgacaatatacctggagtacctggaataggtgaaaaaactgcctttaagcttataaaagaatataaaagtatagaaacagtacttgaaaacatagagaatataaaaggaaaaaaattaaaggaaaatttacatgaatatagagaacaggctatatttagcaaaaaattagctactattatatgtaatgttcctatagatatgagtttagaagatataaaatcaaaggaagaatatgatataaacaaagttagagaaatgtttgaaaggttagaatttaagtctttaatgaataaagtaggtaaaagtgatgaggaagaaacggtagaagaggaagtttcttataaaaatatagtttctttagaagaatttaaagatctaaaaaataatataataaaatataaagaaaatgatttatatctgtattttgaattagaagatatagttttattttctaaatctagagtaaaaacattatatgctaattttaaagatgaagtttatagaatagactttgaaatgcttataaaaaatactaaagaacaatttatagaagtatgtaaagaaatatttgaaagtaaagaaattaaaaaaattacctatgatgcaaaaaatccaaggactatattaagaaagttaggaatagagtttaatggtataaaatttgatataaatttagctgcatatctaatagatccagtgaggaaagaatatgagatatctagtttagcttcagaatacttgtttaaaaatataaacagagaagatgaatttttaaaaataaaagaagttaatataatgcctaatttatataaagtgctggaagaaaaaataaaagagcaagatatggaagaattgctatataaggtagaacaacctcttacagaaacattatcagctatggagacagaaggttttaaagttgataaagatatacttttacagctagagaaaaaatttaaaggggaaatagaaagtactcagctagaaatatattcaatgtctgaagaagaatttaatataaattctcctaaacagttagggaaaatactctttgaaaaattagatttacccgttataaagaaaacaaagacaggatattctactaacgcagaggtactggataaattaagagataaacatccaataatagataaaataacttattatagacagttaacaaaaatatactctacttatatagaagggctaaaagctgctatagatgaggatggaaaaatacattcaaattttaatcaaactgttacagctacaggaagattatctagtacagagcctaatcttcaaaatatacctataaaatatgaaatgggaagagaaataagaaaggtatttatccctaatacaggggattctgtaatactttcagcggattattcacaaatagaattaagagtattagcacatatatctgatgataaaaatatgataagtgcctttaatgaacatgatgatattcatactaaaactgcatcagaagtgtttaaagttccaatagaagaagtaacacctcttatgagaggtaatgctaaagcagttaattttggtatagtttatggtataggagactttagcttatctcaagatttaaatataactagaaaagaagcaaagcagtatatagatgcttatttggagagatatcctaatgtaaaactttatttagaaaatatagtagaagaagctattgaaaaaggttatgtaagtactatattaaatagaagaagatacataaaagaggttaagtcctcaaataaaatagttaaagctgcaggagaaaggctagctatgaatagtccaatacaaggaagtgcagcggatataataaaattagctatggtaaatgttcatagaaaattaaaagaagataattttaaaagtagtataatattacaagtacatgatgaattaatattaaatgtccataaagatgaactagaaaaaatcaaagctttagtaaaaaaagaaatggaacaggttttagaattaaaagttgggttagacgtggatataaacataggtaataattggtatgaggcaaag

SEQ ID NO: 16322 - DNA, 762 bp, Clostridium botulinum
ttgcactataaaataaaagaagttgctgacatggccggcataagtgtacgcatgcttcatcattatgacaagataggattacttgatccagagtctgtaagtgatgcaggttatagactttattcagatgaaaatcttgatagattgcaacaaattctgttttttaaagaactgaattttcccctccaagaaataaaaattatcttggacagtccaaattttaacaaaaaagaagctttagaaactcataaacaattgcttttagagaaaaaaataagacttgaaaaaattatacaatctgtggataaaactataagtagtatggaaggagaatttaaaatgaataaaaaagaagtgcttggagcatttgatatgactgaaatagaagaacatcaaaagaaatattcagaggaagtaaaaaataaatatggaaacacctctgcttataaggaaagtaatgaaaaaacttctaaatatacaaaagaagattggaataatataatgaaagattgggatattatttataaaaaactagcaaatcttatggacaaaaatccagatgataaagaagttcaagaatatatacaccaatttagagagcatatttcaaaaaacttttatgattgtactcctgaaatatttagagggcttggagaactttatgttaatgatgaaagatttactgctaatatagataaatataaaactggtctttctaaatttttaagggaagctattaatgtttattgtgacaatataaaa

SEQ ID NO: 16323 - DNA, 888 bp, Clostridium botulinum
atgtacaaaatattagaaaagaaaaatattgcacctagtatatttttaatgaaaattgaagcaccaagagtagcaaagtcagcaaagccaggacaatttgttatagtcaaaatggacgaaaaaggagaaagaatacctcttactatatgtgattatgataaagaagagggtagtgtaactattgttattcaagctataggttcttcaacaaaaaaaatggattcttttaaagaaggagatagctttagagattttgtaggaccattgggacaaccttcagattttgtaaatgaaaatttagatgatataaagaaaaagaaaatggtgtttatagcaggaggtcttggtgcggcaccagtatatccacaaataaaatggcttagtgatcatggaatagaagcagatgttattattggatgtaaatcaaaagaacatttaatattagaggaagaaatgaagaaagtagcaggtaatgtttatgtggctacagatgatggttcttacggatataaaggacttgtaactaatttattaaaagacttaattgataaagaaggaaaaacctatgatcatgtagtggcaataggccctatgattatgatgaaatttgtaactttacttacaaaggaatacaacataaaaactatagtaagtttaaacactctaatggtagatggaacaggtatgtgtggggcctgtagggtaactgttggtggacaaactaagtttgcttgtgtagatggtccagaatttgatggacatttagtagattttgaagaggctattagaagacaacaaatgtataaaactgaagaaggaaagaaattattagaagatcaagaaaaagcagaaggacatgtatgccatgtaggattggatggtgataaa

SEQ ID NO: 16324 - DNA, 1317 bp, Clostridium botulinum
atggcaaaacctatagttgcaatagtaggaagacctaatgtagggaaatctacactatttaataagttagcaggaaaaagaatatctatagtacaagatacaccaggggtgacaagagacagaatttatgcagaggcagaatggctaaattacaaatttacaatgatagatacaggtggtatagaaccaaaaagtgaagatataatagtatctcaaatgagaagacaggcgcaaatagctatagaaatggctaatgtaataatatttttagtagatggaaaagaaggattagcaccagcagacaaagaagtagcacaaatgcttagaaaaagtaagaaacctgtagtgcttgtagtaaataaaattgataaattgaaagatgagaataatgcttatgagttttataatctaggtataggggatcctgtaaccatatcttcatcacaggcattaggcttaggtgatatgctagatagagttgtagaatattttaaagatgatgaatcagctggagaagatgatgagagaataaatatagcttttataggtaaacccaatgtagggaaatcatcacttataaataagttattaggagaagaaagacttatagtaagtgatataccgggaaccaccagggattccatagatagttatgtagatacagattttggtgagtttactttaatagataccgcaggattaagacgtaagagtaaagtaaaagaagaaatagaaagatattctgtaataaggacttatgcatctatagaaagagcagatgtatgtatacttatgatagatgctacagagggtatatctgagcaggatcaaaaaattataggatatgctcatgatataaataaagctattttagttatagttaataagtgggatctagttgaaaaagacgataagactatggataaatttaaaaaagagttaaaagttaatttatccttcatgccttatgcaaaatacttatttatatctgctaaaacaggccaaagggttgtaaaagttttacaaaccgctaaagaatgttatgataattataataagagagtaaaaacaggagttttaaatgatgtaataagtcaagctattatgatgaaagagcctcctatagtaggaacaaaaagattaaaaatttactatgtaactcaaataggaacaaaaccaccaacttttattttctttgtaaatgatccagcttgcatacatttctcttatcaaagatatttagaaaatcaattaagagaaaattttgatttccaaggtacaggaataaaatcagagtttagagaaagaaaagaaaaa

SEQ ID NO: 16325 - DNA, 1299 bp, Clostridium botulinum
atgaagaaaacatcagcaaaagatttcatagttattggttttgcacttttcgcaatgttttttggggcaggcaacttaatctttccaccttttatgggaaaattagtaggggatcaggcaccagcagcaataataggttttttaattaccggagtaggtttaccattaactggtataatagcctgtgctaaaataaatgggacattttcagatatatcaggaagagtaggaaagatatttgctattatatctacaacagcattaatattagctataggacctatgcttgctataccaagaaccgcagctaccacttatgaattagcaatacatccaatatttccgggggtagctccagtagtagcagttataatttattttcttgtttgtttagcatttgtattaagaccatcaggaatagtagatagtataggtaaagttttaacaccagctttattagttatgttagcaattataataattaaaggattagtttctcctctaggacctactatatcaactggatttaaaggggctttttcaaaatctttacttgaaggataccaaacaatggatgctatggcatcagtaatatttgcatccataataataacagctgtaagagcaaagggatatacagagaaaaaagatattgtaagtcttactataaaatcaggtattgtagctgcagtagggttggcttttgtttatggaggacttatgattctaggaagtcatacttcacaaataattcctggagaaataggaagatcagctctagttgttgagatagttaaaagacttttaggtaatgcaggtacagttatattaggattagctgttggacttgcatgtcttacaacagcaattggacttatatctacaggagcagaatatttcagtagtttaactaagggtaaagtaccctataatgttttcgcaattattataagtgcagtaagtgcattacttggaacaggtggagttgataaaatagttaaattctcagttccaatattgcaagttttatatccaatagtaatagttttaatagcaataactttagcaggaaaacttgttaaaaataatactgttgtaagaattactgtttacactacattagtagtaagtttcatagatacaataaatatattaacaaatggcaatgtagcttttataaaaagtttattaggaattataccactttctaatgctggtttttcatggttaattccagcagtcatagcatttataataggtacagtagcctttggaaagaaacaagatatagcagatgct

SEQ ID NO: 16326 - DNA, 2796 bp, Clostridium botulinum
atgggattaactccaatgatgagacaatatttagaggtaaaagaaagctgcaaagattgtatattgttctttagattaggagatttttatgaaatgttttttgaggatgctaaagttgcctcaaaagaactagagctagtattaacaggaagagattgtggcctagaagaaagagctcctatgtgtggtattccatatcatgcggctaatacatatataggtaggttagtaagtgcaggctataaaatagctatttgtgaacaattagaagatccttctgcttctaaaggcatagtaaaaagaggcattataaaaataattacaccagggacttacactgactcctcattcttagaggaaaataaaaacaattatataatgagcttttatttagatgataatatgtgtgctatgagctttgcggatatatctacaggtgagttcaactcaactcatagtaattttaaagaagctgtagtattggatgagatatcaaaatttgctcctcgtgaaatagttttagaggaaaatataaaggaaagcttcatacatactataaaagaaaggtttcctaatatatctataagtaaaataaaacaagaaaattttgattataatatagataataatttaaaggagcaatttaataattttaatgaaaatgaatatgaaaccatagtaaaaaaatccgctaatggtcttctatattacatatttcacacccaaaagaatatattatctaacattaataaaatagactattacagtatcgtagactatttgactatagatgtaaattcaagaagaaatttggagataacagaaaatttaagagaaaaaactaaaaaaggctctcttttatgggcattagataaaactaatacagctatgggtggaagacaattaagaagatggatagaacaaccacttataaataaaaatcctatagaaaatagattaaatgctgtagaagagttattaaacaatatctccctacaggaagacttaaaagaagatttaaaatctatatatgatatagaacgaatagtgggaaaagtagcctctaaaagtgttaatgcaaaagaacttatatctttaaaatgctcaataggtaaggttccttatataaaagaatacttatcaaattttaaaagtgatttatttttaaacatggaacaatgtatagatactttagaagatattcacaaattgctagataaagctttattagataatccatctttatctgtaaaggaaggtaatataataaaggaaggatttaatgaagaagtagattcactaagagaagcgaaaagtaacggtaaaaaatggatagcttctttagagcaaaaggaaaaagaagaaacaggtataaaatcattaaaggttagctataataaggtattcggttattttatagaaattacaaaagcaaatttaaacttagtaccagaaggaagatatataagaaaacaaactctatccaatgctgaaagatatattactcctgaacttaaagaaatggaagaaaaaatattaggagcagaggaaaaacttatagatatagaatataaactttttactgaaataagagattttatagaagaaaatatagatagaatgcaaaaaactgcaagaataatatctgatatagattgcttatgttcactagctactgtagccttagaaaataattatataaagcctaatataaatgctaaagatgaaattcttatagaagagggaagacatcctgtagtagaaaaagttatacctaaaggtgaatttatatctaatgatagcttaatagatacaaaagaaaatcaacttatattaataactggccctaatatggcaggaaaatctacttatatgaggcaggtagccctaattacaattatggctcaaataggtagctttgttcctgctaagaaggctaatatttctatatgtgataagatatttacaagaataggcgcctcagatgatttagctgcaggcaaaagtacttttatggtagagatgtgggaagtttctaatatactaaaaaatgctacatcgaaaagtttggtgcttttagatgaagtaggtaggggaactagcacctatgatggtttaagcatagcttggtctgttatagaatatatatgcaataataaaaatttaagatgtaaaaccttatttgcaactcactaccatgaacttacaaaacttgaagacaatatcgagggcgttaaaaactattccgtatctgtatcagaattagaaaatgaaatagtgttcttaaggaaaataataaaaggtggagcagatcaatcctacggtatagaagttgctaaactagctggcctaccttcccctgtaataaatagagctaaggaaatattacaacatattgaaggtgacaaggaagaaaactcccttaatattgccccttctaaagaatataaaagcaaagattatattgaagtatcaaaggatacttcaaatactaaaaataatcttggaagtgaaataaaacatgatactttatctgaaactaatactgatactataatagaggatgaaagcactaaagaacatctttcttctaataaaaaacaaataaactgtagaataaatgatgaaaagtctataaaaaaagaagtagcagtggattcttttcaaataaattttgaatatataaaaagagataaaataattgaagaaattaaaaatatagatatactcaatatgaccccaatggaaggttttaataaattatatgatataataaataaaacaaaagatatagat

SEQ ID NO: 16327 - DNA, 969 bp, Clostridium botulinum
atgaaaaagttaacatacgcagaagcaataagagaagcaatgagaactaaaatgagtgaagatgataaggtattaatttttggggaagacgtaggagcttttggaggatgctttggagtaaccggagatttatacaaagaatttggagataaaagagtaagagatactcctatatctgaaggcgcaattgcaggatgtgctgttggagcagcagctacgggtctaagaccaattgcagagataatgtttggggactttttaacggtgtcaatggatatgatcgtaaatcaagctgcaaaaatgagatttatgtttgggggaaagataagtttacctatggtagttagattaccagagggagcaggtgtacaagcagctgcacagcattctcaatcccttgaagcttggcttacacatgtgccaggtcttaaagtggtatatccatccacaccacaggatgcatatggacttatggtagcagctatagaggatgataacccagttatgtttatggaacacaaatttttatatggcatgaagggtgaagtttcagatgaaataaaaagaatacctttaggtgtggcagatattaaaagagaaggaaaggatgtcactattatagctacaggtaaaatggtacacgaatctttaaaagcagcagatatactttcaaaggatgggattgaagtagaagtgatagatccaagaactttatatccactagataaggaaactatatttaattctataaagaaaaccaatagagctgtagttgtaacagaggaaaataaaagaggagcctatagtggagaaatatcttccctaataaatgaggagattttcgattatttggatgcacctgtaggcagaataggagcccttaatactcctataccattttcacctacactagaaagttatgttattcctgattctaaggatatagttaaaaaagtaaaagagctattc

SEQ ID NO: 16328 - DNA, 942 bp, Clostridium botulinum
atgaaaagtagttatttttcatttaaaggtagggaagatacaaagataaacgtttataagtgggaaccagataaagagcaggatataaaggcaattatacaaatatctcatggtatggccgaaactgctaatagatatgaagagttggcttcctatttaagtgaagctggatatatagtttatgcaaatgaccacagaggacatggtaaaagtgcattaagtttagaccaattaggatacttaggggaagaagatggctttatgtcaatggtagaagatgtacatacattaaataccataataaaggaagaaaataaaggattacctgtatttttattggggcatagtatgggttcttttataagtcaaagatacatacaattgtatggacaagaattaaatggagttatattagtaggaactaatggcaatcaaggccccttaataaatatggggatcttagtagctaaattggaaatgaaatttaaaggaagaagacataaaagtaatcttttaaataatctgtcctttggaggatataataaaaaatttgaaccaaatagaacagaatttgattggttaactagagatgaaaaagaggttgataaatatataaagaatgaatactgtggagcgatttttccaacctccttttatcatgatttcttaaagggattaaagtctatatggaaagaagaaaacaagaataagatacctataaatttgcctatatttataatagcaggagataaagatccagtaggaaactttggtaaggggatattaaatttatataatttttataaaagtataggtgtagtggatgtaaactataaactatataaagaaggaagacatgaaattttaaatgagataaataaaagagaagtgttccaagatgtgttaaattggattgatagcaaatataataaaactattaag

SEQ ID NO: 16329 - DNA, 444 bp, Clostridium botulinum
atggatataagtgaagctaaagtattaatatttaaaataaatggagaatactatgccgcagatatcatggaaatagaaagaatactaggttatgaagaacctacaaatttaccggatgcaccaagttttgttgaaggagttataaactatcagggtaaaatattacctatagtttcccttgctagaaaatttaatttaaaagaagaagaaattaaaaatgaagctaaaataatagtagttaaggaagaagaaaataaattaggtataatagttgatgtagtttcagaggttaaagacgtaaaattagataatatagaacagcccccagaaattgtagcaggtatatccaaaagatatataaaaggattaataaaaatagaaaatcaaataataatatttttaaatttatcaactatactaacagaagaagaaaaatcaatgata

SEQ ID NO: 16330 - DNA, 468 bp, Clostridium botulinum
gtggttcaaagtggagtaaaaattaccaattggggtggagatatgtttataggggagtataatcatggcttggatacaaaaaatagaattataatcccggcaaagtttagagaggaattaggaaagaactttgtattgactaaaggattagatggatgtctttatgtatatcctaaaagccagtgggaagttcttcagaaaaaattagaaactctacctttaaccaataaaaatgctagagcttttgtaagattctttttctcaggagctcatgagttagaactagataaacaagggagaacattaataccacaaaaccttttagaatatggacaaatacaaaaggaaatagtaagtataggagtttccaatagaatagaaatttggagtaaggaaaaatgggaagaatataataattctaatatagattatgatagtatagcagagcagatgagtgaacttggaata

SEQ ID NO: 16331 - DNA, 252 bp, Clostridium botulinum
gtggaaagatcaaatagaaagacaagaatcggtagagtagtttcaaataaaatggataagacaatagtagttgcagtagagacaaaggttcgtcatccattatatggtaaaataatgaacagaactactaagtttaaagctcatgatgaaaataatgcagctaatataaatgataaagtattaataatggaaacaagaccattatcaaaacaaaaaagatggagacttgttgaagtagtagaaaaagctaaa

SEQ ID NO: 16332 - DNA, 1338 bp, Clostridium botulinum
atgaattataaggaattagcattttatattatgaaaaagtactttgatgattttaatgaagaggaacttaaagaatgtatagataaagcctatgacagtaagtttgagaatcctcttatagcaccattaaattataaagctggagcatattttttagaactttatcatgggaaaacattagcctttaaagatatggctttaagtatacttccgcaccttttaaaaacctcagcaaaaaagatgaatataactaaagacatagttatattaacagctacttcaggagatactggaaaagctgctctagaaggatttgatagtgtagagggcacaaagatagtggtattttatcctaaggatggggtaagtgaaattcaaaaaagacagatggttacacaagaggggaagaatactttcgtagtaggcatagatgggaatttcgatgatgctcaaagtggagttaaggaaatatttaatgatagagattttaatggattattagaggaaaggggatacatgttttcctctgctaattctataaatataggaagactagtaccgcaaatagtatactatgtttattcttatgtgaatctacttaaagataaaaaagtaggggaaggagaaaatataaacatagttgttcctacaggaaattttggtaacattttagcagccttttacgctaaaaatatgggaataccagtgggaagattaatttgtgcatctaatgagaataaggtgctaacagattttataaatactggaatatacgataggagaagaaaattttctgttactaattctccttctatggatattttaatatctagtaacttggaaagatttttgtatgaaataagtggaaaagattcacgccttataaaaaatctcatgacagaacttaaagaaaagggtaaatatgagataacagaggaaatgaagaagagattagatatattatatggagatttttcggatgaagatgatacacttaaagctattgaaaaagtctatgaaagttctgattatcttatagatactcatactgcagtagcttatgatgtttatgaaaaatataaaaataaaacaggagataatagtgctactataatagcatctaccgcaagtccatttaaatttcccaaaagtataaatgaagtattagatatgggacatgaaaatgcttcagattttgaattagttaatttattttcagataaattaaatttaaagttgcctaaaggattagaaggactagaggaaaaagaaatttgtcataaggtcacttgtaaaaaggatgaaatgaagaaagtaattaaaaattttttaggaata

SEQ ID NO: 16333 - DNA, 725 bp, Clostridium botulinum
aatatgaatagcagatatataggggcattagtattagcaccctttgtaatattcctatttataggaggagtatttttaaagtggggtatattagcactttctttaggtggtatgtacgagttttataaagtagttaaaaacaaagatatacatccaatagaaataataggatacttattatgtttaatatactatataccacttttgaatagtataaattataaaaatattttttatataattacattagctgtttttatacttttagctataccagttataaatttaaagtataattttatagatgtggcaataactcttttaggatttttatatgttcccatattttttagttttatagttttagttaataataaaacttacggaaattatttagtgtggcttatatttatttctgcttggctctgtgataccacagcttattatgtaggaaagtatttaggaaagaataaattatgtcctaaagtaagtcctaaaaagactatagaaggttctataggcggaataataggagcctcattagcctgcactatatttggaatggttatatttagattaggagttagcataggaattatacactatatattaataggtcttatatgtggcatagtttgtcaatttggagatttggtagcttcatcaataaaaagatatgcaggagtaaaagattatagtaatttaataccaggccatggaggaat

SEQ ID NO: 16334 - DNA, 777 bp, Clostridium botulinum
atgatttctagtaaagataatcaattaataaaagaagtaagaaagttaagagaaaagaaatatagaactcaaaataaaagctttattgtagaaggatttagattctttgaagaggcattgaaatctaatagtagtgtaaataaagtttttatagaagaaaaaagcttgaataaattagaagaactatacaaaaaatataacataaataatgatatagaaacttatgtggttagttattctgttttaaaaagtataggtaatacagaaaatcctcaggggatagtatcagtaataaactattttaaaaaagaaaaattagatttacaaaatggtttttatattttagtagataaagtacaagatccaggtaatatgggaactataataagaactgctcatgcggcaggagccttaggaattataacaactaaaggaacagtagatatatataatgaaaaaacattaaggtctactatgggatctattttttatattcctataatagaagatgaaaatttagaagtagtgaaatcgctacgaaaaaaggggttcaaactattagtaagttctttagatacaaacagtaatttttatgatgtaaatatgaaagataatatgataattgctgtaggaaatgaaggaaatggaataagcgaggttttgaatactcttagtgacataaaggttaaaatccctatgcctggagcagcagaatcgttaaatgtagcagtagcatgttctataatgacttttgaaagaataaggcaaattaataaa

SEQ ID NO: 16335 - DNA, 1077 bp, Clostridium botulinum
gtgaatattttgaaaaagaaagttttagttggtatgagtggaggcgtagatagttcagtagcagcgtatcttttaaaggagcagggttatgaggttataggagtaactatgcaaatttggcaagatgatgaggaatttatagaaaaagaaggtggatgttgctctttaagtgcagtagcggatgctcggagggtagcaaataaaataggcattcctttttatgttatgaattttaaagatgcctttaaaagaaatgttattgattattttgtagatgaatatatggaaggaagaacaccaaatccttgcatagcctgcaataaatttataaagttttcttcatttctggataaagccatggctataggtatagattatgtggctacaggtcattatgctatcatagaaaagcataatgatagatatataataaagaaatcagaagacgataaaaaagatcaaacctacgctctttataatcttacacaatttcaattggaaagaaccttgatgccctgtggacagtataaaaaaagtaaaattagagaaatagctaaagaaataggtcttagggttcacaataaaaaagatagtgaagaaatatgtttcataccagataatgatcatggaaggtatattaaaaatagatttcctaataaggttagagaaggtaactttgtagataagcaagggaatatattaggtactcataaaggaatagtatattataccataggacaaagaaaaggattaggtatagcttttggaaagcctatgtatgtagtagatataaatccctttagaaatgaagtagttttaggagatttagaagatcttttaaatacgaaacttatagctaaggatacaaattatataccttttgatactttaaaagagcctatggaagttgaggctaagataagatattctcaaactccttcaaaggcaataataactcctatagaggatggtagagtaagggtgaattttcatgaaaaacaaagggctataactaaaggtcaatctgtggttttctataaagatgatctattaataggtggaggaataattgaaaag

SEQ ID NO: 16336 - DNA, 831 bp, Clostridium botulinum
atgtttaaatattctaaagcagatgaagttttaaaggaaaaacttagttcatatacaaataaaggagaatacttattagtctcagatgttataaaatataaccaaatagaatatagagaagtattatttaataaaaaaactttgttaatggaagaaagcaaaggtatagaatatatagatgaaaacaataatattgtacaagataagaacatacaaaaatcattggctacattagcctattactatgagatatttttttgtataaataaaaaaaataatatatttaaagctttaagaagtgaagaggatttacataaggaaaacgaagatatagaattatctataaaagcactagaatttttgcaaaaggaaaaggtaaaagatatagaaaaagtgaaaaatatactattacagctaccaagtttaagaaagaaaactaatgatttattaaaagcaatgaaatcaataatagaaaatatatttaatgaagaagacgccatgtctaaagaaagctttaaaaaagtatatacaatttataaagaaatattaaaactgaattttaaaaatgtaaaattaatatattcaggaatagattattatgattatataaaaggctgtataaataaaaaaagaaaatctttttctataagatttaataaaaaaatatcagatcccttatttaaattagattaccagataaactattttaaaaaattgctaaaaacttataatgaaatattatgtatgaatgaaagagagtatttaaagttcatacacaattcagagaaagagaatataaatgaaagattatatcttgtaagagcaaaaaac

SEQ ID NO: 16337 - DNA, 462 bp, Clostridium botulinum
atgcaagatacccctaaaaaagtaggacaaacaaatgcaaaggtagaggagaataaagaagaagcaaaatctaaaacttttaaggttggcgatgttgtagaattaaaagatttaaaagttacagttaataaggtttatacagttgctggggatgaatttagcaaacctaaagatggtaacgaatatattgcagcagacattacactagaaaatacaggtaaagaagaaaaagcagtatcttcaattgcaatgtttaaagttgtagataaagacggtaggcaatgcgaatattcagttatggggttatctgctgctaaagctggacaaatggacggaactcttggagctggaagaaagatgacaggagcttatgttgtagaagtaccaaaaggcactactggattagaattagaatttgatagttctttactttctggtgggcaggttatagtaaaattaaac

SEQ ID NO: 16338 - DNA, 912 bp, Clostridium botulinum
atgaaaggtttaaaaagaagagtatcgattattatttgtattatgttagcttttatgctagtatcatgcaatttaaagaagggagaaaataaagaaacacaaaaaaatataaaaattacagattcctatggaaaagagttagcttttgaaaaagctccagaaagaatagttagtctttcacctggagcaacggaaaccatatatgccttaaataaagaaaatacattagttggaagatctgattttgatgactatccaacagcagttagcaaaataaagtcagttggtggagtaaaagatccaagtatagaaaaaataactgaactaaagccagatttagttataggtggagctcatttttcaaaagatactgtgaaaaaacttgaagacttgggcattaaagtagcagtgctttatggtgcagaggatctagatggagcttataaaaacataatggatatttctactatattaggagtaactgaaaaaggccaaactatagttgatggtatgaaaaagaaagttgaaagtgttgagaataaggtaaaatcattaaataaatctaagatttactatatggttgattttgggaaagcagacttttctgctggaggagatacttttataggtaaaatgattgaaaaagcaggtggagataatattgctaaggatacaaagggatggaattattcttttgaaaaaatagttgaaaataagccggaaatgataatattatcagataaatttaacactaaaaagaattttttaactgctgataagtataaggagcttcccgcatcaaaggctaataaagtatatgaaattgatgataacatgttattaagacaaggcccaaggcaagccgatggattagaagcattagcaaaaattattcatcctgaagcattcaaa

SEQ ID NO: 16339 - DNA, 969 bp, Clostridium botulinum
atgaatataggaaatcttatatttcataataatgtatttttagcacctatggcaggatttacagatatagcttttagagagatatgtaaagaattaggatgtggtttggtttacactgaaatggtaagtgctaaagcattatattatgaaagtaataatacaaaagaattatgtgtaatatcaaataaagaaaaaccagtagcactgcaattatttggtcatgaaccagagataatggcaaatgcagtagaattttttaataataatgatgatgtatgtatattagatgtaaatatgggatgtccagcacctaaaatagttaaaaatggtgatggttctgcacttatgaaagatcctaaattagcatcggaaataataaaagctatgaaaaaagtagctaaaaaacctattacagttaagtttagaaaaggttttgacaaaaataatattaatgcggtagagtttgctaaaataatggaacaatctggagttgatgctataactattcatggtagaacacgagagcaaatgtatgaaggaaaggcagattgggcaataatatcaaaagtaaaaaattctgtaagcatacctgtgataggcaatggagatgtattctcatcagaagatgctttagaaatgataaataaaacatattgtgatggtataatgattggaaggggtgcacaaggtaatccatggatatttaagcaaataaatgaaaaaattaagggagaacatgtatattatcctactccacaagaaagaatagacatatgtataaatcattataaaaaatcattagagtattttgaagagcataaggcagtaagagagatgagaaaacatgtggcagtatatgtaaaaggccttaaaaattgcactgatataaaggataaagtaaatatggagaaagatcctgataaagtgttagaagaattaattaagtatagagaaacattaagggaattt

SEQ ID NO: 16340 - DNA, 885 bp, Clostridium botulinum
ttgaattatagtaatgcaatatcggagtgcattgaatttatcgaggaaaatataaaaagtgacttaacaccagaagtaatagcaaataaatgtggatattctgtttttcatttttcaagaatatttaatattaataaaggaataactttaatggaatatgtaaaaaagagaagactttcattagcagctattgacttgtttaaaggcggtagaataatagatattgcacttgattatggttttgaaacacataatggtttttcaaaagcatttaaaaaggaatttggatttagtcctaagcaatatgtaaaatgcatggggaattattttaatgaagaattaaatatagattttggaggttatattatgaatcctgttattataaaaaaatctgcattcaaagttgcaggttatggaattaaaactaatattacaaacagtaattatactaaagatatagcttcattttggagcaattataatggtgaaaatttagaaagtaaaatgtataaaatattaaatccaccaaagcatggtgaagtgggattatgtgttccagctaatggagaaagtggggatgcagtatatttacttggggttatagttgataacttcgataatgtcactaatgaaatgataacagttgaagttccagaagcaacttatgctgtttttacaatacctccagtagatacatctaatgatttagataatgatgattttccagaggcaataaaaaagacttggaaatatatatttgaggaatggtttaaagatagtgaatatgtttttgatgaaagtaaatttgactttgaattttatgatgagagatgtcatggacgaaaagatactgtaatggaaatttatgtaccaatagaaaaaaag

SEQ ID NO: 16341 - DNA, 1587 bp, Clostridium botulinum
atggctgatttaagagaaaaaatagaaacaagaagaacctttgctataatatcacatccagatgctggtaagactactttaacagaaaagctattattatacggaggagctataaggctagcaggttctgtaaaagctagaaaggcgtcaagacatgccacttcagactggatggaaatagaaaaacaaagaggaatatcagtaacttcatctgtaatgcagtttaattatgagggatattgtataaacatattagatactccaggacatcaagattttagtgaagatacatatagaactttaatggcagcagacagtgcggtaatggttatagatgctgccaaaggtgtagaagaacaaacaaaaaaattattccatgtatgtagtttaagaggaatccctatatttacctttgtaaataaaatggatagagaaagtaaagatccctttgaacttatggaggatatagaaagtgtattaggtataaaatcttacccaataaactggcctataggatcaggtaaaggctttaaaggagtttatgacagaaataaaaagataattcaagcctttaatggtggaaaccatggtcaaacagcagtagaatccttatcaggggatatagatgatgatgtatttaaagatttaataggtgaagatttacatgaaaaattaaaagaggatatagaacttttagacattgcaggagatgattttgatttagaaaaggtaagagtcggcgaacttacaccagtattttttggtagtgctttaaccaactttggagtggaaccatttttaaaagagtttttaaatttaacacaaccaccgttatcaagggaatcagatattggagaaatagatgtatttagtgataaattttctgcctttatatttaagattcaagctaatatgaatccagcccatagggatagaatagcttttatgaggatatgttctggtaagtttaaaaaaggcatggaagtttaccattatcaaggcggaaacaaagttaagcttgctcaaccacaacagtttttagcccaagatagggaaatagttgatgaagcttatgcaggagatataattggagtgtttgatccaggcatatttagaataggagacactctatgttctgctcaagataaatttagatttgaaggtatacctacttttgctccagagtattttgctagagttagaactatagatactatgaaaagaaaacaatttataaagggcataactcaaatatctcaagaaggggcaatacaagtatttaaagaacttcatataggaatagaagaaatagtagttggagtagtaggtgttcttcagtttgaagttttagaatatagaatgaaaaatgaatataatgtagatataaaattagaaagagtaccttataaatatgtaagatggattgagaaaacagaaaaagaagcagaaaaattaagtataactagtgatacaaagatagtaaaagatttaaaagatagagatttactattattccaaagtgattgggctataagctgggctttggagcataatgagggattagtactttcagatataggtaagaat

SEQ ID NO: 16342 - DNA, 1365 bp, Clostridium botulinum
ttggaggtattaagcatgaaaaattctttaagtcttgatttgacaaaaactaaaccttatgtggaggagcatgaactacaatatttagaatcaataataagagaaatggataatactcttggcaaaaaaacaggttcaggaaataaatttttaggttggatggatttacctataaattataataaagaagaatttgcaagaataaaaaaggcagcagaaaaaataaaaaatacttgtgatgtgtttattgttataggcataggaggatcttatttaggatcaagggctgctatagaaatgatatcaaatacattttataataatttagataaaaaccaaagaaaagtgccacaaatatattttgcaggtaacaatataagttctacttatatggctgatttattagaattagttaaagataaagatatatgtgtaaatgtaatatctaagtcaggtacaactacagagccagctatagcttttagaatatttaaagaattattagaaaacaagtatggaaaagaaggcgcaaaagaaagaatatttgctactacagatgcagctaaaggtgctttaagaactttagctgattcagaaggctatgaaacctttgtaataccagatgatgtaggtggaagattttcagttttaactccagtaggattattacctatagctgcgtctggaatagatatagacgaaatgatgaaaggtgcagccgatgctagagaagaatattcttcagataatatagaaaaaaatcatgtgtatagatatgtagcagtaagaaatgctctatatagaaaaggaaagactacagaaatgttagttaattttgagccatgcctacattatttcggagaatggtggaaacaattatatggagaaagtgaaggtaaagatggaaagggaatattcccagcggcagcagatttttcaacagatttacattctatgggacaatatatacaggaaggtttaagaaatatatttgaaacatttataaatgtagaaaaccctagaaaatcaattatagtaaaagaagataaagaaaatttagatggacttaactttttagcagataaagacatggattatgtaaatcatcaagcattaagaggtactgttttagctcacaatgatggtggtgttccagctatggtattaaatgttccagagctttcagcttattattttggacaattagtgtatttctttgaaaaagcttgcggaataagtggatatttgttaggtgttaatcctttcgatcaaccaggagtagaagcatataaaaagaatatgtttgctcttctaggaaaaccaggctatgaaaatatgaaagctacattagaagaaagattgaag

SEQ ID NO: 16343 - DNA, 1869 bp, Clostridium botulinum
atgaaaaagctatccacaggtatagctgtatttttatgtacaatattaattttagggcagattagaattgttaaaaatgctattttccctagtggaataaaacatgaaaataataggattcatttaaatacaggaaacactattagagtttctggaaaatcttcaaaagagataggtactaaagttacagatatattgtttccagctttcaattatgaaggtaagcctaacggattaatcatttacaagggagataattggaaggatatattagctttaatgccccttgttaaaaaatataatagcactataatacctttcaatgaaaaagatgaaagctctcttttagattatataaataaattagagccaaagggtattccaaaattaaataatgcacaagttgttatttgcggtgataacataaatacattaaaaaacaatttagaaagaaaaggtataagggtaactaacataaattataaagatacaaatagccttttggagaaagtctataatagtgttttttctaattctgaaaaatgctatggctatatagtttcagatgaggatccgttaatgactgttccagtagctacctggatagttcaaaatggggggataccattgtatttaaataatgaaaagaagctttatagttcttcaaaaaaaatattgcctaatataagtaagatatatgtaattggaaagaaaaataatgttgatgaggaagatattaaatccttaaaagtacctgtgcagaaagtttatggatataaccctgaaaattttgccattaactttgctaagttttatgatagagaagaaggttttgggtggcatagcaatagaagtagagatgatagcaatcacaattttatattatgctctaaggaagaaccattaatggctttagtaggaagtcaacttgcacttaaaggaaaagtaggaccaattctttggacgaataagaattatttatctcctctaacagaaaactacctatggagaatgaagcctaattattgggtaactgcagcggaaggaccttataatagtttgtgggtaatgggtaatgaagatatattacctttttcaattcaaagtagggttgattatactcaagaaattcaaccttataaaactatgggggaccaggcagttagcggattagatggtatttctataatatttagtttaatatccatactaggtgctatatgggtttctattcatttatatcttagaatgaaaaaattaagtatattaataaaatttatgtggatacttacagtactagttttagggcctttaggaatatggttttatgtaatatcttatataaattctccttggataaagattaacgaaaagatcgtgtatctcaggtctttatggaaacaaacctctgtagcaactttatctggattagcctttggagcgtctagcataattgtagtaaattatatattaacgtatatagggtcaccattaatttctttctatgctagatatggaggctatttattaggtaatcctatgataataaaaatgataatatcctacttaatagcttttttattagatttatttgttttcatgcctactatattaatagaaatgaagagtagcaaatataaagatgcggtaaaagaatcattacttttagtttttatttctattacatcaatttcagttggaatgatgctaagtatgtggtggtttaatatgtcttattctcctagcatacttcgtgaagataatatactatggtttggttttatgtttttatcagcattcataggatttttaaccgcatatattcctaattggattttagttagaaatggtaagaaaatgggtacttta

SEQ ID NO: 16344 - DNA, 1158 bp, Clostridium botulinum
gtgagcaaaatatttatggaaaatactataattgaatttagaaatattaaaaaaatttacaaagatgctattgtaatagaaaaatttaatttaagaatagagaagggcaatttagttgtattaataggttccagtggttctggaaagactacattattgaaaatgataaatagattgatagaatctacagcaggggaaatactagttaatgggaaaaatataaaggatgtagatccaatagagttaagacgaagtataggttatgtaattcagcaaacagggcttttcccacatcttacagttaaagaaaacatagaaataataccaaaacttatggggaaatctaaggaagaaattaataaaaaaacaaatgaattgttaaatatggttggattaaatccagaagaatatatggacagatatccagttgaattaagtggaggacagcaacaaagagttggagttgcaagagcttttgcagcagatgccgaaataattttaatggatgaaccttttagtgcgttagaccctataacaagatcagaacttcaagaagaattatttaatatacaaaaagagtatagaaaaactatagtttttgttacgcatgatatggatgaggctttaaatttagcagataaaatttgtatattgaaagatggaaaactacttcaatatgatactccagaagatatattaaaaaatccagcaggagaatatgttgaagaatttgtaggaaaaaataaaatatggaccaagccagaaatgataagggcagaggatgttatgatagcgaatcctgtaacagttacttctaaaagaaatttacttcaagcaagggaaaaaatgagagataacaaagtggatagtttattagtaatagataaacaaagaaaattactagggtatataactttagaatatattagaaaaataaaagaaaaaaatacattagtggaagaagtaatgaacaaagaaccgaaatgtgttttgggagatactaatttaccagaacttttggataaatttaatagtttaaagatggggtatttgcctgtaagtgatagtgaaggaaaacttttagggttaataacaagaagtagtttaatatcagttttaagtagtcaatatatagatatggaggggataattgatgaa

SEQ ID NO: 16345 - DNA, 2100 bp, Clostridium botulinum
atgggacaaaaaatgggacaaaatttagtaatagtagaatcaccagcaaaagctaaaaccataaagaagtatttaggaaaaaactatgtagttgaggcctcaatgggacatgtaagagatttacctaaaagtcaattaggtgttgatatagaaaataattatgatcctaagtatataacaataagaggaaaaggcgaacttttagataaacttagaaaagaagctaaaaaaagctctaaagtatatttagcaacggacccggatagagagggagaagctatttcttggcatttagctcatgttttaaaaatagatgagagtgaagaatgcagaatagaatttaacgagataactaaaacttctataaagaaagcaatcaaatctccgagaagaataaatgaaaatgtagtagacgcgcagcaagcaagaagggttttggatagattagttggatataaaataagccctatattgtggagcaagattaaatggggattaagtgcaggtagagttcaatctgtggctttaagaatgatatgcgatagagaaagagaaattgaagaatttataccaaaagaatattggactatagaatgtgaggtatataaagaaaaaaataaaaaacctttcataataaaattaactactaaatcagggaaaaaaatagagataaataatgaagaggaagctattgaagcaatacaagacttaaaaaaaggtgaatttatagtaaaaaaaataaagaagacaaagaaaaataaaaatcctttagcaccttttactacgagtactcttcaacaggattcttataaaaaattaaatttttctactaaaaagactatgtctatagctcaacaactatatgaaggtatcgatatcaaaggttttggtgcagtaggtcttataacctacatgagaacagattctataagaatatcagaagaagctcaaaaatcaaccctagagcatatcaaaagtaattttggggaagaatatataccaaaaactccaagagtttttaaaggaaagaaaaatatacaggatgcccatgaagctataagaccaaccaatattgaaataactcctacacttgctaaggaaagtttaacgcctcaacaatataaattatacgaattaatatggaaaagatttgtagcaagccaaatggcttcttgtattttagattcaacatctataagtatagaaaatggaaaatatggattaagagctagtggatccttaatagcttttgatggttttatgaaggtgtatgagtattctacagaggaagaaaaagatagtataaaaatacctgagttggaagataatgagattttgggagagaaatctataaacaaaagccaacattttactcaaccaccagctaggtattctgaagcttctttagtaaaaactttagaagaaaatggtataggaaggccaagtacttatgctcctattatatctactatattagatagaaaatatgtagaaagagagaaaaaaacattaaaacctacagaactaggagatatagtaaataatatactaagtgaatattttaagcaaatagtagatctagaatttacagcggatatggaaaataagctagattatatagaagaaggaaaaaaatcttggagagaggtagtaaatgatttctttcagccattgatagaatccatagaaatagcagaaaaagaaatagcaaaaataactattgaagataaagtaacagatgtggtatgtgaaaaatgtggaagaaatatggttataaaacatggaagatatggagactttttagcatgtccgggatatccagattgtaaaaataccaaacctatagtagaagaaatagatgttaagtgtcctaaatgtcgagatggaaaagtcttaataaagaaaagtagaaaaggcagaaagttttatggatgcagtaactatccagactgtgattttgtaagttggtcagaacctgtgaaagaaaagtgtgaagaatgtggaagttacatggtaaaaaaacaaagtaaagctaaaggtgaatactatgaatgtgctaattcagaatgtaagcatagaaaatatttaaataataaagag

SEQ ID NO: 16346 - DNA, 474 bp, Clostridium botulinum
atggattttaaaggcatagaaaatttaataaaagctatgagtgaatcaaatttatcttctatggatatagagtataatggtatagctataaaaatgaaaaaagaaaacaataaaatttataagcaagaaactatatctcaggaatatgaaaaagaaaatagagataatattgtagaagaaaaaaaattagatttattaagtaatgaagaaaaaacaggtatagctattgcagataatcttatagaaatagtatcacctatagtaggaactttttatgaatcaccaggagtagataaaaaaccttatgctaaggcaggagataaggttaaaaaaggagatacagtttgcatagtggaagctatgaaggttatgaatgaaattgaagctgaagtagatggagaaatagtagaggtattggtagagaatgagcaaatggttcaatatggagaagttttatttaagataaagccacta

SEQ ID NO: 16347 - DNA, 804 bp, Clostridium botulinum
ttgaaaagggtgaagggtatggcactaggtgaatggaaaacttttttaataccatataagcaagcagtagaggaacttaaggttaaatttagaagtataagaaaagaatatagagaaaaaaatgaatactctcctatagaatttgttacagggagggtaaaagaaatctctagtatcctagaaaaagcaaataaattcaatataccgctagatagaattagttatgaaatggaggacatagctggcataagaataatgtgtcaatttactagtgatatagaaaaggtagtagaattagtaaggcagagaaaagatatgcaaataatatatgaaaaagattatataactaatgttaaaaatagtggatatagaagttatcacatgattataaaatatcctgttagtatggcagaaggtcaaaaggagattttagcagaatttcaaataagaacattagctatgaatttttgggctactatagaacattcattaaattataaatataaacatcaaatacctaaggatataaagttgaagcttaaatcagctgcagatgcagcgtctaacttagacaaattaatgatggaaataaaagatgaaataaaggatgcacaaaaactttttgaagtaaagtcaagcttagtatcttacataatggataatattttaactttgcaatctatgggaaaaattatagattctaatagatatcaagagcaattgaacaaacttatagaagaaggggaagtatttgaattaaatagtcttctaaaatctacagaaaagactatagaaatgtataaa

SEQ ID NO: 16348 - DNA, 354 bp, Clostridium botulinum
atgatatatttaatattgacatcggtttttctaggagcattaggacaaatattggtgaaatatggagcagttaatttaacattaaatttttcaccagcacacttcttacctagtatagtatctatattaaaaaatatgccagtaatggcaggtataatatcctatggaattagctttttactttggataaaagtattgagtaaagtagaattaagctatgcatatccaatggtaagtttaggctatgtattagtaatgatattctcttactttttctttaaagaaaatataactcctataagaatattaggagttgcatttataatgataggagtaatactagtagctagaagc

SEQ ID NO: 16349 - DNA, 828 bp, Clostridium botulinum
atgaaattaataaaagaaataaaaaaaatggctaaggataatggtggtaaaagtatggttttaacctttaaagaccatcctttaaatactataaataaagatttggctcccaaaattctattagataatcctagcaaggtgaaaatattgaaagaaaatgaagtggatctagttaattttattaattttgataaagaatatatgaagttatgtccagaggattttataaaaaaaatgatatattattataatgcaggtggatttgtagtaggatttaattatagatttggatataaaaatttaggagatatagaacttctagataaaatgagtaaaaaatttaattttaatcttaaagtagtttccccagttaaatatttaaatgaaatcataagcagttctaaaataagacatatattaatagaggatggcaatgtagataaggcaaaaaaaatgctaggtaggaactattttttaaagggcaacatagtaaaagggaaacagttagggagaaagcttgggtaccctacagtgaacctaaattataatacaaaatatgttcttccaagagggggagtgtactataccctaatagaatatgaaaataaactttataagggtattactaacgtaggttataatcctacagtagaagataaaaagttaaatatagaaactcatatattagatttccataaggatatatatggagaaaatatagttatatatttttcaaagagaattagagatgagaaaaaattctcttctttagaagagttaaagaatcaattaaaaaaggataaaagttttgctaaaagacaaagtatg

SEQ ID NO: 16350 - DNA, 534 bp, Clostridium botulinum
atggaagttccaaattgtgaatatggtaaaaatggtatgcttttatttgcagattgtgctgtaaatcctaatccaacagcagatgagctagcttcaattgctatatccacagcagaaactgctaaagctttatgtgatatggaacctaaagtagctatgctatctttctcatcaaagggaagcgcaaaacacgacttaatagataaagtagcagaagctacaaaaatagcaaaagaaaaaagaccagaccttgatatagatggagaattacaattagatgcggctatagtacaaaaagttgcagatttaaaagctccagatagcgccgttgcaggaaaagctaatgttttagtattcccagacctgcaagcaggaaatataggatataaattagttcaaagatttgcaaatgcaagtgctataggaccaatatgtcaaggttttgcaaaaccaattaatgacttatcaagaggctgtagcagtgatgatatagttaatgtagttgctgtaacagcagttcaagcacaaaatatg

SEQ ID NO: 16351 - DNA, 951 bp, Clostridium botulinum
atgaaaaagagatatttaattttagcattaattattttatctatttgttcaatatttattggagtaaaagatattagctttatagatatatttaattcagatgatgtgaagcttaaggtattattaattagtagaatcccaagacttataagtattattgtagtaggggttagtatgagtatagcaggacttattatgcaacaaataagtcgaaataaatttgtatctccagatacagcttcaactatagatagtgcaaagcttggggttttagttgctttaatgatatttccttcagcaactcttactgaaaaaatgatagtttcctttatattttctttattaggtacattcttatttatgaaaattttaaagaaaataaaagttaaaaattctatcttcataccactcgtaggtataatgcttggaaatataatagattcaataactacgttttttgcatataaatatgatcttattcaaagtattgcctcttggcttcaaggtgatttttctttaattattaaaggaaattatgaacttatatattttagtctaccacttgtagtcatagcctttatttatgctaacaaattcacagtagcaggtatgggagaggatttttctaagaatttaggtgttaattataacagaatcataaatataggacttgtaatagtagcattaatatcttcactagtagttattactgtaggaaaaataccattcctaggtcttatagtacctaatatagttactctttataaaggggataatttaaaaaatagtctttgtagtacagcattgcttggagcagtatttctcttaggctgtgacatattaggtaggttagttatttatccctatgagatatctataggacttgtagttggagttataggaagtatggtattcctttatctcttgtttaggaggaatggcaatgaagtg

SEQ ID NO: 16352 - DNA, 366 bp, Clostridium botulinum; identical to SEQ ID NO: 16007

SEQ ID NO: 16353 - DNA, 477 bp, Clostridium botulinum
atgaatatatctataatttcagtagggaaaataaaagaaaagtttttaaaggcagcaatagacgagtactctaaaagattaagtaaatactgtaaactaaatataatagaagtggccgatgaaaaaactccagataatgcctctcttaaagaagaaaatataataaaagaaaaagaaggtaatttaatattaaaacatataaaagataatagctttgttatagctttagatttaaaaggtaaatctataacctcagaagaattctcggaccttatagaaaattgcagattaacaggtaatagcactattgcctttgttatcggtggatccctaggattatctcagcaggttttatccagagctaattataagctatctttctcaaaaatgaccttcccacatcagctctttagagtaatgcttctagaacaagtttatagggcttttagaatattatgcagagaaccgtaccacaaa

SEQ ID NO: 16354 - DNA, 573 bp, Clostridium botulinum
atgtatggtcccaaagatcatggctggattgaagtagtagcaggccctatgtatagtggaaaaacggaagaattaataagacgaataagaagagctgaaattgcaaagcaaaaagttcaagtttttaaacctgaaatagataacagatatagtaaacaagatgttgtatctcacgcaggagataaaattcagtcagtaccagttaaaagtagtaaagaaatattagaaaaacttttagatgatacagatgtgataggtatagatgaagcacaattttttgatgattttttagttgaaatagtaagtaaaatagctaataataatagaagggttatttgtgcaggactagatatggattttaagggagaaccctttggtccaatgcctaaacttatggctatagcagaatttgtagataaaatacaagctgtatgtatggtttgtaataatccagctacaagaacccaaagacttataaatggaaagccagcaaagaaatctgacccagtagtattaataggggcacaagagtcttatgaagctagatgtaggaagtgtcatcgtgttccaaga

SEQ ID NO: 16355 - DNA, 855 bp, Clostridium botulinum
gtgtttggtatgaatgagatgattaagtgcaataatgttacatataagtatgaatctaataaagagtatgaaagtactcaaaagattgcgttagataaagttaatttaactatcaaaaaaggtgattttgtagttattttaggtagaaatggttcagggaagtcaactatagctaagcatatgaattctcttttaataccttcagaaggtaaagtgtatgtggaaaatttggatactgaaaatttagaaaatacatgggacataagaaataaagcaggcatggtttttcaaaatcccgataatcaaattgtggctactatagtagaagaggatgtagcttttggcccagaaaatttaggaattcctcaagaacaaataagatctagagtggatgaatcacttaaaaaagtaaatatgtatgattatagaagacatgcaccacatttactatctggaggacaaaagcaaagagtagctattgcaggtgtattagctatgaggccagaatgtattatatttgatgaacctacagctatgttagatccttcaggaagattagaagtagtgaataccattaaagaaataaataaaaaatatggtataacaatagttcttataactcattttatggaggaagcagtagaagcagataaagttatagtaatggattctgctaaagtaataaaagaaggaactcctaaggaaatatttaaagaagtagaaatgatgaaaaaaatagggttagatgtacctcaaatgacggaaatagcccattacttaagacaacacaatgtggaaataccatcagatatattaactatagatgaaatggtggatgaattatgtcaattaaaa

SEQ ID NO: 16356 - DNA, 825 bp, Clostridium botulinum
atgcgtaatactgtatcaacttttcaagaattaaaaaacaaaggtgaaaaaataactatgttaactgcctatgattattctatggcaaagcttatagactcctctggaatcaatggaatactagttggggactctttaggaatggtatgcttaggatatgaaaacacactaagtgtaactatggaagatatgctccatcatactaaggctgtagtaagaggaacttctaacgctttagttgtgggagatatgccctttatgtcttaccaaacttctatttatgatgcggtttataatgcaggaagatttataaaagaagctggcgctcacgctgtaaaattagagggtggtgccactgtagctgaagaaattaaagctatagttaaagctcaaatccctgtaatgggacatataggtttaacccctcaatctgtaaatatgtttggaggattcaaagttcaggggaaaaacgaaaaagtagcaaagaaactaatagaagatgctaaaattttagaagaggcgggagctttttctatagttctagaatgtatccctgaaaaattatcaaagataatatcagaatccatttccatcccaaccataggcataggtgcaggaaaatattgtgatggtcaaatactagtttatcaagatatgctttctatgttttcagatttcaaacctaaatttgttaagtcctttggaaatataggagaatctataaaagatggtgtttcacaatatataaaagaagttaaagaagctaagtttcctgaagaaaaacatgcttttaaaatagatgatgatgtaataaataaattatat

SEQ ID NO: 16357 - DNA, 198 bp, Clostridium botulinum
atgattatgaaagcttatgtagataaagatacttgtgttggatgtggattatgtcctagtatatgcagtgaagtattttcaatgcaggatgatggaaaagctcatgttatagtagagaatgagaatgtccctgaagaattgacacatttagctgaagaggctagagattcttgtcctgtagcagctatagaagttgaa

SEQ ID NO: 16358 - DNA, 1422 bp, Clostridium botulinum
atgagtgatagtcccaaacagtttataaaaagatttattggtttttctatgggaccaatattatcagctattattagcttttttactgttcctataactacatattttgtagttccaacagaatttggaaaagcttctatgtatacaatggctttaagcattagttcaatgtttatatttttaggtatggatcaatcttttactagagagtttaattcagaagaagataaaaaatctttattttggaattccttaatagtgcctttaatattttcgttgatactaggagctttttatataatttattataaaccattatctgtattaatgattgatactgttgataggtatatagtagttatattggcattatcattaccttttgcagttatagatagatttaatttattattgataagaatggaagagaaagctagattatattctgtcttaaatgtaataagtaaagttataaatgttgtagttttagtaccatatcttttatatatagataaaagttttaaaggaataataaacgcaggttttgtgtcactagtttttatgtgtatagtagaatgtctttttataggagattactggattgcaaaatttaaaataaataaaactttaataaataaaatgtttagatatgggatacctttaataccagcatctgtaattgtttggtttttgaattctatggataaaatagcaatgagacaatggtcctcttttgaagaaataggattgtattctgcagcatttaaaattgttactgtagtaagtatagttcaaagtgcattttgtactttttggacgccaactgcatttagatggtatgaagaaaaggtagaaggcgaaaaatttatgaaggtaagcaatatgttaatgtgtttcatgaactttatgtttgtaggaatagttttatttagggatttaataataaaactattagatgcaagttatgctagttcagccattatagttccgtttttattattgttacctataatgtatactgtatcagaatcaacttgtttaggcatatctttttcaagaaagacatcttacaatataatagtatcattaatagcagctgtggttaattatattttaaattatttattagttccaaagtatggagctttaggagcttccatagctaccggaatagcctatacagtattcttttgggtaagaacacttatatcaagaaagctatggtttaaatttaaactaggcttttatatattaaatacagcatccatgttattgttagcatcgttagatgtgttgtataataatctttatataaatatcgctatatctttatttattgtatatgtaaatagaaatgaagttaaatctattatatcttatattaagatgtttttaaaagatagaaaaaataaagccgttgct

SEQ ID NO: 16359 - DNA, 1371 bp, Clostridium botulinum
atgaaccaggaatttgttgaagcattaagggaaatagtaaaagaaaaaggtataagtgcagatcttttgtttacaactatagaggatgctttagtaacagcatataagaaaaattatgcaaagcaaggcggatcaactaataatgtaaaggtaataatgaacagggaaaatggagaaataaaagtatatgctcaaaagaaagtagtagattttgtagaagaggaagttgaggaaatatccttagaagatgctaaagaaatcgatccaaactatgaattagaagatataataaatattgaagtaacacctaaaaagtttggaagaatagcagctcaagcagctaaacaggtagttatacaaagaataaaagaagaagaaagaagaattgtatacaacgaatatatagaaaaagaagaagatatattaacaggaacagttctaagaaaggataagggaaatatccttataaacgtaggtaagtcagaggcggttttagggccaaatgagcaaatacctggagaacaatttagatttaatgaaaaaataaaattatatgtagtagaagtaaaaaatactacaaagggaccacaggttctaatatcaagaactcatccaggcttagtaaaaaggttatttgaacttgaagttccagaaatatataatggaatagtagagataaaaagtatagcaagagaagcaggatcaagaactaaaatagcagtatattctaatgatgaatcggtggatccaatgggtgcttgtgttgggcctaaaggtgtaagggttcaaaatatagtaaatgagcttaaaaatgaaaaaatagacataataaaatggagcaaattcccagatgaacttatatgcaatgctttaagtccagctaaagtaattgatgtaactatagtggatgaagaaaataaagctgcaagggctgtagtagatgatagtcagttatctttagctataggtaaagagggtcaaaatgttagactagcagctaagttaacaggctggaaaatagacataaaaagtaaatcacaagcagaaaaagaagcaacattaaatttatctgaagctaaagatgaaaaaatcttagagaataaaaaagaagataaagaggacaaaatagatttacatgaagaaatggatagcatagttgaagatacaaaagaaaatataaaagaagagataagtgtatctcacgataatcaagaagtagattcagagttagaaaaggccatggaagaagtttttaatactgaagataaagaaaataaattagaaaaagatatgaatttatttgaagatgataatgaaaaaccaagtatagacacagaaaaagctatagaagaaatctttaaagatgaattt

SEQ ID NO: 16360 - DNA, 1326 bp, Clostridium botulinum
atggataatgcaagagaagtagctttggatgtattaaaggctgtattatttgaaggtgcttattcaaacatagttttaagtaaaaagctaaataaaagtaatttaaaagataatgataaggctttaattaccgaaatagtttatgggacattaaaatataaggaaactttagatattataatacaaagttatttaaggaatcccattaaaactatggataaaaatatagttaatatattaagaataactatatatcaaataagatatttagataaaataccttcttttgctgcagtaaatgaagcagtagagatgtcaaaaaaaatatctataaaatattcaaagttagtaaatggagttttaagaaattatataagaacttataaaaataaaaaattttatgaccatagaaacaacctagaaaaatttagttttatgtactcctatcctaaatggcttataaaaatgtttataagccaatatggtatagaaatagcagaaaaaatattaaaaggattaaatgaaagacctaatataacagttagagttaataatctaaaaatagattatgatgaggccttcgaaaaattaggtgaatatgggtataatatagaagaaggatatatatgtccagaggctatacaaataattaaaggtaaaaacatagaaaaaaaccctttatttatagaagggaatattactgtacaggacgaaagtgcaatgctagtggcaccttctatggagcttgatgaagaaagtatagttttagatttatgtagtgctccaggaggaaaaactacacatatttcagaaattatgaataataaaagtaaagtatatgcttacgatgtacaccaaaataagttatccttaatagaatctaatgctaaaagattaggtataaaaaatatagaaacggatgtaggtgatgcagctgtttttaataagaagttaaaagaaaaagctcatagagtgctcatggatgtaccttgctctgggttaggtataataagaaagaagccagaaataaaatggactaaaaatgaaagagaaattaaaaatattatagctatacaaagaaagataatgaataatggagcttcttatttgaaagaaggaggtatactcttatattccacctgtactttaaataaagaagaaaatgaagaaaatataaactggtttttaaaaaaacataaaaattttaaaatagaacccttatattatggtgatgtagacaatataatatatcataaagaaggatttgtatccatattgcctaatgataaaatggatggcttttttatagctaaattgaagaaatgt

SEQ ID NO: 16361 - DNA, 906 bp, Clostridium botulinum
atgaccaatattagtttagataaattagtaactgagagtagaaatgaaaatactaaaaatatagatagagttgaaactttagagatgttaaagatgataaataatgaagataaaaaggttgcagaagctgtagaaaaagagcttattcatatagcaaaggctgttgataaaataggagaagcatttttaaatgggggtagacttatatatgtaggagctggtacatcaggaagattaggagtattagatgcatcagagtgtccaccaacatatggggtgagttatgatttggtaagagggattatagcaggaggagaatcggctatgtttaaagctagggaaggagcagaggattctaaaaaactttgtattaaagatttgaaaaatattaattttggtaaaaatgatatattggctggaattgcagctagtggaagaactccttatgttataggaggattagaatatgcaaatgggataggtgctacaacaatttcagttacgtgtaatccagaatcagaaatgtctaagattgcaaacatttcaatagcaccagtagtagggccagaagctataacaggatctactagaatgaaggcaggaacagctcaaaaaatggttctaaacatgttatcaacgggtgctatggttaaaacaggcaaggtttatggtaacttgatggttgatttaaaagctactaatgagaaattggtagaaagagctaaaagaattgttatgcaggctacaggatctaaaagagagcaggtagaaaaaattcttaaagaaacaaattttgatgttaagttgtccatttttatgatagagagttcattagataaaataaaagctaaggaaatattagacaaaaataaaggatatatagtagaagcaataaaagaaataagt

SEQ ID NO: 16362 - DNA, 492 bp, Clostridium botulinum
atgaaagagtttctagcggtaggagaaataataaatactcatggtataaagggagaggtaaaagtatatcctttaactgatgatatgaaaagatttaaaaaattaaaagaagtatttatagatggagaggaaagaaaaatattatcctgtaagcttcaacctaataatgtagttttaaaaatagaaggcatagattctatagaagaggctaataagtatagaaaaaagcttctagaaattaaaagagaaaattctgtaaagcttccaaaaggaagttattttatagcagatttaatagaatgtagagttatagatgaagatgggagagaaataggacaaatatctgatgtaataaagactggcagtaatgatgtatatgaggtaaaaggaaagagcgaggtattagtaccagccataaaagatatagttacaaatatagatatagaaaacaaaactgtaactataaaacctttggagatatggcaatgcgaa

SEQ ID NO: 16363 - DNA, 945 bp, Clostridium botulinum
atgaataaaaaatatgtagtgggtgttgatttagggggaacaaagatttatacagcacttgtggatttagatggaaatataataaaagaaaaaaatgttaaaactgaagcaagcaaaggagaacttgatgtattatataaaataataaatactattgataatgttatagaaggagtaaacttagaggaaataaaggctataggaataggtttaccaggacctttagatgctaaagaaggtataataatttcatcttcaaatctaccctttgaaaattttagcttagttcaacctataaaggataaatataatattccaacatacctagacaatgatgctaatgtagctactttagctgaatttatgtttggtaaaggaaaaggtacccagaacatgatatacgtaacagcaagtacaggcattggagcaggagctataataaatagcagaatatatagaggaaatacaggaaatgctttagaaataggtcatacaactgttatgaaggatggaccgaactgtggttgtggtaataagggttgcgcagaaagtttaggttctggtactgccattatgaaaaaggcaaaagaagtttgtaaaaataatggagagacatctttaaaaaaatatgataatctaactgcaaaggaagtttttgaagaagctaaaaaaggagataagctttcaaaagaagtactagaattttgcttatcctatttaggtataactgtagccaatataataaatacttttgatccagaaatggttgttataggcggaggagttataaatggtggagaaattgtttgtgatataataaatagagaagtgaaaaatagatgctggaaagctattagagataattgtaaaataacaaaagcaaagcttgcaggaaaagcaggggttctaggagctgcagccttagctataactgaaagtaaaaat

SEQ ID NO: 16364 - DNA, 780 bp, Clostridium botulinum
gtgataaaattgagtataaatgataagcctataggtttttttgattctggagtaggcggaataagtgtgttaaaggaagcatttaagttattaccaaaggaggattttttgtattatggagattcaaaaaatgcaccctatggaactaaaaaagtagaagaagttaaggcgttaacctttaatgcaacagactttttgatgagtaagggaataaaagctttagtagtggcttgtaatacagctactagcgtaactataaatgacttaagggaaaattatgatatccctattataggcattgaacctgctttaaaacctgcggtggaattaaagaaaggtggaaagataataataatggcaacgcctatgaccttagctgaaaagaaatttgctaatttaatggatttgtataaagaaacagaggatatagagcctttgccttgtcctgggctaccagaactaatagaacagggaatagtttctggagatgtaatttataattatttgaaggataaattttcaaaatatgacaatgaaaaaatatcatctattgttctaggatgcactcattatccttttatagaagagactttaaaagaggttacccataataaagcttgtataatagatggtagttttggtacatctagagaattaaaaagacaattaaaaaatagtaatatgctaacagaagaaaatagagtgggaaaagttactatatttaattcaagagaggataaggatataatagatctaagctataaactttttaatatgaaa

SEQ ID NO: 16365 - DNA, 1173 bp, Clostridium botulinum
ttggaggttatatttatgaagcaaaaaatagtatcctacttaaagtccatagaatcagatttatttaatatatctaagtatctttatgataatcccgaaacaagttttaatgaatataaatcttgtaaatatttaatagatatcttaaagaaaaataattttaatgttcaagaaaactattataatatacctacatcattttatgcagaatttggtaaagggtaccctaaaatatgttttttttgtgaatacgatgccccaagtgaaataggtcatgtatcagggcataacttagtttcctccatatccctaggagctgctttatctctttcaaaagtaatagataatttttctggaactattattgtaatgggaacacccggtgaatccctaagcggttctaaagtaactttagctaaacaaggagcttttaaagatatagatgtaggtcttatgattcatcctgatgaagtaacctgccaaagtggatcttcaatggccattcttcccttaaaaataaaatttagaggaaaggaaaccttaagctatgaaaatactaatgtattttcatcattaaatggtcttttatatacatttaattctataaatcttttaaaacaatctattaataaaaactttcatatagataaattagttattaatagtggtaaagatccttatatttcttctaatactacagaagctaaattttatataagatctaaaagtatatcaactgctatttatgtagaaaatcgaataagaaaaatagtagataatgttaactctcttttaaatttagattcagaaatttgtttttttgaattgccttatagagaattaataaccaataaaaggttatcacgcttgttttgccataatctaaaggaagctggtataattgatatttgtaatgaaaaaaatactgtatcaggcttaagtttaggaactgtaagtcattatatcccttgtattcatccatatatatccatattggacaaaaacagctctataaattatttcactaaagaatttgcagatgaaactttaacaaagcatgctcaacaaaatgcccttaaagcttctcaagccttaagtttaactgcattagatctaattcaaaatgatatgcttctaaaagaagtaaaaaaagaattttttaataaaatagaa

SEQ ID NO: 16366 - DNA, 309 bp, Clostridium botulinum
atgattgtgcgaagggaggcaaatatagtgagtagatcagttaaaaaaggaccatatattcaagaggtacttttaaaaagaataaacgaaatgaacaaaaatggagaaaagaaagttttaaagacttggtcaagaagttcaacagtattcccacaaatgatcggccatactattgctgttcatgatggaagaaaacatgttcctgtttacataactgaagacatggtaggtcataagttaggagagtttgttcttactagaacttacagaggacatgatgacaagtcagaaaaatcatctcgtttaaga

SEQ ID NO: 16367 - DNA, 1164 bp, Clostridium botulinum
gtgtataatagttatagtttaaattataggggaagtgataatatgcttagatttttagatgcaggagaatctcatggaagggcattagcagctataatagaaggtataccatcaaatattcatatagatatagattttataaataaggaattaaaaagaagacagactggctatggtagaggaaaaagaatgataatagaaaaggacaaagtggaaatatggtccggtgtcagagctaataaaactacagggaatcccataactttaattatttataataaagactataacaattggaaagaacttataaataaagaggtagaagataaagataaaatttttgttcctagaccaggtcatggagatttagtgggacacattaaatataatacaggagatataagaaatgtaatagagagaagctcagcaagagaaacagctattagaacagctgtaggtgctatatgtaaatatatattgaaattattgggtatagatataagaagcaaaatacaaagcataggagaaatatttgatgagaatgtagatatatataatgatcatatatataaagaaatagaagatagtcctttaagatgttacaataaaaaagtagaaaataacatgataaatgaaatagataactgtaaaaaagaaggagatactataggtggaagtatatatatatctataaaaggcatgccagtaggtataggaagttatactcaatgggatagaaaattagatgctctgttaagttattctattatgtctgtccagggaataaaggtagtagagtttggagaaggcctagatttaagtaaaagaggaagtacctttaatgacgagatatattatgatgaagataatataaaaagaaaaagcaataacgctggaggaattgaagctggagtatctaatggtgaggatataatagtaaaggcttatatgaaaccaataccatctataaaaaaaactataataaccattaatttaaaagaaaaaacaaatgtagaaaacagatacgaaagatctgatgtttgtggtgttgtgccagcttctatagtcttagaaaatgtatgtgcatttgaaatattaaaagaaattttgaatacatatccctgtgatgatttcaatatgttaaaaaaatacatgagagaaatg

SEQ ID NO: 16368 - DNA, 423 bp, Clostridium botulinum
atggctaaaaaagtagtaggaatgataaaacttcaacttccagcaggaaaggcaagtccagcgccaccagtaggtccagctttaggacaacacggtgttaacattatgggattctgtaaagaatttaatgctaaaactgctaaccaagcaggattaataattcctgtagttattactgtatatcaggacagatcttttagttttatactaaagactccaccggcagctgtattattaaagaaagcggctggaatagaaagtggatctggtgttcctaataaaactaaagtagctaaggttacaaaagatcaaattagggaaatagcagaaacaaaaatgcctgatttaaatgcaggatctatagaaactgctatgagtatgatagctggaacagctagaagcatgggcataactgtagaagaa

SEQ ID NO: 16369 - DNA, 312 bp, Clostridium botulinum
gtgacacaaatgatttttgaaaaaataaaagctacaatagcagaacaattaagtatagatgaagaggaaataactatggaatcatcttttattgatgatttaggtgcggattcacttgatatagttgaattaataatggcattagaaactgaatttgatttagaaataccagatgaagacgcagaaaagatttctacagtgggagatgtagttgactacataaaatcacatactgaggaattattgatttttatccccgcctttattagcggggattttatattaaaagataagtttattcttgagtttatt

SEQ ID NO: 16370 - DNA, 1017 bp, Clostridium botulinum
ttggggaaaggaaggaataaaatggattcaacagtttgttttttaggagcaggtagttttggaacagctttagctgtaatgctaggaaaaaaaggattgaaagttaacatatggcatagaaataataacatagtagaggatataaatatcaaaaaagaaaatataaaatatttacctaaagtagtaatacctgcaggggtaaaagcttataatgaaatagaaaaaagtatagaacaatgtgaatttatagtattagcagtaccttcccatgtgataagacaggtatgcaaaaagatacaaccttttataaaagaaaatcaaataatagtaagtatagctaaaggtatagaagagggtgcagggaaaaggttatcagaggtcataaaagaagaactgcctaataatcctatagtagtattgtcaggccctagccatgcagaggaagtagctcaagatatacctaccacagtagttgcgtcttcagagcatatggatatagctgaaaaagttcaggacctttttatgactaataaatttagagtgtatactaatgatgatttagtaggagtagaaataggaggcgctgttaaaaatattatagctttagctgcaggggtatctgatggtataggttatggagataacacaaaggcagccttaatgacaagaggtatgagtgaaataataagaataggtacaaagcttggaggtaaacaggaaactttttcaggtcttacaggtatgggagatttaatagttacatgtacaagtatgcatagtagaaatagaagggctggtatactaatcggtaaaggctatagcacagaagaagcaatagaagaggtaggtatggtagtagagggaataaaagcttgtaaagccttttatacattaaaagaaaagctagatgtagaaatgcctataacagatacattatataaagttttatttgaaaataaagagcctaattatggggtctatgaacttatgactagggataaaaaaatggaaataatt

SEQ ID NO: 16371 - DNA, 369 bp, Clostridium botulinum
atggcaagaatttcaggtatagacctaccaaaagaaaaaagagtagaaatcggtctaacatatatatacggaattggcttaccaacttctcaagaaatattaaaagctactggagtaaatccagatacaagagttaaagacttatcagaagaagaagttaatgcaatcagagattacgttaacaagaatgtaaaagttgaaggtgacttaagaagagaaattaaacttaacataaagagattagttgaaattggatcttatagaggaataagacatagaagaaatcttccagttagaggtcaaaagactaaaactaacgctagaacaagaaaaggtccaaagagagctataggtggaaagaagaaaaaa

SEQ ID NO: 16372 - DNA, 1663 bp, Clostridium botulinum
cctactattccagatggaatgtgggttaaatgtaataaatgtggagagatattataccaaaatgatttagaaaagaattatatggtatgtaatttatgtggaaatcattttagaataggtgttaaagaaagaataaaatatttattcgataaagatacctttaaagaatgggattataaaattaaaacagaaaatccattagattttaaaggctatgatgaaaaaatagaacatataaaagaaaaaacaaacttaagtgaagctgttacaacaggtaaatgtaaaatagctggtatggaagttgtagtatgtataatggatagtaaattcatgatgggaagtatgggatctgttgtaggagaaaaaataactagagctatagaaagagctatagggttaagattgccagttataatatttactgcatctggtggggcaagaatgcaggaaggaatattatctttaatgcaaatggctaaagtaagttctgcattagcaaaattagatgaagaaggattattatatatatgtgtactaacagatccaactacaggaggggtcacagctagttttgctatgcttggagatataatacttgctgaaccagatgcgttaataggatttgcaggtaagagggtaatagaacaaaccataaatgaaaagttaccagaggactttcagaaatctgaatttttgttagagcatggttttattgataaaatagtcccaaggtctgatttaagaaaagttttagcaaagcttattaatatgcatcaaaattctttttaaaactatacattaatattatttcttaatttagattggagatataaatatggaagataaaaaattgattcataatgtaaaaaaatatgcttctaaaaatgcttggcaaagggtaatattagctagattaaaagaaagacctacagcattagattatataaatattatatttgatgattttatagaattacatggagatagatcctttagtgatgaccaatctatagtatgtggtatagggttattaaacaataagagtgtaactataattgctcagcaaaaaggtaaaaatataaaagacaatataaaaagaaattttggtatgcctaagccagaaggttatagaaaagcgttaagaataatgaagcaagcagaaaagtttaaaaggccaatcgtatgttttatagatacacaaggagctttctgtggcatagatgcagaagaaagagggcaaggagaagctatagcaagaaacctattagaaatgtccagattaaagactatagccttatctatagttataggggaaggtggaagtggtggtgctttagccttaggagtagcagatagagtaataatgctagagaactccatatattctatattatcaccagaaggctttgcaagtatattatggaaggatgcatctaaagcaaaagaggctgcagaagtgatgaaaattacagcagaggatctaaaagaatttaatataatagataaaattataaaggaaccagcaggtggagctcataagaatttaaataaaatggcagaaaccttaaaagaaaatattataaatgaaatagaaatattaaaagaatatcctttggatatacttttagataaaagatataataaatttagaaacatgggagta

SEQ ID NO: 16373 - DNA, 2028 bp, Clostridium botulinum
atgtttaagaaatcattcggtgttttacaacaagttggtaaagctttaatgcttcctgtagcattattacctgccgctggtattttattagcctttggtaatatgtttcaaaaccctgactttttaaaacttgctccagcttttggttcaacaggatttcaagctttcgcaagagttatggaacaatcaggtaatataatttttgctaatctagccttattatttgcagtaggtgttgctgtaggattagcagcaggtgaaggtgttgccgcactagcagctatagttggattcttaattatgaatactactatgggtcttgtagttggtgtaactccaggattaataggtaaatctcatcctgagtttgcaagtgttttaggtataccaacactacaaactggggtatttggcggtattataatgggtattattgcagcatcattatataagaaatattacaatatagaattaccttcttatttaggattctttgcaggtaaaagatttgttccaataataactgcagcagttgctatacttgttggtttaataatggtagttatttggcctccaatccaacatggattaaattcattctcacacaacatgatagatgctaatagaactttagcagcttttatatttggtgttattgaaagagcattaattccatttggattacatcatatattctataatccattctggtatcaatttggtgaatatataaacaaagcaggtcaagttataaacggagatcaagctatattcttccaacaaattaaagatcatgcgcctcttacagcaggtacatttatgactggtaaattcccatttatgatgtttggtcttccagctgctgctttagctatatatcaagaagctaaacctgaaaagaaaaaacttgttggtggtataatggcctctgcagctttaacttcattcttaacaggtataacagaaccaattgaattctcattcttattcgttgcaccagtattattcggaattcactgtatatttgcaggattatccttcatggttatgcaaatattaaatatcaaaattggtatgacattctctggtggcgttatagatttcttaatatttggtgttgttccaaatagaactaaatggtggcttgtaattcctgtaggcttagctttctctgcaatttactattttggatttagatttgctataaggaaatggaacctaaagactcctggtcgtgaagatgatgcaggttcagaaagtgttaactacagttctgaagtctctttagctgctaaagtattagaagctttaggtggaaaagaaaatttagctaacttagatgcttgtataactcgtcttagagtaagtgttaatagtattgataaagtaaataaagaagaactaaaatcattaggtgcttctggagttatggtagttggtaataatatacaagctatctttggtccaaaatctgatcagttaaaagagcaaattaaagatgttatatctggaaaaattataactaaagatgttaaaatagaagaacctaaaaaagaaactgtaaaagtttcttctaaagataaatttgtagccccaatagaaggaaaaatactttctataactgatgttccagatgaagttttctctcaaaaaatgatgggtgacggatttgctatagagcctaaaaatggaacagtagtttcccctgtagatggagtaataactacagtattcccaactaagcatgctataggaataacagcagaaaacggacttgagcttttgatccactttggaatagatacagttaatcttaaaggcgaaggcttagaagccttagtagaacaagatgctaaagttaaagcaggagatccaatattaaaagtagatattgataaaattaaggatgaagttccttcaataataactccaataatatttactaatttaactgatgatcaaaaattagaaattgttaaacttggcagccatgttaaagctggagaagaagatatagttaaattaaaa

SEQ ID NO: 16374 - DNA, 369 bp, Clostridium botulinum
atgaagatattaatatctaatgcttcagagcagcctatatatgaacaaatcctttgccaaataaaagtcgctataatacaaggagaattaaaagaaggggagatacttccatctataaggaatctagctaaggaagttggagtaagtgttataactacaaaaagggcttatgaagagcttgaaaaggaaggcttcgtagaaacggtaaaagggaaaggaacttttgtagctgctcaaaataaggagcttttaagagaaaagaaaataaaaattatagaagaaaaattaaatgaagttatagaagacagtaaattattggacatatcttatgaggaaattttagagatacttaaaatattatattttcaa

SEQ ID NO: 16375 - DNA, 765 bp, Clostridium botulinum
gtgattattgtgcataaattttttgtacccgctgaaaatataattgatgaaaaagctataattgatggtgatgatgttaaacatatatataaggtattaaggttagaatgtggagatgctataaatataaataattgccagggaaaagaatataaaggtgaaatagaaagcatagataaaaaatctgttgttgtaaagatattagaacaggttgaagtaaataatgaaaaccctttaaatatttatttatatcaaggtcttcctaaatctactaaaatggatttaatagttcaaaagtctaccgaattaggtataaaagaaataatacctgttataacagaaagagttgaggttaaggcttcattaaaggaatttaaaaaattagatagatggaatagaattgcacttgaagcatgtaaacaatgtaaaagatctttaattccaagtgttagagaacctctaaaatttaatgatttgttggaagaaataaaggggatggatttaatagttgtgccttatgaaagcaaggaaaattacggtataaagtctcttataaaaaatatagaatatgaaaaagaaaatattaaaaatataggtataataataggaccagaaggtggctttgaagaaagtgaaataagagctttagaagaaataaaagctcaaatagtaactttagggcctagaatatttagaacagaaacagcaggtatagtatgtgcttcaataatttcatatgaattaggagatctaggaggaaatata

SEQ ID NO: 16376 - DNA, 255 bp, Clostridium botulinum
gtgaaaaacatggcagtaaaaatcagattaaaaagaatgggtgctaaaaaagctccattttacagagtagttgttgctgattctagatcaccaagagatggtagattcgtagaagaaataggatactataacccaataactgaaccttcaactataaaattagatgaagaaaaagttcaaaaatggataaaaaatggtgcgcaaccaactgatacagttaagaaattaatcgaaaaagcaggtatttctgttaaa

SEQ ID NO: 16377 - DNA, 411 bp, Clostridium botulinum
atgtttgaatggaaaaaatgttatagttgtaacataagtaaaattgataatcagcataaaagattatttgaattagcagatgaaatttatactatagtttcagttaatgatggatatgaccattttgatgaaattatggaagctataaaagcactaaaggaatatacagtatatcatttttcttatgaagaagaggtgatgagaaaatatgagtatagtgatttagataaccataaagtagaacatgatgcttttgtaaataaaattaaatctataaatgaagaggaaatagatgaaaagcaaaaaaactttttaatggatttactagagtttattgttaattggatagaaaatcatatattaaagtcggacttgaagtataaagaatatttaaatggattgggagtatat

SEQ ID NO: 16378 - DNA, 1632 bp, Clostridium botulinum
atgatatatatacaattattagaaagtatgtctttaattggtatagcggcttatttatatagtcaaactaaaacttttaataaatttattaaaaacaaatctgattataaatataagttaataattataactttttttagtgtgttatctatattaggaacttatactggagttaatatagaaccttatgcattagctaacgcaagacctataggggctatagtagctgggtatatagggggaccattagtaggaattatggttggaatcatagggggaactcataggtattttttaggtgggtttacagctctttcttgcgctatatctaccatattagaaggtatagtaggaggcatagctaatgtaattacaaaggatgaaggcttagatgtttcaacgggtgttacagcagcaataatagcagaagtattacagatgataataattttattaatagcaaaaccttatgaggctgctttggaattagaaagggttatagcattaccaatgataataacaaattctattggagtgggtatatttataaatattataaataatactcaagaacattataaaaaaattggcgctatacaatctcaaaaagctcttaatatagccaaaaaaacttctatttacttaagaagtggatttaatcaagaaattttagataaagtatgttcaataatatatgaatcaataaatttaaaaagtatatttattgctgaaaatgggggaatattttcttataatggagaagaattaaataaggaaaaattaaaatatagagtaaaggaatattttgatttcaaagattataagttaataaaatttgaagataataataaacaaaaattattctattgtataccgatatatacagataaggataagtttaagtttgtaataggaatacaagttaagtcctataaaagtatagataaatattttagtgattttgctaaagaattaagtgctcttttggctactcaaatagaattatatgaattagatcaattagctcaagaagtttcaaaggcagaattaaaaatgttaagaaatcaaatacatccacattttttatttaatacactaaataccatagcatctttttgtagaactgatcctataaaagccagggagcttatattgaacctttcaaattattttagacaaaccctaaaaagacaagatgaaaaaattatattgaaagatgaaatagagtttttagagtcttatttagctatagaaaaggctagatttggagaaaggctgaatatagatattaatataccagaagagcttttagatgctaaagttccaatatttgtacttcaacctataatagaaaattctatgaaacatggtatactaataaaaccacaggggggagaagtaataattactgcaatagatgaaaaagataaaattaaatttgtaataaaagatacaggagtaggtatggataaaaatacacttagctatgtagtggaaagttggccagggataggactttcaaatgttaataaaagattaaaattactctatggggaaaaaagtttcatacgcatagaaagtaaactaaatgaaggaacaaaagttatgttttgtatacctaaggaggtgttt

SEQ ID NO: 16379 - DNA, 801 bp, Clostridium botulinum
atgataaaggatataacaataggacaatatataccaggagattcttttgtgcataagttagatccaagagttaagataatcatatcccttatatatataattgacctttttatagttaacaattttaaagggtatatatttatagtgctatttactttagcagctatattaatttcacaaataaaatttaagtatatatataaggggcttaaacctatacttatattagtgataattacagccgttttaaatctatttctaacaccaggagataccttattgtttaagtggaaatttattactatatataaggaaggattaaggttagctatatttatggttctaagattagtatttttaataataggaacatcattattaacgctaacaacttctcctatagaacttacggatggaatagaaaaattactaaatccattaagaaaaataggagttccggctcatgaacttgctatgatgatgactatagctctaagatttataccaacacttatggatgaaactgataaaattatgaaagcacaaatggctagaggtgcagattttgaatcaggtaatttaatacaaagagctaaaaatttaatacctctactagtgccactttttattagttcatttaggcgagcagatgaactagctatggccatggaagcaagatgttataggggaggagaaggaagaactagaatgaaagaactttctctttcgtcaagagattttgtagcagcagcatttacttctattttagttatactatctatttggagtaggatgtggact

SEQ ID NO: 16380 - DNA, 1284 bp, Clostridium botulinum
atgtcagcttttatagtattaggggcccaatggggcgatgaaggtaaaggaaaaatgactgattatttagctgaaaatgcagatgtagttgtaagatttcaaggtggtaataacgcaggtcatacagtagttgtaggagaaaaggaatataaattacacttaataccttcaggtatactgtataatgacaaactaaatgtaataggaaatggagtagttttagatccaaaggctttatttgaagaaataaactatttagaatctttaggagtagaaataacaccagatagattaataataagtgatagagctcatgtaataatgccatatcataggatattagatggaataaaagaaagagctagaggaaataaagatataggaactacaggaaagggtataggaccaagttatacggataaaatggaaagaagcggtataagggtttgcgatcttatacataaagaagtttttgaagaaaatttgaaagaaactttagaagtaaaaaataaaataataacagaaatatttggtggaagggctttagactataatgaaatctataatgaatatttaggatatgcagaaaaattaagaccttttgtaaaagatatatctgttatagttaacaaaaaaataaaagatggtaaagaagtgttatttgaaggagctcaaggaacattacttgatatagattatggaacatatccttatgtaacatcttcaagcacaatagctggaggagtttgcataggagcaggtgtagggccaacagctataactaatgcagtaggtatagcaaaagcatatacaacaagagtaggaaaaggtcctttcccaacagagcttttagatagcactggagactgggtaagagaaaagggacatgagtttggagttactacagggagagcaagaagatgtggatggttagatttagttatattaaaaacttcagcgagaatatcaggacttacaagctttgcagtaacaaaaattgatacattagcaggattagatacattaaaagtatgtacaggatatagactaaatggagaaattatagattatgttcctgctagcttagaagatttagcaaaatgtgaaccaatatatgaagaatttgaaggttgggatgatagtatagctaatgctagatgttatgaagatttacctgaaaatgctataaaatatttaaagaaaatagaagatttcacagaaacaaaggtatctatagtttctgtaggtccaaaaagagatcaaactatgatgatatcagaaatt

SEQ ID NO: 16381 - DNA, 2106 bp, Clostridium botulinum
atgattcatacattagaaactactgtagcaggaagaaaaatgaaagtagactttggtaagacaggaatgctttcaaatgctgccatattcatgagttatggagatacagtagttatgataaatgccaacgcttctaaagagccaagagagggaatagattttttcccattaagcgttgaatatgaagaaagactatattcagtaggaaagattccaggaggattcatcaaaagagaaggaaaaccttctgacaaatctatattacatgccagatctatagatagaccattaagacctttattcccaaagggatacagaaatgatgttcaaatagttaatacagttttatctgtagaacaggataatttaccagaaatattagctataaatggctcctctttagctctatgcctatctagcataccatttacaacaccagtagctgcagtttctgtgggattagtagatggagaatttataataaatccaactgtagcccaaagagaaaatactatattagatttaactgtatgcgctacaaaagaaagagttatgatggtagaagcaggtggacaggaaatagatgaggaaactatgtatagtgctatcatgtttggttttgaagaatgcaaaaatatagttgcattccaagaagaggctgtggctaagtttggaaaaactaaaaatgaaccagtattatacaaagctgacgaagaagtagaaaaagaagtaaaaagctttgcttttgatatgataaaagaagctatgtatataatggataaagatgaaagaaatgctcagttagataaagttaaagaaaaaatatcagaagagttttcagaaaaatatgaagacaaagtggcagacatagcagaagttatatataaaactcaaaaagaaatagttagaaacatgcttttaaatgaagatagaagaccagatggaagagcttttgatgaagtaagacctataagctgtgaagtgggaatacttccaagaactcatggtacgggtttatttacaagaggattaactcaagtaatgactgtagctactttaggagctttaggagatgttcaaatattagatggtatagcagaggaagaatcaaaacgctacatgcatcattacaatttcccatcctatagtgtaggagaagttagacctttaaggggacctggaagacgtgaaataggtcatggagctttagcagaaagagctttggaaccattaattccatctcaatcagagttcccatacactataagattagtatcagaagtactaagttcaaatggttcaacatcacaggcaagtgtttgcggaagcacattagctctattagatgcaggtgtacctataaaaaggccagccgcaggtatagctatgggacttataactagtgaagatttagaaaaggaaaaagtaataacagacattcaaggtatagaagatttctttggagatatggactttaaggtagcaggaacagaaaaagggattacatctatacaatttgatacaaagataaaagggttatcaaatagttgtgtaaaggatgcattagaaggcgcaaaaaaggcaagactacacatattaggaaaaataaaagaatgcataccagaaccaagaaaagaattatctaaatatgcaccaagaacagaaataatatgtatagatccagaaaaaataagagatgttataggtgctggtggaaaggtaataaataaaataatagcagataccaacgtaaaaatagaaataaaagaagatggaaaaatatttgtaacatctaataatgagcctgaaggtgttaagaaagctataagtataatagaaggattaacaaaggaagtagttcaaggagagatttatctaggtaaagtaactaaaactactaattttggagcctttgtagaaatactgccaggtaaagaagggctagttcatatatctaaattagattttgctagagtagaaaaagtggaagatgtagtatctgtaggagatgaaatattagttaaggttacagacatagataatcaaggaagaataaatttatcacgcaaagatgctattgccaagaaagaagaagaaaaagataaa

SEQ ID NO: 16382 - DNA, 2364 bp, Clostridium botulinum
gtgaaggataaatctattaaggttttagaatttaataaaatacaggaaattttaaaaaattacacttgtacaaaagctgcaaaagatataatagaagatttaaaaccttatgatagtatgtatgaagtaagggagcacttagaagaaacaaaggaggcctttaaattattgattacaaagggagcaccaccctttgaaggggtatacgatataagaagtggaatttccttagcagaaaaaggatctgcattattgccagggcaacttttaaaaatagctgcagttttaaggtgtgcaagaagattcaaagaatatataaatcataaggaagaggaagaaagctatagggttttagagaatatatgtgagggtattttctcattgcctaaaatagaagaagaaatatttaatgctatagaaggagaagatgaaatagcagatagagccagttctactctttataacataagaagatctttaaaagaaaaaaattattctgtaagagataaaataaactctttagttagaagttattcctcttatcttcaagaaaatatatatacagttagaggagatagatatgttttaccagtaaaggcagaacataagggagcagtaccaggacttgtgcatgatcaaagttctacaggggctactctttttatagaacctatgagtttagttaacttaaataatgaaataaaagaacttatgttaaaagaaaaggcggaaatagaaagaatattaactgttctatcagctaaaataaatgctaatataactggagtaaagacagatgctaatatagtatgggaattagattttatatttgctaaagcgaaatttgctagtgaatataattgcacttgtccaactattaatgatgaaggtatcgttgatattatagaaggaaggcatcctcttatagatagaagagaggtagtccctataagtgttaagttaggagaagagtttacatccttaatgataacaggacctaatacaggaggtaaaactgtaactttaaaaacagtagggttaatacatttaatggctatgagtggacttatgattcctgctagagaaaactctgtaataagttattttaataatgtttttgcagatataggagatgagcaaagtatagagcaaagtttatccactttttcatctcatatgaaaaatatagtagaaattatggataaagcagatgagaactctttagttttatttgacgaattaggagcaggaacagatccaacagaaggagcagcattagctatctctatattagaaaacttaagaaaaagaggaacaaagataattgctacaactcattatagtgaactaaaagcttatgttttaagaaaagaaggggtagaaaatgcttctgttgagtttgatgtggaaactttaagacctacttatagattgttaataggtataccaggtaaatcaaatgcttttgaaatatctaaaagattaggattgccagattatattatagatttcgctagagaaaatatatctaatgaaaatataagatttgaagaattaatccaaaacttgcaagaaaagagtataaaggctcaagaggatgcaagacttgcagaaaatcttaaattggaaagagataaagaaaagaaaaaatacgaagaaaaattagaaggacttcaaaaagttagagataatgctttgatagatgcaagaagagaagcaaagaatataataaaggaagcaaaagaagaggcagataaaatattaaaagatataagacaattagaaagaatgggttattcttcagatgcaaggcgtaaattagaagaggaaagaaaaaaattaaaagataaattagattctattgaagaaaaggaaatcaaaacagttcataaaggagaagctttaaagaatgtaaaagaaggagatgaagttcttttagcttcaataaaccaaaaggtaatagttctatcaaaaccagacaataaaggtgatgtattagttcaagccggaattatgaaaataacagctaatattaaagatttaagagctgctaagggaagtaattctaataatagttcatcaaaaataaagaaatctaaaaaactcaatttgaatttaaggagagtagagtcttctgtggatcttagaggaatggatgcagaagaagctatatatactgtagataaatatttagatgaggcttatttaggtggcttgggagaagttactatagtacatggtaaaggtacaggagttttaagaaaaacaattatggatatgctaaaaggtcattctcatgttaagaaatatagactaggtgaatatggtgaaggtggtactggagttacagtagtagagctaaag

SEQ ID NO: 16383 - DNA, 2490 bp, Clostridium botulinum
atgggaaaaaagaaaaaaaagcgcaaatctagcgcctttaaaataatacttaatgtctttttaagtattttcttagtagctggagtagcctttggtggaattgtgtttgctatgataaaaacagctcctccactaaatgtacagcaagttctcacttttgatgaaccctctatactttatgatgataaaggtcaatatatggataaagttataactaacgaacaaagaattgtagttgattataaaaatgtaccccaaaatttaaaaaatgcatttgtaagtatagaagatgaaagattttataaacatcatggagttgacataaaaagatttactggtgttatattaattaatgtgactaataaaataaaaaggagttctaaacttcaaggagcttctactctaactcaacagttaataaaaaatacagttttatcctctgaagtttctattaaaagaaaagttcaagaaatgtacttatctatacaactagaaaaagaactatcaaaggatgaaattttgggtgcctatatgaatagtatatttttaggcggaaatgctttaggagtagaggcagcatcaaaacagtattttaataaaagtgtaaaagatctatctttaatagaatgtgcttttattgctggagtacctcaaagtccatcagtttactatccctattcatctgcttctaagaaaaacccttctatttatttaaatagaacaaaaactgttttatataaaatgttagacaatggctatattactcaaaatgattataataaagctttaaaggatttagatagtaaaaagctagtctttgctaaaccatctgcccctagcaataagttagcctatgaatggttctctattcctgctattgagcaagtaaaaaaagatttaaagactcaatataaatatgatgacaaacaaattcataaccttttagttaatggtggcttaaaagtatatactactatgaataaaaatttacaagataaaactcaaaatacaataaataatgcctattatttaaattcttataagagtaatggtatgatatatcctcaagcctctgctgtaataatggactatcataatggtgaggtaaaaactataattggaggtaggggcgaccaacctgctagatcttataacagagcagcctcttataactatctaagacctgccggttctagtattaaacctcttacagtgtatagtgctgctatagatagtaaaaaagccactgctgctactggatttgaagattctccaattccaaataatataggacgtaaatatagttctggagcaccttataatcctaaaaatagccctgatatttattatggatatgtaaatgtaagagaggccttaatgcgttctataaatgtagtagctgtaaaacttgtagataagataggactaaatactagtatacaatatgctgaaaaatttggaattcctatagatcaacacgatagatctagtatagcatctctatctttgggagaattacataaaggtactaatcctttaataatggctcaagcctacggtgtatttggcaataatggaacctacacagaagcaaagttatatacaaaagtagtagatagaacaggtaaagttcttttagaacctaaaactaatacaaaaaaagttctttcaccagaagcagcctttataacttatgatatgcttcaaggtcctgtaagcgaaagtggtactggacctcaagccaattttggtaatatggaagttagaggtaagactggtacatctagtgatatgaaaaatttatggttctgtggattaactccttattattccgcagctgtttggataggtaatgacaattcttctacagtggatggggtatatagtagtactgcagctagactttggggagatattatgaaagaatttcatgttaatcttccttataaacaagttcaaaaaccagctagtgttgtaactgctaatgtcgatagaatttctggtaaacttccaactcagctatcttatagagatcctagaggtagtacagtatataatgaattttttataaatggaactattccaacagaatatgatgatatacatgtagaagctcaaataaataagttaactggtaaattagcaagtaaattcaccccttcattccttgtagaatctagggtattcttaagaagagattactctcctggtgtagaacttttagatcaacaatggcttctcccttattctatagacgaaggaggaagcttaccacctactgaagaaaaaaataactctaatactagagataaaaataaagataagaataaaaataagaataaagataagaatccttcacaggataaacctaataataataacaatgataacaatagtaacaacaataataacaataacgacaataacaacaatactaaacctcctgaaaatgattcaaatcaaaatcacgaagacaataaaaacaaacaa

SEQ ID NO: 16384 - DNA, 618 bp, Clostridium botulinum
atgaaatttaaaaaatttattacactaattatttttatatcaattattagccttataaatggctgtggtagcaataatagtgacaaaaacaataatacaagtaatactactagtaatacaaatagtaaaaaaagcaatagtacaagcaatgctgttagtaatataaattcaataaaagatattaagtatgataatttacaaaaattatatctaagtataaattcaaatatgtcttacttagaagctctcgaaaaagtaaaaacaacaggcttaccttatagcgaaactgacttcaatcaaagtaaagcaataaaaattgcatttaaagaagcagttacacctcaaaaatatgccgaagaaggagatcatataaacataagctttgattatgatagaaataataattcttattcatttagcacaatagaatatttcaatcataaaaaatatataactgtatttgaatatagagacgggtcatattgggatcttagagataaaaaggacgctggattatacataaataattataaaaatacttctggaagtaaagaagaaaaatatataaaggcatcaagcaaagaagaacaacttaaatacatatatgattacagtgaa

SEQ ID NO: 16385 - DNA, 1287 bp, Clostridium botulinum
atgagaaaaatattgtattatgactgtttttcgggaataagtggggatatgaatttaggtgctttaatagatttaggtgtagataaggagtatctattaaaagaattagctaagcttaatattaatgatgaatttgaaattaaaataaataaggactctagaaaaggtatatcaggaacaaaagttgatgttatattaaaaaatttacatgagcataatcatgaacatgaacacagccatgattatgtacatagtcgtggacatgagcatgaacacaaccatgaacatagccatgagcatgaacataatcatgctcatgatcacagaaatgtgataaatataaataaaataatagataacagtaatctaaatgataatgttaaaaaaattagcaaagaaatatttttagaggtagcaaaagctgaagggaaagtgcataataaacctttagaagaggttcattttcatgaagttggtgcaacagattctatagtagatatagttggggctgctatatgtttagattatttaaaagtagataaagtattatgttcaaaggttcaagtaggatctggatttgtaaaatgtgcccatggaacaatgccagttccagcaccagctacagcagagatattaaaagatataccaatggtatcttcagaagaaataccttttgaagcaactacgcctacaggagcggctatagtagcttctacagtatataaatttacacaaaacaaaaatttttatattgaaaaagttggatatggtataggtggaaaagatttatcagatatacctaatgtattaagagtttttttagcagaagttaaagagcaggaagaaaatgatattgaaaaagaagaagctttaatattagaatgcaatatagatgatatgaattctgaaatttatgaatatgtgattaacaaactacttcatgaaggagcatcagatgcatatataacaccaataataatgaagaaaactagacctgctgctaaattaacggttctatgtgaaaataaattagaaaatattatgagagaaattatatttaaagagactactacattaggaataagaaaatattctgtagagaaatctatgctaaagagaaaaatagaaaaagtaaagactatatatggagagatttctgtaaaaaaatcttatttaaaaggtcaggtattaaacagtaaaccagaatatgaggattgcaaaaaaattgcattagaaaataatatacctataaaagaagtttatgaggcagttaatgaacgtaaggag

SEQ ID NO: 16386 - DNA, 695 bp, Clostridium botulinum
gggtctttccgtccaatcgcgggtagcaagcatcttcacttgcactacaatttcgccggatttgctgttgagacagtgcccaaatcattacgccattcgtgcgggtcggaacttacccgacaaggaatttcgctaccttaggaccgttatagttacggccgccgtttactggggcttaagttcacaccttcgcttacgctaagtgttccccttaaccttccagcaccgggcaggcgtcagcccctatacatcagctttcgctttagcagagacctgtgtttttgctaaacagttgcttgggcctattctctgcggcctactttcgtaggcaccccttctcccgaagttacggggtcaatttgccgagttccttaacagcaattcttccgatggccttaggattctctcctcacctacctgtgtcggtttgcggtacgggcacctattcactcgatagaggcttttcttggcagtgtggaatcagatacttcgccataaatggctccccatcacacctcagcttagctcgacggatttgcctatcaagcatgcctaagtgcttagacgcacatccaatagtgcgcacatcttatcctactgcgtcaccccatttctcaaacgtaaataggcggtatcggaatatcaaccgattgtccatcacctacgcctttcggcctcggcttaggtcccgacta

SEQ ID NO: 16387 - DNA, 2637 bp, Clostridium botulinum
atggaaagaatgggtttaaatgaaataagggaagaatatctaaagttttttgaaagtaaagcacatttaagattgccgagcttttctttagtgcctaaaaatgataaaagtttacttttaataaatgcaggaatggcccctttaaagccttattttacagggcttcaagttccaccaaataaaagggtcactacttgtcaaaaatgtgtaagaactggagatattgaaaatgtaggtaaaacttcaagacatggtactttctttgaaatgatgggaaatttttcctttggggattattttaaagaagaagttattccttgggcttgggaatttactacagaggttttaaaattacctaaaaacaaattgtatgtgactatatatgaggatgatgatgaagctttagacatatgggtaaataaaacagatatggatcctaaaagaatatttagattaggaaaagaagataatttttgggaacatggattaggaccttgtggaccttgttcagaaattcactttgataggggagcaggagaggttaaaacttcagaggaatttgtaaaagctagtgatgaggataaaatagtagaattttggaacttagtatttactcaatttgataaagatgaagaaggaaattataataaattagctaatcctaatatagatacaggtatggggcttgaaagaatggctactataatgcaaaatgtggatactatatttgaagtggatacaataaaagctgtattagataaggtgtgtaaactttcaggagctaattacaaagaagatagagtaaaagatatatctataagaataataacagatcacataagaagtattacttttatgataagcgatggtatattaccttctaatgaaggaagaggatatgttcttagaagacttttaagaagagctgcaagacatggaaaaactttaggaataaacaatacatttctacataacttaacagacatagttatagaaaattgctataaaaattatccggaattagaagaaaaaagagaatatataaagaaaattataaaattagaagaagaaagatttgatgaaactatagatgctggaatgcaaatattaaatgattatataaaagaagttaagaataataattataagatcctttcaggagataaagctttcaaactatatgatacttatggattcccagtagaattaacagaagaaatattagaagaggaaggtataagtatagataaagaaggtttcaacaaagaaatgaaggagcaaagagaaagagctagatccgctagagaagaaactaattatatgggggcagaggatactatattaaataaaatagatctaaatataaatacagactttgaaggttacgataaactagaagtaaaatcaaaagtggctgtgattataaaagatgaagagttcaaaaatgaaatggaaaaaggaaatgaaggggtaatagtaacttataatactccattttatgcagaaatgggtggtcaaataggagatacaggtattatatataacgataattttaaagcagaggttatagattgtaaaaagaacatatcaggtaaaatacttcattttgtaaaaattttagatggaaaagttgctttagaagatcaagttatattaaaagtaaatgaagaaagaagaaataatataagaaaaaatcatacagcaacccatatactacatgctgctttaataaaagtggtaggagatcatgtacaacaatcaggttcttatgtggatgatgaaagactaagatttgactttagtcattttgaagcagtatcagaggatgaattaaaagaagtagagaagatagtaaataaagagataatgaaagccaatgctgtaaatactaaagtaatgaatatagaagaagcaaaacagcagggggctattgcattattcgataataaatataaggatgatgttagagtagtttctgtaggagattttagtaaagaattatgtggtggaactcatgtaagtaatagtggccagattggaatatttaaaatagtttccgaggcaggggttgcagctggcataagaagaatagaggcagtaacggcttttaaagctatggaatatgtagatcataaaaataacatattaaaagaagcagctcaaatattaaaatgtaacgaaaaggaattattaaataaattaaatcatcaagttctagaaatgaaagaaaaggaaaaggaaatagaagctttaaaattaaaattagcaagtggtgcagaagatgaaatattagataacataaaagaaataaaaggtgtcaaagtagcatcagctgcagtaaaggatatagatgggaatgccctaagagatttaggcgataaaataagagataatatgcaaagtggagtagttgttctaggaagtaactataaaggtaaagttttatttgttgctatggcaactaaggatacagtggctaaaggagtgcattgtggaaaaataattaaagaggttgcaactatagccggtggtggtggtggtggaagaccagacatggcacaggcaggaggtaaagatccaaataaattagaagatgctataaaaacagtagaaactgtagttgaaagtttagttaaa

SEQ ID NO: 16388 - DNA, 633 bp, Clostridium botulinum
atgaaaaatttaatgaataaagtttatggacaatttagaaggcctaaaggaatgataggtaaatttattgcaaaaagtatgaataaagaacactttaaagtaactacttggggacttcataaacttaaagtaaaagatagtaatatcatattagacataggctgtggaggaggaaggactgtaaacagacttgctcatggagttccaaaaggaaaggtttttggcatggattattctttagattgtgtgaatttttctaaaaaatataacaaagatttaatagaaaatggcaaagtagagattattcatggtagtgtagataaaatgccctttgaagatgataaatttgatattatatctgcagtagaaactacatatttttggccaaatttattagacagttttaaggaagtaaaaagagtactaaaaccttcaggaaagtttattatagtaaatgctagttatactaatgaaaaatttaaagaaagaaatgaagaatatctaagaaaagtaccaggtatgaaaatatatagtgtggattatataaaaaacttattagaagaagtgggatataagaatatatccatagagaccttagaagaggaaaattggctatgtgccataggagaaaaa

SEQ ID NO: 16389 - DNA, 756 bp, Clostridium botulinum
ttgggtaataatatgaaatgtttagaaggtagaaccgcaatagtaacaggagcaagtagaggtataggaagagcaatagctaaaaaattagcgtctatgggggctaatttagtattaaattatagaagtagcgctaaagaaatagatactttattagaagaaattgaagaatttggaatagaaactttagttattcaaggggatgtaagttcttttgaggattctaaaaaaatagcagatgaggcaaaaaataagttcggtacaatagatatacttataaataatgcaggaataacaaaagattctttaatattaagaatgacagaagaagattttgataaagtaatcagtgttaatttaaaaggtgtatacaattgtagtaaacatatagcacctataatgctaaaacaaagatcagggaaaataataaatatttcatctgtagttggagtagcaggaaatgcaggacaatgcaactatgcagcggctaaggcaggggttataggtataactaaatctttagctaaagagctgggtagtagaggtataactgtaaatgcagtagcaccaggttatataagaacagatatgacagatgcattacctgaaaaagtgaaaaaatctatagaggatttacttccacttaaaagattaggaactccagaagatgtagcagaagctgtaggatttttagcttcagataaagctgcatatataacaggtcaagttatacatgtagatggtggaatgattata

SEQ ID NO: 16390 - DNA, 735 bp, Clostridium botulinum
gtgaaatacatggaacttaatatatgtcatctataccccgatttattaaatgtatatggggatataggtaatattctagtattaaaatatagagcagagcaaagaggcataaaaataaatgtatctaatgtttctataaaagataactttcctatagataaatatgatatagccttatttggaggcggtcaggattatgaacaatccatagtttcaaaggatatgttagaaactaaaaaagatgaccttacaaaatacatagaaaaaggaaaagtcttattagctatctgtggtggttatcaattattaggtaaatattatactacaccagaaggtgaaaaacttgatggattagacatattagatatatacaccgaaggtggagatattaggtttataggaaatacagtaataaaaaatgaagaatttaatgaaacctatgtgggtttcgaaaatcattctgggagaacctatataggaaatttaaaacctttaggtaaagttatagctggatatggcaataacggtgaagatcaagaagaaggctgtatatacaaaagtaccttctgcacctatttccatggttctctactttccaaaaacccagaattagcagacagactactttctaccgctttaaaaaataaatatggggaagacataaacctagaacccctagatgataatctagaaatcaaggcaaaggaatttataatccatagagaaagtaaggct

SEQ ID NO: 16391 - DNA, 795 bp, Clostridium botulinum
atgaagataatagttattggaccaaggggaaaaatgggaagcttagttactaaatcttgttatactaatgaaaatatagaacttgtggcagcagtagccccaaaggaaagggattacataggacaggatcttggtatagttgcaaacctaggcaaaaatatagattgtaaagttgtagataatttagagaatgttatagataaatgtgattgcattatagatttcacagatccagaaacttctatggatgtatttgaaaaagctttaaagagtaaaaaatctgtggtttgtggtactactgggttttcagaagaagaaataaataggataaatgaaatttcaaaggaaataccacttgttctagcaggaaatacttctatggttgtaaatcttatgtataaattagtagaacttgcagctaatactataggcaatatgtctgatattgaaataatagaaatgcatgatagatataaaaaggatgctccaagtggaacttctttagaaattggagaagttttagctaaaacatttaataaggaattgaaagaattagctcaattcggaagatgtggaaaaggtgaaagagaagaaggaaaaattgcatatcattccttaagagcaggagatatttcaagtagtcatacagttatgtttggtcttatgggggaaagattagaaataactcatcatgctcataattgggagtgttttgccaatggaggctgtcaagctgccttatttttaagagacaaaaaaccaggaatatattccatgaaagatgtattaggttta

SEQ ID NO: 16392 - DNA, 2193 bp, Clostridium botulinum
atgggaaaagtattagttttagcagaaaaacctagtgtaggaagagatttggctaaggttttaaaatgcaataaaaagggtaatggttatttagaaggaaataaatatattgtaacttgggctttaggacatttaataactttatctgatcctgaaagttatgatgaaaaatataaaaaatggagcatggatactcttccaatgctacctaagagaatgaaaactacagttataaagaagacttcaaagcattttagtgaagttagaaaagttatgataagaaaagatgtagaagaacttgttatagctacagatgcaggaagagaaggagagcttgtagctagatggataattgataaagtaggttttaaaaagcctataaaacgtctttggatttcttcacaaacagataaagctattttagacggatttagaaatttaaaaccgggaaaaaattatgagaatttatatcattcagcagtgtgcagatcagaagcagattggattgtaggacttaatgttacgagagctttgacttgtagatataatgctcaactttcagcaggaagagttcaaacacctactctagctatgatagttcaaagagaagaggaaataaagaattttaaacctagagattattatagcatagaaggtaagactaaaggatttacaatgcattgggagagtgctaagggtagatttaatacctttgatgaagatttagctaaaaaagtagtttcaaaagttacaggtaaagagggaaaaataatagaggtaacggaaagtgataaaaagaaatatgctccggctctttatgatttaacagaacttcaaagggatgctaatagaatatttggatattcagcaaaacaaaccctatccataatgcaaagattatatgagaatcataaaattttaacttatccaagaacagattctagatatatttcaaaggatgttgttggtactttaaaagatagattaaaggctatatccattagtaattatagtaagtttacaaatgaaatattaaaaggaaacattaaggcacataaaggttttgtagatgatagtaaggtttcagaccatcatgctataattcctacagaagaaaaacctaaattaggtaacctaagtggtgaggaaagaaatatttatgatttagttattaaaagatttttatcagttatgttaccaccctttgaatatattcaaactaccattaaatcagaagttataggtgaaaaatttgtagctagaggaaaggttatcaaatccaagggatggaaagcagtttatgatagagaagaattcgatgataaaaataataattcagatagtgatgatataaaagatcaaactcttcctaaggttaataagggagatggtataaaattttctaactttaagataaacaaaggtcaaacaaagccgccagctagattcaatgagggaactttattatctgctatggagaatcctcaaagatatattaatttagataaggagagttctaaaaccttaggagaaactggtggacttggaactgttgcaactagagcagatataattgaaaaattatataatactttttatatagaaaaaagaggaaaagaaatagttccaacttcaaagggaaagcaagttatagatttagtacctaaggatttgaaatccccacttttaacagcgaaatgggaaagagaattagattccattagtaagggtaatttaagaggacagatatttataaataaaatgagagactattctacaaaacttgtagaagatgtaaaaaatagcaaggataaatatgttcatgataatttaactggtaaaaaatgtccacaatgtggcaaatatatgttagaagttaagggtaaaaatggagttataaatgtatgccaggatagagaatgtggctatagagaaaatgtaagcagatttaccaatgtaagatgtcctgagtgtcatgtaaaattagaacttagaggagaagggcagggtcaaatctatgtatgtacaagatgtagttttagagaaaaactttcttcctttaataaaaagtatagaaacaatcaagaaaaattaaataaaagagatgtaactaaatatatgaaaaaaatgcaaaaagaaaatgacgaaccaataaattcagctttagcagaggctttatctaaattgaaatta

SEQ ID NO: 16393 - DNA, 723 bp, Clostridium botulinum
gtgatttttatgaagtacaatgatttaaaaattaagatatttgcagacggagcagacttaaatggtatgttagatgcttataataaaggaatagttaaaggatttacaacaaatccatctcttatgaaaaaagcaggaattactgattacaaggaatttgcaaaggaagtattggcaaaaataaaagatatgcctgtatcttttgaagttttttcagatgatttagaaactatggaaaaggaagcagaggttcttggaaatttaggtgagaatgtttatataaaaatacctgttacaaacacaaagggtgaatcaacagcaccacttataaagaaactttcagaaaaaggatatcaccttaatgtaactgctatatttacaatagatcaagtaaaagaagtagtaggagcattaaaatctggagtagatagtatagtatcagtatttgcaggaagaatagcagatacaggagaagatccagttaaaattatgaaagaagcaagcaaaatttgcaaaactaaagaaggagtagaacttttatgggcaagttgcagagaattttatagcatagtagaagcagataaatgtggttgtgaaataattactgtaacaaatgacgtacttaaaaaaatgcctaacatgggaaaggatctaaaggaatattctattgaaactgtaagaggattttacaaagatgcatctagccttgggttttcaatttta

SEQ ID NO: 16394 - DNA, 1335 bp, Clostridium botulinum
gtggaaaaaattaaagtagcattagttagcttaggttgtgataaaaatagaattgattcagaacttatgctatacaaattaaatgaagaagcagaactagtaaaagatcctaaagaagcacaggtaattatagtaaatacctgtggatttattgagaccgctaaggaagaatctataaataccattttacaaatggcttcctataaaaaaactcataattgcaaagtattagtagttacaggatgtttgactcaaagatataaaggggaacttaaagaacttatcccagaaatggatattatgttaggggtcaatgattatgataagttacttgaaagtataaaagtttttttgaaatcaggagaaaaaagtttttatcataaatatagtgatacaaaaataaatgagggaaatagaatattaactacgccaacatacacagcctatgtgagaatagcagaaggatgtaataatttttgtacttactgtgccataccacgcataagaggaaagtatagaagtagaaaaaaagaaaatatattaaaggaagtagaaaatttagctaaacaaggagttaaagaaataatattgatagctcaagatacaaccatgtatggaatagatatatatggcaaaaaagttttacatgagcttctaagagatatttctaaagttgaaggtgtaaagtggataagattattatactgttacccagaggaaataactaaggaacttatagaagagattaaaaataatgataaggtatgtaaatatttagatttgcctatacagcagataagtaattctgttttaaaaagaatgggaagaaaaactacaaaggaaactatcataaatataataaaaaaattaagaaaagaaatagagggtattactttaaggacttcattaatagtaggatttccaggggaaacagaaggagagtttagtgaacttaaagaatttgtttcagatgtaaaattagataaattaggtgtatttaaatattcaaaggaagaaggaacgtcagcagctcttatggaggaacaaatagatgaagaaataaaagaaaaaagagaagaagaaataatgatacttcagcaaagtatatctaaagacataaataaagagaaaataggtaaaacatatgaagtcatagtagaaggtaccaaagaagatatgtattatgggagaaattatgaaatgtcaccggagatagatggagaaatttactttgaaaaggatgaaaacgtaaaaattggtgatataataaaggtgaaggtaactcatagtttagaatatgatttaataggagttgtttataatgaacttagcaaa

SEQ ID NO: 16395 - DNA, 1056 bp, Clostridium botulinum
atggtggaaaaattaaagaagaaaattaaagaacatttttccaatggtcctaaggcaattttgattgttgtagtaatcttaatgatagcgagcatagtaattactaatatgagaaaaacaataattgtttcaatagacggaaaagaaagccaaaaaattacaacatttaaaaaaacatatgcaaaagccttaacgtcgaaaaatatacaagtgggaccaaaggacaaagttcagccccaattggacgctgaaattaaagacggaagcaaattaagcataaagaaagcagttaaagttaatgtagaagttgatggtaagaaattagctattcaatccgcagaaaacaatataggagatatgctaaaaaaagagggtatacaagttaaaaaacttgataaagtagccccaagcaaagaagaagagataaaaaagggattgaaagtaacagttacaagagtagaagaaaaagtaataaagagcaaaaaaaatatggattatgaaacagtagttaaagaagatgattcccttgaaaaaggtgacaaaaaagtcataagggaaggacaaaatggagaaaaagaagtaacaacaaaagtagtttttgaagatggaaaagaaaaagtaagaaaagtagtatcagaaagcataaaaaagcaaccagtatctaaggtagttgcaatgggaactaaagttacaactgttaacgctctttctagaggaggaagtgttactggtacgccaggtggtagattattaagaatgagagctacagcatatacatcaagttatgaagatacaggtaagagtcctggaagccctgattttggagttacagccacaggaactacagcaagaagaaattcaggaggatatagttcaatagcagtagatccaagggtaatacctttaggaacaaaactgtttgttgaaggttatggatatgctatagcagaagataccggtggagcaataaaaggaaatgttattgatttatattttgattccaatgttgaagtatcaaattggggttcaagatgggtgaatgtttatattttagat

SEQ ID NO: 16396 - DNA, 762 bp, Clostridium botulinum
atgaaagaaattagagctattataatagaggatgagaagccagctatagaagaacttaagtatgttttatctaaatataattttttaaatatagtagatgtggctatgactggagatgttggatatgaattagttaaaaagatacaaccagaagtagtgtttatggatataaatatgcctacagaaaatggcataagtgtatcgaaaaaaataaaagaatttaacaaagatataaatataatatttataacagcatatgaacaatatgctctagaggcatttgaaatagatgctttagactatatattaaaaccctttgatgataagagaataggtgtaactataaaaagattgcaggaaaaaatagatgaaaaatataaggaagaaattccagttatgataagtgatatattaaataaattagaaaaagaagaaaaaacacttaaaaagattccctgcgaatatagaggtaaaataatattaatagatacaaaaaatatctactattgttatacaatggaggataaaacttatgtaaagacaaattcagaagaatatataactcacaatacattaaaagaaatagaaaaaaagacagatttatttagggttcatagaagttatatagtaaatatggacaatataaaagaattgtactcttggtttaatggaacatataaactagttatgaatgataaagaacaatcagaaatccctgttagtagaaataatgttaaaaaagtaaaagaaatattagggata

SEQ ID NO: 16397 - DNA, 1245 bp, Clostridium botulinum
gtgaataatatgaataaaagagtagttataactggtatgggtgctattacacctattggcaataatcttgaggacttttggaaaggcataaaagaagaaaaaataggaataggtaatataaaatcttttgacatagaagattataaagttaagttagcagcagaggttaaagattttgatccagaagaatatatggataaaaaagaagctagaagattagataggttttgccaatttgctatagcagcagcacagcaagctattgataatagtaaattagatttagataaaataaataaagaaaaatttggagttatagtaggatcaggtattggcggattagcaactatagaaaaggaagaacaaaaattattagaaaagggacctaatagagtaagtccattatttataccaacaataataagtaatatggcagcgggaaatatagctattagatttggagctaaggctatatgtagtactgtagttacagcctgtgctacaggaactaattgcgcaggtgaggcttttagagctataaagaatggagaagctgacataatgctagcaggaggtacagaggcagctataactcctatagctatagcaggttttacaactcttacagctttaagtaaaagtacagatcctaatagagcgtctataccttttgataaagatagagatgggtttgttatgggtgaaggttcaggattattagtattagaatcactagatcatgcactagagagaggtgctaaaatttatgcagaagtagttggatacggatctacttgtgatgcatatcatatgacatctcctgctccaggaggagaaggagcggcaagggctatagagcttgctataaaggaagcaggtataaataaagaagaagtatcctatataaatgcccatggaactagtactccatataatgataaatttgaaacagaagcaattaaaagagtgttcggagattattcatctagtatacctgtcagttctacaaaatctatgataggacatttattgggagcagcgggagcagttgaagctataatatgtgcaaagtctttagaagaaggatatatacctgcaacagttggatataaggttaaagatgaagaatgtgatttggactatgtgacttcaggcggaagaaataaaataataaattatgctatgtctaattctttaggttttggaggacataatgcagtaatattattaaaaaaatggggtgag

SEQ ID NO: 16398 - DNA, 2316 bp, Clostridium botulinum
atgttaagaaaaatagagtcaaaagatttattatataatttggaactcgatgatattaatatagatagaacccaaaagtatactccggaatataactctatatatgaaaagataaatcttgctttggatatagataaatcaggatacaatttatacttagtagatgatttttctaaagaaaaattaaatagtataataaattttataaatcaaaaactagagaaaaaaagtaaaccaaaggatatttgctatgtagttttagaggaagaaagatacccttatagtatatatttagaaaatgggaaaggtaaaatattaaaagaaaaattaaaagatattcaaacaaaatataatgaatgtatatatgatttttataacaaatcttccaataaagaaaaagaaattattttagagagtatggagaaaaaaaggagtgaaatagtaaacgaacttatagaggagtcaaaaaaagaaggttttgaaataaaaactggtgtatctggctttgtcttcatgcctataaaggatggtaattctctaagtgaaagtgaatatgaagacttgaataaagaagacaaagaagagatattagaaaaagtatctaaattaaaggaaaaggcagaatcttctttagaagtattagctgatatggaaagagaaggattagaaaaattaaaggatataatgagaacttatttggaaatggaaatgaaaggttcaaaggaagaatatagaatggagtttgaagataacattcagactctagattttttaaatagtgtttgcagaaatatagaaaaggaattaatagaaagttacacttcaagctatgaagaagatcaagaatctataataaacgttatatataaatataaagtaaatgtaatagtagacaatactttaaacaaaagtcctttagttatatttgaagaaaatccctcagtaaataatttagttggaagcatagaatacgaaaataaaagtggagtatattatacagatgctagtttaattaaagccggatcacttttaaaagctaatgagggctgcttaattgtgagagctaacagtttgtttacaaatggctcagcttatttttatttaaaaaaagctctcataaatgataagatagattttgattataataagggatatctagaactattatctttgggaggattaaagccggagccaataaacactaaattaaaggtaataattataggtgattatgaaacttacaatttgctttacaattatgatgaagattttaaaaagatatttaagctaaaatcagaatataataaagtagtggatataaatagtaagagtaaagaacagatttgtaaaaatatatatgatatatgtgaaaataaagatttaaaaaatataaatgaagaggcagtaaaagaagtatgcaaatatttatcaagaaaagctgaaaataaaaataaattttattttgataattatgaaatagatagattattaatacaagcggatagtaaagctaggattgaagatagagacattataacaaaagaagatattcaatttgtagcttatgaaaaagaggaaatagaaaaagaagttatggaaggttatgaaaaagaaagaatatttatagatgtaaagggagataaagttggtcaagtaaatggactatctgtaatagatttaggatatgcaagttttgggaggcctattagaataacttgttgctgttataagggcaatggagatattatagatatccaaaaggagagtaatttaagtgggaatatacacaataaagctataagcacattaaaggggtatataaatagtataatagggaaatatgatacgttgccagtagatttccatttaagttttgaacagatatatggaacagtggatggagatagcgcttctgtagcggaggccatagctatgttatctgctttaagtaatatacctgttagacaaagtatagcagttacaggatcaataaatcagtttggtcaggttcagcctataggtggtgtaaatgaaaaaatagaaggattttatgaggtatgtagatataaaaaagatataaaggataaggggatattaataccaaaatcaaataaagaaaacttagtgttaaataaagaagtagaagaggctattaaaaacggagagtttagtatatatactatggaaactttggaggatgcagtaaaaatactcctaggagaaaaaaatttaaaatttaatgaattaatagtggagatagaaaaagaactgaaaaagtataataagaaatctaaaaaatgcagaaaaataaaatta

SEQ ID NO: 16399 - DNA, 816 bp, Clostridium botulinum
atgatatacgctgatttgcacgtacacacaaatcatagtgatggtatttgtgaaattgctaatgttcttgatatggctaaaaagaaaggaataaaagcaatagctattactgatcatgataccgttgatcaatttgatgaaattaatgaattaggcagaaaaatggatcttgaagtagtaaagggtgtagaaatgagttgttatgattatgatgtgtttaaaaaggttcatattgttggattatggcttaataaaaatgctacacatgtaaaaaaattatgtgataagactttaaaatgtagagataattaccatagagatttaataaaagaattgtctgaaaagggatatgatataacatatgaagatgctaaaaaatattccaaatacagtattgtttttaaaatgaatatttttcaagctctaaaagaaaaatataaacatgagatgacaaaagaaagatataatgagctttttgcttcaaaaacatcaaaggaaactgatttaaagatgggatatactcctgtaatgcaaggaattgaagcaataaaaaaagatggtggtataccaattattgctcatccttgccaatatgataattatgatgagattgaaaaatatgttaagtatggattacagggaattgaaataaatcattcaaagatgaagaaaatagattacaaaaaaaccttgaattttgcagctaaatataacttagccaaaagtggaggaagtgattttcatgacccagatttaattgaatttgggtgttatggtttaaccaaagagcagtatgaaaaattaaaacattttaga

SEQ ID NO: 16400 - DNA, 888 bp, Clostridium botulinum
atgaattatagaaaagatatagaaaattgcattgagtatatagaagagcatattagagaatctcttacagttaatcagattacaaaagaaatagggtattcatcatatcatttctgcagagttttttcttttttaaaaggtatgcccttaatggaatatgtaagaaagaggaagttatccctatccacaatagacttattagaaggtgaaaaaataattgatgttgcctttaagtggggatttgaaactccaagtagttttgcaagagcctttagaaaagagtttggatgtagtccaagtcaatatattaaaaaaatgaaattctattacaaaagtgaaaataatttaatcctaagtaagtttatgaatgatccatatatcattaaaaaagaggcatttaaagttgctggatatggtattaaaactaatgtggcagatagtaaatacacaaaggatgtagcctccttttggagcaattataatggagaaaatctagaaagtaaactatacaaaattctatcacccctaaaacatggggaagttggattatgcataccctgttctgatagtggggatataacctatttattaggggttattgttgaggatttttccaaggtaacttccgatatgataactgttgaagtaccaaaggctcagtatgcagtgtttactacaaatcctgttaatacggtagagagcaaagaccaaagggaatttgcaaagattattaaagaatcatggaaatatatatttgatgaatggtttaaaaataatgattacgaatatgatgaagaaaaattggattttgaattttatgatgagagatgtcatttaaggccagacacagttatggatatttatgtaccaataaaaaagttggagagg

SEQ ID NO: 16401 - DNA, 195 bp, Clostridium botulinum
atgccaaaaatgaaaacaaaaagggctgcagcaaagagatttaaagtaactggaacaggtaagttaaagagagctaaagcttttaaaagtcatatattaacaaagaagagcagaaagactaaaagaaatttaagaaaagctggatacgtttcagaaagtcaagaaaaagtaatgaagaaggtattaccataccta

SEQ ID NO: 16402 - DNA, 1860 bp, Clostridium botulinum
atgagcaataaaaaaatagaaaatagaagaaaaggtggctttggctcacgtcatggtggtcctataggagcagttgaaaaggcaaaagattttaaaggtaccatgaaaaatttaggcaaatatataatgccttataaaatgtctataatttttgtaattgttcttgctataggtagtgcggctttttctatagtaggtcctaaagttttaggaaaggctactacaaaattatttgaaggattagtacaaaaggttagtggagtaaaaggtgctttaattgattttgattatataggtaaaataataattttacttcttgtattatatataataagtgctatattttcctttgtacaaggatatataatgtcctcagtggctcaaaaaatttcttatgaatttagacgtgaaatttctgaaaaaataaatcgtatgcctattaagtattttgacaataagactcatggagaagtattatctagagttactaatgatgtagatacagtgagtcaaactttaaatcaaagtatgtctcaaataattacttctgttgttacaataataggtgtattaattatgatgttatctataagttggcaaatgactattgtagctttattaatattacctgtatccatgatgattataatgctcgtcgtaaaaaaatcacaaaaatactttaaggctcaacaggaagacttaggtaatattaatggtcatgtagaagaaatttatggtggacataatataatgaaggcctttaatagagaacaagaagctatagaagggtttgataaaataaacgataagctttatagctcagcttggaaatctcagttcttatctgggatgatgatgccaattatgtcttttataggtaatataggatatgtgcttgtatctattttaggtggatggcttgcaataaagaaaactattgaagttggagatatcctatcttttattcaatatgttagaagttttacccaacctatatcacaggtagctcaaattgctaatgtgcttcaatctacagcggctagtgcagaaagggtttttgaatttttagaagagggagaggaagttaaagaaacagaaaatcctgttaaacttgaaaaagtttctggagaagttgaatttaaaaatgttaaatttggatataataaggataaaattatcataaatgatttctcagctaaaattaaaccaggacaaaaggtagctattgtaggaccaacaggagcaggtaagaccactatgattaaacttttaatgcgtttctatgatgtaaataagggtggaatatttatagatggtcataatataaatgactttaaaagagcagatttgcgtaaaatatttggaatggtacttcaagatactttcttgtttacaggtactataaaggaaaatatagcctatggaaagcttggagctagtgatgaagagataattaaagcagcaaaatcagctcatgttcataattttgtagagactttaccaaagtcatatgatatggaactaaatgaagaagcgagtaatatctcccaaggacaaaaacaattattaaccattgcccgtgcgatattatcagatcctaaaatattaatattagatgaggcaactagctctgtagatactcgtacagaattacttatacaaaaagctatggaaaacttaatggaaggaagaactagctttataattgcacatagattatctactattagagatgcggatttaattcttgtaatgaaggatggagatattatagaacagggtaatcatgaagaattattaaaagctaaaggcttttactattctctttacaatagccaatttgaaaatgcagaagtatct

SEQ ID NO: 16403 - DNA, 1455 bp, Clostridium botulinum
atggatttaactaaattaacagcacacgaattaaaagatatgctttcaaataaagaagttaaagcagaagaaataacaaaagcttttttagatagaataaatttagtagacaataagctaggagcatacttatatgtatcagaggaagaagctataaaaaaagctaaggaaattgatgggaaaatagaaaaaaatgaagagttaaaagccttatcaggtataccagtaggtataaaagataatataaatgtaaaaggaatgcaaaatacttgtgcatctaaaatattagaaggttatacttcaccttatgatgctcatgtaacagaaaaaataaaacaagaagaaggaataatccttggcaaattaaacatggatgagtttgctatgggatcatctacagaaaatagtgcatttaaattagccaaaaatccatgggatttagaaagagtaccaggtggatcttcaggtggatctgcagtggcggtagcaggatctgaagctactttatcattaggaacagatactggtggttctgtaagacaacctgcatccttttgtggagtagttggtttaaaacctacatatggaagaatatcaagatcaggggttgtagcttttggttctacattagatcaagtaggtccaatgggaaaagatgtagaggattgtgctttgctaacatcagttatagcgggattagataaaaaggattttacaacagtagataaggaagttcctgattataaaaaaagtttaactaaagatataaagggtaaaagaattggtattccaaaagagttctttggagatggattagataagaatgtaagaaaatctgtagaagaagctataaaggtattagaggcaaatggagcagaagttaaaccatgttctctaccattaatggattatgccctatcagcttattacataatatctagtgcagaagcttcatcaaatttagctagatttgacggtataagatatggttatagatcaaaaaactttaaagatgctaaagatatatatttgaaatctagaagtgaaggctttggagatgaagttaagagaagaataatgcttggaacttatgtattatcagcaggatactatgatgcttactacaagaaagcattaaaagtaagaaaacttataaaagacgatttccaaagagtatttaaagaatttgatgctatagtgtcaccaacatctccaactacagcatttaaagtaggagaaaagaaagacgatgtaatgtcaatgtatctttcagatatatatactgttccaattagtgtagcaggagtaccagctatatcattaccatgtggtatgatagatggacttccagtagggcttcaaattatatcagattattttaaagaagatgtattatttaatttagcatataattatgaacaatcagtagattttcataaaatgagagcggatttt

SEQ ID NO: 16404 - DNA, 1203 bp, Clostridium botulinum
atgagttataaatttaatactatagaagaggcaatagaggatataaaagatggaaagattattgtagttgtagatgatgaggatagagagaacgagggagatcttttaatggcagcagaaaaaattactccagaggctataaattttatggctaaagagggaagagggcttatatgtactcccgtaaaaaaatctagattagaggaattagaaatatgccaaatggtacataagaataaagataattttggtaccgcttttactgtatcagtagatgcagtaggtacatctactggaatatctgcatttgatagagcatttacagtatcaaaaatagtagatctaaattcaaaaccagaggattttttaaagccaggccatgtatttcctttagctgctaaagatggaggagttttagttagagcaggtcatacagaagcggcagtagatatggcaagattatcaggcttttctgaggtaggagttatatgtgaaataatgaatgaggacggaactatggcaagagtgccacaacttatggaatttgtaaaaaaacataatttaaaaataataactatagcagatttaattgaatatagaagtaaagaagaaaaactaataaaggctttagaaccagtaaaacttccatctaaatatggagactttattgctataggttatgaaaatttaataactggagaagaacatatagctttagtaaaaggagatgtaaaaggagaagatccagtacttgttagagtacattcagaatgtttaacaggagatgtattcggttctttaagatgcgattgtggtgagcaaatagctaaagctcttatgaaaatagaagaagaagggaaaggggttttagtttatatgagacaggaagggagaggaataggtttattaaataaactaaaggcatatgctcttcaagatgaaggtatggatactatagaagcaaatttagctttaggattcccagaggacttaagagattatggcataggagctcaaatattaaaggatttagggatcaaaaatattaaacttatgactaataatcctaaaaaaatatcaggactttcaggttatggtataaaaatagtagatagagttcctatagatatgggctgtaaaaaagaaaatcgtaattatttaagaactaagaaagataaaatgggacacttgatagacataatg

SEQ ID NO: 16405 - DNA, 312 bp, Clostridium botulinum
ttgccaacggtatccttggataaaggtgataattatttggaggtgcttacaatggataaagcaaaaaaacaagaattaatggctaaacacgcaagacatgaaggagatacaggttctccagaagtgcaaatagcattacttacagaaagaattaaccacttaaacagccacttaaaagaacataaaaaagaccatcactcaagaagaggtcttttaatgatggttggtaaaagaagaggtcttttaaattacctaatgcgtgaagatattgaaagatatcgtgctatcataaaagaattaggtttaagaaag

SEQ ID NO: 16406 - DNA, 816 bp, Clostridium botulinum
atgaaaggaaagaaaatagtcagtattttagcagctataacattaacattgggaatggtagcctgtggaaacagttcatctaaagacaaggaaaaagctaatgaaacatcaggagataaaaaagtaataactataggaacatcagttatatcaaaggatgttttagaggaagcacaaaaggtatttaataaaaaaagtagtaaatatgagatgaaagtaaaagtatttgatgatgcaataacacctaacatggcagtcaatgacggaagcatagacggtaacttttatcaatatcaagattatatggaaaactttaataaagatagagggacaaaattaaaagcatatggtaagccagtctttgcatttcaaataggattatattctaataaagttaagaaaataagtgatattaaggataaaatgactgttgcagtatctaatgataacactaacagagctttagcactaaaattattagataaagaaggaataattaaacttaaaaaaggtgtagaagtaccaaacactttagatattgttgaaaataaacacaatttaaaatttgttgaaatggaaagattaaatttagcaaatgcattaaatgatactgatatggctatagttatggcagatgttatgcttaaagctggtaaagattcagaaaaagctttagctttcgctcaagaagagggtattgttttagtacttaaagaagataaagaatgggcaaaggaagtagaagaagctttaactagcaatgaggttaaaacatttataaaagagaaaacaaagggaacaaaaacacctttattc

SEQ ID NO: 16407 - DNA, 174 bp, Clostridium botulinum
atgtcagaaataaaagttggagaaaatgaatcattagaaaacgcattaagaagatttaagaaaaaatgtgcaagagctggtgttttatctgaagtaagaaaaagagaacactacgaaaagccaagtgtaaagaaaaagaagaaatctgaagctgcaagaaagagaaaatttaag

SEQ ID NO: 16408 - DNA, 2433 bp, Clostridium botulinum
atgagaatcggtggactttcaggtctagatactgataatatgataaaaaatatgatgaaaccctatactatgcgtgtagacaaaatgaaacaaaatgctcaaattgtaaaatggcaacaggatgcatatagaagtgtaataagtggtatatcagatatgacaaaaaaatattttgatgtattaaatggagacaactatatgttatcttcaaagaatttttctagtttaaagccatcaggaataccagatacttcaactattaaaataaatacaggaagtggtgctgtatcaggaaattattctttaaaggttatagaattagcatcaaaggctgaagctataagtgataaagccataaatataaagacattaagtgaaggtgattatggcataaaaatagatgcttctaatagcaaaatagttatagatggcaatgaaataacattaagtgaaagcaaatataacaatgcatcagatatagcagctgaaataaatagcaaaataaatgaagatggatctactctaaaggataaagtaaaagccgtagttaaagatggaagtataaaaatagaaaatttatttaaaatagatgatacaaataaggaattaaaagtaacagtagatggaaaagaatatactgcagaattggctaaaggaaattttactttagaagaattaacagattctataaatggtaaattagaagttgctaaggatgctgatggaaatgtgttggtagaggataaaggtgttaaagcgtctttatcagcagatggtaagagcatagaatttacaggaacaacagcgcaacctaattatttagtggctggagttaatttgggaggaacaacaggtggaactggaattacaggtacagatgtaacagtagctggtaattcaataacttatgcaaaagaaataatagcaggatttaatgatacatttaatatacaaataggtactgattcttcaaaacaagtaaaactagcagcaggaactataaattcaatagatgagttaaaaacaaaacttaatgatgcttttactactgcaggactaaatactactttaactgcaacagtaaaagatggaaagatagttttgtcatctaattcagataaacaagtaataattacaggtgaatcagggaagagtgctacttctttacttggattatcagatagatatgaaatgtctatgagcactaatgaaaaaatgtccaatatcgtaaatgaagcagtggaatttgaaataaatggcgtgaattttaaatatgattttactagtataggagcagaaagagataaaactatatcacaaatattagcagatatattagataaagctaatgtacaagcttcatatagtgaaattaccaaaagctttacattaagatcaaaggaagagggagctactcaaaatattaagtgtgaagataaatcaggaaattttgtgtcaagtatattgggaagcagcacaacagcaaaaggtaaagatgctaagattgaacttaagactcctaataattctacagcaacaacaataataaaaccttctaataattttactatagatggagtaaattataatatagcaggagcaaaaaaagacgaagagataagtttttcactagatggtaatgtagaggattcttttaataagataaaaggctttattgatgattataataaattaatagatgaattgcagaagaaaacttcagaaaaaaaatatagaaaatatgaaccattaacagaagaacagaaaaaagaaatgaaagaaaatgatataaaactttgggaagaaaaagctaagtctggtatattaagaaatgattcaaatatagaaaacatgctttcaactttaagaagagctttcttcgattcagtagaaggggcaggacttagtttaaaggaattaggattaactacttctaaagattaccaagaaggcggcaaaatagtatttgatcaaatattggataaaaatggaaataacggagaagctaggcttaagaagcttttgaaagaagaaccagataaagtatttaaaatattttcacaagaatctacaagctatccaagctatagtgcagatttaacacttacagaaagacaaattagaaataaagaagaaggtatatttcaaagaataaatgatatatttaaagattacacaagaacatcaagaagtgcaagtggtaagagaggtatattagtagataaggctggtatagagggaactgtatctgcaatagataatatactttataaagatttagaaaaaagagaaaaagctatacaagatatggaattaaaacttatagaaagagaaaataagtattatattcaatttgcacagctggaaaaatatataaatcaagccaattctcaagctagttggcttgcacaacaattaggtggtggcatgagt

SEQ ID NO: 16409 - DNA, 342 bp, Clostridium botulinum
atgttagaagttataaaagctatagaagcagaacaagtaagaagtgatttaccagaattcaatgtaggagatactgtaaaagttcaccaaaaaattaaagaaggaactagagaaagagttcaagtatttgaaggaacagttttaaaaagacaaaatggtggagcaagagaaactttcacagtaagaagagttgcttacaatgtagcagttgaaaaaactttcccagttaattcaccattaattgaaaagatccaagttgtaagaaaaggtaaagtaagaagagctaaactatactacttaagagatagagtaggtaaagcagcaaaagttaaagaaagaata

SEQ ID NO: 16410 - DNA, 243 bp, Clostridium botulinum
atggaagatgcaaatatacttaacagaacttatcatcatatagcatttaaaatatcaaattctgatgtagataattatttggataaaattaaaactctaaatttagaattaaaacctccaaggagaagagtatctggggaaggctactctatatacttttatgactatgataataatttatttgaacttcacacagaaacattggagaaaagattagcttcgtatacaaagatagataatata

SEQ ID NO: 16411 - DNA, 339 bp, Clostridium botulinum
atggcaggatatcgtaaattaggtcgtccaactgatcaacgtaaagcaatgcttagaaatcttgtaactagttttttaaagcatggtaaaatagaaactacagaaactagagctaaagaaactagaagtattgctgaaaaaatgataacccttgcaaagagaggagatcttcatgcaagaagacaagtactttcttttgtaacagaagaaacagtagtacaaagactatttgaagaaatagctcctaagtatgctgaaagaaatggtggatatacaagaatatataaagttggcccaagaagaggcgacggagctgaagtagttatactagaattagta

SEQ ID NO: 16412 - DNA, 834 bp, Clostridium botulinum
atgaataatatgaatacaaaggaaatagttaacaaatatgaatttaagtttaataagaatttaggacaaaactttttaatagatgaatctgtattggaagatataatagagggagctgaaataaacaaagaagatactgttatagagataggccctggggttgggactttaactaaggagcttttagaaagagcaaaagaagtttactctatagaattagatggtgatttaatacctattttgcaagaggagttaaaggaatataataattttacactaatacataaagatgcgttaaaaattgattttaatgagttaatggaaaataaggattccataaaattagtagccaatctaccttattatgtaactacacctattatatcaagattacttacagaaaaatgtgattttaaatcactaaccataatgattcaaaaggaagtagcggaaagaataaatgctgaacctaactgtaaggagtatggttcattaaccgttttagtacaatattattgtaatacaaaaataataagaaaagtatctccaaattcttttataccaagacctaaagtggattctatagttataaaattagatagactttcagaaccaagagtaagggtgaaaagccaaaaattattttttaatgtagtaagaagttcatttaatatgagaagaaaaactttatggaattcattaaaaagtttaaatatagataaagaaagtatggaaaatgcttttgaaagagcagggatagatccaaaacgaaggggcgagactttatccatagaagaattcggaaaactttcagattgtatatatgatatatta

SEQ ID NO: 16413 - DNA, 291 bp, Clostridium botulinum
atgaagctaactaactacgatataataagaagacctcttattactgaaaaaacaatggcttcaatggctgataaaaagtacacctttgtagtagatatacatgctaacaaatctcaaattaaaaatgctattgaaacaatatttgacgttaaagttgaagatgttaaaacagctagaattatgggaaaaactaaaagagttggtgttcatataggaaaaagaccagattataaaaaagctattgttaagttaacagaagatagtaaaacaattgaattcttcgaaggacta

SEQ ID NO: 16414 - DNA, 762 bp, Clostridium botulinum
ttgaaagtaatatctatttttaatcaaaaaggtggtgtaggcaaaactacaaccagtataaatttatgttcatgcctagccatgaatggatataaaatattaaacatagacatagatcctcaaggaaataccactagcggaatgggattagataaaaatagcttagaactctcagtgtatgatgttttaacatctgatgaaatatcaataaaggaagccataaaacaaagtgaacttataagcaatttttatattttaccatcaactatgtctttagctggtgctgaaatagaattgataaataaattagatagggaaagaattcttttacaaaaattaaaagaaatagagaatgattttgactatgtatttattgattgtccaccttcattaggtttgctaacaattaatgcattggcagcgtctgatagtgttttaattcctatacaatgtgagttttattcattagaaggagtagggcaattagttaatactattgagttagtacaaaaatctcttaattctaatttggaagttgaaggtgtaatactgtctatgtatgatattaggactagattatgtaatgaagttgcagaggaagtaaaaaaatattttaatgataaagtatataagaccacaatccctagaaatgtaagattggcagaagctcctagttttgggctgcctataatattatatgattctaaatgtaaaggggcagaagcatacaataatttaagcaaagaatttatagaaaaacaa

SEQ ID NO: 16415 - DNA, 2472 bp, Clostridium botulinum
ttgattgaaagaaatttgtttaatattatcaataagtatttacccatgggctctcaaataatagttgaagaagataataacaatgaacctttaataataagagctaatttaaatggatatggattaggcgaaataattgtagcttatagatggcaagaagaaaactatattatggtgctagaaaggtactgtaatcagtggagtgtaatagataatataagaggaaaaggctatgatatttcttatttaaaagtggcacctataacagataatgcaatggataatttaattataggatggagaagaggtgctatatggtctgagttagatatacttcaatggacaccctatggttttaaaagagtaatagatgagggcatatattatagtaaaattgaagtggaaaatatgaaaagtgtaaaagctatgaatgataaaaatgaaatagccttatggttacatgatacagcagaggcttacaaagtagaaatatatagatggagcttaggaaaattagtaaaagctgaagatgtgtatccttattattttaagaaagtaattgatttttataaaacaaaactgcaggaagaaccagaccttccagtatattggtattacttagcagatgctcagattaaaggggaaatgtatgaagatgctttgaaatctatagataaagctttagagcttcctaaagcttatccttctaagaaagagttaataaaattaagagattatatattatactataaaaaatgtaaaaatataaatttatattcggcaccgatgaatactattaaaggagttagatggggatatataaatgaaaagggagaatttctaattaagcctttatataatttagctttagaatttcagtgtaatggacttgcagttgtggaaatagataatctttatggaattatagatgagaatcagaattatatagtaaagcataagtatggctttataagtgatttctcagaagaaagagctatagttatcgataatgaaagatttaatataatcaatgaagagggagaagaattgatccctaaaactgaaaattatagttatataggaaactttaaagaaggaagagctcaatatggtgttatagactctaataagggatatctttatggatacttagatagagaaggaagggtaatcataccagcacaatatgagtatggaaatgatttttatgaaggaaaagctgtggttagaataaaagaaaatgaatatgctctagtaaatataaagggagaaatactaaataaatatgagtatgcttctgtaggaaatttaagagagggtcttttatcttttaaaaaggatatgggtgaaaaatatggcttcatagatgaagatggaaatgtggttataaagccacaattcacctatgctcatgattttagtgaaggaagatctgtagtaaatgtttcagggaatattatgaataactatggtgtaatagataaagaagggaattatataataacacctaagtataatgacataattctattaggtgagaatagagtggctgtaggagtagctatagataaaacatcgccttttataggatccaaatatgctattgcagatacagagggaaacatattaacagatttcatttattatgaagtttcaaattataaaaacggaatagcttttgcttatgatgataaaaatacattctttatagataaagagggtaacaaaattgagaacttacctatagtagaaggtagtggaactttaactgtagaaaatgaattaataaaagcctatgtggattataaaatttcttatttcgataaagaaggaaatttaatatgggaagaaaattcagttatttctttaaataatcagtataaagttatagaagaaaaatacaaacctaataaggattatttagtgtattatccaaaggttcagggaatgggagataaggatttagaagatgaggttaataataggctcaaaagtttatctgaagtgaaacctatagaagaaaatgttcaattagaatatagttatttaggagattttaaaatagagttttttgacaataacttattagaattagagcttgatggatataactttcactttggagcagctcacggtattccaagtaaaatatatacaaaaatagatttaactacgggagaattttacgaactaaaggatttatttaaagaagatagtgattatgtgaaagttttaagtgatataataggagaacaaataaaaaataatccagaatactcctatatattccccgatagttataatggaataaaagaagatcaacctttttatgtatcagaggatacattgtatattaacttttatccctatgaaattgcaccttatgctgcaggatttcctacctttaaaataccttataaggatataatagatataatcaatgaagcaggtgcattttggatgtcctttaat

SEQ ID NO: 16416 - DNA, 1299 bp, Clostridium botulinum
atggaagtaaaaatagattctataaagttatatatatttgggggagatagaatgaaagtatgggaaaattataaatggtctataatactacttatttctgtaattataggaggaatagttggattaattatgggaccaagagctgaagtagtagaacctttaggtaacttatttttaaatttaatgtttactgcaattgtgcctctagtattttttagtgtggcttcagctattgctaatatggctaacatgaaaagactaggaaagattttattaagcgtatttatagtatttacttttaccgcattaattgcagcagtaattggtgttataggaaccttaataataaaccctacaaagggtgtagatccttccactatgcaaaagataatggcaaatacagttaatgaaattcaaaataaagagaaggtaagtatgttacaacaaattgtaaatacagttacagtatcggattttgcattattattttctagaaaaaatatgctacaaattattatattttcaataatctttggtgtttctacagctatggttggagaaaagggtaaacttgttgctaagtttttagaagctggttcaactgtaatgataaaaatgatagatataataatgtatacagcaccaataggacttggttgttattttgcttcagtaataggacaacttggtccacaaataattgaaggatatgtgagagtgtttatattatatttgatacttactttagtatattattttattatgtttagcatatatgcatatatgtcagcaggaaaaacaggagtgcaactattttggaagaatgcattggcgccttcaataacatcccttgctacctgttctagtgcagcatgtattcctgttaatttagaaagcacaaaaaatatgggagtaccaaaggatattagagagacagttatacccctaggagcaaacactcataaagatggatctgttataggtggagttttaaaaataacttttttacttggattatttggtcatgatatgactagttttaaagcaataattacaataattatagtgtcttatttaataggagctgttatgggagctatccctggtggaggacttataggtgctatgctcatcataagcatatatggctttgcccctgaagttttaggaatagtggcagtcataagcactataatagatgctccagcaacgctattaaattctacaggaaatacggtatgtgctatgatgataacaagacttgtggaaggaaaagattgggttaaaaaaattatagca

SEQ ID NO: 16417 - DNA, 900 bp, Clostridium botulinum
gtgattaaaatggtagaagttagagtgcctgctacaagtgcaaatataggaccaggatttgattgcttaggtgtagcagtaaatatgtataataaattctttgtagaagaaattgaagagggacttatctttgaaggttgtgcggataaatttaaaaatgagaacaacttaatatatgtggctatgaaaaagtgttttgataaaatcggatacaaacctacaggattaaggataaaaatagaaagcgatatacctgtctcaagagggcttggaagtagtgcagcctgtgtggtaggaggtatagtttctgccaatgaattagctggtggagctttaaataaaaaagaacttttagatttagcagtggaagtggaagggcatccggacaatgtaaatccagctttttgtgggggaatgactgcttccatatctgataatagagaagtaatttatagtaaagtgaaggtgagtgagggtattaagttttgtgcacttataccagattttactttatctacagaaaaggcaagggcagtccttcctaaaagtatagattacaaagatggaatttttaatgtaggaagaaccgcacttatgatatctgcattaaataatggtgattttcatttaataaaatatgcttgcaaggataaattacatcaagactatagagcaaagcttatagaaaatttttattcaataaaaaaacagtgtgaaaaactaaattctttaggtgtatttttaagtggagcaggtccaacaattatggtaatgcttagagaagaggataaggatttttcaaaaaatattaaaagttttttagagactttaaagaacaagtgggaagttagggaacttaagatagacaagcttggaaccgtagtaaataattgtaaggtt

SEQ ID NO: 16418 - DNA, 1032 bp, Clostridium botulinum
atggattatcataaaaaacttatattaaattatttaaaaaatatattaactattccaagtccaacaggctttactaatcatataacaaattatctaaaaaaagaattagatactattggtatagaatataaaataacaaataaaggttccataataattactttagaaggagaagataaaagctttgagcgaaccttgtctgctcatatggataccttaggtgctatggttaaagacataaatgataacggaacattatccatcgttccactaggtggatttatgatgaattctattgaaggtgaaaattgtagcatccacacactaaatgatgaagtttattcaggaacaatacaaactataaaaccttccgttcatattcatggtaaagaagcttatgatttaaagcgttctcctgaaaacatggaagtaatattagatgaaaaaatattttccaaaaaggatatagaaaatttaaacataaacataggagattttatttcctttgatacaagaaatatatttactgaaaatggttttataaaaagcagacatttagatgataaagcatctctagctattcttctttatgctataaaatatattcatgtaaataatctgccattgtcttgtactactaatttcttatttagtaattatgaagaagtaggtcatggagctagttacataccaaaaaatacaaaagaatttattgctgtagatatgggtgcccctggagaaaatcaaaactcctctgaatatagtgtatgcatatgtgcaaaagattctacaggtccctatgatttagatttcaggaaaaaattaattaatatatgtaaaactagcaatatcccttataaaatagacatatatccttcttacggatctgatgcaagtgctgctttaaaagcaggttttgatataaaagctgccttaataggccctggagtatatgcctcacatgcctatgaaagaacccatatggattcaatactggccacattagatctaataataaaatactgtgtatct

SEQ ID NO: 16419 - DNA, 2112 bp, Clostridium botulinum
atgtcaatgacaccagagcatgcagaggcgttaaagaatgaatctgcagtagtatgttgtagagcagaagagggaacaatattaactgctgacaacttagaagatccagaaatattcccagatatggtagactcaggtctattaactattccagctgattgtttaaaagttggggaagtaataggagctaaattgttaaaaactgtagattcattaacaccattaactccagatataattgagggagcaaaaacaataggtggttcagaagaaaaggctgaagaaatttcagaagaattaactgaagaagatgaaaaagcagttctaaaatataacttaaaagcaggagatactataaaagctagtgatctagaaaatccaatgcattttgaaaaacttgtagattctcttttactaacattagatgaaagagttcttacaagaaaagaagtagttggagcaactttatcagttgatacgccagctttaactcctgtaacacctgatatattagaaggatttgaggaggaagtaaacatgagtgctgatacacaagcaacaataagtggtggaactttaagaatcagaatagccgaaggaaaaggaattgacatcgaagttcctttaaatggaaatgtaggtacaggaaaatcaatagctgttccagcagtaaaagctgaaaaaggcacagtaactgcagcgccagtagcagtagaagctaaaaaagaagttaaattagaagaaaaaatagtaagatcagttacaagaaaacactataaaatagataaagtagaattagctaaagaaactaaaattgaaggaacaactctttatataagagaaaacatctgtgaagatgcattcaatgtagaccaattagttaaagatataaaattagaaataataactccagataagtacaacacttatagtgaaactataatggacgtacaaccaatagctactaaagaaggttcagatgctaagttaggtgaaggtgttacaagagttatagatggagctattgtaatggtaactggcatagatgaagacggagttcaagttggtgaattcggttcttcagaaggtatattagaagaaaacattatgtggggaagaccaggtgctcctgataaaggtgaaatattcatcaaaactcaagtaactataaaaagaggaacaggaatggaaagaccaggtccattagctgctcacaaagcaacagattttataactcaagaaatcagagaagctttaaaagctgttgaagatgattcattagtagttaacactgaaacttttgaacaagtaagaagaccaggaaagaaaaaagttgtagttgttaaagaaataatgggtcaaggtgctatgcacgataacttaatattaccattagaaccagttggggtaataggagctaaaccaaacgttgatttaggaaacgttccagtaatgcttgcgccaacagaagtattagatggtggtatccatgcattaacttgtattggacctgcttctaaagaatgttcaagacactactttagagaaccacttgtaatggaatgtatgcaagatgaagaagtagatttagcaggagttatatttgtaggaagtccacaaatcaacagtgaaaaattctatgtatctgaaagattaggaatgatggtagaagctatggatgttgatggtgcttttgttacaactgaaggttttggaaataaccacattgactttgcaagccacgtagaacaaataggtatgagaggtgttccttgtgtagcattctcattctgcgcagttcaaggcgctctagttgttggtaacaaacacatgaaatatatggtagataacaacaaatcagaaggtggaatagaaaacgaagtattatcttgtaatacattatgtaaagaagatgctgtaagaggccttgcaatgattaaagcagctatgtctggagaagaagttaaaaagccagaaagagcttggaatgcaaatgttaaagaaaataacattgaaatgatagaaaaatctactggaaataaaattgatagagttttaaatgaaacttcaataccaatgagcgaaaagagaaaagaaaaatacgctacaaag

SEQ ID NO: 16420 - DNA, 1565 bp, Clostridium botulinum
aatattttagaagtcaaaggccttaggattgaagaagaaaaaaataaaaaaattttagttgggaatactaattttgaagtagaaaaaggaaagattacttgtatagtgggagaaagtggaagtggcaaaactattacagccatgtccataataggaatgcttccacaaggagttagggttatagagggagaaatactttttaacgggaaaaatacttttaatttctctaaagaaaaattaagagattttagaggaaagaaaattttttctatatttcaaaattctataaattgttttaatccctctgtaattatggaaacacaaatatacaatatgatatgtagtcattatagtatagataaggaaaattttagaaataaacttataaatataatgaaaaatattaatttgaaaaatcctgaaatcatattaaaacagtatccttttcaattaagtggaggtatgcttcaaaggatgatgattgcatcagctatacttatggaaccagatataataatagcagatgaaccaactactgccttggatttaacatctcaaaaagatatactaaatcaattgaaaatgataaaggaaaaattgaatactactatattaatgataactcatgattttggagtagtagcggaaattgcagataatgtgataattatgcaaaatggaaatattatagaaaagggaaatgtatataatatatttgataatcctcaagaaaattatactaaaactttaataaatgctacctttaaaagagaggtaacttatgtatgttagaagttaaaaatgtagtaaaaagctataatactaaattaaggttatttacaaaaaataaattagattttagagctatagataatgtatcctttaaattaaaagaaggagaggctataggaattgtaggagaatcaggctgtggtaaaagtacattgggaagacttattttaagattagaaaatactacagaaggttcaataaaatacaaagggaaggatatatggaattttaagggcaaagagctaaaaatttttagaaaacagtgtcaaataatatttcaagatacatattgttctttgaaccctaatattaaaataatagattcccttatggagcctttagataattattttatccaattatctagagaagaaaaaataaataaaatagaaaatatcataggatttgctaaattagataaggatatattagaaaaatatccttcatctataagtggaggggaaagacaaagaataaatatatgtagagcgctgcttttggaacctaagcttttagtttgtgacgaaataatatccagcttagatgtatgtactcaagtatcaataatgtctatgataaaagagcttagggaaaagagtaacacagctatattgtttatatcacacgatataagtgttgtagattatctttgtgataagattattgtaatggaatctggaagaataatagaaactatagaaaataaaaaattaggattatattcatataaaaaagagtatacagaaaaacttttatcttcagttcctataaat

SEQ ID NO: 16421 - DNA, 1371 bp, Clostridium botulinum
atgtataattgtgctataatattggctgcaggcaaaggaaaaagaatgaaatcttctatgcctaaagtcgtacacaaggtttgtggaaaagaaatggtaaaccacgtcattgataacgttagaaaagctaatataaaggatgtaaacttggtaataggaaaaggatcggaaacagttaaagagcatacaaaagatagaaatgttacttattctatgcaagaagaacaactaggaactggccatgctgttatttgtgcagaggaatttttaaaagataaaaaaggtacagtagctatatttacaggagatgctcctttaatcaccaatgaaactatacaacaattatttgaatttcataatagtgggaaatatgcagctactttaatttcttctactgtacaagatccaacaggatatgggcgaattataagagaagcatctggggaagtaaagaaaatagttgaacataaagattgcaatgaagaagagcttaaggtaaatgaaattaacagtggaatgtattgctttgatatagaagttttattaaatagtttaaaaaatcttaataatgataattctcaaggagaatattatttaacagatgttatagagataacaaaaaaatctggagataaagttggtgctatagttgtaccttatgaagagatcatgggtgtaaattcaagagttcaactttcagaagcagagatagttatgagaaaaagaataaatcataaacatatggtaaatggagtaacatttatagactgtgaaagtacatatatagatgttgatgtagaaataggaaatgatactataatatatccaggatgcgttatccagggaaatacaagaataaaagaagaatgtacgttatattctaattcaagaatatgtaatagcgtaataggatcaggagttatagttgagaattctgtcatattagaaagtcatgtgggagaaggtactactgtaggaccatttgcttatataaggccagaaactaaaataggtaaatctgcaagaataggggatttcgtagaaataaaaaaatcaactattggagacaacacaaaggtatcacaccttacttatataggggatgcagaagtaggcagcaagtgcaattttggatgtggaactgtagtagtaaattatgatggacaaaagaaacaaaaaactattattggcaacaatgcttttataggatgtaacacaaatttgatttcaccagttaaagttaatgacaatacatatattgcagcaggatctacaattactaaggaagtaccagaaggttctttagcaattgctagatcaaagcagatcaataaagaaggctggttagataaaaaaggattattaaagaaa

SEQ ID NO: 16422 - DNA, 1869 bp, Clostridium botulinum
atggcaaaaataatcggaattgacttaggaacaacaaattcttgtgtatcagttatggaaggtggggaaccagtagttataccaaatgcagaaggttcaagaacaactccttcagtagtatcttttcaagctaatggagaaagattaataggtcaagtagcaaaaagacaagctattacaaatccagaaaagactataatttctattaaaagatatatgggaacagaccataaagttaatatagatagcacagaatatacaccacaacaaatatcagctatggtacttcaaaaattaaaagcagatgcagaggcatatcttggagaaaaagtaactcaagcagttataacagtaccagcatactttaatgatagtcagagacaagcgacaaaggatgcaggaaaaatagctggtcttgaggttttaagaataataaatgaaccaacagctgcatcattagcttatggtttagacaaaatggatacaaatgaaaaaatattagtttatgacctaggtggtggtacttttgacgtatcaatattagaactaggtgatggagtattcgaagttaaagctactaatggagatacaaaattaggtggagatgactttgaccaaaaattaatagattatatagctgaaacatttaaagctgaaaatggaatagatttaagaaatgataaaatggctatacaaagattaaaagaagctgcagaaaaagctaaaatagaattatcatcagcaacacaaacaaatataaatttaccatttataacagcagatgcaacaggtccaaaacacatagacatgaacttaacaagagctaaatttaatgaattaactcatgatttggtacaacgtacattagaaccaattaaaaaatcattagaaggttcaggatatgcaatgtctgatatagataaaataataatggttggtggatcaacaagaataccagctgttcaagatgcagttaaggactttacaggaaaagagttaagtaaaggggttaacccagacgaagttgttgcaatgggtgctgctattcaagcgggagttttaacaggagaagttaaggatgtattacttttagatgttaccccattaacattaggaatagaaacatttggaggagtttcaactacgttaatagaaaaaaatacaacaataccaacaagaaagagtcaagtgttctctacagcagcagatggtcaaacatcagttgaaatacacgtagtacaaggtgaaagatcaatggcagctgataataaaacattaggaagatttactttgtcaggaatagctccagctccaagaggaatacctcaaatagaagtaacttttgatatagatgctaatggtatagttaacgtatctgctaaagataaaggaacaggaaaagaagctaatataacaataacagcttcaacaaatttaacagatgatgaaatagaaaaagctgtaaatgaagctaagaaatttgaagcagaagacaaaaagagaaaagaatctatagaaattaaaaacaatgcagatcagatagtatatcaaacagaaaaaacattaactgacttaggagataaagtgtcagctgaagataaagctcaaatagaagaaaaagtaaaagcggttaaagatgttaaagacggagaagatttagaagctattaagaaagcaactgaagatttaactcaaacattctatggaatatcttcaaagatatatcaacaagctaacccagaaggagctcaaggtgcaggtttcgatcctaataatatgggtggagcaaatgcaggtaatgcttcagcaggaaatgataaaaaagatgacaatgtagtggatgcagattttaaagttgaagatgataaa

SEQ ID NO: 16423 - DNA, 882 bp, Clostridium botulinum
atgaatgaagatttgaattttataaacagtttccctaagtctgtacctggtcaagagcaatcaaagcaacccggtatagaagctattatgaatcctaaacccatttttgacaatcctaactacaaagcttccgcaaagcttatggatagagttgccttaattaccggtggtgatagtggcattggtagagctgtagctgtaacctttgctaaagaaggtgcagacatttctattgtatactttgatgaacacgaagatgcaaaggaaactcaggctataatagaaggtttaggtagaaagtgtttattaattcctggagatattacagatgataacttttgcaataatgccataaatcaaactataaatacttttaataaactagatattttagtaaacaatgcagctgttcaatacgttcaaaatagcatagaggatataacaaaggaacaattagaaaaaacttttaaaactaatatattcagtatgttctatttagtaaaggctgctttaccctatttaaacagaggtgcttccattataaatacagcatctataacagcctataaaggtcaaaagctgttaattgattattcttctagtaagggtgctattgtaagctttactcgctctttggcattatctttatggagtaaaggtataagagttaatgccgtagcccctggacctatttggactcctcttataccttcttcctttgatactaatcatgtagaaacatttggttctaccacaactatgggcagaccaggtcagccagtagaattagctccagcctatgtatacttagcctctaatgaatgtgcctcctttgtatctggtgaagtaatacatataaatggaggagaaattataaacggg

SEQ ID NO: 16424 - DNA, 957 bp, Clostridium botulinum
atggagaacgaaaacttaatagaggttagaaatttaaaaaaatattttaaagttggaaaggatgccattttgaaagcagtagatggagtaagttttgatataagaaaaggggaaactttaggacttgttggagaatcaggctgtggtaaaactacttgtggaagaactatattaggtttatatgaagctacagagggagaagttagatttgaaggtataaatatccacgactttaataaaaaagaaaaaagagagtttactaaagaagcacaaataattttccaagatccttatgcttctttaaatccaaggatgacagttgcggatataataggagagggtatagatattcatgagatttatacaggaggagaaaggcttaataaaatatatgaattgttaagtttagttggattaaataaagaacatgcctctagatttccacatgaattttcaggtggacaaaggcagcgaattggaatagcaagagctttagctatagagcccaagtttatagtatgtgatgagcctatatcagctttagacgtatctatacaagcgcaagttgtaaacttgcttatagaccttcaaaataaattggggcttacttatttgtttatagctcatgatctttctatggtaaggcacatatctgatagagtaggggtgatgtatctgggaaatgtggtggagttatctaatagcaaagaattatatgaaaagccgcttcacccatatactaaggctttattatctgcaatacctgttccagatcctaagttaggcagagatagagaaagaattatgcttcatggagaagtcccaagtcctataaaccctaaaccgggatgtaaatttgcagcaagatgtaaatatgcaaaggaaatttgcaaaaaagaaaaaccaaaacttaaagaaatagaaaagaatcattttgtagattgtcatttatttgat

SEQ ID NO: 16425 - DNA, 1113 bp, Clostridium botulinum
atggctttttatttattttcatataacaaaaagcctatatattttttacccaatcagttatataatattattaactataataaattatatgattatttaatattcatttgggaggtatatgttatgaattacaatgtagcagtagtaggggctactggaatggtaggaagaaaatttatagagattttagaaagcaggaattttcctatagaaaacatttatttttttgcttctaaaagatctgcaggtaaaaccttaaaatttaaaacttctgaaatattggtagaagaattaaaagaagacaatataaaaaataaaaaaatagattttgcattattttctgctggtggagatataagtaaagactttgcacctgtttttgttaaatatggtgctacagtaattgataatagcagtgcttggagaatggatcctgaagttcctttagttgttcctgaagtaaatgctgaagatataaaatggaataaaggtataattgctaatccaaattgttcaactatacaagctttagtggctttaaagcctcttcatgataaatataagatcaaaagaattgtatattcaacttatcaagctgtatctggtgctggattaagtggttttaatgatcttaaaaatggctatacaggagaatcaccaaagaaattctcttacgctattgcaggaaacatattaccacatatagatgtattcttagaaaatggatatacaaaagaagaaatgaaaatgattgatgaaactaaaaaaatgcttcatgatgatactctaaagataacagcaactaccgccagagtacctgtattccatggacatagtgaaagtataaatgtagagcttgaaaaaccttttgaattagaagatatatttgaaatttataaaaatgctgaaggtatagtgcttaaggatgatgtagctaatttagtttatcctatgcctattgatgtagctggtcatgatgaagtgtatgtaggaagaataagaagagattttagtctagataacggcttaaatttatgggtagtagcagataatattagaaaaggtgctgcacttaacgcaattcaaatagctgagcatataataaaaagtaaa

SEQ ID NO: 16426 - DNA, 885 bp, Clostridium botulinum
atggagaatatggttaaaagtatgacgggttttggtagaggttttttagaacaggataaaaaaagttttactgtagaaatgaaaagtgtaaaccatagatactgtgatataaacataagaatgcctaaagcatttatggctttagaagaaaaaatgagggctacaatacaagaaaaagtacatagaggtaaaattgatatttatatcacagtaaatacatatgataaagatgatgtagaacttatatacaatgaaaccttatcagacaattattatgaatgcttaaaaaagataagtggaagatatgatgttaaaaacgacatatcagtatctttaataggaagatttccagaagtaataactgtaaaacaaaaagaagaggatttagaggaagtttggaaaagtttaaatactccgctgaaagaagcggtggatgctttggtatccatgagagagagggagggtagtaaattatataaagacataaatataaaatgtgatgaaataaaaaaaatggttgatagaatagaggaaaaggcgccaaaagtagtgaatgaatataataaaaaaattcatgaaagagtaagtgagcttttatctcaatcagaaatcgatgaaagtagaatagctatggaagtagcattgtttgttgataagtcttctgtagatgaagaaatagttagattgaacagtcatataaatcaagtatcagaaacccttaatttaaaagaacctgtaggaagaaaattagattttatagttcaagagatgaatagagaagcaaatactatagcttctaaatctacagaccttgaaatagttaatttagtattaaatataaaaaattatatagaaaaaattagagagcaaattcaaaatatagaa

SEQ ID NO: 16427 - DNA, 540 bp, Clostridium botulinum
atgtcaagagtaggaaaacttccagtagctatccctaatggagtaactgttacagtaacaccagataacgttgttactgtaaaaggaccaaagggagagttagtaaaagctatgagtaacaaaataaacatagctgtagaagataattcagtagttgtaactagagataatgatcataaagatgtaagagctcttcatggcttaacaagagctttagtaaacaacatggtaacaggagttaatgaaggatacgttaaaacattagaattaataggtgttggttacagagcacaattacaaggaaagaaattagtacttagccttggattctcacatccagttgaaatggaagcagtttcaggtgtagaatttgaagttgaaggtggaactaaggtaaaagttaaaggtatagataaagaattagtgggtgctgtagcagcagacataagaaaatggagaaaacctgaaccttacaaaggaaaaggaattaaatacgaaaatgaagttataagacgtaaggaaggtaagactggtaagaaa
